United States Patent Application Publication US 2005/0228172 A9 - sequence listing, part 156

SEQ ID NO: 708140 - DNA, 1975 bp, Homo sapiens
gcacttcatattgtgctaggtttaaattttattttaaaattttccttggaaagatacctatgtatttgattacagaataattttcagaacagattgttgtcagaaaaacgtattttagtttcatatgaaaaagaaaaagatacaggaatgcttgatttattttatgcttcgtttgtgtgaatagtgtaattgtgttgtcagtagtgctaatatgatcttaggttacattggtagaagtgggatgtttagaaaaagtccaaggtttattggttattccatacctcagatgctgaagcagcacagcacatactttataaaaacactttaaaatcacattgcccaagtgtgacttttggattctgcccatactagttatgcaaactttgataggttacttagcaaaaatccttaagacccagttttctcatttttgaagtttagatggtgtaataatactttctttagagkgatgtttaagaattaaatgagatatttattggtatgtgtattcattaatttataagtgttaacataacatgtgaaagagtctcttacttttttttaatggcctatgaaaaacctattccctgaaacagacaccttatataatcaatttattaatggaatgcattctgtacagtatcttcaatgaaacttgacttttcactgtagccatatctgtgaggttgactggttttctacattctgtgagtcctgtggcatagaattctcattaagtgctggccttaccatttaaccctcattgaaaaactcccatatctgagagttttgcattcttgctatactaccttatagctattggtctgcagttatataacctcttaataatgacattctcatcctttgaataaggattttcaatcacatgactgaaatctttcttttgaatctgtctcttgatagttgaatagcctgtgaaatgtaatgtaagttcatattttattctaaagttattattctattttcattttaaggatattctttcattttcttatttgttgtaacaaagataaatacaatataaagtaaacctatttagtatactgagaatattgttttggtcaaaaaattcaaaaataattgactatcttcatcaaatagtctatgataatctacatataaacaagattgagagccagatttatgcactgttcattcataagttttccatttaatatttcctttcttatctgcaggatttaatgcccttacagcaatatattacttgctaatcacaacatgtccagtcaaatatgaaattactttgttcatatttcttttacattaatatacttaaaattttagatgtatgctttcaggtaaaattgtaaaactttaaataaatgcttttataattctactgtgaacaggtttaataggcaataatattgcattttaatattataaaaagttgaactatttgttttaatactaatggagttcacatactaagaaatacagaagttaggaaacacaatataagatatacaaaatagaactgaaagaccataatcaaaattaaggtctgacaatgtataaaaatttaattccaaaatgattgagatttccagacttagaaacttaattactccttgcatgttttatatgagtctgaattttttatacaagcaactaagacacttgccttttgggtttcatgtgtgaactttattcctctatccattttttaccactttaaaatattttcagaattagaatatctaagtcatttaaatgtaaaacccaaaactacaaaactctagaagaaaacctaggcagtaccattcaggacataggcatgggcaaaatctttatgaggaaaatgccacatgagatctagttaaactaaagagcttctgcacagcaaaagaaactatcatcaaagtgaacaggcaatctatagaatgggagaaaatgtttgcaatctacccatcttacaaaggtctaatatcca

SEQ ID NO: 708141 - DNA, 1225 bp, Homo sapiens
tatttgtctatctagatgaatgtattaattcattgatttaataagcatttattgagcactgattatttacctgcaggagatatgtagtgaacaagagaggcatgaagcttaaaatctaggggaaaaatgcagagactacataaagagcgaatcaagtggtaggaaatgtaaggtgattagtgctaaaacatgctaagaacaaaaagttaytatgacgtcataatatcttttgatttgatggtcagggagaacaactttccaagacatgatattcagcttgagatgataaaatgaggtaggttgttcaagtgggggtggaagaaggaagaaagtgagagagagagagagagagagagtttgtgaggtgtgctggaagaggtagagagagaagagcttagatttagagggtttccacattataataaagaattagatatttattataagtgcaatgggaaaccaatggagagtttggtgcacgacagtgacataacttgatttctattttcttttactttttagacggagtctcactttgttacccaggctggagtgcagtggcatgatcttggctcactgcaacctctgtctcctgggttcaagcgattctcctccctcagcctcctgaagagttgggattacaggtgtgtgccaccatgcccggctaatttgggtatttttagtagagacagggttttgccatgttggccaagctggtcttgaactcctgacctcaagtaatccccctgcctcgacctcccaaagtgctgggattacagaagtgagctacaatgccagaccttgatttccattttataaaaagtctattctgactgttgtataaaaactgattgtagaggaacaagaaatgaaagaaagcagatacagagaaaattgtcagtgtctgggtagaagtttctggttgctagacctaggatagttctggtggagatgaaaagaagtggagtgattagaagaacatttggaagtggattgccattgctggttgacagaattgatgtgaatggtgagatcaagaatgaaattccgaatggtgctaggcttttggcttggaagttactggaagtctttaaaaaagaacagtcttattagtaagaaaacaaagcttgttccatttgaaatgccattagacatccaggtaaactattggataaataccctaaggggagtagtcattaccgtagatataaatgttgaggcttaa

SEQ ID NO: 708142 - DNA, 1225 bp, Homo sapiens
tatttgtctatctagatgaatgtattaattcattgatttaataagcatttattgagcactgattatttacctgcaggagatatgtagtgaacaagagaggcatgaagcttaaaatctaggggaaaaatgcagagactacataaagagcgaatcaagtggtaggaaatgtaaggtgattagtgctaaaacatgctaagaacaaaaagttactatgacgtcataatatcttttgatttgatggtcagggagaacaactttccaagacatgatattcagcttgagatgataaaatgaggtaggttgttcaagtgggggtggaagaaggaagaaagtgagagagagagagagagagagagtttgtgaggtgtgctggaagaggtagagagagaagagcttagatttagagggtttccacattataataaagaattagatatttattataagtgcaatgggaaaccaatggagagtttggtgcacgacagtgacataacttgattwctattttcttttactttttagacggagtctcactttgttacccaggctggagtgcagtggcatgatcttggctcactgcaacctctgtctcctgggttcaagcgattctcctccctcagcctcctgaagagttgggattacaggtgtgtgccaccatgcccggctaatttgggtatttttagtagagacagggttttgccatgttggccaagctggtcttgaactcctgacctcaagtaatccccctgcctcgacctcccaaagtgctgggattacagaagtgagctacaatgccagaccttgatttccattttataaaaagtctattctgactgttgtataaaaactgattgtagaggaacaagaaatgaaagaaagcagatacagagaaaattgtcagtgtctgggtagaagtttctggttgctagacctaggatagttctggtggagatgaaaagaagtggagtgattagaagaacatttggaagtggattgccattgctggttgacagaattgatgtgaatggtgagatcaagaatgaaattccgaatggtgctaggcttttggcttggaagttactggaagtctttaaaaaagaacagtcttattagtaagaaaacaaagcttgttccatttgaaatgccattagacatccaggtaaactattggataaataccctaaggggagtagtcattaccgtagatataaatgttgaggcttaa

SEQ ID NO: 708143 - DNA, 2186 bp, Homo sapiens
tggatgtggttaagtgttatgtatccaagaggcatctgctgrtaaaaaaaaatagcagccaaatagaaacaaatattagatgaggaagctcaatagtttagcctatttaatatgtgtttttgcccattttttttgcattcctggattagtcattctgctcaacaggcctcggggactgggatcttgaaaaataagttgcaataatgaaaaaagatggggactattaaaagtatggagcacttttatgatgcagaatttcttggtattgagtttgcactccagaaagctacaaatactaaaaattcattcactaccagacacatggagatgtcttgggtattgtctcttgcatacataacagctctgcggtctcccaagagaccatcaaggtgacattgaccttggtgcatccaaagtcttatctgagaaaataaattctgcaagttactctgagataaaatatttttggagtcaaataagtttatctatatatcatataccactattaaagactcaaacatgatatatataacatgttatgggatctaagaagatataaattaaataatcctgtttaacctttgtttctcacagtaggacttctcttctttgaaacatttaatatcctgtgggtttactttgggaaataggacttatgtgaatttactttctggtcttttgtcaatatttataaagtacagtctataagccaaactacttttttatgatgaggggactgagctaacaatatgacatagttattcaatgaaaaatctggaattcatactctggatatttggtgccaaagtccagacttttgatgattacatatccaaggtctaattttcaacattaaattttaagaaacttaattctgttcatagtcatgggatgcttcatctttaggcttagaggaacatgagacaaaatccacagattaatgtttcaaaccagaatgagtactttataatttacaataagaaattgccaccatacagagtagaacactcaaagagcatcatttacattctttctataggtagagacatatgggaagccagaacacatttaaaatgttgcaggatgagaatgaaatcacaacaattgatcactgtttctcatactgtgcttcagggacttgcacttgtggggaaataatgtgccttggaattccttcatcattgacagagtgtcaagttttcccataaaattatcatcagtagcagggagattgcaccacaatgaaaaactaagaatatgtgcctattcactttcccttctaaaagccaatgaaaatatataacaattaatttattcaatgaataaatccataagtatggagaagctatatagaatgtcattagaaaaccaaaaccattatgaaatttccaaaatataaaaagcaaacataaatggataaatgaaaagtaaaacaataggaaaacaaaatacaaaacatgatctgaatacttctgaggtagtgatatttcctgttggagaaaccatcctgttggtcaggatgatttcactggtgagctgtatctcgtgcacctagagtaactaaactctagtaactccctcttttcccttacttgatcaagcagtggtttgtgtgtcccttggtcacaagatgaagcaggaaaccagatcagggtccacagaacagaattgtaaaatcaagacaaggagttattgatttccaagaaagacaaagttgcctctacccataaaacaatttaagtcacatcccaaatttaccacagccctgctctttctttttcagtaaacatcaggggcaagcagtaatcatcaaagcagggaaggggtcaaggtaaaactttccctttgccttctgaaagtttgctgaaaatcaattgacaaagagcagattaaaaggagaaaaggggccaggtgtggtggctgacaactataaccccagtgctttgggaagccaaggcaagagagggtcatgtgagccaagaaattcaagaacagcctgggtaacatagagagaccctcatctttacaaacaacagaaaaaactagcccagtgtggtggctcaggtctgtagtcccagtgactctggaggctgaggtgggaagatggcttgagaccaggagattgaggctgcagcgaggcatgattgtgtcgctgcactccagcctgggtgacagagcaagatccc

SEQ ID NO: 708144 - DNA, 2186 bp, Homo sapiens
tggatgtggttaagtgttatgtatccaagaggcatctgctggtaaaaaaaaatagyagccaaatagaaacaaatattagatgaggaagctcaatagtttagcctatttaatatgtgtttttgcccattttttttgcattcctggattagtcattctgctcaacaggcctcggggactgggatcttgaaaaataagttgcaataatgaaaaaagatggggactattaaaagtatggagcacttttatgatgcagaatttcttggtattgagtttgcactccagaaagctacaaatactaaaaattcattcactaccagacacatggagatgtcttgggtattgtctcttgcatacataacagctctgcggtctcccaagagaccatcaaggtgacattgaccttggtgcatccaaagtcttatctgagaaaataaattctgcaagttactctgagataaaatatttttggagtcaaataagtttatctatatatcatataccactattaaagactcaaacatgatatatataacatgttatgggatctaagaagatataaattaaataatcctgtttaacctttgtttctcacagtaggacttctcttctttgaaacatttaatatcctgtgggtttactttgggaaataggacttatgtgaatttactttctggtcttttgtcaatatttataaagtacagtctataagccaaactacttttttatgatgaggggactgagctaacaatatgacatagttattcaatgaaaaatctggaattcatactctggatatttggtgccaaagtccagacttttgatgattacatatccaaggtctaattttcaacattaaattttaagaaacttaattctgttcatagtcatgggatgcttcatctttaggcttagaggaacatgagacaaaatccacagattaatgtttcaaaccagaatgagtactttataatttacaataagaaattgccaccatacagagtagaacactcaaagagcatcatttacattctttctataggtagagacatatgggaagccagaacacatttaaaatgttgcaggatgagaatgaaatcacaacaattgatcactgtttctcatactgtgcttcagggacttgcacttgtggggaaataatgtgccttggaattccttcatcattgacagagtgtcaagttttcccataaaattatcatcagtagcagggagattgcaccacaatgaaaaactaagaatatgtgcctattcactttcccttctaaaagccaatgaaaatatataacaattaatttattcaatgaataaatccataagtatggagaagctatatagaatgtcattagaaaaccaaaaccattatgaaatttccaaaatataaaaagcaaacataaatggataaatgaaaagtaaaacaataggaaaacaaaatacaaaacatgatctgaatacttctgaggtagtgatatttcctgttggagaaaccatcctgttggtcaggatgatttcactggtgagctgtatctcgtgcacctagagtaactaaactctagtaactccctcttttcccttacttgatcaagcagtggtttgtgtgtcccttggtcacaagatgaagcaggaaaccagatcagggtccacagaacagaattgtaaaatcaagacaaggagttattgatttccaagaaagacaaagttgcctctacccataaaacaatttaagtcacatcccaaatttaccacagccctgctctttctttttcagtaaacatcaggggcaagcagtaatcatcaaagcagggaaggggtcaaggtaaaactttccctttgccttctgaaagtttgctgaaaatcaattgacaaagagcagattaaaaggagaaaaggggccaggtgtggtggctgacaactataaccccagtgctttgggaagccaaggcaagagagggtcatgtgagccaagaaattcaagaacagcctgggtaacatagagagaccctcatctttacaaacaacagaaaaaactagcccagtgtggtggctcaggtctgtagtcccagtgactctggaggctgaggtgggaagatggcttgagaccaggagattgaggctgcagcgaggcatgattgtgtcgctgcactccagcctgggtgacagagcaagatccc

SEQ ID NO: 708145 - DNA, 2186 bp, Homo sapiens
tggatgtggttaagtgttatgtatccaagaggcatctgctggtaaaaaaaaatagcagccaaatagaaacaaatattagatgaggaagctcaatagtttagcctatttaatatgtgttwttgcccattttttttgcattcctggattagtcattctgctcaacaggcctcggggactgggatcttgaaaaataagttgcaataatgaaaaaagatggggactattaaaagtatggagcacttttatgatgcagaatttcttggtattgagtttgcactccagaaagctacaaatactaaaaattcattcactaccagacacatggagatgtcttgggtattgtctcttgcatacataacagctctgcggtctcccaagagaccatcaaggtgacattgaccttggtgcatccaaagtcttatctgagaaaataaattctgcaagttactctgagataaaatatttttggagtcaaataagtttatctatatatcatataccactattaaagactcaaacatgatatatataacatgttatgggatctaagaagatataaattaaataatcctgtttaacctttgtttctcacagtaggacttctcttctttgaaacatttaatatcctgtgggtttactttgggaaataggacttatgtgaatttactttctggtcttttgtcaatatttataaagtacagtctataagccaaactacttttttatgatgaggggactgagctaacaatatgacatagttattcaatgaaaaatctggaattcatactctggatatttggtgccaaagtccagacttttgatgattacatatccaaggtctaattttcaacattaaattttaagaaacttaattctgttcatagtcatgggatgcttcatctttaggcttagaggaacatgagacaaaatccacagattaatgtttcaaaccagaatgagtactttataatttacaataagaaattgccaccatacagagtagaacactcaaagagcatcatttacattctttctataggtagagacatatgggaagccagaacacatttaaaatgttgcaggatgagaatgaaatcacaacaattgatcactgtttctcatactgtgcttcagggacttgcacttgtggggaaataatgtgccttggaattccttcatcattgacagagtgtcaagttttcccataaaattatcatcagtagcagggagattgcaccacaatgaaaaactaagaatatgtgcctattcactttcccttctaaaagccaatgaaaatatataacaattaatttattcaatgaataaatccataagtatggagaagctatatagaatgtcattagaaaaccaaaaccattatgaaatttccaaaatataaaaagcaaacataaatggataaatgaaaagtaaaacaataggaaaacaaaatacaaaacatgatctgaatacttctgaggtagtgatatttcctgttggagaaaccatcctgttggtcaggatgatttcactggtgagctgtatctcgtgcacctagagtaactaaactctagtaactccctcttttcccttacttgatcaagcagtggtttgtgtgtcccttggtcacaagatgaagcaggaaaccagatcagggtccacagaacagaattgtaaaatcaagacaaggagttattgatttccaagaaagacaaagttgcctctacccataaaacaatttaagtcacatcccaaatttaccacagccctgctctttctttttcagtaaacatcaggggcaagcagtaatcatcaaagcagggaaggggtcaaggtaaaactttccctttgccttctgaaagtttgctgaaaatcaattgacaaagagcagattaaaaggagaaaaggggccaggtgtggtggctgacaactataaccccagtgctttgggaagccaaggcaagagagggtcatgtgagccaagaaattcaagaacagcctgggtaacatagagagaccctcatctttacaaacaacagaaaaaactagcccagtgtggtggctcaggtctgtagtcccagtgactctggaggctgaggtgggaagatggcttgagaccaggagattgaggctgcagcgaggcatgattgtgtcgctgcactccagcctgggtgacagagcaagatccc

SEQ ID NO: 708146 - DNA, 2186 bp, Homo sapiens
tggatgtggttaagtgttatgtatccaagaggcatctgctggtaaaaaaaaatagcagccaaatagaaacaaatattagatgaggaagctcaatagtttagcctatttaatatgtgtttttrcccattttttttgcattcctggattagtcattctgctcaacaggcctcggggactgggatcttgaaaaataagttgcaataatgaaaaaagatggggactattaaaagtatggagcacttttatgatgcagaatttcttggtattgagtttgcactccagaaagctacaaatactaaaaattcattcactaccagacacatggagatgtcttgggtattgtctcttgcatacataacagctctgcggtctcccaagagaccatcaaggtgacattgaccttggtgcatccaaagtcttatctgagaaaataaattctgcaagttactctgagataaaatatttttggagtcaaataagtttatctatatatcatataccactattaaagactcaaacatgatatatataacatgttatgggatctaagaagatataaattaaataatcctgtttaacctttgtttctcacagtaggacttctcttctttgaaacatttaatatcctgtgggtttactttgggaaataggacttatgtgaatttactttctggtcttttgtcaatatttataaagtacagtctataagccaaactacttttttatgatgaggggactgagctaacaatatgacatagttattcaatgaaaaatctggaattcatactctggatatttggtgccaaagtccagacttttgatgattacatatccaaggtctaattttcaacattaaattttaagaaacttaattctgttcatagtcatgggatgcttcatctttaggcttagaggaacatgagacaaaatccacagattaatgtttcaaaccagaatgagtactttataatttacaataagaaattgccaccatacagagtagaacactcaaagagcatcatttacattctttctataggtagagacatatgggaagccagaacacatttaaaatgttgcaggatgagaatgaaatcacaacaattgatcactgtttctcatactgtgcttcagggacttgcacttgtggggaaataatgtgccttggaattccttcatcattgacagagtgtcaagttttcccataaaattatcatcagtagcagggagattgcaccacaatgaaaaactaagaatatgtgcctattcactttcccttctaaaagccaatgaaaatatataacaattaatttattcaatgaataaatccataagtatggagaagctatatagaatgtcattagaaaaccaaaaccattatgaaatttccaaaatataaaaagcaaacataaatggataaatgaaaagtaaaacaataggaaaacaaaatacaaaacatgatctgaatacttctgaggtagtgatatttcctgttggagaaaccatcctgttggtcaggatgatttcactggtgagctgtatctcgtgcacctagagtaactaaactctagtaactccctcttttcccttacttgatcaagcagtggtttgtgtgtcccttggtcacaagatgaagcaggaaaccagatcagggtccacagaacagaattgtaaaatcaagacaaggagttattgatttccaagaaagacaaagttgcctctacccataaaacaatttaagtcacatcccaaatttaccacagccctgctctttctttttcagtaaacatcaggggcaagcagtaatcatcaaagcagggaaggggtcaaggtaaaactttccctttgccttctgaaagtttgctgaaaatcaattgacaaagagcagattaaaaggagaaaaggggccaggtgtggtggctgacaactataaccccagtgctttgggaagccaaggcaagagagggtcatgtgagccaagaaattcaagaacagcctgggtaacatagagagaccctcatctttacaaacaacagaaaaaactagcccagtgtggtggctcaggtctgtagtcccagtgactctggaggctgaggtgggaagatggcttgagaccaggagattgaggctgcagcgaggcatgattgtgtcgctgcactccagcctgggtgacagagcaagatccc

SEQ ID NO: 708147 - DNA, 2186 bp, Homo sapiens
tggatgtggttaagtgttatgtatccaagaggcatctgctggtaaaaaaaaatagcagccaaatagaaacaaatattagatgaggaagctcaatagtttagcctatttaatatgtgtttttgcccattttttttgcattcctggattagtcattctgctcaacaggcctcggggactgggatcttgaaaaataagttgcaataatgaaaaaagatggggactattaaaagtatggagcacttttatgatgcagaatttcttggtattgagtttgcactccagaaagctacaaatactaaaaattcattcactaccagacacatggagatgtcttgggtattgtctcttgcatacataacagctctgcggtctcccaagagaccatcaaggtgacattgaccttggtgcatccaaagtcttatctgagaaaataaattctgcaagttactctgagataaaatatttttggagtcaaataagtttatctatatatcatataccactattaaagactcaaacatgatatatataacatgttatgggatctaagaagatataaattaaataatcctgtttaacctttgtttctcacagtaggacttctcttctttgaaacatttaatatcctgtgggtttactttgggaaataggacttatgtgaatttactttctggtcttttgtcaatatttataaagtacagtctataagccaaactacttttttatgatgaggggactgagctaacaatatgacatagttattcaatgaaaaatctggaattcatactctggatatttggtgccaaagtccagacttttgatgattacatatccaaggtctaattttcaacattaaattttaagaaacttaattctgttcatagtcatgggatgcttcatctttaggcttagaggaacatgagacaaaatccacagattaatgtttcaaaccagaatgagtactttataatttacaataagaaattgccaccatacagagtagaacactcaaagagcatcatttacattctttctataggtagagacatatgggaagccagaacacatttaaaatgttgcaggatgagaatgaaatcacaacaattgatcactgtttctcatactgtgcttcagggacttgcacttgtggggaaataatgtgccttggaattccttcatcattgacagagtgtcaagttttcccataaaattatcatcagtagcagggagattgcaccacaatgaaaaactaagaatatgtgcctattcactttcccttctaaaagccaatgaaaatatataacaattaatttattcaatgaataaatccataagtatggagaagctatatagaatgtcrttagaaaaccaaaaccattatgaaatttccaaaatataaaaagcaaacataaatggataaatgaaaagtaaaacaataggaaaacaaaatacaaaacatgatctgaatacttctgaggtagtgatatttcctgttggagaaaccatcctgttggtcaggatgatttcactggtgagctgtatctcgtgcacctagagtaactaaactctagtaactccctcttttcccttacttgatcaagcagtggtttgtgtgtcccttggtcacaagatgaagcaggaaaccagatcagggtccacagaacagaattgtaaaatcaagacaaggagttattgatttccaagaaagacaaagttgcctctacccataaaacaatttaagtcacatcccaaatttaccacagccctgctctttctttttcagtaaacatcaggggcaagcagtaatcatcaaagcagggaaggggtcaaggtaaaactttccctttgccttctgaaagtttgctgaaaatcaattgacaaagagcagattaaaaggagaaaaggggccaggtgtggtggctgacaactataaccccagtgctttgggaagccaaggcaagagagggtcatgtgagccaagaaattcaagaacagcctgggtaacatagagagaccctcatctttacaaacaacagaaaaaactagcccagtgtggtggctcaggtctgtagtcccagtgactctggaggctgaggtgggaagatggcttgagaccaggagattgaggctgcagcgaggcatgattgtgtcgctgcactccagcctgggtgacagagcaagatccc

SEQ ID NO: 708148 - DNA, 2186 bp, Homo sapiens
tggatgtggttaagtgttatgtatccaagaggcatctgctggtaaaaaaaaatagcagccaaatagaaacaaatattagatgaggaagctcaatagtttagcctatttaatatgtgtttttgcccattttttttgcattcctggattagtcattctgctcaacaggcctcggggactgggatcttgaaaaataagttgcaataatgaaaaaagatggggactattaaaagtatggagcacttttatgatgcagaatttcttggtattgagtttgcactccagaaagctacaaatactaaaaattcattcactaccagacacatggagatgtcttgggtattgtctcttgcatacataacagctctgcggtctcccaagagaccatcaaggtgacattgaccttggtgcatccaaagtcttatctgagaaaataaattctgcaagttactctgagataaaatatttttggagtcaaataagtttatctatatatcatataccactattaaagactcaaacatgatatatataacatgttatgggatctaagaagatataaattaaataatcctgtttaacctttgtttctcacagtaggacttctcttctttgaaacatttaatatcctgtgggtttactttgggaaataggacttatgtgaatttactttctggtcttttgtcaatatttataaagtacagtctataagccaaactacttttttatgatgaggggactgagctaacaatatgacatagttattcaatgaaaaatctggaattcatactctggatatttggtgccaaagtccagacttttgatgattacatatccaaggtctaattttcaacattaaattttaagaaacttaattctgttcatagtcatgggatgcttcatctttaggcttagaggaacatgagacaaaatccacagattaatgtttcaaaccagaatgagtactttataatttacaataagaaattgccaccatacagagtagaacactcaaagagcatcatttacattctttctataggtagagacatatgggaagccagaacacatttaaaatgttgcaggatgagaatgaaatcacaacaattgatcactgtttctcatactgtgcttcagggacttgcacttgtggggaaataatgtgccttggaattccttcatcattgacagagtgtcaagttttcccataaaattatcatcagtagcagggagattgcaccacaatgaaaaactaagaatatgtgcctattcactttcccttctaaaagccaatgaaaatatataacaattaatttattcaatgaataaatccataagtatggagaagctatatagaatgtcattagaaaaycaaaaccattatgaaatttccaaaatataaaaagcaaacataaatggataaatgaaaagtaaaacaataggaaaacaaaatacaaaacatgatctgaatacttctgaggtagtgatatttcctgttggagaaaccatcctgttggtcaggatgatttcactggtgagctgtatctcgtgcacctagagtaactaaactctagtaactccctcttttcccttacttgatcaagcagtggtttgtgtgtcccttggtcacaagatgaagcaggaaaccagatcagggtccacagaacagaattgtaaaatcaagacaaggagttattgatttccaagaaagacaaagttgcctctacccataaaacaatttaagtcacatcccaaatttaccacagccctgctctttctttttcagtaaacatcaggggcaagcagtaatcatcaaagcagggaaggggtcaaggtaaaactttccctttgccttctgaaagtttgctgaaaatcaattgacaaagagcagattaaaaggagaaaaggggccaggtgtggtggctgacaactataaccccagtgctttgggaagccaaggcaagagagggtcatgtgagccaagaaattcaagaacagcctgggtaacatagagagaccctcatctttacaaacaacagaaaaaactagcccagtgtggtggctcaggtctgtagtcccagtgactctggaggctgaggtgggaagatggcttgagaccaggagattgaggctgcagcgaggcatgattgtgtcgctgcactccagcctgggtgacagagcaagatccc

SEQ ID NO: 708149 - DNA, 1511 bp, Homo sapiens
gtattataagatatgtaaagcaaagctttgtccagagggtgcatgcagtacactttatgaaatcaaaatggattgaatggaggaagcaggtatgcatatcactttcaataaatataacatctggcagttctaagaacacctttagatatagtattgctgtgtttatgtaaagattcatgtaagcagatactaatatgtgcataaacctaatgtaaaatgatttcactaatctttcattttaaaaatatgatgaaaataaaaattattttatagaaataatttattgttaatggtgcaatttaaaaaacaggagcacacaagtgtattataaaattcatacacttaatgtttaatttaatgaatcttcaattcactaaggccatttttcaatgatattcaaaacatgttttattaaaggcacattataaatcaatgagtaactaaaataacctgatattccagaagtccttgatataattctcctattgtcctaagatgaatgcagacagagattgattctcataagattctaaattgtatacattcttctatctttctcaaagcaataaaaattccagggaggccaaaaactactccttggtttggggctttccaaaataattctaatgataccatagtacactaacttttgggatatcatggatatatactgagactgtggtaataccaatattgcaagttattaatgtctttaaagttccctagtagatgaattcaaacatttctgaatttatagaaattgttaagaaaattcctacatattggttcaataaataaatgatcctaattgtttttttttgtttgttttttttttttttttttttttttttttgagacggagtctcgctctgtcgcccaggccggactgcggtctgcagtggcgcaatctcggctcactgcaagctccgcttcccgggttcatgccattctcctgcctcagcctccccagtagctgggactacaggcgcccgccaccgcgcccggctaatttttgtatttttagtagagacggggtttctacttgttagccaggatggtctcgatctcctgacctcatgatccacccgcctcggcctcccaaagtgctgggattacaggcgtgagccaccgcgcccggcctcctaattgtttttaagcacaaacctccatgctccctttaagcactgccatttctctagctgtttcattgtgaagatgcaacaatgagtttttctctgagctgttatcatggaggctcaattggtattgctcaatatcccaaacaaagcataaacaaatctaaacactaaaattttactcttctgtcaagctcagaagacaataataagtgcagaatgtttttgttaaaatatktttaccccagctaattttgttttgaataatttaaatggaaatcacgattctcttctcatatagcttgtttaaattacctaattgacaacctcccttctgattataaatcagaaaaacaatcagccggtctccttacc

SEQ ID NO: 708150 - DNA, 1144 bp, Homo sapiens
ccctgtttaactacactctaacttctggcctcctccatattatggcctctcacccacccttcctgtctcatcttctatttttcactaacatcatccaaactcttctacatccaggtctctgtgctgttctctctttctgaactactctacctccatctgttcacctgaaaaccccacctcttccaaagcctccaagaaaaccatttggtaaccaatctgcttggatatggcatacttccctttcaacttcatgctgatttacctgttctttcctaatggaatttagcatatatgtcctttgctcctactgctgcttgagtctaataaagaatttgaagcagtagttttgtgtttatgtaattatgtatttgtcttcttctcccaaccagagtagaaacttcttcactagggcaactttatctctgcatcttcacagggatttgcacacagatgcttcataaatgacttttgaattaaactgagttaggttgaaatgataggaagtagaagggaacacactaactattgagctctttaagaaggcaaacagagtgggcagccattaagtatccccagtgttcgagagtattggtcctgcttgagtgaatgaccagctgaatttcttcattcagaggcttcacccagatcatgttctttacccctgaatagttttcctagtcattcagyacaatccttaagacttgatcaactatcagatgacacattcttaaagcatcttctcataaataaataactacaactgtcaatgatgatgcaatggtggttgtgtgatagtacttgaatcaggagtcaggctatctcagttgtagcctttgaaatatcatttaattgccgtagaactggggaactgagcctgagttattttatttgtgtgcctctgtacacaacaatagttagataactggagtgctagcagcatgtcgctttatgatctcacacatgctctggatcagtggtctgccattctgaatgcccattaaaatcacctggggagctttaaaaataccaatgtctgccccaacccaaccaaatgttatagtctctgaggtctaccaagcatcagaatgtctttaaagctccacaagtcattcccaagagtagccagagttgaaaacttctacta

SEQ ID NO: 708151 - DNA, 740 bp, Homo sapiens
ctagtagctaatatgcactcaataagtgatgaatgaatgtatacatatgaaaagcccacattcaattttctaacaaacaagatttttaaaatgcattcattttgggaaatagcaggaaagccacccagacttttcataaggaatcaaaaaacccaacatagtggcccaactaaaaactgaataagcaccaggaagcttgactacagagtacttaagccttgagaatattctcaaaagagttttactcaatgaatgatttgaattgggaattctcaaagtttgagatgctttcagttatatcaattaaagtcttgaactctttttaaggttctcaaaataaaatcaactgcacattcttaaatagtgaaagcaaatctatacagtatatttatagagagaagagcatagtactaagcaggcaaatcacagcctaaagtaaaaattccaaaaagatttggaataacaatattstttaggatttgacacaagatttgtttatctctagagagaagttccaaagccccagtgagttctgttttcagggaatatctgagctggggtatggtttctcagcacataataacccgtagaaactgaatccttaatttatagaggaggaaacaaagactcagaaacacaaagggaccagcctgagaccaccctgctggttagggccagagctgagcctagaacccacacttcttgatttccagtgttgtgttttcccactgcctctttca

SEQ ID NO: 708152 - DNA, 1241 bp, Homo sapiens
ttccttttgtggtttttgggtaagggttagacgtgttaactttgcccaaaacaaattttgtatttttctgggtttggggatgcaggggtgcccaacagtaggaaagaggaaagggtgtaagtgtatggatccaaaagtcagagcagtcttttatgatattggaaaagggttgacagtgtaaccaaatctatgcctggtcactatccgtgagcaacggcgcacggactaagtgctcccaataacccttctctctgctttcaacttcaggggtgcagagggcctataatgtaaaatcatgacactgatagaaaccttaaggaggtttctctcatttctcccatttagtaagcaaactagaccttgtcatatatggcgaatccaattgtgtaagttaattttcttatctttagtcattgtaacagcaacctacactagtggtgaagctagaaatgggtctatctttcccaccgaggcccatgtgaatatggccaagtacccactttaattagggcaaccaaacattttaatttgcccagggcagtcataatttatgcctcttgttctaaagaatacatatctataaaacccccctttattctcaaaaatttcccagttaaaataataaattatatgggtcccccaacatgaacaaaatcagggaggagccctccaacacacaggccaacttttcacactgtcgctttgctcagaaaaagttccattgtctctaaaagactcttagccctggggtcatgggctgatttctttttttttttttwagctctctagcaatattgctccccaaccagggaccactgccttttagtgcattgtttttcaaactcttttcagcagcagaatctattttttcagatgaaaagttaggcagagctccaatgtttaaagcagataaagtagagcttttcctggttgaagtgggggcgggaagctcagatacccacacatttggcctctcttgttctttccttctggtgtgggtccctactgaattttatggttttgtggaacatagattaaaatttaccaccagagcataacgctaccatcaatttaatgtgttgccagtttctcgatgaaatagttttgttccttgagaaagaaaggttagcactaccccctttattttaccttgggccaagttaataatgatcaggctcttaaaaaaattaccccagtctcacccctattgtaagtagtcttcccatcgcgtaattctccca

SEQ ID NO: 708153 - DNA, 1520 bp, Homo sapiens
tgacgacatcagtgagccagggctaatgtctttgagtaagcaaaagtgattgggagattagaatataacagtgaggaaaggaggagggtggtgtaactgaatggcaggaccctaaaaaggatatgggtgtttgcagtgggcaggggaatggagaaataaggcctgaaggggcagaggtgccaaggccatctcctgactccagagtgtgagaggctgggcagctgctatttgagagggttgcaggagaagaggggtgtcttcagcatgctcagaggagaggccaaggatatgacactactttctgggtgtagagcagcagttccaagggacctagaggaaggttgtgggaggtggagagggtgatgggcttggaaggaacttggaagcaaaacagcggtactcaagtggtagaggatagatctctgcagtgggcactgcctacattttaagtgttgcctgatgaaaacaggcatgagttaggggtctagacctggtggctgtaggatggtttattttccttgactagagtgacaacaggcccagagattgtatgtcctgtgtgctgctggaggtggatgatggtagaagcagagactaggtgcacaccatatgctgagtactgttctaagtgcccaagaaacattatatcatttatttcctattacaaccatgccaggctagtactgttgatatttctgtcttacagatgaggaaactgaggttctgttaaggtaagtttagtaatttttctaaggctacgcagctagcaaatggtagaactgagactcaaaatcaagactttgtgcctgtgtacctcccatgatggtgtatatacttaacatttccttccctgtgaaattattatttttaacatatctgatagactgttgagaagttaatgtaataggaattgtctttctgaataccaaaattaaattcaattttagaccccaaatcttgtttgcagagtcctctgaaagttagactagggcccctgccttctgcagacaaccctcccagctcttcttttaccacttccatgatagacacttggacacttctaaagggctagagggtggttaagttaaactgcccacttgtgtcattttgagtaatgcagaataagttcctggtctcatttttttgtacactttttttttttttttttttgagacagagtcttcctctgtcgcccaggctggagtacagtggcatgatctcagcttattgcaacctccgtctttcaggttcaggtgattcttgtgccttarccccctcaagtagctgggacaacagccgcataccaccacgcccggctaatttttgtatttttagtagagatgggatttcaccatgttggctaggttggtcttgaactcctgacctcaagtgatccacccgccttggcctccgaaagtgctgagattacaggtgtgagctaccatgcccagccacaacacttctttaaatgttcaaggaatgctctcaagttcgttttgttttgtttttgagacagggtc

SEQ ID NO: 708154 - DNA, 1249 bp, Homo sapiens
cacttagtgcaaattttattgaaaaaaatagatgtgtcagtggactcatacagttcaaacccatgttgttcgggagtcaactgcattagagtccatcaaccatgaattccttccactctgaccccaagatctcaaaacttcttctcaggcacctttacctttcaactcagaggagagtcctcatcttctaggatttattcaataaactaccctgccttcccttgttctaccaagttccccttctataaattgattcttcttttaccaaygtgctcaattcctgctaatccaaaaacctcccctccactgcttctcttctttgccagttttttgaaaggagagtcagacatattcacagacattcttactacactcccaaacccaagacgatatgactgcaactctacaaaagaaattagtcagttacatatgtgcacatgtaccctaaaacttaaagtataatttaaaaaaaaagaaaaaaaaaaagaaattggtcacccatagcttcctcataaccatagtgttagcttctgccaatttttccatctaaccagtgcctggtctttaaaccagtttctttcaaaggaaagaacccaaatattaactcaaggtgaaataatatttacataactgtcctccttacctccctcttccatggcagaaagatcacttattttgttggaatccacctcttcttacctaattagaacattctttcattctagcaaataaagactaacagtttgtgaaggtatgtactgaatctgagaggaaagaggggaagggaggaaaacatgcatgtgggaaggaaggaaagaagaacagcaacactttcttttacccaccatttactgttattactaagacaggcataaaagacagcaaattgtatgtatttattaatacaatcctcccttcactccagagagaaaatcctaactttggtcatttagcaattattcctcctcctacccttctaaaggaacttgaaccttcccattaagtttactgggagttaattgtgtagaggtatcgtactcactaaaaattgtgtaaaaactagaaaaagtgtaaaaactaggaattatttgctctaattcacatttacatttggaaagaggatggagggctatttgcaggcacagaaaaaaaaaaagtgagaaaagaggacagggacaaataattgatccttgatggcactggtttgttgagttttagaggagttgagagtcagaagtttgagagagcc

SEQ ID NO: 708155 - DNA, 917 bp, Homo sapiens
tatacctaatgtaaatgacgagttaatgggtgcagcacaccaacatgacacatgtatacatatgtaacaaacctgcatgttgtgcacatgtaccctagaacttaaagtataataaaaaataaataaataaataaataaatgaagtatcaagaggccagggatggtgaatcatgcctgtaatcctagcactttgggaggctgaggcaggaggatcacttgagcccagcagtttgaraccagcctgggcaacataggctgaccccatctctatagaaaatttttaaaaattagccaggtaaagtggcgaatgtctcagctactcaggaggctgaggcaggcagatcgcttggccctgggaggtcaaggctgcagtgagccctgacagtgccactgcactccagcctgggcaacagaatgagactctgtctcaaaaaaaaaaaaaaaaagaaaaaattaagtatcaaggggtgctataggaccagaaataagaatacttaaagttttaaaaggaactgagtgacaactagcattccctaactacattgggaggaagaagggaaggcaaatagaggtatgaacattaaattcttgtccaccacagcaagaaaatactatctaacattattacccaacattgacaaatcaagatacggatagtgtctgaacagggccacatcaattccttccctccctgtatgtgcaaaatgttcctcgtatcaagaggtggtcttatttcctacctcttaaatctgaactgcccttagcaactcacttgataaatagaatatactggaattacctatgtagtaagtcttctgaagccaggtcctaagaagtcttgcggcttcctcctgggtctcttggaacaattactcttgaaatgttgttcagaacacaattatgaggctgtgagaagc

SEQ ID NO: 708156 - DNA, 1004 bp, Homo sapiens
tcccactaaaagattaatttcttaaacatggataatttagtccctgggtgtgaaatgtatggctttgcctgttcccagtgttttcaaaccaattcagagtagtggaagagtcattggcatccaaggaattcttaaactgaaatatgctcctttatatgagtatgacttccacttaaagaacaaagagggatgttgctgatagtatgagagagtagaaaggatgctcagctatgcagatttctgctctttttccctctagctttaaaaaattgtacaagtaataccggaatacgttctcmctggaaaagattaattgtagaagtgtcaagatgtgaaagccctacttcgttcatcacctcatggtttggacatcctttagttctttgagtacatccttaaagttctcctctccctgtatttctatatgtatgtatgccatgattgtttttaacataaattggatcttaccatatgtattatttggcaacttggttttttttagatacagcatcttgttatgttgcccaggctggactcaaactcctgggctcaagcaatcctcccacctcagcctcccaagtaggtgagactacaggtgtgcaccaccatgcccagctggttttctgaaattaatactctatcttggaactttttatgtatcactatatatatataagtccataatataggtttattttaatatatttaatcactcccattcaatggcacttaggtcatttctttatgattaataatgaagcagtgaatatccttgtacctatatatttgaacacatatatgaaaacttctataggatagatccatagaagtgaagttgcctggtcaaaggtaagggtatatgcagtttgaattttattagaaagtgataaaatgcctttcccaaatgtttttccaatttgaatttccactggcaaggcaggacagagcccacttcccagagccttcaccaatattcagtatttttctctagctttatttttaat

SEQ ID NO: 708157 - DNA, 2615 bp, Homo sapiens
tagagcctcaggtaggtctgagcatgacctccagcaaagagcttaaaaatagcaaatttcacctgttatactcatctttcaagtgtatcatcatctataattctcgcttgcttttgttcattctcttctgccttcaagttgtttggtgaatatagaagatatgaatatacatatagatacacttttccaagttttataattcttatatgcagaggattattccaatcaaaccactccaccatttccaatacactatctttttgaaatcaagaaatgaatcttactcaacttggtcttgccagggcaaaatatgggttttttgccatatagtagctgatcaataagtgcttgctggattgaatacttcattttgacatcaaggttatttacaaatcatttataaataattacgtgtgcattgttggacatgaataaaatttctaagaactgacaagagaaacagcactgtgctgaatctcagaaaagttcaagaaagtaggcagaatatgggtctcagaatatagcttagaaactattaggagccatatatttaatatggaattacagaaaatttcataaagtatgtcatcctaagcaagaaaaaaaaacttgtctactattaaagagtctattatctgtcagaggtagggctgtactaaaatcagatgaccttgaccttcaaaacagtcccctaagcctacacatttttcccataagatgacacaataggcctggggctgatgagaactttgaagataatcccagccatactctaagaatactcatcaaaagattgtccactaagaccagatctacctatgctaagaatctgtcaatgttaatccaattcggttacttggagttggagaaaacacacacacacacacacacacaaactcagcttaaatagccatttactctcagtggtgtgagggtatttgttgtctatgaataactctttggcataatacaaaagaagaatccactaatcttattaaaggtaaattatttatgagtaacttattcaacaggatacacagaagaataaaacattagatattaggacctcataggtaaggtttctatttcggatatgctattgagaaaacaatcagtttatcatcaggaaaggttttcactttatttctatggagaaaaataacctcccacctgctgctaaacatacttaattaaagagatccggattgtactgcttatacttgtggcatatcacttgaacttttcactaagtgtcattcttataacattatcacagactcctagcttattatgagaacagaggtgctaatcaagaggaattacttagtaattatatttttatttagaattttaaaaggatgcatttctatttttttggagcaccccaaccatatttctccacacacatttatctaaggaagttcaattaactatgtaggcacacctagatttgcccctcttatggcactgtttgatgagtagaaatgttttagaatacagtattcaaaactgtaatcattaaatgcattagttaggattctccaggaaaacagaggggagagagagagagagagagacagtgtgtgtgtgtgtgtgtgtgtgtgtgtgtgtgtgtgtgtataaagaaatttcttataaggaactggaattggctcaggagattgtggaagcttaaaagatctgcaatcaccaagctggagacccaggagagccaatggtgtagctagtccaagtccaaaggcttsagaaccagaagaactgatatttcagttggagtctcaaggcagaaaaaaaaaaaaaacgccctacccagttcaaggcagtcaggcaggagaaactcctttttatttgtgagaacgtcagctttttttttttttcctgaattcaggcctccgcttggatggtacccatctacctgaaggactgcaacctgctccactcagtctaccatccagatgtttatttcacccagaaacatccttccagtcacacccagagtaatgtttgaccaaatacctgggcaccccagtgaagccggcacataaaattaaccatcataccaagtgaacatgaaatagctaaattatttcagcaacttgcctccattatacattgtcctgaacagaacatgagattcagttctaactccaataaccagatagggaaataattttaataattcatggtaatatgttttgctcaagtataaaaatgaggaatcagtttgtgtctggtgcacacaatttatgcttctttgcttccaagatgacatcattctgtccctttttggcatttatcttttctacttgccagtgtgccaaaatgaaaatgattttcaaaaagctatagagaatcatactttgggaacacacaatggtattaataaacgttatcctgaaaatgctgaagtagctcctaaaaaaggtgttcccaataaaaattttatcattttaaatgttatccgcatttttttatctcaactaaaaagcaataaccatggccaaattggttagtaaaaaacaactatccataagaattcctgggttccgattccagttcaaacatttaattagctgtataagcatcagtatagcatgtaatttctctgatcctca

SEQ ID NO: 708158 - DNA, 631 bp, Homo sapiens
gcctcggcctcccaaagtgctgggattacaggcgtgagccaccacgcccggcccataaatacaattttatgactgaataaaagaaaacgataagcatatttcacattattttttttttgaaactgtctacccttggccctcttgttaacacttaaggtttcaattttgtggttaataagaacagcacaagaaacaactggtaggttcattagcacctccttttaaggaaacagcacataaaacattcattcaaacaaaaaacgactaccccgccagatgcttcctataaagagaaaccttattctgttactcagctaccaataaaatatttatgtaggttgcttagaatgcccccattgtacacaatgctaaaattcttaacaacacttgaaagaatatttgtcctatttataggtaaagaawtttttgtatatggcaaagcaaaatacgcctttagaaggtcacagcaaacaacagacagtcccaaatgaataaaatgaaatacaagcaccatcttttccaccatggccagttcagttctctgcttagtaccactttcctcacagttttctctgaataccactaccaggctggactggggatccttctttatgtttccacacactctcta

SEQ ID NO: 708159 - DNA, 753 bp, Homo sapiens
tggagaaaccctgtctctactaaaaatacaaaaaattagccaggcgtggtggtgcatgtctgtaatctcagctactcaggaggctgagggcagggaaaatcgcttgaacccaggaggtggaggttgcggtgagccaagatcacgccattgcactccagcctgggcaacaagagcgaaactccaactcaaaaagaaaagaaaaagaggtgtttttttttctttttttttctaaaagaaaaaaaattttatcttccttttgtgccatatgtatctttccattaaactttcacttatttcagaacaaaatcaccaatggtcccacctcacgtcagtccytttcctattcatagataaacatagagatgttgaaaacaagaccttattgatttggtcagttttaatgttttgcacagtctatttcagagtacagtgaacaggagctcttcgaagatggaggcatgcgcagtgagtgaggctcacccaggtgtctccgtttttatcattgtttgtggtgtgacaggtgcagtggacctaggaaataagtgaagaaatgagtacagaccaagacatcaacatgcacaaccccccattagaagaagaaacaggggaaaagactcagaggaggagcaagggatggagagagaagtgtagcaaagacaacagcttcctgaactccacgttcttctctttcctctggactcacaactggaccacataacctttccagctttccttgcagttaggtgaggcaac

SEQ ID NO: 708160 - DNA, 617 bp, Homo sapiens
aagatgtttctccctaaatcagtggtgtcagcaccacccacttgttagacatgcaaatcatcaggccttacctcagacctactgcaccaggagccctggggtgggagcccagcaagctgtgttttaataaatcccccaggtgattctgaggcatgctccagtttgagaactgctactctagagacggattttgaaagatcagctatcataggtatgcctgatgtgcctattacaggtacaaagaatacactcagaatttagtatgtgagcttaaagaattttttttttttttttttttttttttttttttttttgagrcggagtttcgctctgtcgcccaggctggagtgcagtggcgcgatctcgactcactgcaagctccgcctcccgggttcacgccattctcctgcctcagcctcccgtgtagctgggactacaggcgcgcgccaccatgcccggctaatttttgtatttttagtagagacggggtttcaccgtgttagccaggatggtctcgatctcctgacctcgtgatccgcccgtctcggcctcccaaagtgctgggattacaggcgtgagccaccacgcccggccgagcttaaagaatttttattgca

SEQ ID NO: 708161 - DNA, 636 bp, Homo sapiens
tcatagacgttgtatcacatggtcctcacaattccccatctggtaagtactgtcatgattttcatttgtacacaaggaaactgagtcagaaagaggataagtaaattgccaaaacagctaaaaaggacctgcgtgttgttctaacttttcagctttagatccaactattcacctcctgtggcccgatttttgagcactcatcctccctttggccttccagcttccatactcttgcttgcgccactttgcctgtctttcycacctttgcaattcctaccaatgtgtcaaaggcagctcagacagcacttcttatctgcagccttatctcccctcctacccttggccagaagtgaccttccaatggttcttctctacataaaccattcggaaagtaattaaacagcaaactaattctataatgtcataaagcattctttttcatggtccgatctcaaaaccaattgtttgctgttcaggtttgtgtgtagttgtgacttttctctccagggagagtgtaagtactttgcatggtttacacttttctcctgcagtgctcaattaacaggagactggtgtttttttcttctctttaagcccttgactcttcccaaccttcccatcatgatgatctttttt

SEQ ID NO: 708162 - DNA, 1113 bp, Homo sapiens
cttcctgggacaatagagtttttctgggcagaagcaagtgccaccctcttgaaggacagagagtacagtagaatggggtgagggtgtatggttgaagacagtagggtaagggaaggtgggagtgggcagacaacatctaaaacccgttcatgggttttaaagaaaatcatgaacaaactaagctgcacaatcagcatagtccctcgccccaggttatttctttatttttaacttatttattaattattctaatcttggagacaagtctgttctcccattcctgacccccaacccagtgttctttggaatatttgatttggatataactttaagattacaaattagaggggttttaaagttgtaaatacaaaagagatttaaagcggtaaagtttcatttgagaacaaaatcaaaggatggagtcttctgagattctgcttcataaaaaacaaaacaagaccctgttttccaaggaagtattcaatgtaataaaaacatcaaacgtttccatttcctttggaatttggggtatgccaactcaagctgcattgatgtttatctctatgctttttattcattttttggagaaattttgtttttagcatatgggatatgtacacacatacatctacacacacacacacatatrtatagcttatttttaagtgtgcattttttttgtttttttttattatgagggtcctgaattgcttcagatgagttaatagatgggtgggaagaaactacactttatgataaagctcctgatttacctggtcaagggaaggctgtcttaccagaagccaggtggccatgccgagcagatgcagcatgtctcaggcatcccttggccctcagagtccctagtggggacacacagtggctggtatacaaagcagagtctggtcaaatctggggcaccaggccgaagccctttcccctcaggcttccatttccatgagagaggaatttaaacccacagtctactcctggaataggaaatgttacagacatccatgcccttcctgcttattgacccaaattcagccttagcgaggtcacttgggccggaaagcgttcagcacccagatggcctggaacagtatctttgtt

SEQ ID NO: 708163 - DNA, 1040 bp, Homo sapiens
gctataaattttcctcagagcactgccttcacagcatcccataaatttttsgtatgtttgttttccttttcattcatcttgaggtttttctaatttccttgtaatttcttctttaactcattgctagtttaagagtgtgtggtttaattttcaaatacttgagaagttttcagtccccactgtttattgattcattccattgtgatcagaaaagatactttgtatgatttcagtcatttaaaatgtactgagacttgttttgtggcctaacatatgatccatcctagagaatgtcctatgagaataactgctgttttgtatattcccttagaattctgctgtgcatttaaggtatacagactgataactacataaaaggtaaatacatctatatttagcaaactaaatgtgctaacacatcatttttattgggtgcatactattccattatttgactgtatcataatatatttaaccaatatattatatggttggacatttagataccttctaaattttttcaccactaagcaggactctaatgattatggcatcaataaacacctgactgggttacttaaccataattactaagtgattactgctgcagggagagaaatgtgttagttcttccaataaaaatcttgcaaagatacataatgaaattagctgctaaaagtaaaaaaaaaaattcataagaatcttaccttgaattttcttgaaaactctggaattcatgaacttaagaaatctgtctgcataaaagcttggtctatgaacagaaacagtgtcctgaaaagacaaaaacccaggatcacagggtcacctcttaatgttcatctcaagtcagaagagagatctatgcaattggttctctgttagccaacattcttaaccaaaggtggcccagagatagaaaacaggaatgtcctgtagcccgtggggcccaggagtctggggctgagggaggagggcacagactcaatcggaacaaagattctagacactcaagaccaaactgagcagaggagagtcagcaa

SEQ ID NO: 708164 - DNA, 1040 bp, Homo sapiens
gctataaattttcctcagagcactgccttcacagcatcccataaatttttggtatgtttgttttccttttcattcatcttgaggtttttctaatttccttgtaatttcttctttaactcattgctagtttaagagtgtgtggtttaattttcaaatacttgagaagttttcagtccccactgtttattgattcattycattgtgatcagaaaagatactttgtatgatttcagtcatttaaaatgtactgagacttgttttgtggcctaacatatgatccatcctagagaatgtcctatgagaataactgctgttttgtatattcccttagaattctgctgtgcatttaaggtatacagactgataactacataaaaggtaaatacatctatatttagcaaactaaatgtgctaacacatcatttttattgggtgcatactattccattatttgactgtatcataatatatttaaccaatatattatatggttggacatttagataccttctaaattttttcaccactaagcaggactctaatgattatggcatcaataaacacctgactgggttacttaaccataattactaagtgattactgctgcagggagagaaatgtgttagttcttccaataaaaatcttgcaaagatacataatgaaattagctgctaaaagtaaaaaaaaaaattcataagaatcttaccttgaattttcttgaaaactctggaattcatgaacttaagaaatctgtctgcataaaagcttggtctatgaacagaaacagtgtcctgaaaagacaaaaacccaggatcacagggtcacctcttaatgttcatctcaagtcagaagagagatctatgcaattggttctctgttagccaacattcttaaccaaaggtggcccagagatagaaaacaggaatgtcctgtagcccgtggggcccaggagtctggggctgagggaggagggcacagactcaatcggaacaaagattctagacactcaagaccaaactgagcagaggagagtcagcaa

SEQ ID NO: 708165 - DNA, 1040 bp, Homo sapiens
gctataaattttcctcagagcactgccttcacagcatcccataaatttttggtatgtttgttttccttttcattcatcttgaggtttttctaatttccttgtaatttcttctttaactcattgctagtttaagagtgtgtggtttaattttcaaatacttgagaagttttcagtccccactgtttattgattcattccattgtgatcagaaaagatactttgtatgatttcagtcatttaaaatgtactgagacttgttttgtggcctaacatatgatccatcctagagaatgtcctatgagaataactgctgttttgtatattcccttagaattctgctgtgcatttaaggtatacagactgataactacataaaaggtaaatacatctatatttagcaaactaaatgtgctaacacatcatttttattgggtgcatactattccattatttgactgtatcataatatatttaaccaatatattatatggttggacatttagataccttctaaattttttcaccactaagcaggactctaatgattatggcatcaataaacacctgactgggttacttaaccataattactaagtgattactgctgcagggagagaaatgtgttagttcttccaataaaaatcttgcaaagatacataatgaaattagctgctaaaagtaaaaaaaaaaattcataagaatcttaccttgaattttcttgaaaactctggaattcatgaacttaagaaatctgtctgcataaaagcttggtctatgaacagaaacagtgtcctgaaaagacaaaaacccaggatcacagggtcasctcttaatgttcatctcaagtcagaagagagatctatgcaattggttctctgttagccaacattcttaaccaaaggtggcccagagatagaaaacaggaatgtcctgtagcccgtggggcccaggagtctggggctgagggaggagggcacagactcaatcggaacaaagattctagacactcaagaccaaactgagcagaggagagtcagcaa

SEQ ID NO: 708166 - DNA, 1040 bp, Homo sapiens
gctataaattttcctcagagcactgccttcacagcatcccataaatttttggtatgtttgttttccttttcattcatcttgaggtttttctaatttccttgtaatttcttctttaactcattgctagtttaagagtgtgtggtttaattttcaaatacttgagaagttttcagtccccactgtttattgattcattccattgtgatcagaaaagatactttgtatgatttcagtcatttaaaatgtactgagacttgttttgtggcctaacatatgatccatcctagagaatgtcctatgagaataactgctgttttgtatattcccttagaattctgctgtgcatttaaggtatacagactgataactacataaaaggtaaatacatctatatttagcaaactaaatgtgctaacacatcatttttattgggtgcatactattccattatttgactgtatcataatatatttaaccaatatattatatggttggacatttagataccttctaaattttttcaccactaagcaggactctaatgattatggcatcaataaacacctgactgggttacttaaccataattactaagtgattactgctgcagggagagaaatgtgttagttcttccaataaaaatcttgcaaagatacataatgaaattagctgctaaaagtaaaaaaaaaaattcataagaatcttaccttgaattttcttgaaaactctggaattcatgaacttaagaaatctgtctgcataaaagcttggtctatgaacagaaacagtgtcctgaaaagacaaaaacccaggatcacagggtcacctcttaatgttcatctcaagtcagaagagagatctatgcaattggttctctgttagccaacattcttaaccaaaggtggcccagagatagaaaacaggaatgtcctgtagcccgyggggcccaggagtctggggctgagggaggagggcacagactcaatcggaacaaagattctagacactcaagaccaaactgagcagaggagagtcagcaa

SEQ ID NO: 708167 - DNA, 1571 bp, Homo sapiens
tgagtcatttctcaaagcaaagtttttccaatgatagcctgccttgttaaacatcccaaaaagatcaactgcaaaacatttaccacccagaggaatataatctcactttattttctaacatttacttaacatcttctatatgccaggtactgcattaggtacttcacatccctcatctcatttaattttcacaatagccaaagaaatcagcattttttccattctactgatgaggaaaatgagactcagagtaacttgttaaacatcattgggggtggattaaagcatatcctctttaaaactacagacttttttggaaaactggggagggagatctatctgccatcctagcattatgatgaccatttttattatgcttcagtatgcattgcgtgttcatcactttccacatttcatattattattattattatagattcccagaagtaaagaaatatgaataattttatcaaagaccatgcttcttcatttttatcatgctgcctctctaagataacaccagatgcgaggatgaacaacttcccttccacaacagggggaaaggattcaccataaaataaaaccagtcgctgcaaaaacaagcctttgttgcctagcacaaaacataggctttggaactagacagaccagtgtgggatcccagctcagtttcttagagctgtgcttctatgagcaagcccccaaccaccctcttgcttactgtcagttccctcatctatctatctatctatctatctatctatctatctatctatctggggtgggtagagatgagtctggctatgttgttcaggctgggctcaaactcttggcctcaagggatcctcccatcacctcaagggatcctcccacctcagcctcccaaagttctgggattataggcatgagccaccatgcctggccagtcccctcatctttaaagtccccttatctttcgaaggggttaatacttactctgcaatgttaatgtgtgtattatagawaatgagtgtaaactatagtgcctggcatgtagaatgcattcgataaatatcagagaataaatggctgggctcagtggctcacgcctgtaattctgtcactttaggaggtcaaagcaggaggattgctggaggccaggagtttgaaaccagcctggtcaacatagtgagacccggtctccacaaaacatttttaaaaatttaaaaagaaaaataagtccacgttccaatgaaaacattgttaaaggtataaataataagcagggtagcattccatttagcaatagacaactatgaggaacttgagtgatttttaatcatatttatttaggggaggtatcttttaaaaagaatatacatatatgcacactttttttttttttgagacagagtctcgctctcttgttcaagcgattctcatgcctcagactcctgagtagctgggactacaggcatgtgccaccctggctggctaattttttttgtatttttagtagagacggggtttccccaagttggccagcctggtcttgaactcctgacctcaagtgatccacccgcctcggcctc

SEQ ID NO: 708168 - DNA, 636 bp, Homo sapiens
atcccagcactttgggaggccaaggcgggcggatcacctgaagttgggagttcgagaccagcccgaccaacatgaagaaacccgtctctactaaaaatatataattaaccaggcgtggtggcgggtgcctgtaatcccagttactcaggaggctgaggcggagaatcccttgacacccgggaggcggaggttgyggtgagctgagatcgtgccattgcactccagcctgggcaacaagagtgaaacttcatctcaaaaaaaaaaaaaaaagaaaagaaaaacaaaatcagtagcatactcccatccctgaaggtatgtattcaaagtgctgtgcccaccacagccattgtgtccctgcaggcagcttcctaaactggtcctaagaaggactctgaataagccggaactgtttaaaactttctccaaagatggaatgtgtgagttcaactagaggagactgagaaacactcatcttcctgaaacaagacaaaaatatgtcgccacacttctgggtcacatttcctgtctgcttggagcatccctctaggattgaaggaacaaagaggggtggtagggaaaatccattgaatctcagagatgcctgtgcttgcaaattattttcagtgtgaagattta

SEQ ID NO: 708169 - DNA, 1374 bp, Homo sapiens
aattattcctttcaaactgtcaaaacccagtaagaatttttcccaacagatggggcatttctgctgaagcttttaaaagatacaaacttgaattttatctctccagattaaaaggaaatctaaatgcaataatgtttaacttcactgatttagttctttaggaggccacaaaaaatttcatgatctattaaaaacactcaaaacctcagggagctaagacggatgttggaattctttcaaaccgtggaagaaacgattcaggatgcagaaacgtgctaggaggctcctaatgaaactcgcctcacattcatcatgtgctggatcctggaacagcttttgctttgtcccagatggtggcttaaatacatttcaaactattgtgggtttatatagtacatgacagaagataatttaaacacagtgtcccaattgtatatttgttttggttataacacttactgtgtgtgcaataaatgccccactacaaaaataacaaaaaaatgttttccttctacataaatcataccctgctttgttgcaatgactgggaagtatggattaaatacatgtgatacttattttttttaaagttcttactgaggatctctgtcaagttcaattcttctatgatttaaatttatgtgagttataaataagacatattttattccttatatttgatttgtagaaataactatttaaatatggctacaatatcaggttcttaaaagtgttagctatcataaatgaacatgaaacaaatgagagaatctaaatttgctgatttttcaatataattaaatataaaacaactgaaagatacaaatctgattttcaaattaaagattcagtttttaataaatcgtcacattaaaacattcagccactcacaaactttaagagaataaagaaagtatttgtttcttcccttggagaatacacttttcatctggaaaaacagctgatcaaattaaggctgtgccaggtaatggaagtgagaggcacagattacagtactggctctaccagttactggctacagattctacctatcagaaccccagtttttcacatgcaaaatgaagagctctgtctataaggtcccttctaataccacatgcctatagttttcccttggggtgatctactcagcaagaacacggactctggagccaatctgttgaattctcaaatgaactctgccacttaccgcggtaagtatctttggtcatttagcctctcttttctctagtctccttgtttgtactttgtactaatcatcatgcaatatgaatgcattgtctacatcggacagaaaaggamccagaagcatcacagactcttgcaacaccattaaaaccgccaggaaaagtg

SEQ ID NO: 708170 - DNA, 636 bp, Homo sapiens
ttccagcagcatcaagtgctatttttattatttccattactaattttgtgtttatgcattttgtggaaaaggaaacatgaacattgtgtggttcaaatagccaaaaaaaaawtaaaatgtgattacactaaattagaatttatgtgattttattgcacctgaaggttaacatgattctgggattctaataacaaaaaagctttaaaaccatcttgatttgtttatacagaaaaacaggaattggcctgatagagaatgaaaactatgaaatagctggctgtcttgctttattgatatttttcacaggctttatttaactcccaaagacctagcctaaacaatagtatttttagaggacatagtcacataaataatctttctcattttgctctaaatgcctgctttaaccacagggggaaaaaattcaactttgttcttgtatgtttaagtcaaagatagtacacatagtatataatgttaattccatattaaaatgaccatttgaagaaagtgttcattaagaaagattacatttacttcaaggaattttcttgatatcaagcaatatttatttttcataattgagcttatgtgcctaaaataatccactcaaatctggataaatcatagtcttct

SEQ ID NO: 708171 - DNA, 636 bp, Homo sapiens
ttccagcagcatcaagtgctatttttattatttccattactaattttgtgtttatgcattttgtggaaaaggaaacatgaacattgtgtggttcaaatagccaaaaaaaaattaaaatgtgattacactaaattagaatttatgtgattttattgcacctgaaggttaacatgattctgggattctaataacaaaaaagctttaaaaccatcttgatttgtttatacagaaaaacaggaattggcctgatagagaatgaaaactatgaaatagctggctgtcttgctttattgatatttttcacaggctttatttaactcccaaagacctagcctaaacaatagtatttttagaggacatagtcacataaataatctttctcattttgctctaaatgcctgctttaaccacagggggaaaaaatwcaactttgttcttgtatgtttaagtcaaagatagtacacatagtatataatgttaattccatattaaaatgaccatttgaagaaagtgttcattaagaaagattacatttacttcaaggaattttcttgatatcaagcaatatttatttttcataattgagcttatgtgcctaaaataatccactcaaatctggataaatcatagtcttct

SEQ ID NO: 708172 - DNA, 1156 bp, Homo sapiens
tgagaaaaaactcagggtatatgcttttaataaaagtaattgttttgctaagtgacactttctgaaaagtattttcccctttaatggcctatgtcatacatatcctttcctacatttcctggaatgaaccaggttattgctctatgtttgcacatcttccaatcatgatctaaggaagctcattctctgtggttagagattgggatacattggtaagcctcagaatttctcaggaaaattggtaaatatagctacttaatattaggaaattgagacagctccattctctctcattaagaacctgaagtgattagttgcattctaaataaaccaaatgtcttttagtattttataaataagacaagccacataatattctattttgaattttccagtattgttgataatgcataatgtgatgcagactgacattacagagatcggctgctttttctgtttgatgatgtttttaaaatgttttacagcaaataattatgcaacacrtacatttatcttcatattacagtgacaatatatttgtaagtcagtgaagtactgcattatatttgcatttatttcctttggtaaaacaacagttatatttttattcttacaatttatacaactttattcatgcacacactaacaacaacagcaacaaaaatactagacttttttttataatcacacacctataaacttactcagaacaggatgtgatgatgaaatactattgggtatattaatacaataaaaatgctactgagagaaactcaattgttgagtctaagatttccattaaattttaagctttagggaggtggcagccagggggaagaaatacttatttaatcactgtgaagttcattcaataaatagctgagtgcctactatgtgccaagtccagcaataagctctgggagcataacattaaagggtaaaagactgtccttgtgaagatttcattttaataaaataaggcaagtcataaaatgggagccaaagaaatatatactgtgccagctggtgagtggcacactatacacaaatcaaggtaaggaaaataggtatttctatggttagggacaaattgctatgctgtattgggtagtcaaggaaagctgacatttgatcagaagcagaaaactttgtggct

SEQ ID NO: 708173 - DNA, 611 bp, Homo sapiens
tttcaggttatgaggtgatgatattctatctcatttattgtattaggctatagttaggtcttccaaaagagaaggatattttctaatgtgctacatttcatgagaaagttggggaatggtcaggagaacactcagcctttctcagtgcataacttcaattggttccagatcatctgagtattctaacctgcacccagcgcatcagaggcagtggtaaatgtgctggagagaactgttttgatgaactttaagagttgcttgagtaaatctcaatgatcttcttttatctgttatcatttattttttgtcagactaaagaaaaaaaatatatagcacgcttttaggcttgcctcccccactgcctcatcccaccatagtctatttctttaagatcttgttcacgcctttagttttcagttgggattggaaacagaagaaggggagcatatttagttgatgtaaaatgcctataccaatagtgtcaatctgcagtgcttttatayttttataaacaaatgtaaaattattagggaacatggcagcaagaaattggtgttccccgttagcatgcaaccttatatgccattgcccagcagcatttctcaatatca

SEQ ID NO: 708174 - DNA, 1441 bp, Homo sapiens
gaaaatgcctttgaaatcttgaaatgtaaagattgttaacttgtgactttcaaagcttaataggaaggtagttctggtgtttcccaagtatgaaacrgaagtacattcaagaatgttaactgaaattgataacaaatatcaaagcaaaacttgaatcgttactattaactgacagatctatcaatattacatgcttaaaatatgtgaacaatttattaatacattttctaaaggcttatattttcaaatgttcaagaatagtttattatttaattatcttcaatgcaagtaaaggggtaaaatatctgctcatttacatgtgaatagttgataatgcggaaactattttaatgttccaccaaaaaaaatcaaattacctgggcattgccaaaacacaatttaatttttttttgtaaacagatatttcagtaacaacaaagtttaaagtatattttccttaaaatctaacatgatattcaagcctatcttctaatttgttttggagggcaggtagtagaagccactgtaaataaagcttccattcaaccatatgcattaataatgttatttattccaactgaattccaacaggaggtagcaaggtacaaaaaacaaaaaacttgcaagaatcaggaaatctgggttcaaatatccaatttgatgtctgcaagatgaataagctagaaaagattgtttatttgtcattagttttattaagttgattaatttaaaattaggatggccaatggcagagagagctacgttaatgacttgggttggattcaccatcatcattgactttcagatttgaatgtaagttaatttaaaaataaatagatgaatacatacattaattttgttctgtaaatttgagttggtgaatatgttattctaaagcatattgtgaattgactgtatttatagcaaaacagaaaatatgatgtatctttgctgatgggataatcacatgacttggtaataagaggtgatacctctcatactagtaagatgagaaatcccctaattataaatatttttatcaggtatgttttatataaatatcttatttcatggctgtttaggaaattaaaattaatagggagtgtctatgaaaacatgtattggtgattgtgtgtttacatgtctttttcaggggcttgacttgaaaatcactatgcatttgctgtagaaaatataaagccaggtaaagtgagaattaaagcaactgttagaaaggagagggatgagctataaggaaatacattacaaaaattattcttattgttttttattaataaaatttatatttctagtcacccattattcccttgccaagattattattctagctatttatacaacttatttcatttttaagtctaataaccgcgtataccttttggccagttttctaacagctacattttcaggaaactgttaa

SEQ ID NO: 708175 - DNA, 1441 bp, Homo sapiens
gaaaatgcctttgaaatcttgaaatgtaaagattgttaacttgtgactttcaaagcttaataggaaggtagttctggtgtttcccaagtatgaaacggaagtacattcaagaatgttaactgaaattgataacaaatatcaaagcaaaacttgaatcgttactattaactgacagatctatcaatattacatgcttaaaatatgtgaacaatttattaatacattttctaaaggcttatattttcaaatgttcaagaatagtttattatttaattatcttcaatgcaagtaaaggggtaaaatatctgctcatttacatgtgaatagttgataatgcggaaactattttaatgttccaccaaaaaaaatcaaattacctgggcattgccaaaacacaatttaatttttttttgtaaacagatatttcagtaacaacaaagtttaaagtatattttccttaaaatctaacatgatattcaagcctatcttctaatttgttttggagggcaggtagtagaagccactgtaaataaagcttccattcaaccatatgcattaataatgttatttattccaactgaattccaacaggaggtagcaaggtacaaaaaacaaaaaacttgcaagaatcaggaaatctgggttcaaatatccaatttgatgtctgcaagatgaataagctagaaaagattgtttatttgtcattagttttattaagttgattaatttaaaattaggatggccaatggcagagagagctacgttaatgacttgggttggattcaccatcatcattgactttcagattygaatgtaagttaatttaaaaataaatagatgaatacatacattaattttgttctgtaaatttgagttggtgaatatgttattctaaagcatattgtgaattgactgtatttatagcaaaacagaaaatatgatgtatctttgctgatgggataatcacatgacttggtaataagaggtgatacctctcatactagtaagatgagaaatcccctaattataaatatttttatcaggtatgttttatataaatatcttatttcatggctgtttaggaaattaaaattaatagggagtgtctatgaaaacatgtattggtgattgtgtgtttacatgtctttttcaggggcttgacttgaaaatcactatgcatttgctgtagaaaatataaagccaggtaaagtgagaattaaagcaactgttagaaaggagagggatgagctataaggaaatacattacaaaaattattcttattgttttttattaataaaatttatatttctagtcacccattattcccttgccaagattattattctagctatttatacaacttatttcatttttaagtctaataaccgcgtataccttttggccagttttctaacagctacattttcaggaaactgttaa

SEQ ID NO: 708176 - DNA, 661 bp, Homo sapiens
cttttctcccacttatttcgtcagtcatttatttatactagtatggacttatgaatatttacataattcttgaaatttcaatccacatatgactttacgatagaaatcagaaatgcatcaacttttgtaaaccctaatgagaatgtacattgggaccctcattagtacaaactctgaacaatctgttgcatagcaaaaagagaattgttgacagcagatagagttcaccatgtgatgaagctggtagtggcactatcattcattcattaacttatttgctcttttcagatatatttattgagaacctactgtgtgccagaccatgttataggattggggggtacccattaaataaaacagatgaattttgccacacagagaagtctagcatagagtaagcaaagaaaagaatattagataaggaggttacagaagtcatcagaaacgagactattcaggacctagattttactataattttgcttgtaaggcccaggcagatatttagtaagggacagttaatattttaaaatacaaatatatatatatattatatatatatgagaaacatatatagtatatagatatagcatatatattatatatactgtatatatagatttatagcagtacatgtatgtgtgtgtttgtgtrtgtatat

SEQ ID NO: 708177 - DNA, 1410 bp, Homo sapiens
aagacgcagcaccctgtgaaggccattgagtgtgatgctaagtatttaggtttattctggaaccaatgaggagttatcgaaggcatgggagagacgttcaagcaggaaaatggcatcatttcattattagaaaaaattacaaattgaattaaagctataaggaagttatatcaaatatggaaagtctaatagttttcaatgccaagattcattacaagactatgtaaagaaaattctgtgctttttttttttttttgagacggagtctctctctgttccccaggctggagggcagtggcgccatctgggctcactgcaagctccgcctcctgggttcacgccattctcctgcctcagcctcccgagtagctgggactacaggcgcccgccaccgcgcccgactaaatttttttttgtgtttttagtagagacggggtttcaccatgttaaccaggatggtctcgctctcctgacctagtgatccgccggcctcggcctcccaaagtgctgggattacaggcgtgagccaccacgcctggccagattctgtatttttatgttctgattaatatttacaaagtgaaaactcatttattttgtaaggtattgatgatcttctttctttatccataaattatatctttaggtattgtgagaagcaaatcaatattatccaaagcttattgtgccaacattttttagtgaagaggtacagtatgtttttatttatactgaaacacattaaaatatgaaataacatctttaaacattttttacttatatgtacatatatttatgagttatcaaattttctaagaaaaggaatttatcattttgtagaaaggcttgctcatttttcaattgtgttctaggttaaaaaaaaaagaaagaagagaaagtgtgtatctaaggtctatcttaatatttggtcatttttatactgtagtttctttatctcttctatttctcaaaccaaycagaactactaaaagttctgtaattctgtattaactctgtgaagtaaatggatttcttaaaaaccacatatttaaaataaatggtatagtactgactattctaagcacagtcagtgtatggttatttagttattaaatctactcatttcaaggcagggaaggtactaatagatataatttgactttcagattgatgggtaaaatcttcaaattaaaacatataaagccataaatgactctttacgtcaacatatatgattattatatattcatataggtataaattgtatttttattaacagtaaataaaaatacacttgaaaaattatttaaatacactatttccaaatgtatttttttcttacactgtgacaacattattttttgctggcaattcagagacctttcttcttttttcaatgtccctcttctg

SEQ ID NO: 708178 - DNA, 728 bp, Homo sapiens
gaaaacataaataggctatattttatataaaatatctcacaaatttttagttattgaatttactattttgtatatttgcagaaatatctccttttactatgataaagataagtctacaagagcatatcaatattatatgtaaagccttctacatttttgtaataaagccaaatgctttaaagtattgattttagataaatagattaatatttaatgtatcattaaattttacatagctagggatcaaagtttcagtgcaggttatctaagttaacactaacagaaagttgtaaggatgttcattaaggtgacaaaagtttcaaaaaatgaataaatcttatatttttatggaggaaaataaaatatcttacttttcaaatgcacacatttgtaatgtaaacgattcaatctggacagtttttgagccayagagataccaagaatgtatgtcactgtgtagctgcttgttagtggttgtggttataggatagtgattatttctaattgaaaaagaaggtataggtgtattagtctgttttcacactactgataaatatataaccaagactgggaaaaaaaaaagaggtttaattggacttatagttccacatggctgaggaggcctcagaatcatggcaggaagcaaaaggcacttcttacctggtggcagcaagagaaaatgagaaagtagtaaaagcagaaacccctgataaacccatcagatctca

SEQ ID NO: 708179 - DNA, 1016 bp, Homo sapiens
aggtggccttaatgctacccgttgacctcttccccatcaacttattaattggtactttctgaatttggttcaggaagcatgaaatatgtgtttaatgtgttgctgtatgaaaagaaatcactgcagcccaaggattaaagattaccagctgaggatgctgcacttccaagaaagagagagagaggggaatagaatcatatcttaaaagagcagagtgccaggcaaacacatggagctttctcaagcatttggaggcaatcatattaaagcctctgaacagttagtgtcatctttgaaagtggtgtcctgtcactgtaaatggcacaaaaggattgcatgccagacactctgcccaaactctgtttatgctatccaggacgaatttaaggttccttgctgttctttcaacctccccttcttgaagaggagaaaagggatgtaatggggtgaaggcaatgctgttgctatcagctacactcccgacaagatgaaaagcgcacacaaaactgaagactaattgcctcttgtaccatgttccaggaaagccactgcccaccaaccataaattctgacaaagttatggatttctctgtctcacattcaccaagcagacggcgttccctcatcagatggccgacaaggagccatcaggtaatctacgaagtataaactcatatggcttcattaaaatctagtgtatgcattaagcaagtacatttagatggctcctaaattcacaggaatatttccaagtgagttcatatttatgaatacataaaacctgtcattttttgaataacaaataagccatcaaatgatcatattgttttgtgtctccaatcacaattaacaataatgtaaaacaacytttttgcactactgccgaaaagtcatttccatgataatatgaagaagctcaattttatagaacatctattgtctcaggcaaggtgattcccttccccactctgattttctagttccctgttagccagaatatgctttcctcttttccc

SEQ ID NO: 708180 - DNA, 1659 bp, Homo sapiens
caccctattgttccaagactgcaaatccatacagcatgttactgtgttgaacactgtgggcaattgtaacatcatggtatttgtgtatctaaatatgtctaaacaaaagagatacaggaaaaatacagtataattttatgggaccactattgtatatggtgtcattgactgaaatggcattacgcagtgcatgacagtatgcatccttcagtgaaattcatcttaagattgagaagccagcaggtcattcgcgccacactttcccagatttcacccaagtagactgctccttcagaagggaagcctgatactaatgggatgtgatgccattttttaaattaaccctttccactaagtttgaaaaggacattcttcttagactgggccatcagtaacaatgccccttcatggagagaaaagcatactgaacctgagcttccacagtctagggcaacctgctcctcaggccctgcaggcatgttctttccactgtgcaggtggagagttatgactgcgtaagcctctgtcccagtgagacaaaactgcattatctattaaatttctaatatgcagactatactttatatggaaaatgcactgcagaaaaaaatgctggcttttactcttatacatggagatccattagagaaatctatcagggaagtatgaagttgctcagagtcacagagattctgatgaagggttacagaattgaagcaatatagtaggtgcgggctccttaatgcacaaaaaattatacttttattaagtcccctaccaaacttcccacactttcagttacatccctgtaaccagggactatatccagaactggaagcttagttttcaggcttcaggctgtcttgtggcttgaaggttgggtttcattgggggcttgtccctatctgcctaggaatttgttggccttctactactatcacaataatttttcaaatgaataggtacaaatcccttagcgtagaggagctccttgaataccagcatgactgggcagttgggctaccacgggtctaaaatcatggatgggaagctcctccgagacccaatatgtttttctctttctacctacggcctgcacctcccccattttgagcctataaaaaccctgccctcakccacacgttgggactacccgccttctggtagggactacccactttgggtctcctctccactgagagctgttccgtcactcaataaaactcttcttggatgcaggacaagaacctgggacccacccaacagcgagtgagaaaggagctgtaatactgtagccttcctgtcctctgttggcgccaggcagctgccccacacaacgggaagtagcagtggcgctgggccagcctaggaggcatgggctagagcagagcagtgggactgaacgagctgtaacacgaatgaggtgaaacccacccccaccctgtttgctgcactgtggctggtgggaaggagagaagagctatgacccttctgggggcctagacctcggctccccaagccagggctgtgttatgctgtaacaccccctttgcagttccatgattgctggtgtccccgagtttttaaggcgccaccgcattcccctcgtccagacaccagcgcccaaggcggaggccccttgtcatacacctggtccag

SEQ ID NO: 708181 - DNA, 3004 bp, Homo sapiens
taaattttaagatagtttgccttctgtgggtagaatagatggccaatgccgtggaggagaccagtgcagtgcttcaaccctgaaacattgatggctttaggtaggatgattagactaaagatgagaaaaattggtggatacaaggtaaattgaagaggtagacaaaactatgtgagaayttaggaagacaaaggggtcaaggatgatgcttgctttctgagttgaggagctgggtagtaagtggtactgttctcctccatctgcccccttaatccaattttcatgccacatcaaaagagtaatctctaagataaagtttaatcccacaattttctgcttaaaaccctcccatgcttctccagtactgacaggataacacagaaagaactaagatagctgtgcttagtgtgatccaaaggccctgctcataagggctgtagcctaccattcccatcacggctcatatttactctcctatgcagcagccacacagttaattttcctgaatatttttgatctgtggttggttcaatccacagatgtgaaacccatggatattcttattttgaggggtaaaattcctatttatccttaaaatgctgcttaaatgatgtattctccaataactctttcctaatatctcagttattgaatatatgaatattatagcccttctcacaacagattgaaaatacttggttatatctgtgaacctccccaattccccagtgttgctttttagactagccaggttttactttatctttttaatctgttgtaatgaactacagtggtatctagtatacagtatgtgttcaaaacactttcattaaagaaatcacttttactggggaaataacataccagcactgtccaataaaattttttcaatgatagaaatgttttatattttcactgttcagtatggtaggtgctaggaaaatgtggctagtgcaattgagaagtgaattttggattttatttgattttagttaatgtacatttaaattgaaataacaactatgttggacagtagtgtaataaatgatattcatgtttctataaatgccaaccaaaaactattatagaatactaaaagaaggagaattaggacaaatgttaaagttcaaaaaatacatcatgaataggttattacataattgaattctagatacaacgactcgtccgtttttaataatgacatggcaatagttaatctaatctgactgtcatatttgattattctttttgctccatccatacatcccacttctgtttattatctccctcattatctcttcatttataatctttcacttttgcttcacttgtactatctttttggttttcaatgctttgaaattcaaatttcctttagttccattggtgaactttgaaacacatttaataaaacctgttgctatagttgaatactagatttcctgattcagtcgtgacataagaaaacgaagattcaatttgtatcatgaacttcttcatttccctgtcggggtatcagaaagtttttcacacttagtattattctggcaaaaggtacttcgttgctccctgcccctcccccacggtcaaatgtgtagttagaaaatgtggtcattgcaaaccttagccactagatggcactagtgagccagtagggtgaaatgtttactgggccggctgcggaatctgatgggttcaaaatcaaggtggggagtaagagtaaatatgtgaaataagtcaatgcttcattttttttttaaggcaaatagttggggaaaaataaaacgtcctctcttcatgcaagtacaatgtttaatgattaaactagcatcagttacagcttacctctcctcttccttgctccactgtcacagcttcccaccagctgcacaggccttctccacccttcttcagtactacaggccgactgcaacctcagagcttgtgtgcaggttctttctgctttgactatcccccgcttcctccccctcaaacatgtctgcatgactcatgtctttcccgccttcaatcttttctcaaacctcacattctcagaccccactgactgcccctcaaacactcccaccccttcctctcctttatctttctccaaagcactttcctgtcaccttgtaacatctatacatgtttttagctgatttatttttctcttttggctagatctgtttttgaattaccctatttcttaagatcgcagagaatgaagatgattttgcaaaaatactgtagacgttgtgtgtggggcgggggtggaggtggggggtggatcctctagcagtagatagccgtgtccagttaggagcagaaagatagggaggttagctactacagttaccttaaaaattagtcaaaagatgtttccagggtatcatgtaatgactaagtttggccttggagggctatatctgacttactaagatcctataggaccattttttagaatcccccaatgtgccctacacacatcctcactctggttcaggaagaagctgattaaatagttgttttcctttgaccaaccacatctttctattactgaattttatcttcttaatgactatcagtttggtctgcctacaaacagccaaacaaaatgaaaagcaaaagtcaataattttttaaacctagagatgtcaacaactttttgttttgttccacagtaaatttatgaagccttggattcattgtgcttcttggagacagaaatccactacacaaattattattatttttaaaaaggaagatggcaggggaaatcatagattcacaggtgcaaactggtccagggttttcagctttttagtagtaatgtcaaacggtacagctgctttaactattttatcaaaggtgacttggcattctttgaagagtctatctcagaaaataggtcgatttatgcttataccaaaagcaaaatagctttagacattaaaataacaattgattttctgccatctcatctttatgaattccccagtagtgg

SEQ ID NO: 708182 - DNA, 3004 bp, Homo sapiens
taaattttaagatagtttgccttctgtgggtagaatagatggccaatgccgtggaggagaccagtgcagtgcttcaaccctgaaacattgatggctttaggtaggatgattagactaaagatgagaaaaattggtggatacaaggtaaattgaagaggtagacaaaactatgtgagaatttaggaagacaaaggggtcaaggatgatgcttgctttctgagttgaggagctgggtagtaagtggtactgttctcctccatctgcccccttaatccaattttcatgccacatcaaaagagtaatctctaagataaagtttaatcccacaattttctgcttaaaaccctcccmtgcttctccagtactgacaggataacacagaaagaactaagatagctgtgcttagtgtgatccaaaggccctgctcataagggctgtagcctaccattcccatcacggctcatatttactctcctatgcagcagccacacagttaattttcctgaatatttttgatctgtggttggttcaatccacagatgtgaaacccatggatattcttattttgaggggtaaaattcctatttatccttaaaatgctgcttaaatgatgtattctccaataactctttcctaatatctcagttattgaatatatgaatattatagcccttctcacaacagattgaaaatacttggttatatctgtgaacctccccaattccccagtgttgctttttagactagccaggttttactttatctttttaatctgttgtaatgaactacagtggtatctagtatacagtatgtgttcaaaacactttcattaaagaaatcacttttactggggaaataacataccagcactgtccaataaaattttttcaatgatagaaatgttttatattttcactgttcagtatggtaggtgctaggaaaatgtggctagtgcaattgagaagtgaattttggattttatttgattttagttaatgtacatttaaattgaaataacaactatgttggacagtagtgtaataaatgatattcatgtttctataaatgccaaccaaaaactattatagaatactaaaagaaggagaattaggacaaatgttaaagttcaaaaaatacatcatgaataggttattacataattgaattctagatacaacgactcgtccgtttttaataatgacatggcaatagttaatctaatctgactgtcatatttgattattctttttgctccatccatacatcccacttctgtttattatctccctcattatctcttcatttataatctttcacttttgcttcacttgtactatctttttggttttcaatgctttgaaattcaaatttcctttagttccattggtgaactttgaaacacatttaataaaacctgttgctatagttgaatactagatttcctgattcagtcgtgacataagaaaacgaagattcaatttgtatcatgaacttcttcatttccctgtcggggtatcagaaagtttttcacacttagtattattctggcaaaaggtacttcgttgctccctgcccctcccccacggtcaaatgtgtagttagaaaatgtggtcattgcaaaccttagccactagatggcactagtgagccagtagggtgaaatgtttactgggccggctgcggaatctgatgggttcaaaatcaaggtggggagtaagagtaaatatgtgaaataagtcaatgcttcattttttttttaaggcaaatagttggggaaaaataaaacgtcctctcttcatgcaagtacaatgtttaatgattaaactagcatcagttacagcttacctctcctcttccttgctccactgtcacagcttcccaccagctgcacaggccttctccacccttcttcagtactacaggccgactgcaacctcagagcttgtgtgcaggttctttctgctttgactatcccccgcttcctccccctcaaacatgtctgcatgactcatgtctttcccgccttcaatcttttctcaaacctcacattctcagaccccactgactgcccctcaaacactcccaccccttcctctcctttatctttctccaaagcactttcctgtcaccttgtaacatctatacatgtttttagctgatttatttttctcttttggctagatctgtttttgaattaccctatttcttaagatcgcagagaatgaagatgattttgcaaaaatactgtagacgttgtgtgtggggcgggggtggaggtggggggtggatcctctagcagtagatagccgtgtccagttaggagcagaaagatagggaggttagctactacagttaccttaaaaattagtcaaaagatgtttccagggtatcatgtaatgactaagtttggccttggagggctatatctgacttactaagatcctataggaccattttttagaatcccccaatgtgccctacacacatcctcactctggttcaggaagaagctgattaaatagttgttttcctttgaccaaccacatctttctattactgaattttatcttcttaatgactatcagtttggtctgcctacaaacagccaaacaaaatgaaaagcaaaagtcaataattttttaaacctagagatgtcaacaactttttgttttgttccacagtaaatttatgaagccttggattcattgtgcttcttggagacagaaatccactacacaaattattattatttttaaaaaggaagatggcaggggaaatcatagattcacaggtgcaaactggtccagggttttcagctttttagtagtaatgtcaaacggtacagctgctttaactattttatcaaaggtgacttggcattctttgaagagtctatctcagaaaataggtcgatttatgcttataccaaaagcaaaatagctttagacattaaaataacaattgattttctgccatctcatctttatgaattccccagtagtgg

SEQ ID NO: 708183 - DNA, 3004 bp, Homo sapiens
taaattttaagatagtttgccttctgtgggtagaatagatggccaatgccgtggaggagaccagtgcagtgcttcaaccctgaaacattgatggctttaggtaggatgattagactaaagatgagaaaaattggtggatacaaggtaaattgaagaggtagacaaaactatgtgagaatttaggaagacaaaggggtcaaggatgatgcttgctttctgagttgaggagctgggtagtaagtggtactgttctcctccatctgcccccttaatccaattttcatgccacatcaaaagagtaatctctaagataaagtttaatcccacaattttctgcttaaaaccctcccatgcttctccagtactgacaggataacacagaaagaactaagatagctgtgcttagtgtgatccaaaggccctgctcataagggctgtagcctaccattcccatcacggctcatatttactctcctatgcagcagccacacagttaattttcctgaatatttttgatctgtggttggttcaatccacagatgtgaaacccatggatattcttattttgaggggtaaaattcctatttatccttaaaatgctgcttaaatgatgtattctccaataactctttcctaatatctcagttattgaatatatgaatattatagcccttctcacaacagattgaaaatacttggttatatctgtgaacctccccaattccccagtgttgctttttagactagccaggttttactttatctttttaatctgttgtaatgaactacagtggtatctagtatacagtatgtgttcaaaacactttcattaaagaaatcacttttactggggaaataacataccagcactgtccaataaaattttttcaatgatagaaatgttttatattttcactgttcagtatggtaggtgctaggaaaatgtggctagtgcaattgagaagtgaattttggattttatttgattttagttaatgtacatttaaattgaaataacaactatgttggacagtagtgtaataaatgatattcatgtttctataaatgccaaccaaaaactattatagaatactaaaagaaggagaattagracaaatgttaaagttcaaaaaatacatcatgaataggttattacataattgaattctagatacaacgactcgtccgtttttaataatgacatggcaatagttaatctaatctgactgtcatatttgattattctttttgctccatccatacatcccacttctgtttattatctccctcattatctcttcatttataatctttcacttttgcttcacttgtactatctttttggttttcaatgctttgaaattcaaatttcctttagttccattggtgaactttgaaacacatttaataaaacctgttgctatagttgaatactagatttcctgattcagtcgtgacataagaaaacgaagattcaatttgtatcatgaacttcttcatttccctgtcggggtatcagaaagtttttcacacttagtattattctggcaaaaggtacttcgttgctccctgcccctcccccacggtcaaatgtgtagttagaaaatgtggtcattgcaaaccttagccactagatggcactagtgagccagtagggtgaaatgtttactgggccggctgcggaatctgatgggttcaaaatcaaggtggggagtaagagtaaatatgtgaaataagtcaatgcttcattttttttttaaggcaaatagttggggaaaaataaaacgtcctctcttcatgcaagtacaatgtttaatgattaaactagcatcagttacagcttacctctcctcttccttgctccactgtcacagcttcccaccagctgcacaggccttctccacccttcttcagtactacaggccgactgcaacctcagagcttgtgtgcaggttctttctgctttgactatcccccgcttcctccccctcaaacatgtctgcatgactcatgtctttcccgccttcaatcttttctcaaacctcacattctcagaccccactgactgcccctcaaacactcccaccccttcctctcctttatctttctccaaagcactttcctgtcaccttgtaacatctatacatgtttttagctgatttatttttctcttttggctagatctgtttttgaattaccctatttcttaagatcgcagagaatgaagatgattttgcaaaaatactgtagacgttgtgtgtggggcgggggtggaggtggggggtggatcctctagcagtagatagccgtgtccagttaggagcagaaagatagggaggttagctactacagttaccttaaaaattagtcaaaagatgtttccagggtatcatgtaatgactaagtttggccttggagggctatatctgacttactaagatcctataggaccattttttagaatcccccaatgtgccctacacacatcctcactctggttcaggaagaagctgattaaatagttgttttcctttgaccaaccacatctttctattactgaattttatcttcttaatgactatcagtttggtctgcctacaaacagccaaacaaaatgaaaagcaaaagtcaataattttttaaacctagagatgtcaacaactttttgttttgttccacagtaaatttatgaagccttggattcattgtgcttcttggagacagaaatccactacacaaattattattatttttaaaaaggaagatggcaggggaaatcatagattcacaggtgcaaactggtccagggttttcagctttttagtagtaatgtcaaacggtacagctgctttaactattttatcaaaggtgacttggcattctttgaagagtctatctcagaaaataggtcgatttatgcttataccaaaagcaaaatagctttagacattaaaataacaattgattttctgccatctcatctttatgaattccccagtagtgg

SEQ ID NO: 708184 - DNA, 2183 bp, Homo sapiens
tgtaatgaaaaactaatgggctggagatttgccttctaggaagagcttaagcattgctttactaaacacacctacatattgtctctaaatgtcatgctaagatgtacagggtattgccatgaacttcttgagcagttaactcagtggcttaatgcttgccgtgaagcatctttaaacggaaacatcctttactactaagactgaggcttcaccatggtatcaaaggaagtcagtaaaatgtaccttggcatagagtgcaggaacatatttattactggtgggaaagacctattaggcctgtctgtcacaatgccaatgtataatttatccctgaggcttttggggatcctataactgccatgattttaatggctggtggtgagtcatgggcatttatgaagatagagcacttcaccgactactgattggactcctaagatgcacataatccttaaaaaattatccaaaactttgtcttaaatttgaagtcttctcatacttataaataaagttgtggttcaatagctctttctctgtcttctgcatgatttccttttggtacaattatcatcattgacttggcaaaaacaatgtaaaacacagggctgcatggaacttctagaatttcagaggatgaatacatttgtagcttcatactaaaatgtgtctaaattattcctaaaacatgcattataatatgtgttctaattccacatccctattatagaaacaaatacacatacattcccgtactgtcccatctctacctcttccagtctatcaccaaacttaacattaaaaaaaaaaagttgccatgtgatattgaaaacaaaacaaagtataagctaaagaaatatcctactttaacctctttgatccttgcttttctcacaaattgatccttacgctagcatttcttaaactggcaaacagcttaaaggtgaaacagaagccctgtggtttctgctcataaagtaaatttggttagtattgactccaaaggcttttgtttccatttttgcccaagtgtaaggttaaaaaagttgctgcaatgtcaatttataaattattgttaatctgtgtcagcatttgacacatcgcagtatatgagaaacactgagaaaaattgttccatgtcagtttgagaccttttaagctgyattagtcacagatttctctaagaatacctggaattctgagtcctcaaattaaatcaggattatatgtagttataaaggatttataagttcatattttctgtagttcattaacttgcttctttttatttcatttcctgtctttgttattgatgaagtaagctaactgaatttcattaaagtctgttttataattttcatataagttgtctaaccaataaatacataaaagactggtttcaccatttgaaaggcattgatatgacattggtaaagatcaaaagcttatctcagagacaaattgaaatcatatcatttgtgtagtaatcaagattaaatttaccaagagtcctttctttttaaaaactgtattggctcctttgtgaatatagcagtaagattttaccagacgtccctctatattttttgacctttgagccttgaaaagataaatgacctacaataatcaatattctatcaatcattaagaacaaattggaattaagttaacctcctagtagcaataaaatctcatactcataggagatttgaattcaggttctgagattaatttgctgctctcccacttgtaatgtacaactaaaggaaacaaatttagttcaggtcagtgattatttcattaagccttcaaaccactgcttaacagaatgttatatatcagatgactctttaaaggatcccaacgtgcagtatgtgtgtgtgtgtgtgtgtgtgtgtgtgtgtgtgtgtgtgtgtgtgtgttgctgtacatgtgctgttgtatgtgagcacaggcacacatctggaggcattatcatatatatccttgtctgattttatgggaaaaagaaagctatgataatatttttacactcaaggacaataatcatagctataaaattcagtgtgcctaatgccatatcctaactctaagataaaagtggaaagaagcggctgtgggcttaaggaatggagggagagaaccctctttctagtgccctccctacaacactaataagagcctca

SEQ ID NO: 708185 - DNA, 1101 bp, Homo sapiens
tggtatttcgaggatcaacatatagataacatatataatttcctagcataggactgagcaaatagtaaataaaaacataagttatccttcccagtcttcctaactgtaaaattatgataatacctttttttcagagttgccatgcagaatactgtgaagtagctactgtaatgtacaagcacctatcaaaatacctggcagctcaatagtaagagttcaatcattccttcattctttcctgactttctatcatttaatttccgtatcaacaatatttgctgagcatctgctatgtgcactaggtcctgatccatgagggtacatgaggcaaatgtgattcctgccctcaaagaatgtataatcttagcttgaggggaagaaagattaattaattaattaattacaattgattgtaagaggaaggaagaagccttcactatgaattcagctgacttttaactctgtcaatgcggtgctagatactgggaatgcaaaagttaggtgtatttgctttaatttgctttgagaaattggcccatttacacatctcagtgacattctaatcctgcctcagccccacccatcatttgtgttctattgttcatatatggtttttatccttcttggctttcagaaacaggtgaaggtctgttgatgactattttgctatagcaatattcacatttccaaagtctgaatggtaaatggttaattactatagttcacgtataaggttgcattcatggcaaatagmatgtaacccaataaaaaggaaatgataatgtgttaggccattcttgcattgctataaagagatacctgggactgggtaatttataagaaaagaagtttaattggcttacagttctgcaggctgttcgggaagcataacaccaacatctacttctagggaaacctcaggaagcttacaatcatgatagaaggcaatggggagtaggcatatcacatggcaggagtgggagcaagaaggcagggaagtgccacacactttcaccggatctcatgagaactcactcactaccatgaggacagcaccaagccatgcaggatctgcccccatgaccgaatcagctcccacca

SEQ ID NO: 708186 - DNA, 598 bp, Homo sapiens
aatggcgaacaaaacctggtctttttcctaaaggactttttgtctaatagacagaagcagcatagaattttaaaaagcataggctaagaaaaataagtgtggttagtctattactgccagccaattattgtttrtctttctctccttgtccatggagagataaatgtccaattgaggacctttatgaatataatatattcgaaactatctgaaaatctcacacaaattattctgatcaaccacatttcagaagtaaactcatgcttgaaaagcttacttcaaggtctgacaatataaccactgccctgcctaaacccagcgcccctttaaataagtgctatgttgtagattcactcagctaaggaagtgtatgttcaatcagttttgaaacatatgtacttgaacccacattttggtgaaagctactaatggttcaattaaataagaaaaatcttaatgggctggtattagagagtggtgggaaagagatgagagactctgttacgaaagtttaagaaacagattatttcctaaattcactgtaaaagtttaatattaagatgatgtcaaagcaaaaattaaactggttaaagttaaa

SEQ ID NO: 708187 - DNA, 632 bp, Homo sapiens
acaaaatgtggcacatgcataaaatggaatataattcagccataaaaagaacgaaatcctgatacattcactataatatggatgaaccttgaaaacagtaagctaaaagaagccagacacaaaggtaatatattgtatgattccacttatgtgatatatacagtatacatagagagagaaaacagatttgtagtttccaaggcacaaggtgatggcaaaacgggatgtgactgcttaatgggtactgggtttctgtttaaggtggtaaaaaaattctggaactagatagyagtgatagttgtacaatgttgtaaatctacttactgccactaaattgtatactttaaaatggttaaactggttacatgtattctattacactaaaaaaagtttctgttctaaaggctttcctaaaaatagatgttagatttccccaaaatacaacagatttagaaataaaatagttatactgcttttgtatgctaagagttgacaattttttcagtaaatattttagggtttgcaggccctccttctcgtttttattactcacctatgctgatgtagcatgaaagcaaccaaagacattaagtaaatgaataggtgtgactgtgttccgataaaacttaatt

SEQ ID NO: 708188 - DNA, 591 bp, Homo sapiens
tcctcaaggagggaatgaatgcgtgcagagacctcagcccccaaaagccccagccctgcgccacctcctcctcttttccgggggcacggcctgggatcccccatcccccacttccagcccaggctggagggaggtggaggcccagccactccacttcccgaggcccaagcccacagcgtcccgaccttggacttgtctcctacagcggctccagccgacgctgttgctggcgacactgagcgcggcctttggctcagccttccagtacggctacaacctctctgtggtcaacacgccgcacaaggtgggcacaaggtgggcacaaggtgggccgggcagcagctgaccggggtcgtgggtggaaggtagccgccatcttcctccgtggaggctgccatcttgcctgtaggaggcrccatcttgcctttgggagcagccagcttgccctagtaccctggatgctcacccctggagaccagggcgtggcaggaggtgtttccccctggagtgtcgtcctttccgggcacattgggatgctgggggacctgttccattttccagcccagtctttttgggcctcaggtcccactg

SEQ ID NO: 708189 - DNA, 647 bp, Homo sapiens
aaatctcattaaataactaagagatttttactttccaatttcacatgaggcatttttttgggggggaaggggggtccaaagttagcaagttccttaacatgaagatgtaatacaataaacccaataaactatgttttgctgcaaacccatgtgcacagattgaaatgaaggcctgctgggatctcacattacttgatttcccctaaacagatatgcatatgaactgaggaaaaaggaagaaccttgtgaaataaaaggtttgttcccttacaggtcaagggtataggtcattatgtcatttctacatccccaacactcctagtgcactttacttagtaaatgcagcaggtatccagtatctgtatgaacaaagtattaaattagttttgacctgtaatggattttagtccattagtgccattttacagaggatgaaattgaggctacaacatttcaacatgctatgactacgtatctaatttttgtatacagccagtattataacccacaattcttaattcccagtagagaaatctttcttcccatgagtaagtagcatttattgagcatttactaggaataaagcactttgtatccacgatgtcgcctcctgaggaaaaaacctccgaaagatatactatcmccat

SEQ ID NO: 708190 - DNA, 1069 bp, Homo sapiens
tttgcccaggctggctagagcactggccttgatccgcgcgtcccagcgacccctggccgggcacccgacccgccaaaggaccccgatcttggcagccaacctaatttcttcagagccgctaccctggggccaccactccctcctagcgcccctcactgcaaaccctaggaggcccgggtcttgcccactgctcctgcccctgcccggggaccccttttccagccttaggtgtcctctaaactctcggtcgactgaacccaggcctgaccttccttgtcgtcccagtgtcccccattctcgatcccggggccccaacctcccatcggctcagtcccccgcccaatctctgccaggcccggagctttaccagacccctcacccacactccaggctcactacccgttcctgggcctgggccccccttgcacgagtccagggccagcygtcctcgccttctgcccgcccccgtccttcgttcctgggagccggccctctccgcggaccaagcggccccgagcaggcgccgccgcccgggggactccgactcagcccccgcgacctacctcggccgacagtcgggggttcccaagcggccactcccggccggcgccgtcccctggcggagccgccgcgctccctgccgtccgcgcagtctggcctcgctcggggccactcctcgtagcgctggagctttacaaaatattaataataaagaaggcagaggagaaaaaagaaagccttcgctccccaactcccaaatcaatttttcaagggggtggagcagagggatttgtttcgaagacgatcaaaacttctgcgaggggcccgcggggcggccgggccggggagccggggcctgagctcggggccaggcgcggcgcggggcgcgggccaggggcgcggagccccggggcgcgcgggggggcgggacggcactatttgacgtggagccggcggcgcatcccggcgcagggataccggccgcggggttcaaatgtcaggaagtttcgggaggtgaggcggcccgtatccctccgccgccagccccagctctaaacccggcggctca

SEQ ID NO: 708191 - DNA, 661 bp, Homo sapiens
tgctctgaagctcagtttctgcagctgtacaatgggtatgatactacttacatcgtagaagtgttatgaggagtagtccatctttagaagcatctaacatttgggacatggaggagaccagtgacttgtgagaactgtggcaggagrgacctgggtgggcagacacagatgcctctgtgtctgggaggctgtagacaccaggcaactgcattccccttattctctccatgcctcaccccaaatacactggtcaggggtgtccaagctagaaggaccttggacactacccccggctgaaagaagtgtcaacctgctcctcaggcacagggctgggactagagtcctgccgtccagacttggtgggactttacagtgattaggagaaccacttctggagtccctctcagatccagattcaaatcccagctctaccacatcacttcacctctctaatcttgttctctcgtccgtcagatgaaaatactactaggccacatcttggagtcatgctggtcaatatggtagccactggctatgtgtagctatttatttatttatttatttatttttgagatggactttcactcttgtcacccaggctggagtgcaatggcgtgatctctgctcactgcaacctctgcctcccaggttcaagtgattc

SEQ ID NO: 708192 - DNA, 661 bp, Homo sapiens
tgctctgaagctcagtttctgcagctgtacaatgggtatgatactacttacatcgtagaagtgttatgaggagtagtccatctttagaagcatctaacatttgggacatggaggagaccagtgacttgtgagaactgtggcaggagagacctgggtgggcagacacagatgcctctgtgtctgggaggctgtagacaccaggcaactgcattccccttattctctccatgcctcaccccaaatacactggycaggggtgtccaagctagaaggaccttggacactacccccggctgaaagaagtgtcaacctgctcctcaggcacagggctgggactagagtcctgccgtccagacttggtgggactttacagtgattaggagaaccacttctggagtccctctcagatccagattcaaatcccagctctaccacatcacttcacctctctaatcttgttctctcgtccgtcagatgaaaatactactaggccacatcttggagtcatgctggtcaatatggtagccactggctatgtgtagctatttatttatttatttatttatttttgagatggactttcactcttgtcacccaggctggagtgcaatggcgtgatctctgctcactgcaacctctgcctcccaggttcaagtgattc

SEQ ID NO: 708193 - DNA, 661 bp, Homo sapiens
tgctctgaagctcagtttctgcagctgtacaatgggtatgatactacttacatcgtagaagtgttatgaggagtagtccatctttagaagcatctaacatttgggacatggaggagaccagtgacttgtgagaactgtggcaggagagacctgggtgggcagacacagatgcctctgtgtctgggaggctgtagacaccaggcaactgcattccccttattctctccatgcctcaccccaaatacactggtcaggggtgtccaagctagaaggaccttggacactacccccggctgaaagaagtgtcaacctgctcctcaggcacagggctgggactagagtcctgccgtccagacttggtgggactttacagtgattaggagaaccacttctggagtccctctcagatccagattcaaatcccagctctaccacatcacttcacctctctaatcttgttctctcgtccgtcagatgaaaatactactaggccacatcttggagtcatgctggtcaatatggtagccactggctatgtgtagctatttatttatttatttatttatttttgagatggactttcactcttgtcasccaggctggagtgcaatggcgtgatctctgctcactgcaacctctgcctcccaggttcaagtgattc

SEQ ID NO: 708194 - DNA, 729 bp, Homo sapiens
aattacatgaattctgtatcaccgaccattcacacacgctacatgtgcacacacacaatctacaaacaatataatgttatgaagatgtggaactataacattaaaaaaccaattataaactagaaatcttrtttaaaggaattatttatgatctgaaacaccattaatattttattacataatgaactataatgaattcatgataaagtggaaatatttccagataaaatagacaaaggacaagaactggaatttacaaaagaaaaatcattactatagcttataaaatagctttacgtgaatgataaaatgtataatatcagtgactttaaaatttataattttattttgtctttatcttaaagaattaagggaaacgaggcaaaaaaatcacattttacgtgtttatatttaagtttgctatttgtaaatatatctttgagaattactatgacacatttgcaaggtaatgtaaagtcaatagagtctgtagaaaattttgataaagttcaaaagtttaataattatgtcaaatcgcattccagaagtttgtcccaagctacatttcaacaacaacaaaatagtcatatatgttttccctcactctagactattctgatactgaaacctgattatttaaaacaaatccaacctggtagatacaaaatggcattttttagggcccaagtgaacattttcttctgtcatgtatgtgctatctgtattaat

SEQ ID NO: 708195 - DNA, 1826 bp, Homo sapiens
  misc_feature 517, 518, 519, 520, 521, 522, 523, 524, 525, 526, 527, 528,529, 530, 531, 532, 533, 534, 535, 536, 537, 538, 539, 540,541, 542, 543, 544, 545, 546, 547, 548, 549, 550, 551, 552,553, 554, 555, 556, 557, 558, 559, 560, 561, 562, 563: n = A,T,C or G
  misc_feature 564, 565, 566, 567, 568, 569, 570, 571, 572, 573, 574, 575,576, 577, 578, 579, 580, 581, 582, 583, 584, 585, 586, 587,588, 589, 590, 591, 592, 593, 594, 595, 596, 597, 598, 599,600, 601, 602, 603, 604, 605, 606, 607, 608, 609, 610: n = A,T,C or G
  misc_feature 611, 612, 613, 614, 615, 616, 1726, 1727, 1728, 1729, 1730,1731, 1732, 1733, 1734, 1735, 1736, 1737, 1738, 1739, 1740,1741, 1742, 1743, 1744, 1745, 1746, 1747, 1748, 1749, 1750,1751, 1752, 1753, 1754, 1755, 1756, 1757, 1758, 1759: n = A,T,C or G
  misc_feature 1760, 1761, 1762, 1763, 1764, 1765, 1766, 1767, 1768, 1769,1770, 1771, 1772, 1773, 1774, 1775, 1776, 1777, 1778, 1779,1780, 1781, 1782, 1783, 1784, 1785, 1786, 1787, 1788, 1789,1790, 1791, 1792, 1793, 1794, 1795, 1796, 1797, 1798: n = A,T,C or G
  misc_feature 1799, 1800, 1801, 1802, 1803, 1804, 1805, 1806, 1807, 1808,1809, 1810, 1811, 1812, 1813, 1814, 1815, 1816, 1817, 1818,1819, 1820, 1821, 1822, 1823, 1824, 1825: n = A,T,C or G
tcacaattcatcagcttaactccatgcagcacttccaataaagattcatcactttcagcacatctaatgattattgtctcaattttatatcaagataataaactttctcataactagatgctttcatttcccctttttccacttgttttgttaaaataaggtaaaaagcaataaaattttccaaataatttttgaaatttttgccaaaagtggcaaagtcacagttctgtagcaggtgggggttacttggcaagacagcaacacaaacagcccaaaaaaggcattcatcaaatgatgttcgtaagtcaaaatccagtatataaatggcatttcagaggtgacacgtatagtattccatgtgccagttatttgaaaagtcaatgatataaaagccaagggctaccagtacctgtttactaaasagtacatattaaacacactaacatatgaaaaaccaagttcttaacttctgtattatactaggtatacaataaggagtattttattttgtacctannnnnnnnnnnnnnnnnnnnnnnnnnnnnnnnnnnnnnnnnnnnnnnnnnnnnnnnnnnnnnnnnnnnnnnnnnnnnnnnnnnnnnnnnnnnnnnnnnnnaaagcccatcatatacagccaagggcttccagtacctgtttcctaaagagtacatattaaacacactaccatatgaaaaaccaagttcttagcttctgtattatgctaggtatgcaataagcagtattttattttgtacctactatttactctgaatggctgtttgttgttactgttgttttagagacagggttttcaaggctggagtgcattggctcaattgatcatagctcgttgtagccctgaactctgggatcaagggatcctcctgcctcagcctcccaagtaactgggaatacaggcacacgccaccaaacccggcctgaatggcagcttttaagagagccatcaatacactagagcaaatatttataaatgcagcatggtttaattctactatactacaagatttctttttgcaagaagacataaaaaattttttcagggaaataaagtgaatcgaggaatggttgacagcgttgaatatatttagctacttagggtggaaaagaccatgataggggcatttagaacaaggcaaatcaacaagcaattaacaccagaaggaatactatgagttgtggggcccgagaataccaaccggaacacagtgtattcttaaagcaggggatgataaataagagagtcccacaaaaagtgatgctgatgtttgcagtgataattgtaacatgaattggagtcaggcaagatacctgtaacatggaaagagtctaaatcagttatattgaagagatagtttgagtttgtttctttgctcttgcaagggtttaaaaaaattgtttttgtttcttttttaactggagaaaatgcagttgcggagaaatcatgcgtgattataaataggtattcaataaatgtacaaataacgtgtaagatcctcattatctacctttattgtgcattttgtataatgttagttaagaataacatatagcatgttgcatcaatgtttgagtctaaccaagtgacttttaagccataaatcagacatagcttattcaacacaatcttgatttaactgtggatttgcagttcaatgtactgcttgcacttatagtatatcgcatatttaatatttctatttttaannnnnnnnnnnnnnnnnnnnnnnnnnnnnnnnnnnnnnnnnnnnnnnnnnnnnnnnnnnnnnnnnnnnnnnnnnnnnnnnnnnnnnnnnnnnnnnnnnnnt

SEQ ID NO: 708196 - DNA, 628 bp, Homo sapiens
caaaataagcaattgatccatgttttggccaacagagctgtgctaaatgctgggcacatttggaatgactgggggataggggaaggatgcaggaatgaagaagagaaaaatggaattgatatttcaaaataaaatgcaagtaaatctatgacatatacttacataatagtggctcacatgtttagtactcactgtatgatggacattgccaataaaagatcagtaagcccagttcctcccctctcagagctagtaggtcccaggacggtggagacagcgagcttctcagagarcagcttttctgcaactcatggagggtggagagagaagttaatgtacccaaagtgagagacacagatggcacctacaggagcctttccattctcaggccacccagaatctcaattagtcccacacaatggtgtagaagctctcatctaacttggttcattgaatgagtttgaaaataatggtaatactgtttgtcagtaaagagatgctggcaaaatactccaaaagtttctgctcttaaagagttaactacttcccctgaatacctatttgtattttttaatagcttcaaaataccttatcacaggcaatggaaaaacaacaacaacaacaacaa

SEQ ID NO: 708197 - DNA, 628 bp, Homo sapiens
caaaataagcaattgatccatgttttggccaacagagctgtgctaaatgctgggcacatttggaatgactgggggataggggaaggatgcaggaatgaagaagagaaaaatggaattgatatttcaaaataaaatgcaagtaaatctatgacatatacttacataatagtggctcacatgtttagtactcactgtatgatggacattgccaataaaagatcagtaagcccagttcctcccctctcagagctagtaggtcccaggacggtggagacagcgagcttctcagagagcagcttttctgcaactcatggagggtggagagagaagttaatgtacccaaagtgagagacacagatggcacctacaggagcctttccaytctcaggccacccagaatctcaattagtcccacacaatggtgtagaagctctcatctaacttggttcattgaatgagtttgaaaataatggtaatactgtttgtcagtaaagagatgctggcaaaatactccaaaagtttctgctcttaaagagttaactacttcccctgaatacctatttgtattttttaatagcttcaaaataccttatcacaggcaatggaaaaacaacaacaacaacaacaa

SEQ ID NO: 708198 - DNA, 628 bp, Homo sapiens
caaaataagcaattgatccatgttttggccaacagagctgtgctaaatgctgggcacatttggaatgactgggggataggggaaggatgcaggaatgaagaagagaaaaatggaattgatatttcaaaataaaatgcaagtaaatctatgacatatacttacataatagtggctcacatgtttagtactcactgtatgatggacattgccaataaaagatcagtaagcccagttcctcccctctcagagctagtaggtcccaggacggtggagacagcgagcttctcagagagcagcttttctgcaactcatggagggtggagagagaagttaatgtacccaaagtgagagacacagatggcacctacaggagcctttccattctcaggccacccagaatctcaattagtcccacacaatggtgtagaagctctcatctaacttggttcattgaatgagtttgaaaataatgrtaatactgtttgtcagtaaagagatgctggcaaaatactccaaaagtttctgctcttaaagagttaactacttcccctgaatacctatttgtattttttaatagcttcaaaataccttatcacaggcaatggaaaaacaacaacaacaacaacaa

SEQ ID NO: 708199 - DNA, 868 bp, Homo sapiens
ttcctcagagttttgaaattgctccctattgaacgagcctattctctgtgcagaggaagctttttacaccttctataggcgtggaaggcagcaagaatagatctctggattggattgtttctgtttctccctccttctctctctcccttccttccttcattcctcccttctttttttcttcttgccattaataagcgttttttgaaccccagagttgaccacatatttgctcttctacctttactttgggtttctttggaagatacatacaaagatggtatctcaaggtccctggaagagtcaaggcagagaagatcctctatacatgaaaaggaggcaaagaagacatggagaaagatgatgtcctattcttagttacaagtttcaccaaattagtagtgagaggatcatacatttacaagacctgaagatggtagatgctcttgggratatagcagggtgggcaggaaagaggcaagtggagactcaagtgcatctcttcaacacacttagactttaaaactccatttcagctggcaaagtttggcagtagatatagttttgtgagaagtaaaaagaccagattggagccatgaaaaggaataaaattattggagtttcccagagccagatctaggctttaagtgggaaggagataattcttcacattcatatcttcattcttttgcccagttcagaagttgcgaaaaatgaaccaattgatggccaaagaccaaatctagaacaaagagcattcactctattttttttagatatatgaggatagagaatgaatagcttaacaagggctcatcagacgatcaagaagtaggtcttaatcctgctatgctcctggctttgtgatagc

SEQ ID NO: 708200 - DNA, 516 bp, Homo sapiens
aattatagaatgcacattttaaaaatccacatgaaacatttacattaatggattctattctgggacacaagaatagtcttaatacattttcaagaattgcaattcttggaaagtttttgtctgagtgcatcctctgaccaaaatgtacttaaattagaaaccattaacataaagataactagaaaatttcaggatacaaatttatagctacaaaaaatatattagaaaagaaaattgatgatcattctcaakattttatctcaaaattctgtaaaaaaaaatcagatgaaacccaaagaaagtgtaataggaacttagaaaaataagtgtagaaaatgataaaacagaaacctaacacaaaattgttaataaaaataggcaagatcagaagcttttactttcaaagtagatctatttctagcaagactaatttagaaaaaatagaaagcaaaaaacattattagaaatataaaataaaacattaatgataattttacagatcttaaaaaaaatatt

SEQ ID NO: 708201 - DNA, 496 bp, Homo sapiens
gtactttcaagcttaacagtctttgggacacagcaagctttgcctttctttctttcttgttttcattttgacactctttgatgagcacctagcttttactcttacactcatgggctggagtattgtagcaggaggaaggacctatgcagtggcaggtaattgggcattggtagatgtggatattgacaccaggtggtcccaacaaatgggctggtttggacatgagaaaggtattgaaagtgaartgagccaggcttgttaaatatagcaagatatatgaaacagcaacccaaaataacaccatttgtagccattattcacatatgcccttaatttgtcaatctgattggatttttatgacattctgatttcccttttgtttctcttttatatgaagcaatctttacttgctgaaagagcctctgcagacttaaatagtgatcaattagttgggtccaccttcagcaccacctatagtaaaagagatcaccctact

SEQ ID NO: 708202 - DNA, 2197 bp, Homo sapiens
tttgtcaaaacaaaaaatctgtacaatacagagtatttgtactgtacaaatacactaatataaatgatgaacttcagttaaactaatgtattgatattggttcatcaattgtaataaatatattacactgagaaaaaatgttaaaatagggcaaacggtgtggggtaggagttccagcctatggaagctctgcattttctgccatttttggtaaatcaaaaccttttccaagaaagactctgttaaaaacatttattcctctctgatattcctaacaaattgaggtcctgaatcattgcaaaggacacttgactctgtaatttatcctcatattttgtcatcaacaaaattccttcaataagaagaaaagtgttatggcttctatatagccataacaatattaaagttctttaacactttctagataaccttggtatgtttttaatactctcattttaagaatatggccagttttatggagtgcagataggtttatttctcaaaatttgctaatgtcagactttagtcatgttaattaaaggtaaaacattgttgtactggattaaaatgtttttaatgctgtatgaaaactctagattttattttgggaatccatagtattcatagaacattaaaaataagctgaataaaaaacataatatcacccaacttcgggttaataacagtattggaaggatatgttgatagagagacagctatttatttgctctaacttgaatttagggaagtcatcgaattcatgtatttaaattctagtaatccttaagaggaaaataagtttgcacctgtgcagtgctgtagaaagataaaagaatatctggaaaaggagtcatcaaaacttccaaaaaagtcgtataaatttagatgataaagcatacaagctttaaagtaataaacacaattcaatctttagaccatcacctgggaaatgacaaagatgtagacacaatgagagaagataaatactattaaaagcaaaataaggagacatgaaaagtttgttttatctttacaggaccaaaagttacaaataccacatcaaaaagatgaawgactgtttgacaatataaaatagaaatcaagaacaattaaattatgaaagggctgtgttgtttattaactgatctatttgactacatgtcaaaaagaataactacttaacgtaagttaaaaatttgtatctacctaacccaaaaagccgtcccttccccattccccagaaaccaaattatgcatttagcataagcagaaaatacattattttctgcagaggttcaggttaagcagttacagctgtctggacagattcagagaaagacacaaatcataaagccttcagatgagcaaggtaaatattaacaaatataatggaaatccgtcttactccatttcccttttagggtttttatcacttgaataaatgaaatgttaagagaatacaggtggtatgatctgacatttgagcaataaaacagcttaataagagtccattgagaggtactgaggaataaagcacacagcatagtattaatcacagacattaaaagagaagactgttgcattgtttggagcatgaatgcaattttggtttgttattgtttttgtttcatgaatagaataattttcaaaataaatgaagtttgttagtagtttcaacctccctccctacccaaactcagatattcagtttcatttttctaatgctccaaaattgtcttcattctttccattcatggtattactatagtattcaaatttttaaaaacactcaattgttgaatcttttcagtgtcaatatattaaaattaagcacaagcaagcattaattacattttaaaatgatgaaattgaaactaagaatactcaagaaacttaattttgggcaacttaagccagaaacaaaaggacaggtgttcaaatccatgtcagcctgggcccgaagtacactcctcaccatccctctaaataatctcttgttcctctctcaacctgtccatgcgtccttcaatgttactttcttctctagccctgataaaaatataaaagtactgattcctatataatattaatttatagtgcatactattcctttatatgaaaagaatgtgaattaaaagtaatatttaaagaaagaaggttattgtgaataaactaaaaacaaaaaggcatatactat

SEQ ID NO: 708203 - DNA, 987 bp, Homo sapiens
tttatctcagatcagctatgaaaacaagtacatcttttaggggaatgcaattaaatcttatccttaaaaatatgtatctcaaagccataggggaaaagttttgctatgcaacttattttggaattttttttacttttaaaaactgaccaagtataaatataaattttmaaggagcataccaaaatataataaatctggaatctgtgagtaacatagctatcaattttgtctatttttacctagaatttccctttttggttctactgttaatgggctgtcttctgttacttaataaatgacattagctgtacctaagtccacccataatactgaatcttttcttatgaatatagttccagtatatgcatactacttttaaatttccccttatttctataatgacaaaatgtttatttggagtaagtctcagcactttaattaatttttaatcatttaattttggtaaaaattaagtttcataagcagccatcacatttatgtcagtgataacaaataacattcttatggcatttgcatagtcattaatggactaatatttggttgaaaatagagcatatttaagaaaaattggttattttctcaaagatatttgaagtagaaaggcaagtatcacaaaaggacaaaacgaatgaaatgcctgttcaatcttgtctttggaaaaatgtaattttcaaagggcttcttgaaacactgaatatctgaacattttaatgttgtgtttggaaactgatgctaaaacccaagattcaagtggtattttagaaaaaaataatttgatgccagaggacaagaaagattgttgataaagaaactaattaggaggccttaacatccttgaagggtaaaggcacaggttagcaaaagcttgagcaaaggtgattctgtataaatggaaattaaaagatggatatcaaaaataagcctcatcaggcttgtggaataaagagatactgtttcaaagctgtt

SEQ ID NO: 708204 - DNA, 987 bp, Homo sapiens
tttatctcagatcagctatgaaaacaagtacatcttttaggggaatgcaattaaatcttatccttaaaaatatgtatctcaaagccataggggaaaagttttgctatgcaacttattttggaattttttttacttttaaaaactgaccaagtataaatataaattttaaaggagcataccaaaatataataaatctggaatctgtgagtaacatagctatcaattttgtctatttttacctagaatttccctttttggttctactgttaatgggctgtcttctgttacttaataaatgacattagctgtacctaagtccacccataatactgaatcttttcttatgaatatagttccagtatatgcatactacttttaaatttccccttatttctataatgacaaaatgtttatttggagtaagtctcagcactttaattaatttttaatcatttaattttggtaaaaattaagtttcataagcagccatcacatttatgtcagtgataacaaataacattcttatggcatttgcatagtcattaatggactaatatttggttgaaaatagagcatatttaagaaaaattggttattttctcaaagatatttgaagtagaaaggcaagtatcacaaaaggacaaaacraatgaaatgcctgttcaatcttgtctttggaaaaatgtaattttcaaagggcttcttgaaacactgaatatctgaacattttaatgttgtgtttggaaactgatgctaaaacccaagattcaagtggtattttagaaaaaaataatttgatgccagaggacaagaaagattgttgataaagaaactaattaggaggccttaacatccttgaagggtaaaggcacaggttagcaaaagcttgagcaaaggtgattctgtataaatggaaattaaaagatggatatcaaaaataagcctcatcaggcttgtggaataaagagatactgtttcaaagctgtt

SEQ ID NO: 708205 - DNA, 1714 bp, Homo sapiens
ggctcacacctgtaatcccagtactttggtaggctgggacgggcagatcacttgaggtcaggagtttgagactagcctggccaacattgtgaaaccccttctctactaaaatacaaaaattagctgggcatggtggtgtgtgcctgtagtcccagctacttgggaggctgaggcaggagaatcgcttgaacctggaaggcagaggttgcagtgagccaagattgcacccttgcactccagcctgggtgacagagtgagactcagtctcaaaaaaaaaaaaaaaaagaaaaagaaaaagaaaaagaaaaccaaaaaacaaaatgagcaactcccattttaaattgcctgccatgctgagtagagtgaatcatccctctgtccagcacgtccatgctgcatattcttcccgctcattagtcacttggtagctgtcttggctgtcagatcaactgctgaggtatcgcagtgcttatgttcaggtaacccttacttcatttaataacgacccctggatgcaaaagtggtgatgcttaacatcatcacaacataattattattaacaataataactgagaataaaatagaacagttgttataattgttctattttattatcagttattattgttaacctcttaactgtgcttaatttatgcattatactttatggtggatatgtacatatagaaaaatccatagtatgtatagggtttggtactatctgcggtttcaggcatccactgggggtcttgaatgtatcccctgcaaataaggggggggactagcgtttctgtcttcaccaggcctagatgtgtcttgcctgccgaggaaagatgtatagttaagatgtgacaattatctgtcagttggtggagtttcacccacttagttggycttcttactgtattttgagatatctttatttacaggaggcaaaatagaggtcctgggtcagtcctcagccctccacccccagcctttatgcctaggagactttgagttgatggggaaagatggtttctgcccttgggggacccacacagggtccttagtatagagcctggcgctccacagggacccggtattgaatatgggatggagaggagcaaagagatcctgccagggaggttgtaggaagatcaatgggtcacagaagctacagaagggcacacagtaaggccgtgagagtgggtaaaaaggagtgtgggagctctcacctgctctgtgctgggatgtgggtactggtctcctgggagtgagcagttgggccctcacccagttggagggcccaaccacaaccacggcaaatcccaaaggccaggaacagggactaatgtggggtccagggataaaagcagatttctgagatacagaaagcccagggtctggcctaaggggcagctgatatgcccaagagcaagttcaagggcagagcaagttcgagtgtactgcagacagccttgggacagggacatccaatttcatgggccaaggagaacagtggaaagtccaggtagtcaggagcccttgaaagtctagagggtggtgggcttggttgggatgtggatggacatatatatatatgtatatacatatatacacacacaccatggtgtgtgtctgtgtgtgtatatatatatatgtgtatatatatatacacacacatacctgatatgttatacctgacatatgttatatacatacatacatatac

SEQ ID NO: 708206 - DNA, 650 bp, Homo sapiens
tacaaaattagccgggcatggtggcgcatgcctgtaatcccagctactcgggaggcagaggcaggagaatcactcgaacccgggaggtggaggttgcagtgagcygagattgtgccactgcactccagcctgggcaaaaagagcgaaactctgcctcaaaaaaaaaaaaaaaaaaaaaaaaaaaaaaaaaaaaaagagggctggtggcccccgagatgagatatttacttttgttcaattgttcattcttttgttcatctatcagacttttaatgatttccttttgtatgccaggctacgtgcttaaaaaaagaaaagcttcactatgctttaagacacaagttcagtaaataaataagaaatgtgtgcttagtttgttccctaaggaaagctggacttacgggttgtatttgtaatagttgtgtgtgtggattaagtaatgtgggtgtgaggaataagtcacaggtgtggatatatcttatgtgtcctgttaaatctggcttcctaatgggaacaaaataaggtcttatttaaaaaattagtaaacatatttattggaagtataattgtgtacaataatacactgatcacgaggctgggtgtggtggttcatgcctgtaatcccagcactttgggaggtggaggcgagt

SEQ ID NO: 708207 - DNA, 650 bp, Homo sapiens
tacaaaattagccgggcatggtggcgcatgcctgtaatcccagctactcgggaggcagaggcaggagaatcactcgaacccgggaggtggaggttgcagtgagccgagattgtrccactgcactccagcctgggcaaaaagagcgaaactctgcctcaaaaaaaaaaaaaaaaaaaaaaaaaaaaaaaaaaaaaagagggctggtggcccccgagatgagatatttacttttgttcaattgttcattcttttgttcatctatcagacttttaatgatttccttttgtatgccaggctacgtgcttaaaaaaagaaaagcttcactatgctttaagacacaagttcagtaaataaataagaaatgtgtgcttagtttgttccctaaggaaagctggacttacgggttgtatttgtaatagttgtgtgtgtggattaagtaatgtgggtgtgaggaataagtcacaggtgtggatatatcttatgtgtcctgttaaatctggcttcctaatgggaacaaaataaggtcttatttaaaaaattagtaaacatatttattggaagtataattgtgtacaataatacactgatcacgaggctgggtgtggtggttcatgcctgtaatcccagcactttgggaggtggaggcgagt

SEQ ID NO: 708208 - DNA, 650 bp, Homo sapiens
tacaaaattagccgggcatggtggcgcatgcctgtaatcccagctactcgggaggcagaggcaggagaatcactcgaacccgggaggtggaggttgcagtgagccgagattgtgccaytgcactccagcctgggcaaaaagagcgaaactctgcctcaaaaaaaaaaaaaaaaaaaaaaaaaaaaaaaaaaaaaagagggctggtggcccccgagatgagatatttacttttgttcaattgttcattcttttgttcatctatcagacttttaatgatttccttttgtatgccaggctacgtgcttaaaaaaagaaaagcttcactatgctttaagacacaagttcagtaaataaataagaaatgtgtgcttagtttgttccctaaggaaagctggacttacgggttgtatttgtaatagttgtgtgtgtggattaagtaatgtgggtgtgaggaataagtcacaggtgtggatatatcttatgtgtcctgttaaatctggcttcctaatgggaacaaaataaggtcttatttaaaaaattagtaaacatatttattggaagtataattgtgtacaataatacactgatcacgaggctgggtgtggtggttcatgcctgtaatcccagcactttgggaggtggaggcgagt

SEQ ID NO: 708209 - DNA, 650 bp, Homo sapiens
tacaaaattagccgggcatggtggcgcatgcctgtaatcccagctactcgggaggcagaggcaggagaatcactcgaacccgggaggtggaggttgcagtgagccgagattgtgccactgcactccagcctgggcaaaaagagcgaaactctgcctcaaaaaaaaaaaaaaaaaaaaaaaaaaaaaaaaaaaaaagagggctggtggcccccgagatgagatatttacttttgttcaattgttcattcttttgttcatctatcagacttttaatgatttccttttgtatgccaggctacgtgcttaaaaaaagaaaagcttcactatgctttaagacayaagttcagtaaataaataagaaatgtgtgcttagtttgttccctaaggaaagctggacttacgggttgtatttgtaatagttgtgtgtgtggattaagtaatgtgggtgtgaggaataagtcacaggtgtggatatatcttatgtgtcctgttaaatctggcttcctaatgggaacaaaataaggtcttatttaaaaaattagtaaacatatttattggaagtataattgtgtacaataatacactgatcacgaggctgggtgtggtggttcatgcctgtaatcccagcactttgggaggtggaggcgagt

SEQ ID NO: 708210 - DNA, 1719 bp, Homo sapiens
tcctgttgcagtgcccacactgtgcatgcacaaattgtctgccttctcatatacaactttctcagggtgctcttttcttcttctctctcacatgcagaaagggaaaagaagagagcaaaactgtagccattgaggcaaagatttggaggaagaagagcagaaaagatgaatacaaatgtttggaacagggatagaattgggccaatctagtgggaaggaagggctgtaagctgtggaaccaggagtgaccagaagccttgtttggtgtcctggaggaccaaagtgggaaggttcgacaacaggactcaaggaaaagagatggatggtgggagcagcttagaactttctgtcccaaagagtaaacttattcacatagaattgtgaactattacacgcacagaaaaagagtagccatggagagaatgggctacggagttagactgactgggatttgggatcaggcttctgccacttacagygtgattttggacaatgtaactaacctttaaaagtgttggcttattcatttgcaggattgggctaacaatgcctagctggcaggactgtcctgaggataacatgagataatgtatggggaacaatgcttggcactcaatgtaagctagttattgtctatattattttatatacatttttcaattacctcccctaattagttcaaattcaccagatttgaccctagaggacttcactacagggacagtcaggcaattgattactattaccattattctaataataatttgaagcaatcaaacagctatgtttatgtcattgggcaaaataatcactccttcacctggtcactggtttatgtaagtggaaggatcccagactttgaagtcacactgacctgggttcaaatcctgagtctgctactcaccaggaaaataattttaaatctggaaactcactttcctttatagtaatgtgtgagatcacttctacctttccagagaattgttattactaaaagtgataacaatggatttagtgtggtgtcttgttagagtgccaggtagttggcacattgtagtgatattcaattttcagtatttcacagttttgttgtcattcagtggccagtggaacttagtgtggtgaatggagaaaatgttgttctaagtattagacaaaacaagaactcagagtaggtaagaatgtgtgcaaagttttatgacgaagtggtcacagaatcaacactagaacctcgaatatagattagcagagctgggaccctatcctctactcatcaagaacttatagcttcatgttgttggtaaagaaacagcccagaaatcaaatggtttcgccaggaacctagacttcacctgacatcaaggctactcatctctcctgtgttatacggtttcagtggaccactttgatgcccaaaagagcttgaaaataaaactttaagtatgacaatattcataactattgaactcagcacaagaaataatttaaattgtatggtcatagccaatattttaaaagtataatagcatgagtatttcagggtgaaaactcaacaaaatgtttgtgatatgtgttaattgaggcatagttcacattttaatagcctggctactaaatgatggtcaaaactcaataatgtgtttctgacataagtgtgttcaattacctttttccatacttttatccatcattttccttctccttaaaatatgtttctca

SEQ ID NO: 708211 - DNA, 1060 bp, Homo sapiens
atcaggaaaagattttacagagaagacaatcatgaagctgagtcttgacagatgactttgagagaactttacaacaaaaattttagtctcagaaatgagactggaaaaagactggtgtcagtacctttaaattcaaattttactcaatgttcacttggtttccagaacttcactatcatctgtgtaagcctactgacaccaggacacatgtgagtcagcctcagcagtgcacagtcggccaaatactgttcagcaacctgagtaatatcaaaattgctcagctattttggattgtgtttgaagagaatacatagcccacagttaatgttttttaaaactttcattttttttctcccgtttattttcttcaaatgttggaacttgtctggtaccattctcctcaaaaactttcttaaaaacaaaataaacaaacaaaaacctcatctacatcaggactgagcattccagttattctatactttccacctatctttcttattctgtatcaaaaccccccaaaatctggcctgacaatagcagaacactactcaggggccaagaaaggcaaagaaactatgcaaggaaaactaacatcatgctttttaagattaagggatgcaaaaatctaagaacattctttggttatttttgtcttcaaataattattacatccaaatatctactcttctaaaacagyagatttatcaaaaaatatgtataactgtgacttctaatcaacctgcttcctgagaagttgaagactttaaaaaaaagagaaaattgtgggaaggcagataagaaccagattgtggaaggctttgaatccaagcaaagaaacttgtctttgtccctttgagctcctataacaaaatatcttagactgtatcatttataaaaaacaaatttattgcttacagttttggaggatgggaagtacaagatcaggataccaacagattcagtgtctggtgaaggctgtctccccacctcatagatggcgccttctcactgtgtcctcacatggcaagaagggcaaacaagctccctcaggcctctttta

SEQ ID NO: 708212 - DNA, 704 bp, Homo sapiens
cgtttcctgcattcatttagggcccaattcaaatactttttctgcccttaatgcttctgagatgtccctagtaaaattcaatccttctctcctccatatgtccatataattcagttttacctctattgtgaaatatgaatatatagtgtaataaaaatatgtgaatatatatgtttgcttcctccaatgaactatatggtccttgaaaacagagattatggtttattcagcttattttcaacccttacagtacctagcacaataccgtgcttataattcagcagtaaagaaatgtattttagacttaattgcttgtgtayaatttcgtataatttttatataatccaggtctgtattgtatcccactcaatctgatgacatgctctttggtgacagagttttatgaggtttcagggtacatgattttcaatccaatatttaaacatacttgaaaaaagtgtaactgaactgttggatttatgggagaaaggtgtgaagccaaaatgctatagaaagaagaggtaagtgatccagtacagaaattctacaaacaggtatttctagcatggaatatttgaagacattggtaatttgatatactctgatacaaatatgaaattgttatgtgtattttaatatacttgtcatacctgtacaatagtctacttaaaaagagctagtcaaaatgttgaggataaatttca

SEQ ID NO: 708213 - DNA, 1176 bp, Homo sapiens
cctaaataactcaatatgatatctctgaaagtttttttgacaaattttggggaatgatgatgagggaagagggttagacactttttactaagagataacttagtgccatttaaggaggaacaaaaatgaattatcagaaaaataaaagtaaaagcaagtgcaaaagttctgtggcaaagatgatgacagtaaagcacatttttgtgactcatggtagctttaactttgttcttaaaattctgagtaatttaagggttcacatttgaagaatctactacattatagataacattttatttcaagtcaatgcatttcaaaatttgctattggttttgtattggattattctcagcctacttcattatcaagctctattattttctyaatgcagtttaatgatcttgtggccgagaaggaagctgtgtcttcagaatgtgtcaatttggccaaagacaatgaagttcttcatcaggagttattatctatgagaaatgtacaagagaaatgtgaaaaacttgagaaggataaaaagatgttggaagaagaagtattaaatcttaagacacatatggaaaaagatatggtagaacttggtaaactacaagaatataaatcggagctggatgaaagggcagtgcaggaaatagaaaaattagaagaaatccatttacaggttagtttttaaaatcaggtaagtttatctgtaatgggctttcatttatttcactgcaaactatattttggatatgtatatattgtgtttcctctgcctctcttacagcaatttccttcgtagagttctagaaaaaaagtgacttttttccttttaaatatttaaatttccattattattataacaaaatcaatctttcaaagtaatgattctcactatagagtaaaagggggaatttgatgattaagaccaggtggcataagagaaaactgtgatttagaaattatatgatacttttgaattggtcttaagctacgttgttcattgttcactttttaaaattataaatggattctattactttttataggacaagattacattaatactaacataagtatgatttcaaatttttttaaatcagacaattctgaattcagttattagttttgttgatattgctgataaatattttaagcttcagcctcttttcaacatactca

SEQ ID NO: 708214 - DNA, 1916 bp, Homo sapiens
tttatttaaatgataaaatggtaagacagtgggaggaaagcaatgactgagaagagacatgaaaatgtatctgaccttgagagttgcaacaaatattcccagccaaaccagtctgtttaatgtgctttcatgcatgcaagtttatctgtttgactcaaactgtttaaacttataattccatcatggccactttaaatgtttttggaaacaaatacacatactttcacatatttaagaaaatcaccactctccaatgtttctgttgaatcagacttttacatgatgttgtttaataaaatatggtaggttttgacatgtatgattttatcatataagtagcgtaactcctcagccaaaaatttagcatttgactctatagtagaaggctgagtcctgtacgttatgttctaaagatagacaaaaatctagagattttcttctttcaaagtaaaagcagatgaggcctcccaccaccctctgagccattaaattgttttgccaaagtcacacttttaatttatttgacaaatttgatgtatttatctggtaattgatgtaattcagcaatatgtaattgtatcttcccttttggtgccacgaaatgctaggcaatgccaccttaggagctttgggtgagttacttaatatttcttggttttacttccagtatcaagtagatatggggctagagtggacagctatactgtgtatcttccagctacaaacttctgtggtgattgaatgtaaatttgaggaacatctcattttccaggattccacactagaaactcagcagtttcactcggctccttgtgttgtggcaaactttggttcctctatttcaatgagcaccttcacttttttgatatcccaggaaccaaatgaaaaaataaggagaaaaggcagtggggaaaagaatatcttagtgcagaaaagggaaagcttcttttctgtttctgaagccccacaaggtcacatcctctcaatctggctatttcatggagaatccaggtgacaaaggcagaagacacattttatgcctgtgtctttttgtttctctgtttttgtgttgatatatttataccacagaggtaactgtgatctgatggagaactagaagtagagtcagaagccctgaggaaaatcctgcagcttgcttatatttttaacctgtcttttttaaggattgtgataactaaataagttcatcaatgtatgtatgtagaagtgcttagtacaatgtctagatttatgatttagtaaatgtaattcttacaactaaaaaatgttgagtcaaatcacaatagaatatgatcagggaaacagaacttttaaaactttgagagattttatctgtccaaatagatgtcgaggtaaaggtcttactatagggtggtgtatgggttagatatcagagtataaatgcaatttcctttttccaagattttaatttagtcaaattttttaacaactttatgctttgagtttgttgtaattcagagaaaggcttttccaattctgatattcttaaaaattctctagagtgtgtgtgtgtgtattttatggattcattgacttcaaatacatttttgaactttttgaaatgtatgttctctaaggttcaaggttttgcttcaactttttctccagttggatatccacttacagcaacttttaattgcatgaatgtatagattgctctttcacttcagaaataaccatcatagattattttattgagtgctaactaaaaatttgttttgttttatttaggattctcaaagttacggaaaaaaraaggatgcgatgtatggaaattttatgttgaagaaagacattgccatgctcaaagaggaattatatgcaataaaaaatgacagtctcagaaaggaaaagaaatatatcagggaaattaa

SEQ ID NO: 708215 - DNA, 1290 bp, Homo sapiens
tataattcacctttgaacccctctaaacttggtgctttctgttttggaagtttattarttatcaattcgatttctgtagtccatataggcccattcagatcatctatttctccttatgtgacatctagtaggttctgtctttcaatgaattggttcttttcatctaagttatacaatttatgggcatagaattgttcataatattcatttattgtccatttaacatccattcgatcagaaatgatgatccctgtttcatttctggtattagtaattgtgtcttctttctttcttcttagcctgaattgagaaattttaagattattttcacataaaaacatacatgagcacatttgcaaagacatccctcagttgctgcagcgccagctccaccctcagtctttccagcagcctgcagttctgctcttttacaggaaacttgaggagtacctaaacatctgactctctgcgtgttacatttcatcgctcctctgaactagggcactgagggaaatttttctactgaaaggtaccatcttaatttctttgcaaattagcatagaagagagaatcttgcacttcacactaatgagaacagtgtgtggttttgtgatttgggaacctggcaaggccacgcaagcttcttgctgagcagcagtaccgcactgcctccaccaacccttaacatccccagcctcaaaagtcaaaataaaagtcagagtggacaggtgagtattgggtggaaggatgagaagggataggggaatccatctagctcactgcaggatgatgaaacagagacacagatttgagtgttattcaaggtaccaggaatttgacttatacttgcttcctctccacagaatactgtgaatacacacagagcctgggcagaaacgagatgttacacaacctccaagatatttctacaagtcgtctctcttatccattctttcttttcatgccaaagataaatctgtggcataaacttatatcaacaagtatttgaaggaatttaaatatctattagtaacaaatggtctacatattattaatatccatatggaaatagccatataagatttacatgtaaatgaccacatttcatcagtattataaggattttattgattcattcatattatgttagaataatgtgcctatctagcacaatacaatctgagcacatttaattgaatacataaactgaattttgtcttccaaatcttaaagttcattgatatgtacgacgaaagcttacttataccattatcttgcaaccgttagcat

SEQ ID NO: 708216 - DNA, 1290 bp, Homo sapiens
tataattcacctttgaacccctctaaacttggtgctttctgttttggaagtttattagttatcaattcgatttctgtagtccatataggcccattcagatcatctatttctccttatgtgacatctagtaggttctgtctttcaatgaattggttcttttcatctaagttatacaatttatgggcatagaattgttcataatattcatttattgtccatttaacatccattygatcagaaatgatgatccctgtttcatttctggtattagtaattgtgtcttctttctttcttcttagcctgaattgagaaattttaagattattttcacataaaaacatacatgagcacatttgcaaagacatccctcagttgctgcagcgccagctccaccctcagtctttccagcagcctgcagttctgctcttttacaggaaacttgaggagtacctaaacatctgactctctgcgtgttacatttcatcgctcctctgaactagggcactgagggaaatttttctactgaaaggtaccatcttaatttctttgcaaattagcatagaagagagaatcttgcacttcacactaatgagaacagtgtgtggttttgtgatttgggaacctggcaaggccacgcaagcttcttgctgagcagcagtaccgcactgcctccaccaacccttaacatccccagcctcaaaagtcaaaataaaagtcagagtggacaggtgagtattgggtggaaggatgagaagggataggggaatccatctagctcactgcaggatgatgaaacagagacacagatttgagtgttattcaaggtaccaggaatttgacttatacttgcttcctctccacagaatactgtgaatacacacagagcctgggcagaaacgagatgttacacaacctccaagatatttctacaagtcgtctctcttatccattctttcttttcatgccaaagataaatctgtggcataaacttatatcaacaagtatttgaaggaatttaaatatctattagtaacaaatggtctacatattattaatatccatatggaaatagccatataagatttacatgtaaatgaccacatttcatcagtattataaggattttattgattcattcatattatgttagaataatgtgcctatctagcacaatacaatctgagcacatttaattgaatacataaactgaattttgtcttccaaatcttaaagttcattgatatgtacgacgaaagcttacttataccattatcttgcaaccgttagcat

SEQ ID NO: 708217 - DNA, 650 bp, Homo sapiens
ttccttcctacaagcctagaatctttagcttggaactactttaaatcagctctaggataccttcagcttattcttagtgattctaatatcaacactttcactttccatatcctgaaaacatacgtattcaatgaaaaattaatacagattcttgaacatgctaattatatgcctaactttcctccagtttgcaccagactatctaaaccttacataacctgagatctccaaataagtgctttsaaagctttacaatttagcagtgcgtccttggcttttaggcgtgtcagtggaagaatgaccatgtaaagaaggaatctacactgatgattacagtgatgctgaagaggaacccattatagtgttatctataatcctctgactgtgatgttctgcatgggataacctcagcaatcagagccaggaaaatctaaatttggagagagacatcatttggccctgtggatctaaattgcacaagctggggtctctggggatcgccccgcatggaaagggacttgggagaagacactaggacaagagtgtgtacccccacctgaaaagaaaaagattcatttgctattcttacacttagaaacttctgggtcaagagcatgtgatttaaggcatcaaatggttctgagattaat

SEQ ID NO: 708218 - DNA, 614 bp, Homo sapiens
agctccaacttttgctctaattgttaataatgctttcctttgccaagtgacttttacatgtcacttcaagaatgtctggctctcaacacaatagcgttcctttattttttttttttatgaatacctagttttagggggggacatgtgatattttgttacatgcacagaatgtgtaacgattaagtcagggtattcagggtatctatcacctcaagcatttatcattactatgtgtaggraacatttcaagagctctcttctacctgatttgaaatatacactacattgttgtcaactatagtctgtgactatagttatctgtaaacactagaatgtattccttttatctaactggatttggcacacattaaccaacctttcttcatccctcccacccactctagcaacccttcccaggttttggtaactatcattctactctctacttccatgagatcagttttttttagcttcttcatatatatgtgtgagaacatgtgatatctgtctttctgtgcctggcttatttcactcaacataatgacttccagtcccatccacattactgcaaatgacaggatttcattccttttttatgactgaaaagtatttca

SEQ ID NO: 708219 - DNA, 1383 bp, Homo sapiens
ttgagttgccagggttttctatccaggcctttggccaaaactgctgtggtcaccatgcattgtgagattacagtgctcaaatagttaatgtggctgaaagcttccactggacattttatgggaggtgacacaaagccactggggaagaaactggttcttcataggaagtcctaaagccctacaccataaatcacttcaggtgtcaaaacatcttcttaagccacatcatcaatgtttctggctttcattaacacaagcaaaaccacctgcagtcctcactaccaaaactaagagctttagtcttcctgaggttctaccatgtttcttatccatattaattattgcagaaacacctaaacccttcactcattgcttagtgtcaggcttgccatctaaagtatgttttcagaaatgtcaagcagtttttggccaccgagtgtatgtcagtgtattctggcggatacaaattattgttttgcgttacttaccatattatcttgcaataaaagacctgcaaactcatcacaagatcaactgcaaagtcatctacagaatgtaaccatatctataatgacaaagaaaacattgttatattaccaagtcaaaatatcctacactggcgctatcctacacattgtacggccaattataaatatctttctggtggttttagcccaagtaaaagttaccccagtgaaggtgtgttaatgaagtccactccactccctgcctggttactaaaacctttactcaatgctcagaacaaagtctgattaattcttcactgactttcagaatacaaacagtatccgtattttctcttccattaaaacaagcagtgattagcagaccctggcaatacatactcagtcattcaaatctctttagaaggtactgaaagatactttgtaggcaagagtcatgaaaccaagatttcagggtcaagtacaaaacaggcacaactcttaagtatattccttttctaataaaaagtattttcagatctcttatattaaaatagaaaatagttttggttgttctgacagcagtttatcatactggctccctcctgagctttctagtgctagggtctggccatgtctgtgctttccgcaaggagtcacagtaacttaatattcttctacaatgtttgaaggggaccgttagctatatatggcctgggcccagatctgtgtcttcctttcctaggcttattttcaaatagaaaatraaaataagtcccacttatgtcaaagagtttcaaagagctttgtatttaaaaaaaaaaaacacaactaattttgatggcaactcactgaaataaggaaaaggtgttaacaagattcttattggaagattgcaatactaggcagggaaggccat

SEQ ID NO: 708220 - DNA, 596 bp, Homo sapiens
gcaaatgaggccctgagaagttgagtgatttctgtaaggtctcagagccaatagacactggtaatgaaataaaatgcaasgccccttatctttggagcccagtgttccttccacataggtggttctccacccaggctgcccaggagaatgtggaatctccagcagttctgacttaactggcctggtgtggatgtctgtgatgggtgaacattcccagacccttttaagaacctgatagaagtggtggacccacttcccagaaaaagggacgcacaacaaaataattgtcctgagtgggtctgacagaatcaagtgaaccctttaaatctggatctagaggtcagagactgagaatgtcagagatgcaaaagagattcagtgcaagagaaatcctcctactggttttgaagatagatgttggcagcctgtgtcaacaacctgagagtggccttgagttgctgggagcaccccagactgacaaacagcaagaagaatatggggacctcagtcgtacaaccacaggaactgaattgctactgacaaccagtgagcttgcaaagaggacttggagccccagatgagaagcaaccctggct

SEQ ID NO: 708221 - DNA, 596 bp, Homo sapiens
gcaaatgaggccctgagaagttgagtgatttctgtaaggtctcagagccaatagacactggtaatgaaataaaatgcaacgccccttatctttggagcccagtgttccttccacataggtggttctccacccaggctgcccaggagaatgtggaatctccagcagttctgacttaactggcctggtgtggatgtctgtgatgggtgaacattcccagacccttttaagaayctgatagaagtggtggacccacttcccagaaaaagggacgcacaacaaaataattgtcctgagtgggtctgacagaatcaagtgaaccctttaaatctggatctagaggtcagagactgagaatgtcagagatgcaaaagagattcagtgcaagagaaatcctcctactggttttgaagatagatgttggcagcctgtgtcaacaacctgagagtggccttgagttgctgggagcaccccagactgacaaacagcaagaagaatatggggacctcagtcgtacaaccacaggaactgaattgctactgacaaccagtgagcttgcaaagaggacttggagccccagatgagaagcaaccctggct

SEQ ID NO: 708222 - DNA, 596 bp, Homo sapiens
gcaaatgaggccctgagaagttgagtgatttctgtaaggtctcagagccaatagacactggtaatgaaataaaatgcaacgccccttatctttggagcccagtgttccttccacataggtggttctccacccaggctgcccaggagaatgtggaatctccagcagttctgacttaactggcctggtgtggatgtctgtgatgggtgaacattcccagacccttttaagaacstgatagaagtggtggacccacttcccagaaaaagggacgcacaacaaaataattgtcctgagtgggtctgacagaatcaagtgaaccctttaaatctggatctagaggtcagagactgagaatgtcagagatgcaaaagagattcagtgcaagagaaatcctcctactggttttgaagatagatgttggcagcctgtgtcaacaacctgagagtggccttgagttgctgggagcaccccagactgacaaacagcaagaagaatatggggacctcagtcgtacaaccacaggaactgaattgctactgacaaccagtgagcttgcaaagaggacttggagccccagatgagaagcaaccctggct

SEQ ID NO: 708223 - DNA, 596 bp, Homo sapiens
gcaaatgaggccctgagaagttgagtgatttctgtaaggtctcagagccaatagacactggtaatgaaataaaatgcaacgccccttatctttggagcccagtgttccttccacataggtggttctccacccaggctgcccaggagaatgtggaatctccagcagttctgacttaactggcctggtgtggatgtctgtgatgggtgaacattcccagacccttttaagaacctgatagaagtggtrgacccacttcccagaaaaagggacgcacaacaaaataattgtcctgagtgggtctgacagaatcaagtgaaccctttaaatctggatctagaggtcagagactgagaatgtcagagatgcaaaagagattcagtgcaagagaaatcctcctactggttttgaagatagatgttggcagcctgtgtcaacaacctgagagtggccttgagttgctgggagcaccccagactgacaaacagcaagaagaatatggggacctcagtcgtacaaccacaggaactgaattgctactgacaaccagtgagcttgcaaagaggacttggagccccagatgagaagcaaccctggct

SEQ ID NO: 708224 - DNA, 1098 bp, Homo sapiens
aagtaagggttgtaacaatttacatttccacaagcaaaatatgagagtgcctgactccatactcaatagaagggaattttaaaaagtagatgaacagattttggtcaccatatggatggtaaggkgagagattagggtgacccttgagtttttggctgtggcagctggaggaatgctaatgctatcaactgaggtttggaataacagattagagatttggagttcatttgagaacaaaaatatttgaggatatccaggaaaagatgtttggcaagtagttagatatacttatctgaagcaaaggaaagaggtctgggttatagatagagatcttgaagtcatcatcatataaatggtgggtgaagtcataggaagagatgaaattgccaaagaagagagagaaaatggccaaggacataactttggagaatataaatatttaagggtaggtaaaggaaaaaaagccataaaagaagacagagaattattgccagagaactaggaggaaaatcaaagataaaccaataaagacagcattattagacaaagatcagtgtcaagtgttagtgacagagaaatctctcggatgtagtaactcttggtaacttagccagacagcttcaatgaatggcgaggagtgaaagtcagatagcagtggtattaagaatgaaggaaaagccaggcatggtgtctcaggccagtaatccaagcactttgggaggttgaagcagacaggaagattgcttgagcctacgagttcaagaccagcctgggcatcatggtgaaatcctgtctctaccaaaaatacaaagattagccaggtgcagtggcatgtgcccatagtcccagctactcgggaggctgagatagaatcacttgagcccaggaggttgaggctgcagtgagccttgatcacaccactttactccagcctggatgacagagcgaggccctgtctcttaaaaaaaaaaaaaaagaatgaaggaaaagctgctgcttttggcagtatggtggtctagaaactctgaagggccctgttgcttcaaaacaacttaagttctgaataaaaattaatttttattttgtgttggagtctca

SEQ ID NO: 708225 - DNA, 1098 bp, Homo sapiens
aagtaagggttgtaacaatttacatttccacaagcaaaatatgagagtgcctgactccatactcaatagaagggaattttaaaaagtagatgaacagattttggtcaccatatggatggtaaggtgagagattagggtgacccttgagtttttggctgtggcagctggaggaatgctaatgctatcaactgaggtttggaataacagattagagatttggagttcatttgagaacaaaaatatttgaggatatccaggaaaagatgtttggcaagtagttagatatacttatctgaagcaaaggaaagaggtctgggttatagatagagatcttgaagtcatcatcatataaatggtgggtgaagtcataggaagagatgaaattgccaaagaagagagagaaaatggccaaggacataactttggagaatataaatatttaagggtaggtaaaggaaaaaaagccatraaagaagacagagaattattgccagagaactaggaggaaaatcaaagataaaccaataaagacagcattattagacaaagatcagtgtcaagtgttagtgacagagaaatctctcggatgtagtaactcttggtaacttagccagacagcttcaatgaatggcgaggagtgaaagtcagatagcagtggtattaagaatgaaggaaaagccaggcatggtgtctcaggccagtaatccaagcactttgggaggttgaagcagacaggaagattgcttgagcctacgagttcaagaccagcctgggcatcatggtgaaatcctgtctctaccaaaaatacaaagattagccaggtgcagtggcatgtgcccatagtcccagctactcgggaggctgagatagaatcacttgagcccaggaggttgaggctgcagtgagccttgatcacaccactttactccagcctggatgacagagcgaggccctgtctcttaaaaaaaaaaaaaaagaatgaaggaaaagctgctgcttttggcagtatggtggtctagaaactctgaagggccctgttgcttcaaaacaacttaagttctgaataaaaattaatttttattttgtgttggagtctca

SEQ ID NO: 708226 - DNA, 915 bp, Homo sapiens
tgtccagacttactacaaaggcatatcttctagttttgttgattactttcttggcaatcacttgatatctaatggatgatttgtgaataaggcctaaaatatttttaaaattatacctaatgcctttgcaaagtactgcaaagtagtcccttgagaggcagatatgatacggtgagattcaaccgaaagacttagactgtgactagaaagaaaacagaccatatctgaaaaatctcacctaaccagttcactaaggttaaaagtaaattctgccctttgggttctgaaatgtggcgaggcttgaaaatcccagttagctgtattttacagcccctgtctggttttcattatgtgtgcattacatttccttcaagaaaattacaaagttcagtaatttgtttagtgtccaagcatgccacacagcacgttagtgagtagaaaatcaatcatcacatcaaggaaaggtgataggaaattatctcataattgatggtatttagaaatgtattaatcagtcagctcttctaatgaacaaggaagcttgatggcaataccgtggccccaggagggacctgctgtgagaagcagctgaactgttcactgaactccctgggccttagtttccccaccataaaaaaggaaagagctcagaaayatgtcctgtctgattctttagtgtttaggaatttgtaataatgtttatagttccactctccagtggaattatttataccctttctcacacaggtaagacagccagtaagtcaagatatcttggtggaccgtattttcttttcttttttagaaacagagtctcactctgtcacctaaactggaaggctggagtgcagtgttgtgatcctagctcactttagccttgaactcctgggatcaagcgaccctcccacctcagcc

SEQ ID NO: 708227 - DNA, 842 bp, Homo sapiens
tcatgacttgtacattaatggacaagccaagtacattaaactaagatatagcagcatggaaataattctgtaggaaaatgtacatgttagttcccttggatcttacaaatgtcatctttttagcataatcaaacaatgtaataaaatataaatttgaattaagttaatctttttatagattgatacatttggaatttaaggaaagctgggtgaaactaccattacagtttgcagaataacttatgtagtattctaaagcagctcctcagaaagatgccttcccaccactcttctgcagtttttacacaggaacttgctttgttgctttcataaagcattcagagtactatttatagaatttttccaatttatttggcagagtctcccatatatatgtcatattatccactctcctgaacagtcagcatctcccactgccctcctcctcaccttgatctaaaatcaagacaatataataacagaaacagcggaagagaaattgcaaacattttaaatgcagattacatattaaggtgaaatgtcttatataggttaaattgtctactattgtgtaccttatgaaataaaatcacttaagataaagtttagatggaaagaaggttctatatctttcttttctgatccaattattgtttcctatagtggcaattagcattcactgactatttactgtgtgccaaatgtcacacttaatgctctttataatttaaacctcacaatgtccttatgagattgctattgttttaattactcctttccttgataasggaataggcttacaaggagacttgcccaaattgatgtaaaatttgtgtttttag

SEQ ID NO: 708228 - DNA, 549 bp, Homo sapiens
atttggttctcattaaaaatgaggttgaggagacagctcaaaataaaaactttgccttttcacctaatttataccctatacccgcccccccccacaaaaaataaacattaaaactggttcgactcaacccaaatttaattgggaatttgtttctatctagttataatgaagagttgatttagaactatctcactactcatgttttctatttctcacccttccagaggcattgaccccgcaatattttaagagatttgagaatattttgatcagggatataatatcatggctgtgtctttttaatcagcacaaatatagacctaatttttgagaacattagtattaccaaaataactttatgatgcaaaaaatgcatttagggaaagacaccatttrtttgggaaactgaaaattaaaggcatgcgcattgaaaatgtattaattcaaaaccttgtggtttcatgaactatttagcaaattaagtgctgtatttaaatgtttaaaaaatataagtgaccctcctgaaagttgtttaattttaatagaata

SEQ ID NO: 708229 - DNA, 946 bp, Homo sapiens
ataactaagtaattgttggtgtgcacaaggcagcataccatagaggtgacacacctgcattcaggcacacttggctgaaatccagatcgtatcattaatagtcataagcccttgaatgaattacttaaccattgggagcctcagtcaccacacctttaaactgggtactgtaagaatactgacctttgtgagactagaaagtaacatatgaaggagtttagcatagcatctgrcatatgataagagatcaataaaattggagctatcattttaacttaggtagtatatgtgacaaacagctgtggcttattctgtgtaatcatagcaaaacacatgggcccactttttgcaatatgaaaagattggataatagatgttagaaagcttcaaggtcaataagcctttaatagccactctatgctactgattccttttattagaaataaaatcacttatggataggaatttgaaatgtatcaaatggcctgaaatcagcaatgattcatttttttttttgagtaaggctgaatagtttataattagcagttactaagttaacaactcattacatttaaggacctcaggggaaattaactatttcaaactgggaaagagccataaactcctggagagagagaaaaaataaaattaaagttaagcaattacaaaaagagtttttcattttcaatcttatgtttctggactatgcaatctgtttacattattggatttgcattaattaaattcacagataagtcaccctgagaagctcactgaattatttttactgtaaaatgcatagaaaccttgaagtcttattgccaagaaaaaccaccattttctgttaaatgtgaccttaataattattttcattcccccttaaacactaaacatttaaacacttgaatactataattgaaagtccaggaaaatagacatatgagat

SEQ ID NO: 708230 - DNA, 1258 bp, Homo sapiens
ccaaatgctggactcactgctctgagacttctttcccagatgctgacccacagtatctcagtgcctttcttatagatttacaatgcctttaaacagattttttaaaatatttcttcagcttttctagttgccttaagtggaaagtcagtctaaaacagctcgtatgccattactagaagtagaagtctccttagtgactttttaacctccaaactctcagtcacatctttttagataccaccaatcttttgaaagattttatatttatgatctctatttcttctctgcatagtcacaacttaatccactctagtctgacttctgcctcaagtatccaccaaaaaaataaagctgaagtcatcagtgacctccgttttgctaagccaatatctttctcagccttcttatcctctgacttctcagcaacatttgtcactgctgatatctccttcctttcacttcctgaaatattctctttccctttgtttccatattataattttctccttttgctgtctcattcttctctgccatgaaaattaatgttgaaatacagacctgttttttaacactctacactctcttagatgatcccatttatcgaagcaaatgacttatctatgtgcaaaaaactcatatgtttttatgtccaactcagacatctcctctgtgctccaatccataaatccaaggagctacttgaagaaacttccttttgaatctcatagtgacacttcaaaatcaaaaggtccaaaatcaaacttataattacccacaatttaaaatagaggagagaaggtgatgtcagccagatggcagagaaggagatcttgtctttcattccccctacgcgcacacacacacacacacataaacaaccatgcacaattagacarctatccatgaatgaaaatatccctgaaagagctcaggagtcaagttaagaagctgaaacacagtgacatcagcaagatggcagaatagtaggtctcaggcttcactaccctcctccacagaaagtacaagcagcagctattgacagagaagaacacttttgtgaaaaccccaatatttgggaatgagactgagactcctgcaagggccacaaaattgaataaaaacattagaaaaggaggagaaatggacttagcctgcactaccccttctcctacccaaagttggcacagcactacacaaagagaattcccctgggtttatggtttccatagtagaaaaagagaaccagaggtggacatcc

SEQ ID NO: 708231 - DNA, 1258 bp, Homo sapiens
ccaaatgctggactcactgctctgagacttctttcccagatgctgacccacagtatctcagtgcctttcttatagatttacaatgcctttaaacagattttttaaaatatttcttcagcttttctagttgccttaagtggaaagtcagtctaaaacagctcgtatgccattactagaagtagaagtctccttagtgactttttaacctccaaactctcagtcacatctttttagataccaccaatcttttgaaagattttatatttatgatctctatttcttctctgcatagtcacaacttaatccactctagtctgacttctgcctcaagtatccaccaaaaaaataaagctgaagtcatcagtgacctccgttttgctaagccaatatctttctcagccttcttatcctctgacttctcagcaacatttgtcactgctgatatctccttcctttcacttcctgaaatattctctttccctttgtttccatattataattttctccttttgctgtctcattcttctctgccatgaaaattaatgttgaaatacagacctgttttttaacactctacactctcttagatgatcccatttatcgaagcaaatgacttatctatgtgcaaaaaactcatatgtttttatgtccaactcagacatctcctctgtgctccaatccataaatccaaggagctacttgaagaaacttccttttgaatctcatagtgacacttcaaaatcaaaaggtccaaaatcaaacttataattacccacaatttaaaatagaggagagaaggtgatgtcagccagatggcagagaaggagatcttgtctttcattccccctacgcgcacacacacacacacacataaacaaccatgcacaattagacaactatccatgaatgaaaatatccctgaaagagctcaggagtcaagttaagaagctgaaacacagtgacatcagcaagatggcagaatagtaggtctcaggcttcactaccctcctccacagaaagtacaagyagcagctattgacagagaagaacacttttgtgaaaaccccaatatttgggaatgagactgagactcctgcaagggccacaaaattgaataaaaacattagaaaaggaggagaaatggacttagcctgcactaccccttctcctacccaaagttggcacagcactacacaaagagaattcccctgggtttatggtttccatagtagaaaaagagaaccagaggtggacatcc

SEQ ID NO: 708232 - DNA, 1258 bp, Homo sapiens
ccaaatgctggactcactgctctgagacttctttcccagatgctgacccacagtatctcagtgcctttcttatagatttacaatgcctttaaacagattttttaaaatatttcttcagcttttctagttgccttaagtggaaagtcagtctaaaacagctcgtatgccattactagaagtagaagtctccttagtgactttttaacctccaaactctcagtcacatctttttagataccaccaatcttttgaaagattttatatttatgatctctatttcttctctgcatagtcacaacttaatccactctagtctgacttctgcctcaagtatccaccaaaaaaataaagctgaagtcatcagtgacctccgttttgctaagccaatatctttctcagccttcttatcctctgacttctcagcaacatttgtcactgctgatatctccttcctttcacttcctgaaatattctctttccctttgtttccatattataattttctccttttgctgtctcattcttctctgccatgaaaattaatgttgaaatacagacctgttttttaacactctacactctcttagatgatcccatttatcgaagcaaatgacttatctatgtgcaaaaaactcatatgtttttatgtccaactcagacatctcctctgtgctccaatccataaatccaaggagctacttgaagaaacttccttttgaatctcatagtgacacttcaaaatcaaaaggtccaaaatcaaacttataattacccacaatttaaaatagaggagagaaggtgatgtcagccagatggcagagaaggagatcttgtctttcattccccctacgcgcacacacacacacacacataaacaaccatgcacaattagacaactatccatgaatgaaaatatccctgaaagagctcaggagtcaagttaagaagctgaaacacagtgacatcagcaagatggcagaatagtaggtctcaggcttcactaccctcctccacagaaagtacaagcagcagctattgacagagaagaacacttttgtgaaaaccccaatatttgggaatgagactgagactcctgcaagggccacaaaattgaataaaaacattagaaaaggaggagaaatggacttagcctgcactaccccttctcctmcccaaagttggcacagcactacacaaagagaattcccctgggtttatggtttccatagtagaaaaagagaaccagaggtggacatcc

SEQ ID NO: 708233 - DNA, 1193 bp, Homo sapiens
ttttaagccatgacataggatttatctcatgatataagatgatccatgacttgttctccttgatcctatcttgtttgttaagagtttgtatcaggaaaggtagttaactttttaacattgatttattaatatctaattttctatattatgtctaaagaatgtggcttctatttctaattcattgagatttctgttgtgtctcatcctgtaacaaaatcatgttctcattgatttatttttatttttatcattgtttaagagatcaaacacatttttagagcttgttatgaagagcagcagtcatccccctacccctaacttcccatcatctcgaccttctcagaggccaccaatctttccgtagattgttttagcatttccctccatgtctctctctctcttttttttttttttttttttttgagacggagtctggctctgtcgcccaggctggagggcagtggcgcgatctctgctccctgcaagctccgcctcccgggttcacgccattctcctgcctcagcctccggagtagctggaactacaggcgcccgccaccgtgcctggctaattttttttttttttatttttggtagagacggggtttcaccgtgttagccaggatggtctcgatctcctgacctcgtgatccgcccgyctcggcctcccaaagtgctgggattacaggcgcgagccatagcgcccggccccatgtctctctttataacatatttattttgctacttctcacaatggaagcacaaagacttactcttctgatttcctcagacacatacagacacacagacatactcggagttctcacagcccccagtctttccattttcccctgatatatttatatatttactggtaatgttagtttgctttctattcagtgtttatgttctcatttattacatcagtacagttcacagctggggagcacttggatgggacttattgattgttggtgtccttgcattttgagttgacttggctgtttcactgggaagccaacccttggaggctaagacctgggtgactgcattggaagctgtgcagggcagaggctggcaaggaggggtggtggtggttggtgtgtgctaaatccctttatttctggtatggtccagcacccttgccctcacctgtatctgatatccccttgaccagagccttctgctatacag

SEQ ID NO: 708234 - DNA, 1377 bp, Homo sapiens
ttagatcatatatactgcattaattctggaattgatttatataaagtacataaaaattatacctccaaactgggtatgttccatgaggatagaattttattcctgtttggtttaattgatttataccaagcctccagaacagtctatgcacaaaataagatctcaawaaatattggctgcattaaattagaccagaaaataaagtaaaaatataaaccatgcgaatcaggaggtttatatagttgctatggttagatgagaaatttgactctgaatttcctagaagctaaagtgaaaatgaagttacactcaattacatagcttacattgtcaagtaagagaaagaatactaatttactatgggaaattaagctttcttagggataaactctacaagaaattcctagtgtgggaattgataagaagcaatagtgagtttttagagtaatttttaatagtatttgtgaaagttgagagcataactttaacatatcagagataatcacggaaaggattcagataatattctttttgttataagatgggagaagggaacagcagggagcaatacatagaattgtacaggtagggaaaactactgtggctgaaaaagttgggcttctcaggaataaaaattgtttcctttttttaaaaaatcatttcctgattgttcttgtcttaatcatttactcattcagaatcatttatcaatgtctttctttatgcttcagttactgtgatagatgctgaagatacgagttaaatttaacatagccctgtccttagggagctctgaatttggtaaagaagcaaaacaagtcaatcagccatcacgaagtgctgctgtcagcaaggtctccatggcgtgtgggaggacacaaaggagaggcatctaaattaagctggagtcaaggtaggcttcccagaagaggacaccgtggagctgacttttaaatttacatttgagttaactgaatgaatgaagcgagacagttttctaggcaggggagtggcatgtgtactggaatattgcaattactggcttgggtagggggcagtgctgcggagacacactcctgtggattaaggaaaaaggaaggcagaggacagaaagaaagtaaggaatgaagggccttgtcggttaaagtaagaagtctgagctttatcctgaaagctatgggcagccatggtcattggaaaatttggatcttcctgggtgcaaggtacttttcacttaatgattagtgattttgatctttgttaaagagtaatttgaattctttagttctgacaattcttttagtaacaattagttatgattagtaacaattattttcatgccagactggcagggagctcttcctctttggtgcatca

SEQ ID NO: 708235 - DNA, 1631 bp, Homo sapiens
gatctatttgaaaaaataacttctctttaaatataaaaaatctttacgaaggatttttttcctgcactgtttttttttctgacttttgagaattctctagattttcctgaccacacttacacattgcatcttgtaaagctgtcagagtaagacagccttaatgttttagccataataatgccagctattgatcctagtaagaggaaaaagagagaatgtgcttaatggggcatgtttgttctctattattttctttgcctaaggataaagctgattcaaataatgatactcttttcttagtcactaaattcacacattcatatacattaattattactaactaccagttagtattaaatacattgagaggtttagcatttgtaatttatcaataaatggtctaaaaatgttaaagtctgttgttcttttctaattcaaaaccatataaggatgcaatcctcttgtataaagcatcttactttgaaaacatgcatttatatgctttgtgtactttaaagactcaatctcaactttaatacgtagtttatttcctactaagtataagatgtccacttctggttaagtacaaagtcataatgttaaatgaaactcagggtatttgtttttgagaaaggtttctgtattccaaatttataaagaatctatcttatyaccaataccaataagttacactgagattcttttcaacataaattgaattccagaattttgtgcaaaccaaatcaattgtgtccctatctttgagctgaggcatccaaaaataatgaaacaattaataatacaaaaataagagtttgagattattaaatgaaaaagtcactttcataatatttatatctttgttgcttcctagacaatactaaatgagcaatatatgcctgccccttcttccatgggacagaaaggaaggaaagaaactaaagattaatgtgtaatgataggtcttgtcaaatagtttaataagtagtatttcttagtaaaaaaaatccattataatgtttataccttaattaaaatatatgatagacatttctatatgacttcaataatattttcttaccttatcaagagagaaagttttggtgagggcaaaaccccatccagcttcaaaagctcttcgaatcattgatgtgctggtggctggagttgcgctagcaagaccaaaaggatttataaacttcaatccggccatttctacactaatgtccaccagatcaataggagtgtaaaagaggggtagttcaggcttggcagaaacggaagctccatattgtgactgcaaaatacaaaccaatacttggtttcatattacatctaaattgtccatataatattttaccaaaaaaatcacttcaacacagcatccgaattaatatagattacaacagtctgtttacaatgaaaaaaactggcaaaaagtcagtgagcagtgaactgaattcatataatatggccttttaatttcaaaggcagtatgaagagtactagcagaaataaaatcaattaaatcaacaaacaactgtatttaaaacatactgagattcaaatacaaaagggaataattttagaatttttctccctggtccaatccagtctctttgtacttaagt

SEQ ID NO: 708236 - DNA, 2180 bp, Homo sapiens
atctcagggtttgttttgttgttgctgttgttgttgttgttgctgttgttcttgttttgggggggattttttgtgataagtttttgttgtactttatctgcttgtttttgcttaggaaggcttcagtgacagtagttaaagaaattgtggtcactatcacattttttttttttttggtagaaactgatttcatctctctgatactgttttatctgagccatggtaaattaatcacagttttaggcttcttcttcactggtaaaataaagcccaaactgctcatttaagagaaaatgcttggccaaaagaagcctgtaaaaccagagtgtgcttttccttgattcacagtaaaacatgaaccctttatttgagctctttatgacatggaaaagcatttctatgtattgtgttgaataagctattcttcccccggatggtattgaatttaattagaagaaaatatcttcatgaaaataaagctttaatgatatactgcttcattttaagaccataagtcatcgtatcctctaaatggtgggataatgatgctgaaacaaaacactaaagagggaaaaagttattcatttggtgttcagtctttctgtggaaaacgtgtgtttttattctttatcttccttatatttttacttccaatttcccacttaaaagaagattctcttgtatgttctattttaattttactctagattcagtacaatttcataaaatgaaattcatttaaatataattcaggaaccaagccatcttgaatgaaagtattttgagacagcactcagggtttcaatataaacaccgccatcatccatccattcattcattcatccacctattaaaaatctgtgtgtctgttgccatcctggtgctgagaaaacatgagtgggaaagagagattcatcacctcagcaattcgcagggaagaaggaaaaagaaactgaataacgtagtaggatggtcctagctgagtgaaagagagcatgagacctggatatgacctgaagtctggttatataagagtttgtatgagatagcctccaaagataaagtattgtgcacaagtgtacaacaaacggggtaggtgagaactgagacaacctgcagtcttgtctctgggcactagtgtttttctttttctgtcttctctttttaaataacaattaacatttatcaagtgtttgcccaaatctggacactgatctgaatattttgtgtgttcttagttaatacttcattcttcacaacagctcgtcacaacacttggtgcactgagacagattctgtgttgcctggagtaggcattgtaactctcatttccattttgcagataaggaaacagaagcacagagagtttacataatttcactaagatcatgcatccccaagtgttgtagccaggatgtaaacccaggcagcatgccccagagccttcctcctgctctaataatggtctgcactacttgagctttaaggagaggggagcagcaggcacaagcagaaggagttgtttttccaaagggcttcatgagacaggtagaatcagtgaagaggggagtgtggggtgcacacagtgcttcttaggtctgtcaggtggcaacaggtgacctagagtcggagattgaatctagcctygctccttgagagtgacggggtcgggagccctgaaatccacacatctcagaatggataccattatcatttggaacaatggtggccctgagacattctctggaaacttcagaagcccaaggatagtgacaaagagggagagatgttgggaggaatcagggtacggatggcatggatcaagaaaataagtgtaacctagaagatactctctgggaactgttcatgatgctgggtgtgttgatacagcttaaaggttatttcagtgtgggggacgctttgatggccttgtcaaaagtgtgtaagcattgctttgttagttattgatttgttttcccaagcagtgcatatgacatccctgaacctttctctgctttctaggtacaccatgattatgagagatttatgtttttcacttcattgagcatggtttaaatgtttataggtctgtattactttcataaactgaaaataaaaatctctcataatttgatagaattgggttaactgctaagaaaataacagtgctttattttaaa

SEQ ID NO: 708237 - DNA, 2180 bp, Homo sapiens
atctcagggtttgttttgttgttgctgttgttgttgttgttgctgttgttcttgttttgggggggattttttgtgataagtttttgttgtactttatctgcttgtttttgcttaggaaggcttcagtgacagtagttaaagaaattgtggtcactatcacattttttttttttttggtagaaactgatttcatctctctgatactgttttatctgagccatggtaaattaatcacagttttaggcttcttcttcactggtaaaataaagcccaaactgctcatttaagagaaaatgcttggccaaaagaagcctgtaaaaccagagtgtgcttttccttgattcacagtaaaacatgaaccctttatttgagctctttatgacatggaaaagcatttctatgtattgtgttgaataagctattcttcccccggatggtattgaatttaattagaagaaaatatcttcatgaaaataaagctttaatgatatactgcttcattttaagaccataagtcatcgtatcctctaaatggtgggataatgatgctgaaacaaaacactaaagagggaaaaagttattcatttggtgttcagtctttctgtggaaaacgtgtgtttttattctttatcttccttatatttttacttccaatttcccacttaaaagaagattctcttgtatgttctattttaattttactctagattcagtacaatttcataaaatgaaattcatttaaatataattcaggaaccaagccatcttgaatgaaagtattttgagacagcactcagggtttcaatataaacaccgccatcatccatccattcattcattcatccacctattaaaaatctgtgtgtctgttgccatcctggtgctgagaaaacatgagtgggaaagagagattcatcacctcagcaattcgcagggaagaaggaaaaagaaactgaataacgtagtaggatggtcctagctgagtgaaagagagcatgagacctggatatgacctgaagtctggttatataagagtttgtatgagatagcctccaaagataaagtattgtgcacaagtgtacaacaaacggggtaggtgagaactgagacaacctgcagtcttgtctctgggcactagtgtttttctttttctgtcttctctttttaaataacaattaacatttatcaagtgtttgcccaaatctggacactgatctgaatattttgtgtgttcttagttaatacttcattcttcacaacagctcgtcacaacacttggtgcactgagacagattctgtgttgcctggagtaggcattgtaactctcatttccattttgcagataaggaaacagaagcacagagagtttacataatttcactaagatcatgcatccccaagtgttgtagccaggatgtaaacccaggcagcatgccccagagccttcctcctgctctaataatggtctgcactacttgagctttaaggagaggggagcagcaggcacaagcagaaggagttgtttttccaaagggcttcatgagacaggtagaatcagtgaagaggggagtgtggggtgcacacagtgcttcttaggtctgtcaggtggcaacaggtgacctagagtcggagattgaatctagcctcgctccttgagagtgacggggtcgggagccctgaaatccacacatctcagaatggataccattatcatttggaayaatggtggccctgagacattctctggaaacttcagaagcccaaggatagtgacaaagagggagagatgttgggaggaatcagggtacggatggcatggatcaagaaaataagtgtaacctagaagatactctctgggaactgttcatgatgctgggtgtgttgatacagcttaaaggttatttcagtgtgggggacgctttgatggccttgtcaaaagtgtgtaagcattgctttgttagttattgatttgttttcccaagcagtgcatatgacatccctgaacctttctctgctttctaggtacaccatgattatgagagatttatgtttttcacttcattgagcatggtttaaatgtttataggtctgtattactttcataaactgaaaataaaaatctctcataatttgatagaattgggttaactgctaagaaaataacagtgctttattttaaa

SEQ ID NO: 708238 - DNA, 597 bp, Homo sapiens
atttgtacacatggatggatcttttgaaatttgagatttgctattctttacaataaaatttaagctgaagtctctcagggctggagcctagatttttaaattatttgcattttttttttagagtgaaactctatagtaagtgaaattggccatatattttaaaatgcatgaacataacaaagttagtcattgaaaagcaggcaaaatctagcatgtatgtttttctttggatwtgttacgtcattgagtcatgtaatgagtatttaagaaaacaaaacagttctctggaatgcctgaattccatgttggcaattgggtacaataaagcatttgcaattctagtgacaaattgtactgcagtgcagaaggtctcatcgagcttagatcattcgttgccttacatattggttcagagatgagaaaataaaaacatcagagtgaattcactaggttctagggtttcaggttcaatctctgtacagaaagacttaacaagaaaatcagtagtcaccagagattatacttggcattagattacacgagatgaagttaaatgcttttgtttgggtttgaatgaaaatatgctgacaaataatg

SEQ ID NO: 708239 - DNA, 1228 bp, Homo sapiens
tgctcctgcctccatctctcccctctgtgctcacctctcaccaggaggccctcccagagttcagtgtcctgctttttttttttgagacggtgtctcactctgtcaccaggctggagtgcagtggcgcgatctcagctcactgaaacctctgcttcctcggttcaaatgattctcctgcctcagcctcttgagtagctgggactacaggtgccagccaccatgcccagctaatttttgtatttttagtagagacggggtttcaccatgttggccagatggtctctatctcttgattagcccaccttggcctcccaaagtgctagcattacaggaatgagtcatggcgcccggcctcatctcctactctttcagcaccaggttttattcttaggattctgctacagctggagcccctgggtgcgagctcctaagctttgtgtgagtgtggacccagcaccgtgcctagtagacatacaaaaggagcatggtgacagtgaggtctgtcatctccagcataataactgttttgatccttgtagaaaaggtgatttttggctgggtgtggtggctcacacctgtaatcccagcactttgggaggccgaggggggtggctcacgtgaggtcaggagttggagaccagcctgggcaacatggtgaaaacacgtctctactaaaaatacaaaaattagctgggcatggtagtgggtgcctgtaatcccagctacttgggaggctgagacaggaaaatcacttgaacccaggaggcaaatgttgcagtaagccaagattgcaccactgcactccagcctgggtgacagagcaagamttggtctcaaaaaaaaaaaaaaaagaaagaaaagtttatatttttgttctaatggttatcttaatatcttcattctataattatatgttttatataattataattgctatataagatataatacccctagtatgttgttttttggatattctactcgttcctgatggttaatttatgtgtcaacttggctaagctatggtgccccgttgtttggtcaaatacttgtcaatatcttgctgggaggttatttcatagatgtggttaacactgacagtcaattgactttaagtaaaacagattacccaccataatatgggtgggccacctccaatcagttgaaggccttaagaacaaaaacaggtttcccagagaagcaggaattctgcttcaagactgtaaca

SEQ ID NO: 708240 - DNA, 592 bp, Homo sapiens
aataaccactataaccatacattttccgttcagtcttcctttgccctgtgtttgcagtcatcgtgtgaggggctgcccatgttcagcccaggcaacccacagcgagagagggcagagcagggagatgggccctggtgagcactgaggctcttsaaaccagctgccaagggagttgcaagcagggtgacacatgaggctcattatttagtggtattttgtgttcttgtcttgtccccaggttgtgtagctcacagactttttttttttttaacatttctataggggtcatttgaagttcataacaccatcaaacatcagtacagggtcttcccattatttaccggctttgggatatgtgctgaggagtggccgcgcactgaaggaatgtgaccggttgtcccaagtgttcctccaactcaaaatccgcaaccagttcaaaagcatttgggcttttatgagcctttcacataaagactatgacaccgctaagctattcatgtactaatacctgccctgagctgtgtgaccacagacaccaccctataatgtggccagtgtgtaggaactctacaggctcagatcattccagaca

SEQ ID NO: 708241 - DNA, 987 bp, Homo sapiens
tcataggactaatgatgcattgacaagactattgagatatataattatggaaatggctaaaatagagataaagtatctatttccacctcccaaccactaacagaaaattcaacacattatacacactgagcagctcaaagaaattgtaaagatccattattatttttaaaaggaaatttaamcagtgaatgctttcactgaaaacgataaacaatatattcccagtataaaccagaaacaaagtctgcagtagaaaactacaatgtccctagattcaagtgtgggtggggagtcatatttaaataataagtgcagaaaaaccaaaatattttaaaataattgtccatgcaagaaagaaaacagtatcatctagcttgaagacccactgtttttattttataatttatttcatgacctttagactgctagaaaaataaaacctaacttgagggcaaaggtaatctttgagaaaatatgtgctattgttgcctgcatagataatagtgtgatttatccagaaggtgatagaaatttcattttcctagacagaccacagatataagccaaggagaatagaaagctctgacctaaacttcacaagtgtcccttccaaacagggacacgtaagagtaaacaaaaaaagaagatcaaattaaactcaaagtgagaagataggaaaaaataaagatgagaatataaatcaataaaacagaaagaggaaagaaaatagagaaaagtccatgaaaacaaaggctgactcaagaagatcaataagactgataaatctctagccagactgatcaggaaaaaaataagacaagatacaaattattagtatcaagaatgaggaaggtgaaatcactacagattctacaggtattaaaataataagaaacattatgatcaactccattcctttaatttgtcaagatagacaaaatgaacaaatttcttgaaagatgcaaatttatgcaaggagagacagat

SEQ ID NO: 708242 - DNA, 987 bp, Homo sapiens
tcataggactaatgatgcattgacaagactattgagatatataattatggaaatggctaaaatagagataaagtatctatttccacctcccaaccactaacagaaaattcaacacattatacacactgagcagctcaaagaaattgtaaagatccattattatttttaaaaggaaatttaaacagtgaatgctttcactgaaaaygataaacaatatattcccagtataaaccagaaacaaagtctgcagtagaaaactacaatgtccctagattcaagtgtgggtggggagtcatatttaaataataagtgcagaaaaaccaaaatattttaaaataattgtccatgcaagaaagaaaacagtatcatctagcttgaagacccactgtttttattttataatttatttcatgacctttagactgctagaaaaataaaacctaacttgagggcaaaggtaatctttgagaaaatatgtgctattgttgcctgcatagataatagtgtgatttatccagaaggtgatagaaatttcattttcctagacagaccacagatataagccaaggagaatagaaagctctgacctaaacttcacaagtgtcccttccaaacagggacacgtaagagtaaacaaaaaaagaagatcaaattaaactcaaagtgagaagataggaaaaaataaagatgagaatataaatcaataaaacagaaagaggaaagaaaatagagaaaagtccatgaaaacaaaggctgactcaagaagatcaataagactgataaatctctagccagactgatcaggaaaaaaataagacaagatacaaattattagtatcaagaatgaggaaggtgaaatcactacagattctacaggtattaaaataataagaaacattatgatcaactccattcctttaatttgtcaagatagacaaaatgaacaaatttcttgaaagatgcaaatttatgcaaggagagacagat

SEQ ID NO: 708243 - DNA, 987 bp, Homo sapiens
tcataggactaatgatgcattgacaagactattgagatatataattatggaaatggctaaaatagagataaagtatctatttccacctcccaaccactaacagaaaattcaacacattatacacactgagcagctcaaagaaattgtaaagatccattattatttttaaaaggaaatttaaacagtgaatgctttcactgaaaacgataaacaatatattcccagtataaaccagaaacaaagtctgcagtagaaaactacaatgtccctagattcaagtgkgggtggggagtcatatttaaataataagtgcagaaaaaccaaaatattttaaaataattgtccatgcaagaaagaaaacagtatcatctagcttgaagacccactgtttttattttataatttatttcatgacctttagactgctagaaaaataaaacctaacttgagggcaaaggtaatctttgagaaaatatgtgctattgttgcctgcatagataatagtgtgatttatccagaaggtgatagaaatttcattttcctagacagaccacagatataagccaaggagaatagaaagctctgacctaaacttcacaagtgtcccttccaaacagggacacgtaagagtaaacaaaaaaagaagatcaaattaaactcaaagtgagaagataggaaaaaataaagatgagaatataaatcaataaaacagaaagaggaaagaaaatagagaaaagtccatgaaaacaaaggctgactcaagaagatcaataagactgataaatctctagccagactgatcaggaaaaaaataagacaagatacaaattattagtatcaagaatgaggaaggtgaaatcactacagattctacaggtattaaaataataagaaacattatgatcaactccattcctttaatttgtcaagatagacaaaatgaacaaatttcttgaaagatgcaaatttatgcaaggagagacagat

SEQ ID NO: 708244 - DNA, 987 bp, Homo sapiens
tcataggactaatgatgcattgacaagactattgagatatataattatggaaatggctaaaatagagataaagtatctatttccacctcccaaccactaacagaaaattcaacacattatacacactgagcagctcaaagaaattgtaaagatccattattatttttaaaaggaaatttaaacagtgaatgctttcactgaaaacgataaacaatatattcccagtataaaccagaaacaaagtctgcagtagaaaactacaatgtccctagattcaagtgtgggtggggagtcatatttaaataataagtgcagaaaaaccaaaatattttaaaataattgtccatgcaagaaagaaaacagtatcatctagcttgaagacccactgtttttattttataatttatttcatgacctttagactgctagaaaaataaaacctaacttgagggcaaaggtaatctttgagaaaatatgtgctattgttgcctgcatagataatagtgtgatttatccagaaggtgatagaaatttcattttcctagacagaccacagatataagccaaggagaatagaaagctctgacctaaacttcacaagtgtcccttccaarcagggacacgtaagagtaaacaaaaaaagaagatcaaattaaactcaaagtgagaagataggaaaaaataaagatgagaatataaatcaataaaacagaaagaggaaagaaaatagagaaaagtccatgaaaacaaaggctgactcaagaagatcaataagactgataaatctctagccagactgatcaggaaaaaaataagacaagatacaaattattagtatcaagaatgaggaaggtgaaatcactacagattctacaggtattaaaataataagaaacattatgatcaactccattcctttaatttgtcaagatagacaaaatgaacaaatttcttgaaagatgcaaatttatgcaaggagagacagat

SEQ ID NO: 708245 - DNA, 660 bp, Homo sapiens
ttctcccggcctccagacacacaacagcttcattgtatgaggagagagcattgaactgaagctttcctgcaagcatatttgaacttggaccttcagtgcacagaccagcagccagcttccagcccaggcaccccctcctctcctcccttctcttcaactctgcaagagaatttcgttccatttaagtccaggagatgtggcaaaaacaacactccaaacaccacttccatttatggcaacgggatcctytaaaccagtgagaaatagtccttcagctcataagtcctttagcttctcctgtgcctcatacattcgttttctctgctcacatcggagggaagaaataggcctaaagagttggggtttattttttaagttttttttttttaaggagaaaaaaaacactgatatcaacaaaaagaagagtcactcattattaatattagaaggacattagctagacacagatcaacttccacatttttcagatgaggaaactgaggccaaagaagctaaaagccctagcagcactgtgggaaaatccctaggatgagccatcttaggacacaacattgaaagccatgccctcatttcccttacttacttgcactattaacttcctattaatgattacgataaattgctgtatactaagtccta

SEQ ID NO: 708246 - DNA, 660 bp, Homo sapiens
ttctcccggcctccagacacacaacagcttcattgtatgaggagagagcattgaactgaagctttcctgcaagcatatttgaacttggaccttcagtgcacagaccagcagccagcttccagcccaggcaccccctcctctcctcccttctcttcaactctgcaagagaatttcgttccatttaagtccaggagatgtggcaaaaacaacactccaaacaccacttccatttatggcaacgggatcctttaaaccagtgagaaatagtccttcagctcataagtcctttagcttctcctgtgcctcatacattcgttttctctgctcacatcggagggaagaaataggcctaaagagttggggtttattttttaagttttttttttttaaggagaaaaaaaacactgatatcaacaaaaagaagagtcactcattattaatattagaaggacattagctagacacagatcaacttccacatttttcagatgaggaaactgaggccaaagaagctaaaagccctagcagcactgygggaaaatccctaggatgagccatcttaggacacaacattgaaagccatgccctcatttcccttacttacttgcactattaacttcctattaatgattacgataaattgctgtatactaagtccta

SEQ ID NO: 708247 - DNA, 665 bp, Homo sapiens
ttctcctgcctcaacctctggaatagctgggactacaggcatgaaccaccatggctggctagtttttgcatttttaatagagatggggtttcaccatgttgggcaggctggtctccaactcctgaactcaggtgatcctcccactttggcctcccaaagtgctgggattacaagcgtgagtgagccatggcgcccggccatgtatttgttttataaccatgagaaactaaaatcaaaagtctatttgtagattctcccagtgggttataaaatctggaatatttctgaagaaattatttctgctacacacacacagacacatacacagagagacacacacacagcgcaggtgacagctctttrgtaactcaactatgaagtatagtttttagaatattttcactgatgaaagatcaaactacagtgattctgtgtgaactctggtgtgtatgcgtgtttctgtgtgtgttgtataaatatatatatatatttcaccttaaaatcagagaagaacctgattttgaaagagcaactgacaaattttatttccagggagattcgctgccaaaagggaaaaaccatcctgtctggtctcaccaaataccatctcccgtctattcgccactcagcaaccagagtgatctcttagaaacataattgggtca

SEQ ID NO: 708248 - DNA, 970 bp, Homo sapiens
actaattcctggtccataaattatgtttttcccagggatctgcagagataggaaggaattatgattagtattacaaaaagtcaaatgaaaattgtgcatttactctaaatagacttatacagataaaatattatgtatcttttctttgaccagtgattatattgactcaaatcattatcatacattgtagcgatttgcagattgttaaggaaataaaatattgtacttatcccttcaagatcctagcactgggttttgttagtttttaagtctttggcaatttgagaattttgattagcttttacttatgtgattaataagatgtcattgcagttggtagacaaaaatctttaaacacgtgaaatccatggaatagaataaagtttttttatagaaaggttgggagccattgattaatgtcctatctgtaatggacctacagggagaagggaactcatatgtttttgagtgtagaccccttacatcctatttaatttgcacagtaaatctacaaagtagatattgttattgtccagtttttttacaggtgatgaaactcaaagtaattatgtaatttgtgaaaatttacacagctctaattatagagaatcacgtgggtagtaaacttccagaagaagggacttttgcaatacaaagcagaaaataggtgatcaatacatatttgtatcttgcttaaatgtaaacatgaatgaatgagtaaatgacaggagactgcctctgtccctatactgttttcagtgagtcacaccatttttctcctaaatgagtctagaaaatttcttcagaaataaagtgacttaacctgtctttttttccataaatcatayggtgaaaatcctgaggagagaaataaagaccaaacacttacaaagtataattttctcttgggctttgttaactgagtaatttgtagagtttttggctttaaaaaaaaaaagtctgctttgca

SEQ ID NO: 708249 - DNA, 1346 bp, Homo sapiens
ctttcaagatgtgtggcacccaaagcaatggaatgactcaaaaatattgtaagtttctgggagccacatctgtgcaaaaatgggaccaattcagtcatacaactggataatatgttgagcaaatccagtgaaaccccgttatgtcaccatgtatagcatcccaaaatacaggccattcctgactctcaagtttgaatgttgcgagtttgcagacaaagacaaagataacgtctctgggaacatgttctgaacactgcccagggcctgtagagcagacaatctcattaagtgaggctgctcatggtttgaagatgagcattggtcttgctgccctctaaatgaagacataggaccctcagttgcatccttataagtgggccaggtacagtgagagggagacatggcttacggaattacagacatattacagaagaaatagaaaactttataagcatgaggctgtcatagaaccttggattttggtaacagaggcagagagcttcatttttgaaaaaagtctctgaggcagtcatcatgaaaaagcagccctttgagtacaaagataaatgttcacttgggagatgtcaccttcaagctttatttctgatactagtacagggagtgatcctgtcacaaaatagagctgccccttgtagtgcccgaggtctgaatggccttgaaactggcctgccttgcaagagcaattggccaactctcaagggaggcaaacatctgtacatattttttgatgatcatgtatctcactaataaaaaaattactaatcaaagaggaaggtgtttgcagactacttatatgaaaaaagacctgaagtatatcaatgttattatcatgattaacctaatagagaactcgtctcttacctaaaaaatgtactctatttctcacaaaattcttaaattggtgatgtacatgagtgcttctacagggtattagatttagctgtttcagctgttgagttggttgacatttgtattgcttactgttgtcttggtctctctgtttatgtgcagacagtctaacagtaaaacaaacaaacagacaaaaccaaaaccaaaatttcaagagtggaaaggagtttttccccagattgacattcaaattcatctgaccacgagttttgggaggcatgacatatgatgcagtgtgagtattctattcttgaaactaggaagtaaggtgcacaccagcccagccaagcytgcatagatgataatgtgttgtctctgtttaatgccgttattaatatgaaatgcttcctcattgcatcaccttaatttgagctttcagcaggatggtgacagttacactgctttagtaaagcaca

SEQ ID NO: 708250 - DNA, 970 bp, Homo sapiens
tttttatttttatttttagtagagatggggtttcaccatgttggccaaactggtctcaaactcccgacctcaggtaatctgcctgcctcagcttcccaaagttctgggattacagatgtgagccaccatgcccgtcccaccttatcctctctaagaggtgacagcattgaggcctgggtcccatctgcctgcatgccctgcccaactgcctcccacagcttatcctccgatgagcaaccagggaaatcaaattatgttgctaccttgtacagctccaagatatcagggcttccctcaaacacaaggaaagcagggctggacaggccctcagttctgggttctgaagcctggcctcggggtggatgagggactggagtgggattaaggcaggaactttggttattaggggaggggaacaaggaaagttctcatctcagtgagggtgcctgggcagcatggtgagcactagggatgcacccggatgagggggcccagaatatggcttctctcccccagggcgtggcacccaccctcagcttcccagacaataaaaagtcttgttcttctccacaccagaagcagaggcaggaggggtaagccagtgaaacgtgagggaagggttcatgctgttcccactgcctcagcccctccctggcactcagtgcccccttttcccctacccagctgcttggcctggcttcctttccaggctgggaaagctaaaccacacttaacccttcctgtcctagacctccccgctctttttttgagaatcttggtctgtcgcccaggctggagtgcggtggcaggatcatagctcactgcaaccttgaattcctgggttcaagtgattcttttatctcagcctcctgagtagctgagactataggctatcatgatagagacggagycttgctatgttgcccaatttggtctaaaactcctggccccaaatgatcctcacttcagc

SEQ ID NO: 708251 - DNA, 1118 bp, Homo sapiens
taaaagcacatcgtaagagtctgtgaaactgcaaagtaaattaggctataaacgtataaaacaaaagaaaacaaaatcaacagataatactgtaaacataatactttaaaaacagacctgctgagatatctgcggatgatcaggttgtataagtttgtggaataaaagcctagcagcattcatatcaacccctgaaaatctggtacctgttctatagtgatcatcattgctaaaaaacagaaaagaaaaaaaaaaatagaataaaaatttaaaattatttcattttttaatttgatatactatttaagacaataaatttgaaaatttcagcatattaaagaattgccacttacctaacagctaaaaaacttccatttaggcaaccagaggaagaaaacgttccatctatctcactaaaaaatttaaaaaagtttttttaatcatagaatcagaaatttaattgtttaccctttcttaaaaaagaattaaaatgaataattaatctaatgtttaatgctacagagcactcctctaacacccaattagatgaatcagaattacataaattgctaaagactgataaaataatacttgatgaaggtattactgtttattctagactttcttaaatattactttcatccatttatccaatgttatctgctttaaaacatggwattttaaaaattaagtgtgtatgttcatgtaaaaagttttttaatttaaaaaaattttaaacattttatattggcagtgagcctaatctgggatgcctttgggattttcagaaaaattatagttttggaaaacaagctagagaaacaaaacagcttttcaaatacaacccatcatcccaaataccaacaaaaaacaaataacatcttaagtgctactaggcaagttaacaaaatattcaagaaagaaataatactcaagtcttccacaaagtataaaagttaagatagtgaccattataaaaccagaaggaacacatttcaaggccaatcctaaaatggctacattaaatattttatgttatcatttaacatatctctatgcacatgaaagaactacaacttatacatatttaattaagatctttaaaaatatccatggat

SEQ ID NO: 708252 - DNA, 596 bp, Homo sapiens
agaaggcggcatggcagctcagctgggagtttcacygctgccctgtggaagagaatagttggtgtgaggcaaaagcacggtacagggaggataaatgggggtcagggttgaaaaagagtatgagtggaaagtaaataaggattcaaaggaatgttctatgccaatgtttaaataaatgtattattgtaaaatgaattctgacttttgcctatattaattcagatgactccttcccttccaaaatgcaaacgctattttactgttctattcaggtttgaaatcttgataacatttgttaagcttggggctgtgtgtgtagagaatggctttccttcttttatgtgcaggagagtgcagtgtcgtcaagcaatctgtctattattgcttcatgaacagtagccacaatttgagacataggatgctagtggcttgcctttgaggaaaaaggggtcttaaaaattcaatatagcattctatgagcaggatagaaactttcagaccaagaagtattattcactgcatcgtcgctattactcatcaattttatttcttaaaatatgagcagttcagtaaaatgttctcctctcccacaggtc

SEQ ID NO: 708253 - DNA, 619 bp, Homo sapiens
aataacccagtatggataagttacacacacaaaaagaggaaattcaacaggatttggaggaaggcagtctaggcgcaaataacccagtatggataagttacacacacaaaaaaagaggaaattcaacaggatttggaggaaggcagtctaggcacaaataacccagtatggataarttacacacacaaaaaaagaggaaattcaacaggatttggaggaaggcagtctaggcgcaaataacccagtatggatgagttaaaaaaaaaaaaagaggaaattcaacaggatttggaggaaggcagtctaggtgcaaataatccagtatggataagttacacacacaaaaaaagaggaaattcaacaggatttggaggaaggcagtctaggggcaaataacccagtatggatgagttaaaaaaaaaaaaagaggaaattcaacaggatttggaagaaggcagtctaggcacaaataacccagtatggataagttacacacacacacacacacacacacacacacacacacacacacacacaaaagaggaaattcaacaggatttggaggaaggcagtctaggggcaaataacccagtatggataagttacacacacacacaca

SEQ ID NO: 708254 - DNA, 1544 bp, Homo sapiens
agaattagactattgtttgaagaagccgttgtagaagggtaagagtcagggcaggaagaccaaataggaggctatagcaataatctggatcagagataatcttagcatcaaattcaacaagattctgtacattaaccttccattgcttactcaatcaagccaaaagtagagaaggggtgttttgagactctttggcatacagacttgtggttaattttctctttctcatctatttttcaattccattctaccaatgtatagtctttgattctagatcctttctggaattctgcttggcaggctgaccttccctctcagatgggactgtccctacatgtggcctctttgaccctgcttctgcagcctgtcctcttaccaccactttttcactctcaratggggctaaccacatccttccctgccactcatccattgatggctgttccagttcactttgggagtaaaaaatttgataattacttgttttgaggaaataaaatacatgtgctcacctaccgtattcagctagaagctggtgttgatattttgattaatctaggatagatgctttttccaaataagattggaagtctgtggaagtgcatgatttattttgctttccagccaaactatcaattaagtcatttcgtcttcatatgatctctcattagatcaagcattggctaatttctgtaaagaactatatagtaaatattttaggctttgtggcccatatgatttttgtcgtatgtgttcaactctgatgtagcatgaaatgaatgaatgtaactaataagtgtggctctatccctgtaatgtacaattttactaaaaatgtagcacgaattagaacgtacatgaatttgaattttacataaatgtaaaaatgtaaaatgaattttacctatgagccatatatttttggaaccctgcagtagatgatgattgacttactttgggggcactgttgttattattgtctcatattataggttcctcacttaacaggagaccgtaattcccatttgcccaagaaatggtcatttattcacgttctttttttcctcttgtcaaccttatgccctaagaccattttcatggcacattccttctttatatttagctctattcatctaatttgattaagactagtgagaagatgctcttgctctacatttgatacagcattcagtaagcttttaaagtgagaagtctcatatctatcactaatctctagtgtgctctaaagagatttttttgcaagatcttaatcaatacctgtcagtcaactgtagctgttagacaacctgcttagccttccagttttcttttcccagattccagcttttcagatctgcctgcatctgacaatctgtaattcaatattggactacatttcaaggataaaggaggaggcattatttatttgctatcaagcaaactggatgtaaatggaaaactgtcgagtatcttttatttcctgcaagttgcgtggcagctcaactatcctaagttttgcccataggaaacctctgtagatgatt

SEQ ID NO: 708255 - DNA, 976 bp, Homo sapiens
agacagataaacttacccagcttttaatacataagaccatcgtgccttctgatgctgagaggcagaaacaggaagaggcttgcagaatacagacactccatcaacatcagactggagcccagagctccctacagcccagtcctaaccctgctgctctgccagttccctctttaagtaggagggacattactccaggggtggtggagtggttgtggcagtgacacagaagcacctggcagggagggtgacagggccacagaggagtcgggcagagccagtattgggaagacacaagctgctctaagagaagaactgaaaatcatgtgatcacacagtacacccctgacatcctacagccacagaccaaatccctgctccagcccttctggcttctacccagcaagttgcctaatccccctgggcatggagtggaataggggttggatggaatgacccctagagtctcttcagcccaagattccaggggcttcacaatgatcagcatgggcactatcctgcaaatcatcgcctccaccttataagtgacgtaatcaagactcagacaggttaattgacttcttcaaggtcaacagagaataaaaacggagtccaagacccatgctgtcattggccttgccattggtcatcctctgctttgtggcttcaggaactgctatttgtgtctgagccagccacagtgtgagacagatggtgtttccagtacaggctccacctactaagtgtacaatctggacctgttgagtaaccaccctgagtctgtttactcctctataattgggaacatcatctcattggttatatggcaatatcatcacatcaacttagcacagggccccrcacacttaagtttttgctgaattagaactattattgttaccatcattctataaatttatcctatggttgagagaaaaaggagaggcagggattgaactcaagatctactgatctattc

SEQ ID NO: 708256 - DNA, 615 bp, Homo sapiens
ctgaatgcctgggtcacagggtgagtgcaattttgtatttgatagatatcgccagaatgtcctcccaagagttatcaatttatattcccattaacaaggcaggagagagtttactgccctccactcttaccaacataagatattatcaaaattttttatctgtgttatctagctggggaaaattgtaacttcatgtcatttgtattggcatcttctcttattgtaatttagggggacatcttttcatgtatttggaagccatttgcatatactttctgtgagccatctgtccatgccctgtgcccatttttttcttgggttattaatctttaaaaaaagagtggtctctctttatataatagtttattcattttctttccattttatttgtggtattcccctcccccccccaatcagatgtggttaattttagtgtgatcatatttatcttttttttttttttttttttacgacttctgggtttgaattattttgagaaaggccttcgcctttccggacaaagaacaacaaaagaatgaaacatgtttgcttcagtactttcrtggtttcatttatttatctttcgatctttgatccattcaaaattaatgtcgg

SEQ ID NO: 708257 - DNA, 1135 bp, Homo sapiens
tcccacatctgtctcatggacaacacaatggtacccatcccctggactctgagtgactgcgtggagccgagtgtgcagactcagaagaaggaggtatgtcctggcccagccttccatgcccacctcctgtgggatgacggagctggaccagctgctccacagctgttattggcagaatccctcaagagaaaggtaattattgactgctcacataggaggcccagagcatggcgcccctgggcaaaaagttaggggatgatgcaaagctccaacaggcaatgccggctccttggagtggctcagcttggctcacatgtggctcttcctcggaacagtgtccttccatcccctccaacagaatggccacctcatctgtcacagagtccccacatgtggccctgctggagctgcctccccctctagaggtggaagcatggtccctggaaatggcagatcctcagaagctgggtggggagcctgaaatgtctccttctgccacttgataaggcaaatgatgggtttgtttctagagaaatcttatccccacctcctaaaatcttaaatcggttgccgggtacccagaacctgaaaatacaagcctgacatggatgggctttccactgagatgtctctgggggagagataatgagctgcaatgtgaggctgagatctacttatgtggggagcccaccttctcagctgcccagtgcccccaaacccccagcctccacttctccccagagactctccaaggcctccatcattcaagctgggagygaagtctgagactagcagttgcctttgtggtatcttccactcagatgccctgcaggtcctcttaaaaagaataacagccagcaagagggaaagtggataatttctaaaaggtgagttggcaagtgtggttttctctctgtggacagtggacagtgggaggtcacagggaaagctggttgaagaaggggatctgtggggctcagagcacccaagggccacctcagagcagaactgtggaaaggtagtgcatttgtctgttttcatgctgctattaaagacatacctgagactgggtgatttataaagaaaaggggctgggcacggtggctcacgcctgtaatcccagcactttgggagg

SEQ ID NO: 708258 - DNA, 1135 bp, Homo sapiens
tcccacatctgtctcatggacaacacaatggtacccatcccctggactctgagtgactgcgtggagccgagtgtgcagactcagaagaaggaggtatgtcctggcccagccttccatgcccacctcctgtgggatgacggagctggaccagctgctccacagctgttattggcagaatccctcaagagaaaggtaattattgactgctcacataggaggcccagagcatggcgcccctgggcaaaaagttaggggatgatgcaaagctccaacaggcaatgccggctccttggagtggctcagcttggctcacatgtggctcttcctcggaacagtgtccttccatcccctccaacagaatggccacctcatctgtcacagagtccccacatgtggccctgctggagctgcctccccctctagaggtggaagcatggtccctggaaatggcagatcctcagaagctgggtggggagcctgaaatgtctccttctgccacttgataaggcaaatgatgggtttgtttctagagaaatcttatccccacctcctaaaatcttaaatcggttgccgggtacccagaacctgaaaatacaagcctgacatggatgggctttccactgagatgtctctgggggagagataatgagctgcaatgtgaggctgagatctacttatgtggggagcccaccttctcagctgcccagtgcccccaaacccccagcctccacttctccccagagactctccaaggcctccatcattcaagctgggagtgaagtctgagactagcagttgcctttgtggtatcttccactcagatgccctgcaggtcctcttaaaaagaataacagccagcaagagggaaagtggataatttctaaaaggtgagttggcaagtgtggttttctctctgtggacagtggacagtgggrggtcacagggaaagctggttgaagaaggggatctgtggggctcagagcacccaagggccacctcagagcagaactgtggaaaggtagtgcatttgtctgttttcatgctgctattaaagacatacctgagactgggtgatttataaagaaaaggggctgggcacggtggctcacgcctgtaatcccagcactttgggagg

SEQ ID NO: 708259 - DNA, 1135 bp, Homo sapiens
tcccacatctgtctcatggacaacacaatggtacccatcccctggactctgagtgactgcgtggagccgagtgtgcagactcagaagaaggaggtatgtcctggcccagccttccatgcccacctcctgtgggatgacggagctggaccagctgctccacagctgttattggcagaatccctcaagagaaaggtaattattgactgctcacataggaggcccagagcatggcgcccctgggcaaaaagttaggggatgatgcaaagctccaacaggcaatgccggctccttggagtggctcagcttggctcacatgtggctcttcctcggaacagtgtccttccatcccctccaacagaatggccacctcatctgtcacagagtccccacatgtggccctgctggagctgcctccccctctagaggtggaagcatggtccctggaaatggcagatcctcagaagctgggtggggagcctgaaatgtctccttctgccacttgataaggcaaatgatgggtttgtttctagagaaatcttatccccacctcctaaaatcttaaatcggttgccgggtacccagaacctgaaaatacaagcctgacatggatgggctttccactgagatgtctctgggggagagataatgagctgcaatgtgaggctgagatctacttatgtggggagcccaccttctcagctgcccagtgcccccaaacccccagcctccacttctccccagagactctccaaggcctccatcattcaagctgggagtgaagtctgagactagcagttgcctttgtggtatcttccactcagatgccctgcaggtcctcttaaaaagaataacagccagcaagagggaaagtggataatttctaaaaggtgagttggcaagtgtggttttctctctgtggacagtggacagtgggaggtcacagggaaagctgrttgaagaaggggatctgtggggctcagagcacccaagggccacctcagagcagaactgtggaaaggtagtgcatttgtctgttttcatgctgctattaaagacatacctgagactgggtgatttataaagaaaaggggctgggcacggtggctcacgcctgtaatcccagcactttgggagg

SEQ ID NO: 708260 - DNA, 627 bp, Homo sapiens
catgtcaacctggtctctacttctttaaatgttacatgctgcactctcttatctgaagaactggtttccagccaggcatggtgatttatgcctgtaatcccagagccttgggaggctgagacaggagaatcgcttgagcccaggagtttgagaccagcctgcacaacaagctgtctctacaaaaaaaattaaaagccagccgggcatgggggtgcgtgcctgtagtcccagttacttgggaggctaactaaggtgggtggattgcttgagcccaggaggttggggctgtagtgagccatgatagcaccactgcactccagcctgggtgacagagggagatcctacatcaaaawcagacagacaaaaaactgatttcctctgctgttttagctcatagctcactgaccatctatggactgtctacctttggttatgttcctaaccctgattcactcagctgagcacaggaaaggagctagggctcagggcacaaaacttggctgcctaggtaagaggagctatagaaaaggcaatatttttttctgatgattgctagcatccagaactatgcctggtatattataggggctcaataaatatatgatgaataaacagagtactttttca

SEQ ID NO: 708261 - DNA, 627 bp, Homo sapiens
catgtcaacctggtctctacttctttaaatgttacatgctgcactctcttatctgaagaactggtttccagccaggcatggtgatttatgcctgtaatcccagagccttgggaggctgagacaggagaatcgcttgagcccaggagtttgagaccagcctgcacaacaagctgtctctacaaaaaaaattaaaagccagccgggcatgggggtgcgtgcctgtagtcccagttacttgggaggctaactaaggtgggtggattgcttgagcccaggaggttggggctgtagtgagccatgatagcaccactgcactccagcctgggtgacagagggagatcctacatcaaaaacagacagacaaaaaactgatttcctctgctgttttagctcatagctcactgaccatctatggactgtctacctttggttatgttcctaaccctgattcactcagctgagcacaggaaaggagctagggctcagggcrcaaaacttggctgcctaggtaagaggagctatagaaaaggcaatatttttttctgatgattgctagcatccagaactatgcctggtatattataggggctcaataaatatatgatgaataaacagagtactttttca

SEQ ID NO: 708262 - DNA, 627 bp, Homo sapiens
catgtcaacctggtctctacttctttaaatgttacatgctgcactctcttatctgaagaactggtttccagccaggcatggtgatttatgcctgtaatcccagagccttgggaggctgagacaggagaatcgcttgagcccaggagtttgagaccagcctgcacaacaagctgtctctacaaaaaaaattaaaagccagccgggcatgggggtgcgtgcctgtagtcccagttacttgggaggctaactaaggtgggtggattgcttgagcccaggaggttggggctgtagtgagccatgatagcaccactgcactccagcctgggtgacagagggagatcctacatcaaaaacagacagacaaaaaactgatttcctctgctgttttagctcatagctcactgaccatctatggactgtctacctttggttatgttcctaaccctgattcactcagctgagcacaggaaaggagctagggctcagggcacaaaacttggctgcctaggtaagaggagctatagaaaaggcaatatttttttctgatgattgctagcatccagarctatgcctggtatattataggggctcaataaatatatgatgaataaacagagtactttttca

SEQ ID NO: 708263 - DNA, 627 bp, Homo sapiens
catgtcaacctggtctctacttctttaaatgttacatgctgcactctcttatctgaagaactggtttccagccaggcatggtgatttatgcctgtaatcccagagccttgggaggctgagacaggagaatcgcttgagcccaggagtttgagaccagcctgcacaacaagctgtctctacaaaaaaaattaaaagccagccgggcatgggggtgcgtgcctgtagtcccagttacttgggaggctaactaaggtgggtggattgcttgagcccaggaggttggggctgtagtgagccatgatagcaccactgcactccagcctgggtgacagagggagatcctacatcaaaaacagacagacaaaaaactgatttcctctgctgttttagctcatagctcactgaccatctatggactgtctacctttggttatgttcctaaccctgattcactcagctgagcacaggaaaggagctagggctcagggcacaaaacttggctgcctaggtaagaggagctatagaaaaggcaatatttttttctgatgattgctagcatccagaactatgcctggtayattataggggctcaataaatatatgatgaataaacagagtactttttca

SEQ ID NO: 708264 - DNA, 944 bp, Homo sapiens
ggtacccctcacacccgcagggaggatgatctgcattctacacaattggcctagacctctagggtcaggggattcttgcacgaagcttctcagcgcagaggcttcagaggcttttatcagggacttttccaacctacccaactgtcccaacgacgcagccccgccgcagccacgccccctctctctgggtcctctctggaagtccgcaggcagcaggctctcactgcggcccctcccacactcactctacaagkctgggctcctcggggcatccggctgaaggatcccgatgaggagggcagatttagacaattccctgtgattttccgtggcacccagcccgcaccagcttgctgcggtgagggtaggggattgtacctggcatgggcggggctgccaagagcacttccttcacaggccccagggattggtgtcactacgttctatctccaaagtggagcatctctgactgaaaggggagcactactagctatcccaccggtcacaggcaaggaacgggactgtcctgggtcactatgcacggagcaggcagctcaactgggcatcaccacggaacgtgggcaggagggtgccctcccctctctctcggtgaggggcgttctacacgcacctccgcacctctggcaccagcagcttcctgggggtcccagaggagctggtgctgccctccccagccttgctccctgaaatcgcagcatcggggcacttgcggtctaatgagctggttgaccctctgcctgccttggggacatgctctgcagttgttcctcacagggaaagcggggcagctggaagtgtaggggatgatccccagctactctctgggattctctggattttaggtgcccacatctgtgtcccagtgtctcccagccagtgacttgggtccttagatgcccccacagttcaggacagccctcctg

SEQ ID NO: 708265 - DNA, 944 bp, Homo sapiens
ggtacccctcacacccgcagggaggatgatctgcattctacacaattggcctagacctctagggtcaggggattcttgcacgaagcttctcagcgcagaggcttcagaggcttttatcagggacttttccaacctacccaactgtcccaacgacgcagccccgccgcagccacgccccctctctctgggtcctctctggaagtccgcaggcagcaggctctcactgcggcccctcccacactcactctacaagtctgggctcctcggggcatccggctgaaggatcccgatgaggagggcagatttagacaattccctgtgattttccgtggcacccagcccgcaccagcttgctgcggtgagggtaggggattgtacctggcatgggcggggctgccaagagcacttccttcacaggccccagggattggtgtcactacgttctatctccaaagtggagcatctctgactgaaaggggagcactactagctatcccaccggtcacaggcaaggaacgggactgtcctgggtcactatgcacggagcaggcagctcaactgggcatcaccacggaacgtgggcaggagggtgccctcccctctctctcggtgaggggcgttctacacgcacctccgcacctctggcaccagcagcttcctgggggtcccagaggagctggtgctgccctccccagccttgctccctgaaatcgcagcatcggggcacttgcggtctaatgagctggttgaccctctgcctgccttggggacatgctctgcagttgttcctcacagggaaagcggggcagctggaagtgtaggggatgatccccagctactctctgggattctctggattttaggtgcccacatctgtgtcccagtgtctcccagccagtgacttgggtccttagatgcccccacagttcmggacagccctcctg

SEQ ID NO: 708266 - DNA, 607 bp, Homo sapiens
ggaccgccaggctgagattaacagacaaaaggagtgagtgagggttctgagggtccggaagaatttgccagttattggggggcaggtcatatttgggggacaggtcgtatttgggggacaggtcgtatttgggggacaggtcgtatttgggggatgggtcatatttggcagggaaggcgaatttgcttgctagtgctgctgtaacaatgtagcataacctgggggggcttaaaccacagaaatttttcatctctcagttctggaagctagaggttcaagatcaaagtatcagcagggttggttccatctgagggctgtgaggaagaatctgttccatgtttctcccctggcttctggtgttttgccagcaacctttggccctccttggcttgtaaaagcattgcccacatctttatcttcacttggtattctccatgtgtgtatctrtatccaaatttcccctttctataaggacatcagacatattgcattagggccaaccctaatgacctcgtcataatttgattgtatctgcaaagaccctatttccaaatcaggtgatattccaaggtaccgaaggttaggatttcaacatatgaattaggga

SEQ ID NO: 708267 - DNA, 706 bp, Homo sapiens
tcggcctcacaaagtgctgagatcacaggcatgagccacggcgcccggcccttgaattcttagaaacttttgaataagggccccacactgccatcctgcagtgggccctgcacatgacacagctggtccttccttagaagttccctttggagagttacctcctgccttcccacacactagcatcagagctgcccagtatcataaggacctcagaactgtaacctggaagagccatgggacaagcctgatgtaggccaaaggactgagtccaacctgggtttgaatcctaccctgcaatttactagccttaggctaattatcacatgcccctgagcttcagtttccttatttccaagaggaagaaaatcataccttaccttacaaagttgttgggaggatcaaagaacataatttattgtagcggggcacctggaagagactgtggctttaaatactgaaggtggaaaatcgccatttggggaatgtcagataatctctttagtccataaagaaaaaacaaatgaatttacctttgagcagatactccctttgttcaggaggggccatgtcactgggccctcctggtagtgctggtaggaccagttctcattctaatgcatatcattaacaaatgtcaatcgsagactcctcagatgaaatctaaagtcagaaattcattttctgtaaaacatgggatttcagtgtc

SEQ ID NO: 708268 - DNA, 778 bp, Homo sapiens
tgtcataaacctcatttgtttaactaaagcaatatatagtcttttaacttcatagccatttaagacaattaagaaagcactaaggaataaagtgaataagcctatcctaaaagcacataccacaaacttttaaaaactctttttttttttttttttttttgagacaaggtatcactctgtcaaccaggctggagagcagtagcgtgaccacggctcactgcagcctcgaactcctgggctcaagcaatccttccacctcagccttacaagtagctgggaccacaggcatgcaccaccatgcctgcctaatttttgttatattttttttttaatagagacagggtcttgctcttgaactcctaggctcaagcaatctgcccrcttccgcctcccaacgtgctgggattacaggcatgagccactgcactgggccctaactcttttctttgtaagagacggagcctcgttgtgtttcccatgctggagggccgtggaaattcacaggtgcgatcagggtgcattactgcctccaatttctggcttccagtgatcctccttcctcagcctccagagtagctggaactacaggcccgcaccactgtgcccggccacaaactaattttatctttggaaagcatagggataaagaggtataacagctattattactcatgtaaggaaagttaatacagatgagaatcaggaacttttattaggtcagattctggtacaagaaaactaataatatacaaagtactaaataatgcaaatgggcaaa

SEQ ID NO: 708269 - DNA, 778 bp, Homo sapiens
tgtcataaacctcatttgtttaactaaagcaatatatagtcttttaacttcatagccatttaagacaattaagaaagcactaaggaataaagtgaataagcctatcctaaaagcacataccacaaacttttaaaaactctttttttttttttttttttttgagacaaggtatcactctgtcaaccaggctggagagcagtagcgtgaccacggctcactgcagcctcgaactcctgggctcaagcaatccttccacctcagccttacaagtagctgggaccacaggcatgcaccaccatgcctgcctaatttttgttatattttttttttaatagagacagggtcttgctcttgaactcctaggctcaagcaatctgcccgcttccgcctcccaacgtgctgggattacaggcatgagccactgcactgggccctaactcttttctttgtaagagacggagcctcgttgtgtttcccatgctggagggccgtggaaattcacaggtgcgatcagggtgcattactgcctccaayttctggcttccagtgatcctccttcctcagcctccagagtagctggaactacaggcccgcaccactgtgcccggccacaaactaattttatctttggaaagcatagggataaagaggtataacagctattattactcatgtaaggaaagttaatacagatgagaatcaggaacttttattaggtcagattctggtacaagaaaactaataatatacaaagtactaaataatgcaaatgggcaaa

SEQ ID NO: 708270 - DNA, 985 bp, Homo sapiens
gaaggctttcgttcctctgaaatatccagagtggttatcaagaatgtccccagttggccaatttctcagcttcctgtttgctttagtggcttcctcccatacaactatggcgtgacaagacatgaccagaggtctcgctcctgcttttccgctcatccacacaaaggctcttctagtttgtcaagaaggccctgggcaagaggggagatccaaattctatagtccctgaacagatctgaatctaaactatctccactatctattaaaatagcctgggaatctccacggtctttaaaataggcctggaaagatgaagagaattgatagggacattcaagttggggaatagcataggaacacaagtgttggtgttcacagggtggtgaaaaacgagtggctgaagccagtcagagcacgagttgtgttcagtcttgaacattgtgtaggtggagggtggaagcaagtaacataagagaaccacgtgtataatggcttacattaacctggcgagtgaagactactgcaagaagcttggcatggctgaagcacaaattttggataagaagagatttaaccagcaataaagaaattaagtaggcaggagtcaggtaatcaagtccctggcaggctgtgaaatttgaatttaatccaagaggcaatggtacttttgacaagggtataatatgatcagctttgtgttttagaacgatcacccttataattttagaagaatggattggagggataataacataaggatgaagaaacaacatggatargagaaattttgcaaagttagcatacacagggcctccttgcttgataaaatggggatggtgatggatagcacctttgtggtttcagtcactgtctccatgaagatgctggtcttttaaactggaggaagaaaatggagcttggtttgagatatgatacccccaaagtttcttatgaagctgcatatcccaatccccagtggaattca

SEQ ID NO: 708271 - DNA, 1646 bp, Homo sapiens
ggtatattttacaggataggttagtgcctcggtgagctgccacagaacctgataccaactgcatggccatggaaattcttcataaaattagtccctgcctcaatttcaaacttagggaacaatttggtagtattggcccaaatgaaaacatagttataaccttttcatcagggcccaaggtaatcatttcctgctttaaaaaaaaggctttttaaaaattttcatccagaaaacaaattctaggaacagttaatttctatagaaaatttactgccaagagaacaagtaacctctgaaaactcctatcaatgcagcattagtttgaaaagggcagagtcaaacacaattttatgttgttacaggatgttaaaaactgcacccagggctggacacggtggcycactcctgtaatcccagcacctggggaggctgacgcaggcagatcacaaggtcaggagttcaagaccagcctggccaacatagtgaaaccctgtctctactaaaaatacaaaaattagctgggcatggtggtgcatgcctgtagtctcagctacttgagaggctgaggcaagagaatcgcttgaacccaggagttggaggttgcagtgagccaagattgtgccactgggctccagcttgggcaacagagtgacacttcatctcaaaaaaaaaaacaaaaaaaactgcacccggccaccatatgctttatgtaatgtgtatagttttttaaatgagatattgctgtcatattgtaagatgaaacaaaatagactgatatgtgaaatatttaaagacttttgctgattttatattttatggaaactgtttttttcttttttttatagaaatgcttactcatgaaaccagttcatatttgtaataattttgtgagtcagaaatagtaagttatgtaatttaaaaggagtgtcagaattatcaagttgtttgttttttttttgacacttggtcatacataatttgtgacaactggtatttaaaaagtttgtgttgcttttctcttcaaaacataagctttctaattctctataaaataactcattctgagattattttttgacagtaagaaaagtacgagtgttagggagagaaatacatttctaagctagtacccactgtttagttgacagggcacattatgcatttgtgtgcagctgtgaagcgctaccttctggacactcagcaaaaatacatcttccgaatgtattccagatgctgatagtccggaggggcatgtgctcttctagctccctgctgctgtgttatacttctggtaatgccagggtaccaattggaaaatttgttcacggttacctttgttttcctgatatagaaaactgatgatgtggtttctaatagaacaaaagcatagtaatacagtttctgttattaaaggaaaaaaaatcaatcttttaaccattacaaaactcaggatgtacttaaactatacaaatggtttaatattaaacaatttaaagttataaaaataccagttataaggagaaaactttttctgaaataattgtatttttgcaggaatggtatatgcgtattttcaggaaactaggaagtgttttccttcttaatcataaattcatagtcctaaaaaccttcaagagtaagtgaaa

SEQ ID NO: 708272 - DNA, 1646 bp, Homo sapiens
ggtatattttacaggataggttagtgcctcggtgagctgccacagaacctgataccaactgcatggccatggaaattcttcataaaattagtccctgcctcaatttcaaacttagggaacaatttggtagtattggcccaaatgaaaacatagttataaccttttcatcagggcccaaggtaatcatttcctgctttaaaaaaaaggctttttaaaaattttcatccagaaaacaaattctaggaacagttaatttctatagaaaatttactgccaagagaacaagtaacctctgaaaactcctatcaatgcagcattagtttgaaaagggcagagtcaaacacaattttatgttgttacaggatgttaaaaactgcacccagggctggacacggtggctcactcctgtaatcccagcacctggggaggctgacgcaggcagatcacaaggtcaggagttcaagaccagcctggccaacatagtgaaaccctgtctctactaaaaatacaaaaattagctgggcatggtggtgcatgcctgtagtctcagctacttgagaggctgaggcaagagaatcgcttgaacccaggagttggaggttgcagtgagccaagattgtgccactgggctccagcttgggcaacagagtgacacttcatctcaaaaaaaaaaacaaaaaaaactgcacccggccaccatatgctttatgtaatgtgtatagttttttaaatgagatattgctgtcatattgtaagatgaaacaaaatagactgatatgtgaaatatttaaagacttttgctgattttatattttatggaaactgtttttttcttttttttatagaaatgcttactcatgaaaccagttcatatttgtaataattttgtgagtcagaaatagtaagttatgtaatttaaaaggagtgtcagaattatcaagktgtttgttttttttttgacacttggtcatacataatttgtgacaactggtatttaaaaagtttgtgttgcttttctcttcaaaacataagctttctaattctctataaaataactcattctgagattattttttgacagtaagaaaagtacgagtgttagggagagaaatacatttctaagctagtacccactgtttagttgacagggcacattatgcatttgtgtgcagctgtgaagcgctaccttctggacactcagcaaaaatacatcttccgaatgtattccagatgctgatagtccggaggggcatgtgctcttctagctccctgctgctgtgttatacttctggtaatgccagggtaccaattggaaaatttgttcacggttacctttgttttcctgatatagaaaactgatgatgtggtttctaatagaacaaaagcatagtaatacagtttctgttattaaaggaaaaaaaatcaatcttttaaccattacaaaactcaggatgtacttaaactatacaaatggtttaatattaaacaatttaaagttataaaaataccagttataaggagaaaactttttctgaaataattgtatttttgcaggaatggtatatgcgtattttcaggaaactaggaagtgttttccttcttaatcataaattcatagtcctaaaaaccttcaagagtaagtgaaa

SEQ ID NO: 708273 - DNA, 1437 bp, Homo sapiens
tcatgcatttactatgaagggagagagggaaaagtgactcatgtttggttaactattggtacaatgatagatacatgcatgtctgttctctataagactattgaatttctgtgaaaagcaacaccctccaaccaaacacctttttcaagtagttcaagagtcaaagatgagaagggctggaacccaaggaatatagatggttgaagctaagggatcaggtccgggacagattcctggaagttttctattgaagtttattggaagcctttgtgttctctcaacatccggaaacattttcacagctctttaaggtactgtcatcctattctttagacctgattaaggctctcaatgcttggttcaggaaagttgaaatctggaattcttccacctcagaaatgtaccaaaacacaggaaaccaaagagcaatacaaatctatagcctcaaataaacagaactcctttccacattggtataatttgaagaagaggtctcctcacttaagcctcccttggagaatccccatcctaatacaggaaatatgttttccacttaatgaggccactgtcaaaagctttgctttcctctcttgacatttttcttatttgttatccaagatgctatggaaattaatggcagctcttgatcgtgaatccattccccctatatttaaggaataagcctgcaattcctataatcctcataccaaacaaggatatcttgatattgagctctgctactcctacaaaggttggtgtttgggatcctgacatagctgagattcctcaattattactcatctgcccttctgttctggttgtctgaatgttgagttttgaatatagcctcttaataggataagctgggctggaaagactttagagacatcccaaaatctgtcatcctagctctctgttggcttcaataatcactcatgaatcccaaactcaaatataacaaattgaaagcttatgacactaaaatgaaatctgagtcctgaggtttattaattagggtcatgtacatctgagaacttatgaaaaaagtttttgcaaaattactagtttatratatgtcaacaaagtatgtttttagagctcgaaaattccacacaactaagcattttaaaaactggaatgcccaagccccactctcagatattctgatttaattagtctgggggtagggctcagacatcagaattcttttccctcaatgttctcgaggtgattctaatgttcagtcaggactgacaacttctgacctagtggtgcccacagtgggagatgtccaacagaatcaccaaaggagcttgttaaacaaacaaagaaacaaatgagctccctgacctcactgtagacttgcagcatcagagtctctgggctcaggagatgtgtgacgggctggaccaaccaccgacagtagcacttaggacg

SEQ ID NO: 708274 - DNA, 1437 bp, Homo sapiens
tcatgcatttactatgaagggagagagggaaaagtgactcatgtttggttaactattggtacaatgatagatacatgcatgtctgttctctataagactattgaatttctgtgaaaagcaacaccctccaaccaaacacctttttcaagtagttcaagagtcaaagatgagaagggctggaacccaaggaatatagatggttgaagctaagggatcaggtccgggacagattcctggaagttttctattgaagtttattggaagcctttgtgttctctcaacatccggaaacattttcacagctctttaaggtactgtcatcctattctttagacctgattaaggctctcaatgcttggttcaggaaagttgaaatctggaattcttccacctcagaaatgtaccaaaacacaggaaaccaaagagcaatacaaatctatagcctcaaataaacagaactcctttccacattggtataatttgaagaagaggtctcctcacttaagcctcccttggagaatccccatcctaatacaggaaatatgttttccacttaatgaggccactgtcaaaagctttgctttcctctcttgacatttttcttatttgttatccaagatgctatggaaattaatggcagctcttgatcgtgaatccattccccctatatttaaggaataagcctgcaattcctataatcctcataccaaacaaggatatcttgatattgagctctgctactcctacaaaggttggtgtttgggatcctgacatagctgagattcctcaattattactcatctgcccttctgttctggttgtctgaatgttgagttttgaatatagcctcttaataggataagctgggctggaaagactttagagacatcccaaaatctgtcatcctagctctctgttggcttcaataatcactcatgaatcccaaactcaaatataacaaattgaaagcttatgacactaaaatgaaatctgagtcctgaggtttattaattagggtcatgtacatctgagaacttatgaaaaaagtttttgcaaaattactagtttatgatatgtcaacaaagtatgtttttagagctcgaaaattccacacaactaagcattttaaaaactggaatgcccargccccactctcagatattctgatttaattagtctgggggtagggctcagacatcagaattcttttccctcaatgttctcgaggtgattctaatgttcagtcaggactgacaacttctgacctagtggtgcccacagtgggagatgtccaacagaatcaccaaaggagcttgttaaacaaacaaagaaacaaatgagctccctgacctcactgtagacttgcagcatcagagtctctgggctcaggagatgtgtgacgggctggaccaaccaccgacagtagcacttaggacg

SEQ ID NO: 708275 - DNA, 1437 bp, Homo sapiens
tcatgcatttactatgaagggagagagggaaaagtgactcatgtttggttaactattggtacaatgatagatacatgcatgtctgttctctataagactattgaatttctgtgaaaagcaacaccctccaaccaaacacctttttcaagtagttcaagagtcaaagatgagaagggctggaacccaaggaatatagatggttgaagctaagggatcaggtccgggacagattcctggaagttttctattgaagtttattggaagcctttgtgttctctcaacatccggaaacattttcacagctctttaaggtactgtcatcctattctttagacctgattaaggctctcaatgcttggttcaggaaagttgaaatctggaattcttccacctcagaaatgtaccaaaacacaggaaaccaaagagcaatacaaatctatagcctcaaataaacagaactcctttccacattggtataatttgaagaagaggtctcctcacttaagcctcccttggagaatccccatcctaatacaggaaatatgttttccacttaatgaggccactgtcaaaagctttgctttcctctcttgacatttttcttatttgttatccaagatgctatggaaattaatggcagctcttgatcgtgaatccattccccctatatttaaggaataagcctgcaattcctataatcctcataccaaacaaggatatcttgatattgagctctgctactcctacaaaggttggtgtttgggatcctgacatagctgagattcctcaattattactcatctgcccttctgttctggttgtctgaatgttgagttttgaatatagcctcttaataggataagctgggctggaaagactttagagacatcccaaaatctgtcatcctagctctctgttggcttcaataatcactcatgaatcccaaactcaaatataacaaattgaaagcttatgacactaaaatgaaatctgagtcctgaggtttattaattagggtcatgtacatctgagaacttatgaaaaaagtttttgcaaaattactagtttatgatatgtcaacaaagtatgtttttagagctcgaaaattccacacaactaagcattttaaaaactggaatgcccaagccccactctcagatattctgatttaattagtctgggggtagggctcagacatcagaattcttttccctcaawgttctcgaggtgattctaatgttcagtcaggactgacaacttctgacctagtggtgcccacagtgggagatgtccaacagaatcaccaaaggagcttgttaaacaaacaaagaaacaaatgagctccctgacctcactgtagacttgcagcatcagagtctctgggctcaggagatgtgtgacgggctggaccaaccaccgacagtagcacttaggacg

SEQ ID NO: 708276 - DNA, 654 bp, Homo sapiens
aaaaatacattacagctttcaaagctactttatttttgttttgaaggtagaggatctccctccataggataacaggggggttgataagattgctcagatgtcgatcacatgtagagtctggatttattgtctcccgacactcagcaccccatatccatatatgtaatacaccttatggcacgctcactgtatactaagtatgagctaactgttttattcgctttatcatatttaattttctgaagtaagtatcattatcccatgttacagacagaataactgagkgttaatgtcacagctctagaaactggtaaaactgcatctggaaatttgcttgtcttcaaagtctgtgctattaacacagtgcttaatttagctgattttaaagaagctaaataaaaccaactgtaaaataaattgaaatatgatttgactgcatgtcagagcatgctccttcatctggaacagaagcattgtcatgctaggtattattagtgtataccttgttttcgctagtaaaattgcaccttgactgagggctgtagttcctggtctatcttgaaaatcagtctgaataatatcctaggaaatctaactatcttttcagctgcatttgcaggaggataaggttttcatttttatgtgacagaaaat

SEQ ID NO: 708277 - DNA, 1335 bp, Homo sapiens
attgagtaagtaagcaccaatgcagaaaaagtttacgaataaatggaaaatatgagcaaaataatatgagctatggaagagagatctgggatacctaatgtatgaaaaacataattattaggggacaaaacagaacagaggataaataatgtacaatgaaataatggaataccagttcactgaactgaagacaaacttaaagtttcaaaaaaggccattgagttccaaacataattaataagacacacatacatattgtggtaaagctttgtaaactaaaaagttacaggaaaaaagagtacaatgtcttctaacttctagaagcccagtgcaagtagaaagataatggaatatcaatatcaatatcaatgatatcaatatgaatatcaatataacaatagcaataaaaattaacatataattgtgaatccaacaaaactatctctccttaagtaacgaagataagtaagaatatattcagagaaacataaaatgagtgcttacaaacaacagatgtttttcagagaatatttcttttctttctttttttttcccccaggctggagtgcagtggtgcaatctcagcccactgcaaccttcacctcccaggttcaagtgattctcatgcctaagtctcccgagtagctgggattacaggcgcacgccaccacacccaactaatttttgtatttttggtagagatagggtttcaccatgttggccaggctggtctcaagctcctgaccacaaatgatctgccagcctcagcttcccgaagtgctgggattaaaggcatgagtcaccgtgcctggccatcagagaatatttctaaaggaaaggaaaaaatgaaaccagaagggaagtgtggcagagatgtgctgtgttcatcctccaacccccattttccctgggaggttactgcagctagatggagaccatactacaggtgctgactaatgagtcatgagaagaaggggcttatgggactgggggaacatataatcatagtgtgtccagaattggtgggttcttggtctcactgayttcaagaatgaagccacggacccttgtggtgagtgttacagttcttaaagatggtgtgtccagagtttgttccttcagatattcagacgggtttggagtttcttccttctggtggattcatggtctcgctgtcctcaggagtgaggctgcagaactttgtggtgaatattacagctcataaaggcagtgtggacccaaagaatgagcagcagcaagatttattgcaaagagtgaaagaacaaagcgtccacagtgtggtaggggacccgagcaggttgccactgctggttc

SEQ ID NO: 708278 - DNA, 639 bp, Homo sapiens
tttgtattttctacatgacaaaagttttttgacttttcttgtaccatgcaactttgaagaataaacacaccttatgcttcaaagttgcccagctaatttcatcttcttttgaagatggttttataatgtttctgatacaattttcttcacttccatgaagttgaggggcacctgccagtccaatccaagaaaagaggaatcacagttttgcctggaactggatctaaaggaagcctcccaaatgaagaccaaatggcaggtgcagagaagtggtgccccacagaagtaaagaacaaggattctggcattgcaytggagttcaaatcccaaatagaccactgacaagctgtgtgaccttgggaaagtggcaacctcctcaagcttcagtttcttcacccatagttaggagagataactccctcttccaggagctgtaaaaagatcaattacgtaaatcaaggtctacaggatgccaaactccaagtctgctttggcataggtgcccatcgcactttccactttctttttcctggagaaatggccctattacccacaggctgcctgggctcaaggaaacaacagcaggtggccaggccttcctggtgtggtctcacaccagggagctctgcctgaagaata

SEQ ID NO: 708279 - DNA, 639 bp, Homo sapiens
tttgtattttctacatgacaaaagttttttgacttttcttgtaccatgcaactttgaagaataaacacaccttatgcttcaaagttgcccagctaatttcatcttcttttgaagatggttttataatgtttctgatacaattttcttcacttccatgaagttgaggggcacctgccagtccaatccaagaaaagaggaatcacagttttgcctggaactggatctaaaggaagcctcccaaatgaagaccaaatggcaggtgcagagaagtggtgccccacagaagtaaagaacaaggattctggcattgcattggagttcaaatcccaaatagaccactgacaagctgtgtgaccttgggaaagtggcaacctcctcaagcttcagtttcttcacccatagttaggagagatarctccctcttccaggagctgtaaaaagatcaattacgtaaatcaaggtctacaggatgccaaactccaagtctgctttggcataggtgcccatcgcactttccactttctttttcctggagaaatggccctattacccacaggctgcctgggctcaaggaaacaacagcaggtggccaggccttcctggtgtggtctcacaccagggagctctgcctgaagaata

SEQ ID NO: 708280 - DNA, 2034 bp, Homo sapiens
tcttttaggaagtctccaggtcttacaacccagagtttggaagggctggggagagagaaaaagggtcagagaatttgtatttttaatgcttggggttgctaggtagttgagtatcrgaaaagtgaatatggaaacttgcctcagttgacaaaagtagaacgtaagaaagggaaagagaaatagtgcctcaagcaaacaattaagagcaatagtttactgttttcagatatgatatatagactacccacctctacccagagtagtgtttttaatgcagactcctaggcccaggtcttgactttctgaagtatattttcagtcatactgaggtttgaaaatctcctggtataacaaaataaggttgaaattagttcaaatttttatttttccacttattaactgtacccatggctcttgtccttcttatgttccactccaactctgcttttaccactctagccttttttctccttgttattacataactcaatcaactaactgtacctattcaactagatagttgtgtaacatgccatcatttggtcttaaaccattggagtgctatcactggctcctcgtactgaacttgtacagttttctagctgacagctacttttaatttcctgacctctcatccacaatgtctggtcctgacatgactgccaattcttctccctagtttctatgtggtctgaattactaccctgaccaatctgatgcccaggtttgtttgttttttatgagtttacccaatttagagcctggatagcaaacttaactcaagggtatggactcagatgcaaaacttcagtgtgtatagcctacagactctataatcaccgaatacttctttgtaccccagtgcagatcgtgtccatatctaatttaataggcaagagcacacatgctaggtgtggaaaaatggacaaggattctgcattttaagcagaatctcaaaaaataagcaataataattaaccagaattacaaccctttcagatattaaaacatgcctagtaaacttctattaacgggtacctacaatcaaggtgaagacaaaggacattcctgtgagaggtaacagtaagagcaaatacatgacttaggactagtaaacgactcagtgttaggttttctataaacattccattgtttctcacgatgcagtatgagtaacacctgcttcaaaaatttcagagggtgactgtttaaaattttattcatgggtgctctagacttattaaatttggatccatgggaatgcgactcaacagtctgcattttcaacaacagatgcaccatcaaaaaacatcaagtagctatatataactaaggatatgtagttgaagacttgagaagactgagccatgtatttctaaaagggctgaaaactatgtagtttagagaatgctcactttctataaaaaagtggcagtgtttggaattagccacacactgtggaaccaattaccatttaagttataatacacaggattctagaagaaaagaaaatgatcttatctgaagtccagtaagttttgttgtgtgtgtgtgagggaaggacggagggagagagagaggctgagggagagagagagagagagagagagagagagacagaataggatgacagtgcaaggaggccctggtgtggcttctaagtggcaaggaaccttcagtaagaaagcaggcacagtctaaagacttgaaaccatggaaattagatagattccagtgaaggctatggtagtgagagaaaagtcaagtaatgttattgaattaaattcttacttggatttcctagggaagagatggatcaagatggtgaaatagaagactccaccaatcatccccttcacacgaacaccaatttaacaactatctacatgcacacacacaaaagcttcatcaatttaacaactatctacatgcacacacacaaaacctttgtaagaactcaaaatcaggtaagtactcatagtacctggttttaacatcatattggtgaaagaggcactgaaaaggtagaaaaaa

SEQ ID NO: 708281 - DNA, 1108 bp, Homo sapiens
cctgcttcaggagacaccagactgaactctttctctctgacgttctccttgggtccatcccacatgctgcctgggagcttcttccttgtcacctaaggtcccttatgtcttcatttttgccctggatccagcgcctatagatggaaagagatttataagaaacactgcacaatcaaaatatatggactttgtttgaattcttattcaaagtgtaagaaaaaaaagttatcctggatatatttgatgatattaaggaattaatgttccttcttaggtgtgaaataatattgtggttgtgttttaagaaagagttttcccctatttacatgtaaaaatatgataggagaaaaaagatgtctacttttttgcttcaaaatcttcaactctccctttcacctacctctttcccgttactatgtaaacatgtcctatttgcattagaaatattaaatttctaaattcatatgtagtaaaactactaggttttaaaaaaattgagtgtcagatctgttatgaggatgaaattaactgtttccatgtccattttcattttttaggctacatggtggggagaccagaaagctcactatttcacttattcctgtctcctttgtcattttctttagtaatattctgggtagagaaargtaaggagtgtgtaccaatgacctctgtagtgctaagatacattcatgcgtttttccaatgcgaggaggtagagatcgttttacaaagtcgagctcatgctctttgtttcccaactggcctttgagtacaggtacgttaggatttgtagacctctgaggaggatttcaggaccttgctgcaaacagtggaccagtaatggtgattaggtagctcgagggcccctaaacacctccctgatgattgaccagctgaaatgcatgtgtatggcttaggcctctcccatccccactccctgggagaaggggagatctgttacaagtgcactgaaagggtctctccagacacttgacaatcagaagcagatatggtagcttttagccccctcgggcccatctttgacttctgctacccatgtggttgggctgtacccagtaagaaaccccctcatcttcaatggtcg

SEQ ID NO: 708282 - DNA, 563 bp, Homo sapiens
tgcaagggcatggatactaactggtggtggttgtagtctgtcctctggtcctcaatgattcatgtctctcctacacgcaaaatactttcacccccccaccaagatccccgagaatgtaatctaataacagcatttgctccaagaccagagtttcattatctaaatcaggccaggtgtgggtgaggctccatggacacatagttcctctcaactgatgaatctgtaaatgaaagagacaaattatcttcccccaacatccaagatacaattctgggagaggtataggaaagaagctgcagacatttttctttaaaaaaggggaaatggargataaaaaggaatcattggtccataataattccaaaatacaactgagaaaatgttcagatttttaaaattaaatttcaaactttgggaataattctccatggctctagaatctgcttcctgggatcttagttctaccatctgagtcattcttccttttctaaatgaaagtcagctcacgtttggagtcattttatcaacctgcttcctactagtagaattggagttacaagggt

SEQ ID NO: 708283 - DNA, 1735 bp, Homo sapiens
aaggtaagataaagtcagaccaggacatggatcccattcctggtttcagcctctgctgggctctgcatttaaagactaggcctccagaaccacctgaagccaggtgaccccagggtcctacctagaatccttagacaagctatgttttctgagctccacattttttccatgtttgttcaagaagaacataagctcctttggctatctcatttctcctgtacttttctattcatactattctattatttctctcccatgccccagcctccctccatgcctatccccctacatctctctccatctttgtaactctaagctccataacagacaaactattgtattcctagttgcctcctagatatgtgtcctctctggaatgttcttctgcattttccattttgtgttgctataaaggaatacctgagtctgggtaatttataaagaaatgaggtttatttggctcacatttctggagattgtacaagaagcatggcactaacatctgctgctggtgaggccacaggtagctaccactcaggtggaaggtgaagggggataagtcatgtcacatggcgagagaggaagcaagagagagaggggtagatgccaggttctttttatttttattttttattttttgagatggagtctagcagtgtcgcccaggctggagtgcagtggcattatctcagctcactgcgagctctgcttcccgggttcaagcgattctcctgcctcagcctcccgagtagctgggaatacaggtgcctgccaccacacctggttaattttgtatttttagtagagatggggtttctccatgttgatcaggctggtctcgaactcctgacctcaggtgatctgctcacctcagcctcccaaagtgctgggattacaggcatgagccactgcacctggccgatgccagagtctttttaacaaacagatctcatggtaactaatagagtgagaactcattcatcaccacaaggacagtgccaagccattcatgagggatctatccccatgaccctaacaccacccaccaggcttcacctccagcattgagagtcacatttcaacctgggacttggaggggacaaatactcaaactgtatcatcttctttccgcagatcagggcattctgctacaatcatatgccatgaggaagctttctatgacccgtcaggccagattaagtcctcatattttgtatacatagccacagttgacactaaagtttatctcataccacttgtcacaacaataaatagctgcattggtcatttttttggcttaatgaatgcatttgctaaattggacacccatgagagcaggaagcatgcatttcttattgatcgttgcattattattatcatccagcacggtggctccagatagagcagatgggcggatcattgactttttttcttttatgaaacaaacatttaagagtgttctatccctagttttgtattttatagaacaaggaaggctctcttctaagggctcacttgcctggcaaacacctcgyggggaaggcactcatcctcctgagagcccagaggccagtaggtctctttttgccctcccaatcagcttccaaaccatgattccttcaccatcacatagaaatcaccattcttttcaaactcttgggcatccacccacaccaccattctttttttttttttttttttgagacggagtcttgctctgtcacccatgttggag

SEQ ID NO: 708284 - DNA, 1711 bp, Homo sapiens
  misc_feature 1229, 1260, 1267, 1268, 1269, 1270, 1271, 1272, 1273, 1274,1275, 1276, 1277, 1278, 1279, 1280, 1281, 1282, 1283, 1284,1285, 1286, 1287, 1288, 1289, 1290, 1291, 1292, 1293, 1294,1295, 1296, 1297, 1298, 1299, 1300, 1301, 1302, 1303: n = A,T,C or G
  misc_feature 1304, 1305, 1306, 1307, 1308, 1309, 1310, 1311, 1312, 1313,1314, 1315, 1316, 1317, 1318, 1319, 1320, 1321, 1322, 1323,1324, 1325, 1326, 1327, 1328, 1329, 1330, 1331, 1332, 1333,1334, 1335, 1336, 1337, 1338, 1339, 1340, 1341, 1342: n = A,T,C or G
  misc_feature 1343, 1344, 1345, 1346, 1347, 1348, 1349, 1350, 1351, 1352,1353, 1354, 1355, 1356, 1357, 1358, 1359, 1360, 1361, 1362,1363, 1364, 1365, 1366: n = A,T,C or G
gaaataaagattgtccacatcagtattaggatataactgtgcaaaatgaaccacgtattgtcatccctggaattaaccttgtggggcaggagagtaaatggtataatggaggaggtaaagcaaaacagctaaacctcctctgccaacctcgggaatttacttgtaatgacagaaatagaaaaaatcaggaagtagtaatataagcatgtttttaaaataaatatggaggtaaatgccaaaagaatttgtaaaaagagaggaatgtggctgatgtagacaggggaaatgaggagaaggtatgctttttttctttttctgcttttttttccttttatttttgataatcagctttgtgacaaataggagtctttaaagtacacagggatatattctgataaaatctttgtttatatgcgtgcatggatatgcacacatatacatatatctatacatattttacaaatgtgtatgtatgtgctatttaattgtttatttccacttttatttctgacagtttatataaagataaatcacaaggaaatttttctttttgcatctggactttgggggtrtggtggagtagggacaaaaaaagttcccctagaactcttaactataggctgaccttataagggtgggggttaagaattcttattttggaagattttgtttactgatgtattgtgtgctactatgacagtgttggcatacagtaagcactcaataaatatttgctgatgaaaaatgaatgaaaatagatttcaattaacagaatacaatatcctgtaacacaaaaggggaaatccttgaatgtttgaaaaaaatgaaggtattaatcttagactttgttaagattaatatactgctaaaagtttaagtctaacctctcaaataattgaaatagaacactgaacttccaaattagtataagaggaaaaaaattgaattaagaaaaatgacctatctaaaaaaatgaaaataaagaaaaaagagtttttaaaagtaggacaaataggaaacatgaaatacaatgatagaaataaatctaaatgaataaataattataataattgtaagtagactaaaaacctaccaattaaacgatagagatgattaaaataaaaagtcagcttaatactgtttacaaaagacccatcttaaatgtaaagacacaagatgcagaaatgtcaaaagtaagaggcaagttagtaatcaggcgagggatcctnctagagtcgaaaccgcgggtttatgtcaacnctaggcnnnnnnnnnnnnnnnnnnnnnnnnnnnnnnnnnnnnnnnnnnnnnnnnnnnnnnnnnnnnnnnnnnnnnnnnnnnnnnnnnnnnnnnnnnnnnnnnnnnntgtctttataatttaaagaaaaaacacaaacacacagaaacaacctaagtgtccagaaccgcaggtgcctggagagcaccaacacacccgcaccgcaaaacaccaatccggaaccgcaggtgcctggagagcaccaacacacccgcgccgcggaacaccaatccggaaccgcaggtgcctcgagagcaccaacacacccgcaccgcggaacaccaatccggaaccgcaggtgcctggagagcaccaacacacccgcaccgcgaaacaccaagttgcacgctcactgaaacacggggagagacaggatcactcaggaaaaggctcaaaatgtgttccgtttaaaca

SEQ ID NO: 708285 - DNA, 1307 bp, Homo sapiens
atgaagtgatttattagcaaaggggtcaggatgacaacaccattctccaactagagctccccagttctcactcggcagtgggagcaccctgaggagcttcctagtggaaagaggaaaaatcatttttcacagaacaaaatgatactaacattttcttaattaaatgaccataaaagatgaaagaaactcattaaccacaaggyttgcaatgctaattttttccccaattataaaagtaatatatactcactacagctaattttgaaaatgcaaggaggtataaacaaggaaaaatcatcctttatctcactacccagagataagtaactaaacatgacagtgtatttctttgccatccgttcaaaagatatatctgtacatatcacacgaagtttgagaatcgtgaataaacatactatatcttgcttttgttgttttatttagatgaatcctaattagtccacaatattctattccataagtacatcaaaacttttgagatgattccctcaactgttagatatttaggttttgagtttttcattatcaataactctgtgatgaatgttcctgttagaatatttatgaacatatctattttccttggaaagaatcctatataagtgtgagatgataagcacaaactatatgcatattttaaaacccaacacctatttggtgaatttcttttcagaaaggctgtgccaatctataattcttccactcacccttttcataaatgaatactatcatttttccatttctgcattagtaataggtaaaagtattttcaatgctgctttaactggcaactcttaaattactggtgagattcatctagttttgctacttatagtctactgtgtttcttctgtgaattgtgattagtgactattttccagggtggtattattatgttcttattaatttgtaaaaatgtgttctatattaagagtattagcctcatgcttattaatctgttacaaatttttttggtgttactgccttttattttggtttacgtgtcttaatggtcagatcacctaacaactttcttctataatttcttctattactatattttagtaaacttttcattttggaataactttagatttacagaaaacttacaaaggtagtgtattagttcccatatacacttcacccagatggacctaaacttactattttatggtaccatggtagatttgtcaaaactacacactttgaattccacctgtttttccactaatatcctttttttctgttccaagatctaatttatgataatactttgcatttagtca

SEQ ID NO: 708286 - DNA, 1550 bp, Homo sapiens
ctccttccgccagtcgtggcctgtcggcatgctgggatctgtcgtgtgctcttcctctggcgtgctcccatccacatcctctcgctgtccagctgcttgtgtcttctgcgatgtgttcctctccacgtccagctgcttgtgtgtctgcctgctagaatcttggaggtttttataggcacaggatgggggcgtggtgagccagggtggtcttaggaaatgcaacatttgggcgctgaaggcaggggtgcctgtcctcacttagacccgtgggcacgggtttgggggtggagccctcgccagggaccacgccctcctctacccagcacttcctttccctcctttcctgttatttaaagggaccacgcccttcccagcacttccctcccgttatcacttacaaaagctagtttatcaagttctagctccttccctgacttgctgtccaacattggtatctttttgttttgaccatccttataaatgggatgggaggcagctgatcctgtaaattaaaaaggactggaaattagaagacctgaatgtgcatgtttgcttgttggtttacaagctgcatgtccttgggtaagtcacttatcttccctgggctctattctttcatctgtaaagcccatctcacagagcagctgtgaggatccaatgaagtgatgccagcaaaaggtgcttgcttcgtacatgtttttgatgatgtctttgccatttgattgcagtgttaaacttaataaattttgcatgtaaaatgtatactttttataaaaaatatttgatattcatcttgaaaacattatgctgaataaaataaagcagacgcaggacgactattgtattaatatgatttcacttatatgaggtacctaaactagtcagatttacagagacagaaagtacaatggcgagtaccaggagctggtgggagaaaggaaatgggaagttagcgtttttttttttttttttttttccttttttgagatggagtctcgctctgtcgcccaggctggagtgcagtggcatgactggattctaggctaagtggagctgcagacaactttgacccgtttgacaaacttactgtgggctcagctcactgcaacttctgcctcccgggttcgagtgatcctcctgcctcttcctcctgagtagctgggattacaggcatgtgccaccactcctggctaaattttgtatttttagtgaagacgggctttcaccatgttggccaggctggcctcgaactcctgacctcaagcaatccgcctgcctcagcctcccaaagtgctggattacaggcgtgaaccaccacacctggccaaggttagggtttaatgggcacaaagtttgttaaggaagataaaaagtttcaragatggatagtagtgatggttgtacaacactgtggatatgcgtaatgtactgaactgtactttaatagcatttatcattattatgtattttttgccacaataaaaaaagtggaaaaaagctaatgttcatagcagtgctattcacagtaaccaaatgatggaaacagccca

SEQ ID NO: 708287 - DNA, 665 bp, Homo sapiens
ttttttttttttttttttttaaatcgagacagaggtcttgctttattatccaggctggagtgcagtggtgtgattgtagctcactgccaccttgaattcttgggctcaatggatcctcctgcctcagcctcttaagtagctggggtcataggcacgtgccaccacagccagctaattttttcattttttgtagacatgagagctcaccatgttgcccaggctggtcttgaactcctgaactcaagggatccttcatcctcagcctctcaaagtgttgggataatagggttgaggttcccttgagcccagggtttggagaccagcccccttgtccygttcctggctacaaattgaaggcttgtggcaactcctcattgagcaagtctgttggcaccatttttccaacagcatgtgctcactttgtgtctctatgtcacattttggtaaatttctattttattatttgttatttgttatttttaattaaaaaatagagatgggggtctcattatattgcccaggctggtcttgaactactgggctcaagtgatcctcccaacttggcctcccaaaatgcggggattacaggtgtgagccaccacgcttggccacacttttgcaagtttctaaactttttcattatatctgttatggtgatctgtgat

SEQ ID NO: 708288 - DNA, 1098 bp, Homo sapiens
  misc_feature 538, 539, 540, 541, 542, 543, 544, 545, 546, 547, 548, 549,550, 551, 552, 553, 554, 555, 556, 557, 558, 559, 560, 561,562, 563, 564, 565, 566, 567, 568, 569, 570, 571, 572, 573,574, 575, 576, 577, 578, 579, 580, 581, 582, 583, 584: n = A,T,C or G
  misc_feature 585, 586, 587, 588, 589, 590, 591, 592, 593, 594, 595, 596,597, 598, 599, 600, 601, 602, 603, 604, 605, 606, 607, 608,609, 610, 611, 612, 613, 614, 615, 616, 617, 618, 619, 620,621, 622, 623, 624, 625, 626, 627, 628, 629, 630, 631: n = A,T,C or G
  misc_feature 632, 633, 634, 635, 636, 637: n = A,T,C or G
ttgattttgagcaatttgaatatatgatgaagtctaattttctttatgtttcttctgcatgtgattcattgagcttcttgtatttacgggttcatagttttcacactgtaaaaatattggatatttttacttcaaayatttttaagtccctttctttctcctttccttcagggattccaattacatgtatatttggccccttgacattgttccacagttcactgatgctttgttaattttttaagtatttttcatctcttgattttattttgtcttctaacttactattttttcagaaatatctaatcttgcaaagagttctttgtgtaataaaatactgtctttattgtaaaatgaaaaaaaaatcatggtataacattttagtgtatagtatgaccttaaatatgtttaaaatgtgcccagtaaaaatattagaagaaaatacataaatgtaaatagtggacttacctggttggtagaattattaagtcttaatacctcctttatacttttaagtatttcccataattttgaagannnnnnnnnnnnnnnnnnnnnnnnnnnnnnnnnnnnnnnnnnnnnnnnnnnnnnnnnnnnnnnnnnnnnnnnnnnnnnnnnnnnnnnnnnnnnnnnnnnnaagggggcagaggaaatattagaggggaatacatgatggtaaataggggactgaccgggttggtaaaataattaattgggaaaacatccttaaacgtttcatgtaattgccagaattttgaaagaataaatacattgctttgataattatctatataaaaaagaaaggatataagatgttaacaacattgagatatgatttattgattatcaaattagtaaagattaaaaataagatgaaaatgtccagtattgatgagccatggaaagtgcattcttgttcaacatttcccccttaggggatatttattataggaccctctttaagagactttggcaatggccttctgtcataggttgttgatgtttcaaaaggggatgcttggcctgacactgaccatgtgtgtccctatatatgtgcacttcaatttatgtcaatatggtcataaatagctctatgca

SEQ ID NO: 708289 - DNA, 1210 bp, Homo sapiens
aaaatagtattggagcaagccactgaaatcataggtaatctagttacccagcactaatataaacactagcaatcatattcaagctgctagtacagtttaaagtatctgaattcctagtaaatagaggaacttttgagtaaatgtatgactctacctaaaacagtgggggtggatgggaggcaaggacccttgaggtaaacatagtataaaatgtttaaggctgttgaattttgaaggcaagagcaaattacccgaagaccaggagaactaggcaataaagaagcactttcaaaagaaagcacatggataactcatctgaaaacgttggttgaagcacactctgcgcagtccgggaattcctgtatgacttgctgagctcagctgtgcaagtactctttggtttcatctgctgtatgttggtgctacaagaattattgtagtggtcaaaatcatggaccaatcaaaacaacttctggttatagtaacctaattcctccactgatccgttgcatacatgcctacttgtttaattgttttacagaagcatgcattgaataagtgacaatcaagacaatggaaggaaatgaatagatattgaaaaatcaatgggygacaagatcatactagacccagcatatacacaatctcatttaagaggggaataagaatgtttagtatggaatggattcttgaaggatttgagtcaaatgactcacacaaattgtctggaaagttgtctcagaggaactgggaaatgaagagtttaaaatcgttgattaaaaggtcaggaaggagttcagagaaagaaaccaagtgtgcttggagttttttccactaggttactttttggtcttttagtctttgtacattctaatgataatttcttggaaatctctatgttaactagatttactctaactgccaacactgtcaaacgtaaaaggagttcatgtaaaggtacaaggaatcacatcaatcaagaatatggtacaacgtcaggaagatatggaaatcaaagattaaaaagtgagagggggtaggggcagtggctcacatctgtaatcctacactgtggggggaggctgaggcaggaagatcacttgagctcagaagttcagcttgggcaacatagtgagaccccatctctacaaaaaattttaaaaattggctggtgtggtggtgtacacctgtggtcccagctacttagaaa

SEQ ID NO: 708290 - DNA, 1210 bp, Homo sapiens
aaaatagtattggagcaagccactgaaatcataggtaatctagttacccagcactaatataaacactagcaatcatattcaagctgctagtacagtttaaagtatctgaattcctagtaaatagaggaacttttgagtaaatgtatgactctacctaaaacagtgggggtggatgggaggcaaggacccttgaggtaaacatagtataaaatgtttaaggctgttgaattttgaaggcaagagcaaattacccgaagaccaggagaactaggcaataaagaagcactttcaaaagaaagcacatggataactcatctgaaaacgttggttgaagcacactctgcgcagtccgggaattcctgtatgacttgctgagctcagctgtgcaagtactctttggtttcatctgctgtatgttggtgctacaagaattattgtagtggtcaaaatcatggaccaatcaaaacaacttctggttatagtaacctaattcctccactgatccgttgcatacatgcctacttgtttaattgttttacagaagcatgcattgaataagtgacaatcaagacaatggaaggaaatgaatagatattgaaaaatcaatgggcgacaagatcatactagacccagcatatacacaatctcatttaagaggggaataagaatgtttagtatggaatggattcttgaaggatttgagtcaaatgactcacacaaattgtctggaaagttgtctcagaggaactgggaaatgaagagtttaaaatcgttgattaaaaggtcaggaaggagttcagagaaagaaaccaagtgtgyttggagttttttccactaggttactttttggtcttttagtctttgtacattctaatgataatttcttggaaatctctatgttaactagatttactctaactgccaacactgtcaaacgtaaaaggagttcatgtaaaggtacaaggaatcacatcaatcaagaatatggtacaacgtcaggaagatatggaaatcaaagattaaaaagtgagagggggtaggggcagtggctcacatctgtaatcctacactgtggggggaggctgaggcaggaagatcacttgagctcagaagttcagcttgggcaacatagtgagaccccatctctacaaaaaattttaaaaattggctggtgtggtggtgtacacctgtggtcccagctacttagaaa

SEQ ID NO: 708291 - DNA, 1210 bp, Homo sapiens
aaaatagtattggagcaagccactgaaatcataggtaatctagttacccagcactaatataaacactagcaatcatattcaagctgctagtacagtttaaagtatctgaattcctagtaaatagaggaacttttgagtaaatgtatgactctacctaaaacagtgggggtggatgggaggcaaggacccttgaggtaaacatagtataaaatgtttaaggctgttgaattttgaaggcaagagcaaattacccgaagaccaggagaactaggcaataaagaagcactttcaaaagaaagcacatggataactcatctgaaaacgttggttgaagcacactctgcgcagtccgggaattcctgtatgacttgctgagctcagctgtgcaagtactctttggtttcatctgctgtatgttggtgctacaagaattattgtagtggtcaaaatcatggaccaatcaaaacaacttctggttatagtaacctaattcctccactgatccgttgcatacatgcctacttgtttaattgttttacagaagcatgcattgaataagtgacaatcaagacaatggaaggaaatgaatagatattgaaaaatcaatgggcgacaagatcatactagacccagcatatacacaatctcatttaagaggggaataagaatgtttagtatggaatggattcttgaaggatttgagtcaaatgactcacacaaattgtctggaaagttgtctcagaggaactgggaaatgaagagtttaaaatcgttgattaaaaggtcaggaaggagttcagagaaagaaaccaagtgtgcttggagttttttccactaggttactttttggtcttttagtctttgtacattctaatgataatttcttggaaatctctatgttaactagatttactctaactgccaacactgtcaaacgtaaaaggagttcatgtaaaggtacaaggaatcayatcaatcaagaatatggtacaacgtcaggaagatatggaaatcaaagattaaaaagtgagagggggtaggggcagtggctcacatctgtaatcctacactgtggggggaggctgaggcaggaagatcacttgagctcagaagttcagcttgggcaacatagtgagaccccatctctacaaaaaattttaaaaattggctggtgtggtggtgtacacctgtggtcccagctacttagaaa

SEQ ID NO: 708292 - DNA, 686 bp, Homo sapiens
  misc_feature 317, 318, 319, 320, 321, 322, 323, 324, 325, 326, 327, 328,329, 330, 331, 332, 333, 334, 335, 336, 337, 338, 339, 340,341, 342, 343, 344, 345, 346, 347, 348, 349, 350, 351, 352,353, 354, 355, 356, 357, 358, 359, 360, 361, 362, 363: n = A,T,C or G
  misc_feature 364, 365, 366, 367, 368, 369, 370, 371, 372, 373, 374, 375,376, 377, 378, 379, 380, 381, 382, 383, 384, 385, 386, 387,388, 389, 390, 391, 392, 393, 394, 395, 396, 397, 398, 399,400, 401, 402, 403, 404, 405, 406, 407, 408, 409, 410: n = A,T,C or G
  misc_feature 411, 412, 413, 414, 415, 416: n = A,T,C or G
cacagtgttttaaaaatattaaatgagacaacatacataaattctttttttcacaggttctgactcttaggaaacatttaataagtgtcagatctcttcctctaaatcattctgaaatttcacattgtgtttgaaaaaagcttttttgtctattcagtatacatcacacattcatccatccattcacaaactcttttgaaaaagttaaaaaacactaatgaaagcatctttattgcaggtagtttacatgttacaatttatatttaactcacctttytttttccccccccccccccatcgcaaaaactctttttttnnnnnnnnnnnnnnnnnnnnnnnnnnnnnnnnnnnnnnnnnnnnnnnnnnnnnnnnnnnnnnnnnnnnnnnnnnnnnnnnnnnnnnnnnnnnnnnnnnnnccacatgatggcagagatccttctctgatttattcaacagatattccaagcacctagaatagtgcctcaaaaaaatgggcttcaaaaaaatatttcctgatgaatgaattattgaagaaacatttttttcatcatgccaatgtacattattttacttttgtgtcacccacctgtgaaaacacctccatttattcacatacattttcaatgtggtgattgaagcatcacagaaatcccaaatgtttcactttaatactctcaggatttaat

SEQ ID NO: 708293 - DNA, 862 bp, Homo sapiens
tgcatataaaacatctggcacggaccacatgtggtggctcacgcctgtaatcccagcaatttgggaagctgaatggggaggatcacttgagcccaggaattcaggaccagtctgggcaacatggtgagactctgtccctacaaaaaatttaaaaattagccaggcatgatgacacgtgtctgtagtcccagctacatgggaggctgaggtgggaggatcacttgaaccgcggaggtcaagtctgcagtgagccgtgattgtgccactgaactccagcctgggtgacggagtgagattctgtctcaaaaaataaattcattaattaatttaattaaataaaaaactkggcacatagtaggtgcttaagaaatgatagttctctgcagggctggcttccatgggcacgcatcatgcagtctatcaggtcctgttctcagaagggccccacactcagagggcctcctgcttgttttaatgctttattgttctcttgtttaaattcttaatactttttcaacaaggagccttgcattttcattttgcatcagatcctgcaaattatctagcccatctgggttattggtgtgggtttagttccttgaatccagaaaggactacctgtgacccacactatgaaacaagccaccatttcatcatttcgtgattttgtctgcccaggaaatgcttctctgcttatcctccgtgcatctagctgttgcttataagaaatcagagtgagccagacagaaccacaactctccttcggcccccagcacctccagggagatgaaagcagatcatacccctgcttgttctgaggagagggacttttgagggagaatcttgagccctggtttctggc

SEQ ID NO: 708294 - DNA, 862 bp, Homo sapiens
tgcatataaaacatctggcacggaccacatgtggtggctcacgcctgtaatcccagcaatttgggaagctgaatggggaggatcacttgagcccaggaattcaggaccagtctgggcaacatggtgagactctgtccctacaaaaaatttaaaaattagccaggcatgatgacacgtgtctgtagtcccagctacatgggaggctgaggtgggaggatcacttgaaccgcggaggtcaagtctgcagtgagccgtgattgtgccactgaactccagcctgggtgacggagtgagattctgtctcaaaaaataaattcattaattaatttaattaaataaaaaacttggcacatagtaggtgcttaagaaatgatagttctctgcagggctggcttccatgggcacgcatcatgcagtctatcaggtcctgttctcagaagggccccacactcagagggcctcctgcttgttttaatgctttattgttctcttgtttaaattcttaatactttttcaacaaggagccttgcattttcattttgcatcagatcctgcaaattatctagcccatctgggttattggtgtgggtttagttccttgaatccagaaaggactacctgtgacccacactatgaaacaagccaccatttcatcatttcgtgattttgtctgcccaggaaatgcttctctgcttatcctccgtgcatctagctgttgcttatragaaatcagagtgagccagacagaaccacaactctccttcggcccccagcacctccagggagatgaaagcagatcatacccctgcttgttctgaggagagggacttttgagggagaatcttgagccctggtttctggc

SEQ ID NO: 708295 - DNA, 662 bp, Homo sapiens
gacaatgatttcattttattttaaaaaattcaaaatctaattaacatatatataaactttaaacatttcgaaatgttcgcaggccaaagaatataacttttgtattactcaattttttccaaattttaatattccacatgatttaaagaattatatatataaatctagattcacatattattctacattcaagccactcctttscatttttttaaagatatttaaaaatattttattggtaactatggaggattttaataccagcaaaaccatctacgtagcttgaaatatttttatgttctagtctttttctgaggcaaaagataaatctgggtcttcatggcagtgattagggccacacatgtataaaatgatatttcttttgttgttgattagattcaaaaggattcctatatggtcctgaatctttttatttattatttgcatggtctgccttaaacatagcttaaggtttaattgataaaatatgaaaaaaattaacaacaaaataattattggacataccagacacaaaaagaaagttttatttaattaaaatattgaaagctatgctctattatattaaaaatgaataaaggtcagacagttcttacagttattaattgttctgactttgtcagatgcaatttgataaattctca

SEQ ID NO: 708296 - DNA, 662 bp, Homo sapiens
gacaatgatttcattttattttaaaaaattcaaaatctaattaacatatatataaactttaaacatttcgaaatgttcgcaggccaaagaatataacttttgtattactcaattttttccaaattttaatattccacatgatttaaagaattatatatataaatctagattcacatattattctacattcaagccactcctttgcatttttttaaagatatttaaaaatattttattggtaactatggaggattttaataccagcaaaaccatctacgtagcttgaaatatttttatgttctagtctttttctgaggcaaaagataaatctgggtcttcatggcagtgattagggccacacatgtataaaatgatwtttcttttgttgttgattagattcaaaaggattcctatatggtcctgaatctttttatttattatttgcatggtctgccttaaacatagcttaaggtttaattgataaaatatgaaaaaaattaacaacaaaataattattggacataccagacacaaaaagaaagttttatttaattaaaatattgaaagctatgctctattatattaaaaatgaataaaggtcagacagttcttacagttattaattgttctgactttgtcagatgcaatttgataaattctca

SEQ ID NO: 708297 - DNA, 858 bp, Homo sapiens
taaagttttaactgtagaattttatttaggaagtgatcccaggatataccaggagtggaatagggaagggaaactgggaagggaaggcagcccataaaggatcattatcaggaaaattacccctgggagtcatcaaagctcaaggccactgagtaactctgggagccaggttagaacgggcaccacagaatcattttacctgggaaacaaaggggtagaggtatgttatacaccagctcccaacaacgattagtttctaccctaatcatcatcacccactgaggcaaccaaccagaacacctcaatccaagctcatacttcttattttacacactagtaggatcccttcctctacttataacacttgtttatactcaaaatacctcaggttcactaaatatgctagtaataatacttgctacccgagagctattaactgccattggttgagggtttctggggtgtgtgttagttttctgagaattaccttttgctggatgcaaggtgtattagtccgttttcacaccgctataaagaactgcctgagactgggtaatttaaaaaggaaagagatttaattgactcacagttctgcagggctggggagacctcaggaaacttgcaatcatggcagaaggggaaacaaacatgtccttcttcacatggcagcaggaaggagaagaatgagagctgaccaaagggggaattctgcyccttataaaaccatcagatctctggtgagaacacactatcatgaaaacagtatgggggaaccacctccatgattcgattatctccacctggtcccgcccttgacacatggggattattacaagtcaaggtgagatctgagtagga

SEQ ID NO: 708298 - DNA, 583 bp, Homo sapiens
tcatgtgtcccacgactcccagggagctgacagtttcctactttaactctgtagagattatactcggtccggcaggtgtgrcccagtggtttcagggagtgccaccaaagggacgtgaagagcgccttcactgcccaggacccttgtctggaagacatttccttcctagagcaagtccctacaatcatagagcagttacacaagaattccgagcccctgacttctgtatctgtgctgtttatattgaggtgacctgaaagtatttcctgccaaagtgaaaattccaggatgagaaggggttctagaactctacaagagggaggaagagttcaggctccagtgtcatgttcttccaggagtctaggtaaagacaggtgacaggcagagatcattgaatctgagaggaatgcttggtctttgtaggcagttttgctaaacatacaggaggcactctaggggatatttagtataattaatttattttacaatatgaggaaactaaatcctagagcatggaaaagcttaaccaaagtcatgtaaccaaattacatatccaagactaagctagatttcctaagactcc

SEQ ID NO: 708299 - DNA, 583 bp, Homo sapiens
tcatgtgtcccacgactcccagggagctgacagtttcctactttaactctgtagagattatactcggtccggcaggtgtgacccagtggttkcagggagtgccaccaaagggacgtgaagagcgccttcactgcccaggacccttgtctggaagacatttccttcctagagcaagtccctacaatcatagagcagttacacaagaattccgagcccctgacttctgtatctgtgctgtttatattgaggtgacctgaaagtatttcctgccaaagtgaaaattccaggatgagaaggggttctagaactctacaagagggaggaagagttcaggctccagtgtcatgttcttccaggagtctaggtaaagacaggtgacaggcagagatcattgaatctgagaggaatgcttggtctttgtaggcagttttgctaaacatacaggaggcactctaggggatatttagtataattaatttattttacaatatgaggaaactaaatcctagagcatggaaaagcttaaccaaagtcatgtaaccaaattacatatccaagactaagctagatttcctaagactcc

SEQ ID NO: 708300 - DNA, 641 bp, Homo sapiens
cctgtccccatgagagcacatgggggctgattatctaagataaaagtgtctcattgatggtgacgtggttgaaggaatggtggtggaatttgtgaggggatgggtgggacaaagcagccaacactgttcatcctcttagcatggttctcagtcatgccgagaagctctgaggccagcccatgcctgacaccccaagcatgagagagccgagattcccaggactaggaacaacttggatgactacacttgtcagaaatattgtgaaagggcaaccaggaaattcccgtattaggggctgcatcattttagaacaaatttctttcttcaaggttcatctctctctgtctcttctttcctagtattcatttctgcatcacattactacacgcccggaaacgagtagctatacaattcctaaaggacattcgagaatctgtcactcaaatcatgaagaatcctaaagcgaagaccacaggaatggtagggacacttggagttttttttcttctctkggaaatttaggtgttggtggagagtttgaaggaatcatatgacccggagtctgttcctgcctctgcccctttgccacagacatcttttatttgttgactggagctgatgatctctgcatcacccacccc

SEQ ID NO: 708301 - DNA, 778 bp, Homo sapiens
  misc_feature 678, 679, 680, 681, 682, 683, 684, 685, 686, 687, 688, 689,690, 691, 692, 693, 694, 695, 696, 697, 698, 699, 700, 701,702, 703, 704, 705, 706, 707, 708, 709, 710, 711, 712, 713,714, 715, 716, 717, 718, 719, 720, 721, 722, 723, 724: n = A,T,C or G
  misc_feature 725, 726, 727, 728, 729, 730, 731, 732, 733, 734, 735, 736,737, 738, 739, 740, 741, 742, 743, 744, 745, 746, 747, 748,749, 750, 751, 752, 753, 754, 755, 756, 757, 758, 759, 760,761, 762, 763, 764, 765, 766, 767, 768, 769, 770, 771: n = A,T,C or G
  misc_feature 772, 773, 774, 775, 776, 777: n = A,T,C or G
agggggaagacagctgtaygctagccaaagagagaggcctcagaggaacccacactgccagcaccttaaccttgttcttctagcttccagaagtgtgagaaaataaatttatgttgtttaagcttcccggtgtgtgttctttgccatggcagccagagctgagctgactaatatactgagagtgagggcctccccgcctcacctcttcatggggcctggtcttgcatcagcagggggtgggcagaaccagagtacctggttacatcacagatgattgacgacttgctaagagtgctgggagaacccagagcacctaattcacctgggacaggtcagggctggctccccagggctacctgagctgcatgtggaaggggcagcaatttgacaggggatggcagggaagggtcttactcagggaatgggtgcaggtgggcaggctggaggctgactggtgtccttctgaggtctgtaagggatggggctgatccccataaatggggagttgttttcctaatgaatggctcctgctgggctctccctctcctctgtgccctattgagagggccctcaaaagtctatcggcacattcagggggccgcaggtgagatcgcagagaccacaggtttccttgcggggtggagcagctgtggcctgtgcctggtgatttggaggttnnnnnnnnnnnnnnnnnnnnnnnnnnnnnnnnnnnnnnnnnnnnnnnnnnnnnnnnnnnnnnnnnnnnnnnnnnnnnnnnnnnnnnnnnnnnnnnnnnnna

SEQ ID NO: 708302 - DNA, 778 bp, Homo sapiens
  misc_feature 678, 679, 680, 681, 682, 683, 684, 685, 686, 687, 688, 689,690, 691, 692, 693, 694, 695, 696, 697, 698, 699, 700, 701,702, 703, 704, 705, 706, 707, 708, 709, 710, 711, 712, 713,714, 715, 716, 717, 718, 719, 720, 721, 722, 723, 724: n = A,T,C or G
  misc_feature 725, 726, 727, 728, 729, 730, 731, 732, 733, 734, 735, 736,737, 738, 739, 740, 741, 742, 743, 744, 745, 746, 747, 748,749, 750, 751, 752, 753, 754, 755, 756, 757, 758, 759, 760,761, 762, 763, 764, 765, 766, 767, 768, 769, 770, 771: n = A,T,C or G
  misc_feature 772, 773, 774, 775, 776, 777: n = A,T,C or G
agggggaagacagctgtatgctagccaaagagagaggcctcagaggaacccacactgccagcaccttaaccttgttcttctagcttccagaagtgtgagaaaataaatttatgttgtttaagcttcccggtgtgtgttctttgccatggcagccagagctgagctgactaatatacygagagtgagggcctccccgcctcacctcttcatggggcctggtcttgcatcagcagggggtgggcagaaccagagtacctggttacatcacagatgattgacgacttgctaagagtgctgggagaacccagagcacctaattcacctgggacaggtcagggctggctccccagggctacctgagctgcatgtggaaggggcagcaatttgacaggggatggcagggaagggtcttactcagggaatgggtgcaggtgggcaggctggaggctgactggtgtccttctgaggtctgtaagggatggggctgatccccataaatggggagttgttttcctaatgaatggctcctgctgggctctccctctcctctgtgccctattgagagggccctcaaaagtctatcggcacattcagggggccgcaggtgagatcgcagagaccacaggtttccttgcggggtggagcagctgtggcctgtgcctggtgatttggaggttnnnnnnnnnnnnnnnnnnnnnnnnnnnnnnnnnnnnnnnnnnnnnnnnnnnnnnnnnnnnnnnnnnnnnnnnnnnnnnnnnnnnnnnnnnnnnnnnnnnna

SEQ ID NO: 708303 - DNA, 778 bp, Homo sapiens
  misc_feature 678, 679, 680, 681, 682, 683, 684, 685, 686, 687, 688, 689,690, 691, 692, 693, 694, 695, 696, 697, 698, 699, 700, 701,702, 703, 704, 705, 706, 707, 708, 709, 710, 711, 712, 713,714, 715, 716, 717, 718, 719, 720, 721, 722, 723, 724: n = A,T,C or G
  misc_feature 725, 726, 727, 728, 729, 730, 731, 732, 733, 734, 735, 736,737, 738, 739, 740, 741, 742, 743, 744, 745, 746, 747, 748,749, 750, 751, 752, 753, 754, 755, 756, 757, 758, 759, 760,761, 762, 763, 764, 765, 766, 767, 768, 769, 770, 771: n = A,T,C or G
  misc_feature 772, 773, 774, 775, 776, 777: n = A,T,C or G
agggggaagacagctgtatgctagccaaagagagaggcctcagaggaacccacactgccagcaccttaaccttgttcttctagcttccagaagtgtgagaaaataaatttatgttgtttaagcttcccggtgtgtgttctttgccatggcagccagagctgagctgactaatatactgagagtgagggcctccccgcctcacctcttcatggggcctggtcttgcatcagcagggggtgggcagaaccagagtacctggttacatcacagatgattgacgacttgctaagagtgctgggagaacccagagcacctaattcacctgggacaggtcagggctggctccccagggctacctgagctgcatgtggaaggggcagcaatttgacaggggatggcagggaagggtcttactcagggaatgggtgcaggtgggcaggctggaggctgactggtgtccttctgaggtctgtaagggatggggctgatccccataaatggggagttgttttcctaatgaatggctcctgctgggctctccctctcctctgtgccctattgagagggccctcaaaagtctatsggcacattcagggggccgcaggtgagatcgcagagaccacaggtttccttgcggggtggagcagctgtggcctgtgcctggtgatttggaggttnnnnnnnnnnnnnnnnnnnnnnnnnnnnnnnnnnnnnnnnnnnnnnnnnnnnnnnnnnnnnnnnnnnnnnnnnnnnnnnnnnnnnnnnnnnnnnnnnnnna

SEQ ID NO: 708304 - DNA, 778 bp, Homo sapiens
  misc_feature 678, 679, 680, 681, 682, 683, 684, 685, 686, 687, 688, 689,690, 691, 692, 693, 694, 695, 696, 697, 698, 699, 700, 701,702, 703, 704, 705, 706, 707, 708, 709, 710, 711, 712, 713,714, 715, 716, 717, 718, 719, 720, 721, 722, 723, 724: n = A,T,C or G
  misc_feature 725, 726, 727, 728, 729, 730, 731, 732, 733, 734, 735, 736,737, 738, 739, 740, 741, 742, 743, 744, 745, 746, 747, 748,749, 750, 751, 752, 753, 754, 755, 756, 757, 758, 759, 760,761, 762, 763, 764, 765, 766, 767, 768, 769, 770, 771: n = A,T,C or G
  misc_feature 772, 773, 774, 775, 776, 777: n = A,T,C or G
agggggaagacagctgtatgctagccaaagagagaggcctcagaggaacccacactgccagcaccttaaccttgttcttctagcttccagaagtgtgagaaaataaatttatgttgtttaagcttcccggtgtgtgttctttgccatggcagccagagctgagctgactaatatactgagagtgagggcctccccgcctcacctcttcatggggcctggtcttgcatcagcagggggtgggcagaaccagagtacctggttacatcacagatgattgacgacttgctaagagtgctgggagaacccagagcacctaattcacctgggacaggtcagggctggctccccagggctacctgagctgcatgtggaaggggcagcaatttgacaggggatggcagggaagggtcttactcagggaatgggtgcaggtgggcaggctggaggctgactggtgtccttctgaggtctgtaagggatggggctgatccccataaatggggagttgttttcctaatgaatggctcctgctgggctctccctctcctctgtgccctattgagagggccctcaaaagtctatcggcacattcagggggcygcaggtgagatcgcagagaccacaggtttccttgcggggtggagcagctgtggcctgtgcctggtgatttggaggttnnnnnnnnnnnnnnnnnnnnnnnnnnnnnnnnnnnnnnnnnnnnnnnnnnnnnnnnnnnnnnnnnnnnnnnnnnnnnnnnnnnnnnnnnnnnnnnnnnnna

SEQ ID NO: 708305 - DNA, 1013 bp, Homo sapiens
tctccacttatctcccatctggcacttggtgactcacacattctgctgctgccttcctttaactcaccaaaacattaccagcattaggcagttgtgtgtaattaacttaccaaaattcccatggttggggtttgtgcccatgtacatgtttatgcctttgcacaggatggctgggatgtcaaaaatgagattagaggtctggatttttaaacatccctggtgttttgccagcatggaaygttcattgctgactctctccagagttcctggcttctagccacagggctggtttcctctctgaaggttcatcttttgcattctccttccttacaaatagtgttcatagccaagcacttctcaaagaagttcagtctggagagctgtgggcataggggtggggcgcttatgaggtttaatccccattgccctgagggtgaccagcagataagctgcccaaattttgattccacacaaggagtttccaactctagaactcatggactgccttttgcagtaacttcctcattaccacgtggggtagtcagaatcgagccaatcttgaatatcctctctcctggaaatctgcagagcagttctgggtgagaacagagggttcactcaagatgacgtgcatggggccacatagtgggatgggagagcggctgtgatatcagtgacaagtcctgagcttgtggtcaggagtccagaccctgttgcttgattagccatgtgacctttcacaggtcgcataacacctctgggatttgggtttcacattgattaaatgggtttaatacccaggaacctgactaccttgagatggtcttggggtcaggcctgcagctccagccttgggggtgttctgcctgggcagccatcaggggagactacttgaggagaaggaggcggtgcctgggggttaagaagatggtgctcctccctcaggctaatgggagggggagttcttaaatgtcctggagtatccaggtctggagagaagaggacatcacctg

SEQ ID NO: 708306 - DNA, 495 bp, Homo sapiens
taaaaacatactgaaaattctcagtctcctgctggtcccagtttctctccccagaggcaactgcttctgttattatttctgccttcagtttttctatgattactgctctgtttctaggtaatacttttaaggctgtttctggagttttcaatctggaatatcatccaatgccttcctgctattccaggaggcacttagctcaatctcattacccccacaccccttctactcagctctggaagtggaattgttcctgactctgccagtttttctcacctgtctggtgatctttcgtcatcctcttatatctaaatagagccaggttgttctgtcaggctccactttagggggcagggcagggagmtggcgattatgctggggatcctctaaatgtcagaatgaagtgttgattctaaatcctggctattgtgaatagcgctgccgcaaacatgggaattgcagatatctctcaacatactgatttcatatcatctg

SEQ ID NO: 708307 - DNA, 615 bp, Homo sapiens
aaactacgaatagaaaaaatccatcccccctttcttctgaaaatccatattttgtcaggaagaacctaataaaaaagcagctgacatgatggtctcagaaatgcacttttcaaactcttagtacaaacatcacagaacagagggtagaaaagtagacttgaggcttagaataagaaaaacaagcacagtctatctttagctactcagcatctgcatacattcttctacctatatctgaattctgaacaattaaaataacattctgcttccaactctgagatacaacaaacacattatcataacaccccctattcacacctctctggaatccacaagtcacatttccacgtgaataatctataagctgaagactaaagacaaaatgataaagttattacaaccaatgcttcatataaactgaaaggagaaaggagaagtttaaaaaaagasagagagacaaatattagtgtaaacataagaaggcaacgtgtatgtctgccagacactgaacttctgtaactggtcacaagggtatagttgattttaatttacttcttacagaccccattcattttaactttactcttagacccttggtcacacatctgctggcag

SEQ ID NO: 708308 - DNA, 615 bp, Homo sapiens
aaactacgaatagaaaaaatccatcccccctttcttctgaaaatccatattttgtcaggaagaacctaataaaaaagcagctgacatgatggtctcagaaatgcacttttcaaactcttagtacaaacatcacagaacagagggtagaaaagtagacttgaggcttagaataagaaaaacaagcacagtctatctttagctactcagcatctgcatacattcttctacctatatctgaattctgaacaattaaaataacattctgcttccaactctgagatacaacaaacacattatcataacaccccctattcacacctctctggaatccacaagtcacatttccacgtgaataatctataagctgaagactaaagacaaaatgataaagttattacaaccaatgcttcatataaactgaaaggagaaaggagaagtttaaaaaaagagagagagacaaatattagtgtaaacataagaaggcaaygtgtatgtctgccagacactgaacttctgtaactggtcacaagggtatagttgattttaatttacttcttacagaccccattcattttaactttactcttagacccttggtcacacatctgctggcag

SEQ ID NO: 708309 - DNA, 654 bp, Homo sapiens
agtatcctcaatggggctaatatcatttataaaccatgcctgagatttcccttccttcatcacatactcatagggaattttgtgtggtcacaggtgtgtgcttaggggaaaaggcaatgatacaagagtaggtgccatagaaatctaagccaattgctcatgcaaatgattttttgtcagggacccaccaggtcagggacctacgctggcagatgccacttcaactccatactgttttgctgctgcacacacccaaccttatggcttggaggattagggaagacacagttcatgatgggcagctcaggtctcacagtcattagatgtagcagaataatggaccctacccctccaatatacccacttcctaatccaaagatcctgtgaatatgtggtttatagcaaacgggaattaagtttgcagatggaattaaggttatcaattaaccttgatacaggatggttatcctggattattcaagtggactaaatgtcatcaaaagggtccttaaaagtagacaggggagatgtgattagggaaaaatgttcagagagatgcaagaccacaagccaaggaatactgagggaactctagatgayggaaaaggcaggaaagagattctcccctctagcctccagaaatgaacgcagccc

SEQ ID NO: 708310 - DNA, 2332 bp, Homo sapiens
  misc_feature 1019, 1020, 1021, 1022, 1023, 1024, 1025, 1026, 1027, 1028,1029, 1030, 1031, 1032, 1033, 1034, 1035, 1036, 1037, 1038,1039, 1040, 1041, 1042, 1043, 1044, 1045, 1046, 1047, 1048,1049, 1050, 1051, 1052, 1053, 1054, 1055, 1056, 1057: n = A,T,C or G
  misc_feature 1058, 1059, 1060, 1061, 1062, 1063, 1064, 1065, 1066, 1067,1068, 1069, 1070, 1071, 1072, 1073, 1074, 1075, 1076, 1077,1078, 1079, 1080, 1081, 1082, 1083, 1084, 1085, 1086, 1087,1088, 1089, 1090, 1091, 1092, 1093, 1094, 1095, 1096: n = A,T,C or G
  misc_feature 1097, 1098, 1099, 1100, 1101, 1102, 1103, 1104, 1105, 1106,1107, 1108, 1109, 1110, 1111, 1112, 1113, 1114, 1115, 1116,1117, 1118: n = A,T,C or G
gacctaattttaaaatgcattcaattattcttaagcccagaaggcatttagaaatgactgttgctaaccaccaaaacgaggaactgttctgtgacctttagactctgccttcttcagcagccatcttttgcagggcttgatctcacatgggagtgccaaagcacaaaatttatggagtcctcagagtttttgtggtcgcaaatcacaagactttatcaaacagaaagggaagtttgccttagagggtgagaacatacttttcagacatagcgatgggaatacaaacaggccaattcaatttcttttggggtcatggtttgtagctttattgaatgtgcgacattccctttttgaaagtccataggatgttttcacttcagagaataatttccacatcccattcgacaccaagaaatgggtaattattatatcacttggtgattatttatcacagtttgaatgaaaataaattgcttcaaagtgaaatcacattacatggttacctgtctgccctattaatttttcatttaattttctttattttaatgtgcatacaaatgtttgtgagctatctcatctgtctccctcataattccctccaatggatttaaatatgttaagagaaattaaataaataggttaaaggaaggctcgggatttgggaaatgggggtttagctgagagtggtaatttgtttctgaaccggctgtctcacttcctgtggaacagaagcacactggaaaatttaaaaaaattggggaaaacacatgtatattcctaccatagaccagctagttagggtacaagtgttgattactatattttctggatccagcagtatccacagtgcccacactggcagttttcaccagtgatttcatttccactaataaaatccacagaacagcaccgcttttctctcaccctaagagtatgaaatcagtcttccctgagcctccccatttccaccttaatcctccaaagtctgaaaatctagttgaaaggacttgtccattcannnnnnnnnnnnnnnnnnnnnnnnnnnnnnnnnnnnnnnnnnnnnnnnnnnnnnnnnnnnnnnnnnnnnnnnnnnnnnnnnnnnnnnnnnnnnnnnnnnntaagaaaagaaggagagagattcagagggatgaaggtggaaaagaaaggtgggtgctttagagaattagcagatgttaaattgtggagatttattcagaaatgtgttcagatgataatcagaagcacccgtacaatgctgcaatttatgatatacctactgtgtgcattagctcattgaatcctccccaaggttctcacaatgttaktttagcaccatgtttatactgtctgtctgtcaatccccactagtctgtgagatccttgcagtcatgggctttttattgttcatctccatagccccaaaatctatagactggctggcactaatataggcttggaaaacatttgacaaatgaacgaacatgatgtataagtgcatgatcaagaacccatacaggatttctgattccaagtccacaaattgatctcccccacctttctgaactcctataaaaattatggtcaggcaattaatttgacactcatatgctgatttgcgccatctcttgagttgttgtactgaactataatttgaaatttttattgttattaaacatttcacaaggggatttatgtcttgttttcacaactagcctgtgagctcattcattcatgcaataagcattcactgaattatgcattgggcattgttacatgggttgttccatttaacccttccttcttctccatgagtataattatccagagcctactgtgtgtcacaggcactatgttcagtgtgtgatatcatctgtcctgacaattcaaaatctccaaccaagctgcaaactcaaatgcctttaaaggccacattagtaagctcagggagtgacgcagttgacagctaggagagagtgagtgtatttggatagggcttctacagatgaccttgcagcttgtgcatcatacaaaggtccccagatgaagacatgaggttggcctaaaatccagcctgctctccaaaccatgcatcagggtgtggggctatgactgcatgcaggtgttaacacctttttttttctttccctgaaaagcactttagcttgctaagccctgcacctgaggctgcaattggtcaaaagggctactctcctaacttgcatgagggcacagcatgtgctaagggaggacctatcatttatgatgtgtgttggggataggaaggaaataaaccttaggttgcacctccccactaaggtcattaaaatttaat

SEQ ID NO: 708311 - DNA, 2332 bp, Homo sapiens
  misc_feature 1019, 1020, 1021, 1022, 1023, 1024, 1025, 1026, 1027, 1028,1029, 1030, 1031, 1032, 1033, 1034, 1035, 1036, 1037, 1038,1039, 1040, 1041, 1042, 1043, 1044, 1045, 1046, 1047, 1048,1049, 1050, 1051, 1052, 1053, 1054, 1055, 1056, 1057: n = A,T,C or G
  misc_feature 1058, 1059, 1060, 1061, 1062, 1063, 1064, 1065, 1066, 1067,1068, 1069, 1070, 1071, 1072, 1073, 1074, 1075, 1076, 1077,1078, 1079, 1080, 1081, 1082, 1083, 1084, 1085, 1086, 1087,1088, 1089, 1090, 1091, 1092, 1093, 1094, 1095, 1096: n = A,T,C or G
  misc_feature 1097, 1098, 1099, 1100, 1101, 1102, 1103, 1104, 1105, 1106,1107, 1108, 1109, 1110, 1111, 1112, 1113, 1114, 1115, 1116,1117, 1118: n = A,T,C or G
gacctaattttaaaatgcattcaattattcttaagcccagaaggcatttagaaatgactgttgctaaccaccaaaacgaggaactgttctgtgacctttagactctgccttcttcagcagccatcttttgcagggcttgatctcacatgggagtgccaaagcacaaaatttatggagtcctcagagtttttgtggtcgcaaatcacaagactttatcaaacagaaagggaagtttgccttagagggtgagaacatacttttcagacatagcgatgggaatacaaacaggccaattcaatttcttttggggtcatggtttgtagctttattgaatgtgcgacattccctttttgaaagtccataggatgttttcacttcagagaataatttccacatcccattcgacaccaagaaatgggtaattattatatcacttggtgattatttatcacagtttgaatgaaaataaattgcttcaaagtgaaatcacattacatggttacctgtctgccctattaatttttcatttaattttctttattttaatgtgcatacaaatgtttgtgagctatctcatctgtctccctcataattccctccaatggatttaaatatgttaagagaaattaaataaataggttaaaggaaggctcgggatttgggaaatgggggtttagctgagagtggtaatttgtttctgaaccggctgtctcacttcctgtggaacagaagcacactggaaaatttaaaaaaattggggaaaacacatgtatattcctaccatagaccagctagttagggtacaagtgttgattactatattttctggatccagcagtatccacagtgcccacactggcagttttcaccagtgatttcatttccactaataaaatccacagaacagcaccgcttttctctcaccctaagagtatgaaatcagtcttccctgagcctccccatttccaccttaatcctccaaagtctgaaaatctagttgaaaggacttgtccattcannnnnnnnnnnnnnnnnnnnnnnnnnnnnnnnnnnnnnnnnnnnnnnnnnnnnnnnnnnnnnnnnnnnnnnnnnnnnnnnnnnnnnnnnnnnnnnnnnnntaagaaaagaaggagagagattcagagggatgaaggtggaaaagaaaggtgggtgctttagagaattagcagatgttaaattgtggagatttattcagaaatgtgttcagatgataatcagaagcacccgtacaatgctgcaatttatgatatacctactgtgtgcattagctcattgaatcctccccaaggttctcacaatgttagtttagcaccatgtttatactgtctgtctgtcaatccccactagtctgtgagatccttgcagtcatgggctttttattgttcatctccatagccccaaaatctatagactggctggcactaatataggcttggaaaacatttgacaaatgaacgaacatgatgtataagtgcatgatcaagaacccatacaggatttctgattccaagtccacaaattgatctcccccacctttctgaactcctataaaaattatggtcaggcaattaatttgacactcatatgctgatttgcgccatctcttgagttgttgtactgaactataatttgaaatttttattgttattaaacatttcacaaggggatttatgtcttgttttcacaactagcctgtgagctcattcattcatgcaataagcattcactgaattatgcattgggcattgttacatgggttgttccatttaacccttccttcttctccatgagtataattatccagagcctactgtgtgtcacaggcactatgttcagtgtgtgatatcatctgtcctgacaattcaaaatctccaaccaagctgcaaactcaaatgcctttaaaggccacattagtaagctcagggagtgacgcagttgacagctaggagagagtgagtgtatttggatagggcttctacagatgaccttgcagcttgtgcatcatacaaaggtccccagatgaagacatgaggttggcctaaaatccagcctgctctccaaaccatgcatcagggtgtggggctatgactgcatgcaggtgttaacacctttttttttctttccctgaaaagcactttagcttgctaagccctgcacctgaggctgcaattggtcaaaagggctactctcctaacttgcatgagggcacagcatgtgctaagggaggacctatcatttatgrtgtgtgttggggataggaaggaaataaaccttaggttgcacctccccactaaggtcattaaaatttaat

SEQ ID NO: 708312 - DNA, 629 bp, Homo sapiens
tatttgtatagcatctcttccatgccacactgagctgggtctgaggaaagccccaacatattatgaaacaaaatagctgtggctgatggagataccatgacttggagatggccagagctagaattccagttgctggcagagccagaggtatcccagagtggttcaggctcaacacaattaagagctggagatgagcagttaggccaaatcctggctcaagctcccttgtgaatttagccaagcaacatcatctgtctgagcctcaggtttttttttttttttttttttaatactaagttttagggtacatgtgcacaacgtgcaggttagttacatatgtatacatgtgccatgttggtgtgctgcacccattaacttgtcatgtaacattargtctatctcctaatgctatccctcccccctccccccaccccacaacaggcccggtgtgtgatgttccccttcctgtgtccatgtgttctcattgttcaattcccacctatgagtgagaacatgggtgtttggttttttgtccttgcgatagtttgctgagaatgatggtttccagcttcatccatgtccctacaaaggatatgaactcatccttttttatggctgcatagtattcc

SEQ ID NO: 708313 - DNA, 624 bp, Homo sapiens
tctttcttacaggcttttgtggggactaaataccttaactattatgcaaacagggtattttctgaagtgcttttactccattatgattgcctaggtattaatatgctttttatatcccacagtagttcagtaattctctttcttcatataggagggtgacaaggtaagagacaaactaaatttccttcattcaagttttcattgtacataaaataaaatggacagttttatttactcattcacaasagagttgtttctcatgagaaaaacaaccttgataggaaaaagttacatataaaatggataggggtagggataacaccagaaatggagggttatgtgcttatatacattaggatggttggaaatgtagtgtacaggaagaagaggaagagctagtgaacactgaaaaaatatatattgatagttctctggagagagtaggagaagcataaattttaagcagattttattaacaggaaactttggggaaagggaaacttatctgaagaaaaaccttagaaacttctctgtgaaatgctacagaaaactctatactaggcctttaagagagcctaaattatgatctgcattattcttcaagacatttggacacaggtttct

SEQ ID NO: 708314 - DNA, 1605 bp, Homo sapiens
ttacaccacagtagggttttcataaatcctctgctacaactttataatttgttttacaccatcaactcccacatcattcctatattattacaaaattcaagcagctacaytataaattttaagacatggactttgaagccctcaactttctagtcatcagggctttatgtactttaagaaaacaatcagagcttggaggaaagcaaaaggaaagtaaaagagaatttgggtgtttatacatagagagagagaaaaggaaaaagacattatttccagaaagactgcatgaggatgacagacaaataaagacagaggggatatttgtgatttaattctgcaaatcctcccaaatatttattagttaaatcttatcctaaatatcaaaatttaaagtccatatagttttataagatgttgttagaaaagtttaaaatttctcagactcacaaaaatctaaagatatcttttgccaaaatactctgaaatagtaaaacccttcagactcacttgcattgaaggagatgtttcagtaaaacagtcttctctagctctcccaattcctggaagtttgtctggcaggagctgttgagggtttcgtcatggagggacagctcaggattggccaggccatcatgagactgttttaaggaatcctgggttaaacattagagtcatgtcaaagtttgccccagcatttctgatttttttctttgttttattttgtcttgttttcgtttgaagcatttattttaaaaatcctgataaattaaaataaaatattttattactgcttttaagaaaaaaattatcatgatagtatcagctattgtgtctgttaaagatgccaaaactcccaagccatttttgaaaactctacgcaatctactccatcctctgaaaattagctgcttacaattatttcataactaattgatgctcagaattatctcactgagaaatttgcatgtcctcagaaattcaagaaagatgtaattggacttgctatacacttcaaattaaagcaagggcaccttttattaccatgttattagtttgagttttatgagctctcaagaggcttcaagtctggttctgaacacccagtgttgctcattacacaggctacttattcgatagataaattagtcaacttttcaacccagttttcctctttttctagtgagaagaaaaaaattatacacacacgcacagaggtaaaaggcttgtacactgaaaactatgaaacaatgctgaaataaatttcaaaagacctaaataaatagaaaaacttcctgtgttcatggataataaaacctaatattggtaagatgttaatgctacccaaagtaatctacagattcagtgtaatctttatcaaaattctaacagccatttttgcatatatgaaaaagtcaatccttaaattcataaggaactgaaaggtgctctgaatagtcaaaacaatattgaaaaaagaaaacaaagttggggatctcatccttcccaatttcgcaacttactccaaagctacagtacataagccagtgtagtactgacattaagaaagatatatagaccaatggaaggaaattgagagttatatat

SEQ ID NO: 708315 - DNA, 1605 bp, Homo sapiens
ttacaccacagtagggttttcataaatcctctgctacaactttataatttgttttacaccatcaactcccacatcattcctatattattacaaaattcaagcagctacattataaattttaagacatggactttgaagccctcaactttctagtcatcagggctttatgtactttaagaaaacaatcagagcttggaggaaagcaaaaggaaagtaaaagagaatttgggtgtttatacatagagagagagaaaaggraaaagacattatttccagaaagactgcatgaggatgacagacaaataaagacagaggggatatttgtgatttaattctgcaaatcctcccaaatatttattagttaaatcttatcctaaatatcaaaatttaaagtccatatagttttataagatgttgttagaaaagtttaaaatttctcagactcacaaaaatctaaagatatcttttgccaaaatactctgaaatagtaaaacccttcagactcacttgcattgaaggagatgtttcagtaaaacagtcttctctagctctcccaattcctggaagtttgtctggcaggagctgttgagggtttcgtcatggagggacagctcaggattggccaggccatcatgagactgttttaaggaatcctgggttaaacattagagtcatgtcaaagtttgccccagcatttctgatttttttctttgttttattttgtcttgttttcgtttgaagcatttattttaaaaatcctgataaattaaaataaaatattttattactgcttttaagaaaaaaattatcatgatagtatcagctattgtgtctgttaaagatgccaaaactcccaagccatttttgaaaactctacgcaatctactccatcctctgaaaattagctgcttacaattatttcataactaattgatgctcagaattatctcactgagaaatttgcatgtcctcagaaattcaagaaagatgtaattggacttgctatacacttcaaattaaagcaagggcaccttttattaccatgttattagtttgagttttatgagctctcaagaggcttcaagtctggttctgaacacccagtgttgctcattacacaggctacttattcgatagataaattagtcaacttttcaacccagttttcctctttttctagtgagaagaaaaaaattatacacacacgcacagaggtaaaaggcttgtacactgaaaactatgaaacaatgctgaaataaatttcaaaagacctaaataaatagaaaaacttcctgtgttcatggataataaaacctaatattggtaagatgttaatgctacccaaagtaatctacagattcagtgtaatctttatcaaaattctaacagccatttttgcatatatgaaaaagtcaatccttaaattcataaggaactgaaaggtgctctgaatagtcaaaacaatattgaaaaaagaaaacaaagttggggatctcatccttcccaatttcgcaacttactccaaagctacagtacataagccagtgtagtactgacattaagaaagatatatagaccaatggaaggaaattgagagttatatat

SEQ ID NO: 708316 - DNA, 585 bp, Homo sapiens
tccttccagagtgcagggatagtctcaataatcttttcaatcctcagcatgtagcagtgagcaggtccacagtaggcccacaaaaatctgtgttgaaggagttactgatattttcacaggggcttgtgtttatttaaaggcttcctaacccatctgtgagctccttagggcccaaggttgaacttggatattccttccaaatcctgactctgtgcctggcatrtagacaacagttgcctcctaagaattccagaatgagctgggcgtggtgactcatgcctgtaatcccagcactttgggaggccgaggcaggcagatcacggggtcaggagttcgagaccagtctggccaacatagtgaaaccctatctctattaaaaattagcctggtgtggtggtgtgcgcctttaatcccagctactcaggaggctaaggcaggagaatcacgtgaacctgggaggcagaggttgcagtgagccgagattgcgccattgcactccaggccggcgacagtgtgagactccatctaaaaaaaaaataaaaataaaaaaaaatttccagaatgaaaaattgtggcccatgttgg

SEQ ID NO: 708317 - DNA, 585 bp, Homo sapiens
tccttccagagtgcagggatagtctcaataatcttttcaatcctcagcatgtagcagtgagcaggtccacagtaggcccacaaaaatctgtgttgaaggagttactgatattttcacaggggcttgtgtttatttaaaggcttcctaacccatctgtgagctccttagggcccaaggttgaacttggatattccttccaaatcctgactctgtgcctggcatatagacaacagttgcctcctaagaattccagaatgagctgggcrtggtgactcatgcctgtaatcccagcactttgggaggccgaggcaggcagatcacggggtcaggagttcgagaccagtctggccaacatagtgaaaccctatctctattaaaaattagcctggtgtggtggtgtgcgcctttaatcccagctactcaggaggctaaggcaggagaatcacgtgaacctgggaggcagaggttgcagtgagccgagattgcgccattgcactccaggccggcgacagtgtgagactccatctaaaaaaaaaataaaaataaaaaaaaatttccagaatgaaaaattgtggcccatgttgg

SEQ ID NO: 708318 - DNA, 1245 bp, Homo sapiens
tatttgcaatccttatccacgaatcctagttctatatagagcaacagaaaagaagcctgtgtcctttcaaatatttgagtatcctttctactctctccccttggtcttctccaggctgaactccctcagatttgcaactgttgctacctgacggtttctggaccagtcagcatcccatctgtctcttgttgttatttctttctttagattattcatttcttcttcttaatctgtatgaagaaaggattgttttctatcatcctctgactttctatcatccttgactgtcaaactacattctctgtatggaaacaatgcaaattagccaagttaggtaaggtgactgcttactatttgcaaatgtctcaaccaaacaaccattcctcctcctttacacactgatcacaaaccaaggtatacatgggagaacaaaaatataacaacaacaacaaaaaaactctgaaagcataatyagaaaagagctaacaaaaaagacttcacacgatattgatgcatatgcctctaagatattaatacctggcttctgtagatataccctgggtgcctatagctcaaccaggttgaaatatgtatttctggagaagcttatctgcgatgtctgtttttagtgataacaggagctcactgttggaactcaataaatagaaaagattattactctctgtcaacatttatgttgttttgtcctttgaataaatgggagccttagtgatcttactcagttacagggttctaaatgccatctagatgccaatgattcccaaatttatatctgcagcccaggctgcttcctgaattccagactcatccatccagccctctgctggacgtctcctcttgatgtctagtaggcatctccacctcggtgcattcagctgcgctcctgatccctcaggacccctccccatctcatttaatggcagctccatctttccaacaggttatgccaaaatcctcgggctgattctcacaaccttactttctctcacagtaatcaagaattttattggctatcttcaaaatacatccagaatctgtcaaccccttcactgctcccaccctggtctgatccatcaccactctcacccacgtcgctgccatcacatcctgcctggtttccttcctgctactcactgttcacccacagtcgatacccaacaggcagccaaagcgacccttttaaaatgcaagtcagggccgggcgcggtggctcacgcctgtcat

SEQ ID NO: 708319 - DNA, 575 bp, Homo sapiens
tcaacactctcttaaaataacttcgggttgcagcctccttcaccagatcctttcttcttctggacttacttgctcccttgagacagagaaacaagaaaagaagcgtctgcttgctggacatctgacctgggagccggcgtgcaggccatttgttcactcagctgttacagacttaaaggagagcacaaaccccaggattttttatcaggagggaaacaaacaaacaaacaaacattcccatcgatctaaatcagactcttactctacagtctggtccagagactggctaaaaggggtatatggatcccctgaaaacatatgccacatttggtgtgtttgggcatttttctgagcagcagggcccactgttttcatgagatgctcgtactgwgcgccttctatgaacacttgcccgtccaggtccactcttcaatctctctactcggctctgcgccaggaggcagacggatgcaagctgcctcgacaggcttccttctggcttcaggatgggctcagcccttggagagcgcagaaggagatgggagaggacagggcacttgtcctcctggctcctg

SEQ ID NO: 708320 - DNA, 575 bp, Homo sapiens
tcaacactctcttaaaataacttcgggttgcagcctccttcaccagatcctttcttcttctggacttacttgctcccttgagacagagaaacaagaaaagaagcgtctgcttgctggacatctgacctgggagccggcgtgcaggccatttgttcactcagctgttacagacttaaaggagagcacaaaccccaggattttttatcaggagggaaacaaacaaacaaacaaacattcccatcgatctaaatcagactcttactctacagtctggtccagagactggctaaaaggggtatatggatcccctgaaaacatatgccacatttggtgtgtttgggcatttttctgagcagcagggcccactgttttcatgagatgctcgtactgagcgccttctatgaacacttgcccgtccaggtccactcttcaatctctctactckgctctgcgccaggaggcagacggatgcaagctgcctcgacaggcttccttctggcttcaggatgggctcagcccttggagagcgcagaaggagatgggagaggacagggcacttgtcctcctggctcctg

SEQ ID NO: 708321 - DNA, 2282 bp, Homo sapiens
ggaaagaaacccccaaaagagaagaaggtagagaggcgaggcaggagctttcagtgtgactgtcaacttcgcatgccccactccactgttcatggcactgcagcccaggaccctccacagacccagccaaagcccagatgatgcccaagggagggcgtggcatggagcagagacatgagacccacagacggggctctgtaatagcacaggaaccggtgaagatgtttaaggaagaagaagcaacagaggagctgaaggcaggaagggagaagggagaaaggcacaggtgaggcaggctgggaggggcagccatggtagcaggaagcacaaggtcacctgtgactgattcctgagtggtctctccaaccctccctgttcacctgtgtttctccatgtggagtcccagtcatctgcactaaagatacctggaccctaccccaaagattctgattgagctggtgggaccatctgcattttaccaagctccacagatagttctgcaggcaggagtttctggagacccattgcttcattgacattgagcaagtgaatggatgaaaattgaatgacgtgagaagagatcctaatgcaacacctatgggaacaccaacatttatggaggataggagagtggaaacgaaactgaaggtgaatggtcagaatggtgagaggggaatgaggagggagaagaatcactacacgtgctatgctgttccctttacctggaacgctcatcttcctcaggcaaaccatcccttaaaaagtctcatcctcttggaaacttttcaaaagtctcatcctcttggaaacttttctaactctcccagacatagagaacggctccaatcccatcttgtttgtatttctcattgcaagtacctatacacactgcccttctttattggctggtttctctctttctcattctaggatgatgagctgttttatgtagactatatgatctctcagtcatcattacatgtccccaaattctggaaaaagtagctactccacgtgcataaatatatcacaagaggatttcttaacctgaggagttggtatatagaygtttgctctactattggtctttaaactgaacatctacctccatttcacacactattttcatgcatgatacacttcacagtaaagaaacactttaaatgtttctttaataggatttagtctagagagttatgacttagtggaaaatgaaaagaaaaagttttaaggagctaatctaacaaggaggcaaacaagacaaaaggcaaagaaagtaccagactgaggtgaactcagtacaaggtgcagcattgcagatgtggtttttgataaaccgatacatttgggactcagaaaggtgtcacacttccattaatggtgacaaagaaatcgcctaaacagagataagctgctcaaagtaagagcgaacttacactcactcttctggagaacgaccaccacatttagccccaatgtatgaaaacggtcactaaatttggtgaaacagaggtggaatgaaagataccaaaataattagcagaaaacaaaatcacccatctacttggcttaaaaaaaaaagaggaactgtagattaaaagttaaggatcacacagcacttggggaggttgaggcgggaggatcacgaggtaaggagatcgagaccatcctggctaacacggtgaaaccccatctctactagaaatacaaaaaattagccgggcgtggtggcgggcgccagtagtcacagctacttgggaggctgaggcaggagaatggtgtgaacccaggaggcggagcttgcagtgagccgagatcgcgccactgcactccagcctgggcgacagagcgagactccgtctcaacaacaacaataaaaaagttagggatcacactaatcatcgaatagatgaatgaatgaatgaatgaatggaatggtgaagggtctagaacatccttggggaaacaccagcacttgaggggcatttcaaacactgttttcttagtttttaaagtgtttcatcacttggtgtgtacacctgaggaatcatggctcagaaaagctgaacgacttgctcttggtcacacagctactaacttcctgaacgagatctggaacccgatcttccacattcaatctgctacactttccactgcaccacattaagccccaatgtatgaaaatggtcactaaacttggtgaaacagaggtggaaatgaaagatgccaataggaatccatcttgaaacacaggagaaagccatcgcaaggaccaaaggttg

SEQ ID NO: 708322 - DNA, 886 bp, Homo sapiens
cctggccatcaacatgagatatcctggatttattaggtcctttcaaaactttttctctccatcgcaagcccttaggattcattcctatcatttttaagtatggaggttaatttttcttcaaatgtagctgcccagaaactctctttttcctgtgaagcccaaataagctcctgaagctagctctggacccccggtggcaatgttgtcggaacgggggaactttctttttatactttgaaccaagggagtctgctgaggtgacacaggccattggaaacacaggctattctgtgaaggctccttgatcacatcatgccctgtgggtggacaccctcctttgtaggacctgccctggacaagactgagaggtagaagacacttgcctttccatttctccccaaggttccctccgttcggggccatccacagatctttctccagctccatctctctctgaagctggcagrcagggacagcctctcttcatgtgttccacgtttccttgtgttacaatctggacttcagtgttaatccattatttcattaaacacccactcattgggacacctctgggctgggcttagaccctggggataagaagatgaagggcatggaggttcaggccatttcggaacttccaggtccctcagggagggcagagaagtggacaggcaagcccaggaacccgtgaaggctgccgtcctgctgtcagttatgtgtgttgtgcaaccaagactcatagattttcatcccagcaaagccagctgggaaaggaaaagggacagttgtgagctctgagagtcagcttccttgaattgttctttgagttaaaatcaaagctggcaattaagactctcctactaccaagctgtggaacaaactgtcc

SEQ ID NO: 708323 - DNA, 886 bp, Homo sapiens
cctggccatcaacatgagatatcctggatttattaggtcctttcaaaactttttctctccatcgcaagcccttaggattcattcctatcatttttaagtatggaggttaatttttcttcaaatgtagctgcccagaaactctctttttcctgtgaagcccaaataagctcctgaagctagctctggacccccggtggcaatgttgtcggaacgggggaactttctttttatactttgaaccaagggagtctgctgaggtgacacaggccattggaaacacaggctattctgtgaaggctccttgatcacatcatgccctgtgggtggacaccctcctttgtaggacctgccctggacaagactgagaggtagaagacacttgcctttccatttctccccaaggttccctccgttcggggccatccacagatctttctccagctccatctctctctgaagctggcagacagggacagcctctcttcatgtgttccacgtttccttgtgttacaatctggacttcagtgttaatccattatttcattaaacacccactcattgggacacctctgggctgggcttagaccctggggataagaagatgaagggcatggaggttcaggccatttcggaacttccaggtccctcagggagggcagagaagtggacaggcaagcccaggaacccgtgaaggctgccgtcctgctgtcagttatgtgtkttgtgcaaccaagactcatagattttcatcccagcaaagccagctgggaaaggaaaagggacagttgtgagctctgagagtcagcttccttgaattgttctttgagttaaaatcaaagctggcaattaagactctcctactaccaagctgtggaacaaactgtcc

SEQ ID NO: 708324 - DNA, 625 bp, Homo sapiens
tttcaaatattgcctccaccatatactctttgaatcaaatgatcaaatgtatattagacattctcactcttcactctgctctattttttcttgccctttcctctatattttctatctttttgtctctccttgcccaattctaagtgttttcttctgacttacctcccagttcattaatttttctgtagctagtctaacctgctagtcaaccatccttttaagttcttaattctattatttttcaattccagaagttctctattttttcagattgtttatattagcttttattctttatttttgctgttgtttttattttttcttctttttaatttttttccttttattctttcctgtaccctacagatttatataagcttgtcttttttctctaaatacagtaatcatagttgttttatcttctgggtctgataattccagtatttggagtctttgggcatctgactttatttttttaaaattgattctgctgtktcttgtccaatatgttttcttctttatgtgcctgattgcatttgatgggttgctgatgattgtacttaaaattatttgtatattggcattttcttctgctagacaactggggtactttcaggcaggacaa

SEQ ID NO: 708325 - DNA, 652 bp, Homo sapiens
tgctacaggaaacatttttacaaagctaagcctggggctgggcacagtggctcatgcctgtaatcccagcactttgggaggccaaggtgggtgaatctcttgagcccaggaatttgagaccagcctggacaacagggcaaaaccttatctcaacaaaaaataaatatcagggctgggcacagtggctcacgcctgtaatcccagcactttgggaggccaaggcgggcagatcacgaggtcaggagatcgagaccatcctggctaacatggtgaaacccctctctactaaaaatacaaaaaattagccaggcatgatggtgggcgcctgtagttccagctactcgggaggctgaggcaggagaatggcgtgaacccgggaggtggaggttgcagtgagccgagatygtgccattgcactccagcctgggcgacacagcgagactccgtcttgaaataaaataaaataaaataaaaataaataaatatcaaaaaattagccaagcatggtggcgagcgcctgtagtcacagctacttaggaggctgagataggaagatcacttgagcccgggagattgaggctgcagtgagctatgatcacgccactgtactccagactgggcaacagtgagaccttgtctcaaaaaataaata

SEQ ID NO: 708326 - DNA, 794 bp, Homo sapiens
tgtggatgatgtgctgctgcaagcttcatcttcaacttcgtttcaccctttctgaaattgaattattgtaaactgctgatttctctagggcattgtccctaaaaagcatcagtgatttcatcattcttctacccaagcttcaccaaaatttgatgtttgttcttgtgtcaattttagcagaattcatgttgttttgataggggctcttttcaaactgatgtcttatctttcttggtgccttaaactaagttctgttcagacatgtgacaacaaattcatactagtttttttttttggtgcaaaaaaaagttgtgaattccatgcataattttttcaggatatgcattttcaatgaaatttttaaaggcctctcatgtgctaatattgaacttatgtcatggttatattaaaaatgtattgccaaatagaatattaaattattcgggtacaaattatttgctttttcattttactaaataatgtgtgctttgataagcatttctaattgtaagaaaggaaaaaagaagagagtgaggaattaataaaaagaaaaaaggtagasaaaaaggaaaggaaacaggagaaagaaggaagaggaggagggagaagagagagaatgccacatatcaggaaggggggacattcttaaagctagacataaacatggtataaaactgtaataatataaaatccccatcttcatttttgaactggcagaagaaagataagggcagtgatgtgcttcaagttatcgacttgagacatttttttggagctcttagtcaaacttatcc

SEQ ID NO: 708327 - DNA, 794 bp, Homo sapiens
tgtggatgatgtgctgctgcaagcttcatcttcaacttcgtttcaccctttctgaaattgaattattgtaaactgctgatttctctagggcattgtccctaaaaagcatcagtgatttcatcattcttctacccaagcttcaccaaaatttgatgtttgttcttgtgtcaattttagcagaattcatgttgttttgataggggctcttttcaaactgatgtcttatctttcttggtgccttaaactaagttctgttcagacatgtgacaacaaattcatactagtttttttttttggtgcaaaaaaaagttgtgaattccatgcataattttttcaggatatgcattttcaatgaaatttttaaaggcctctcatgtgctaatattgaacttatgtcatggttatattaaaaatgtattgccaaatagaatattaaattattcgggtacaaattatttgctttttcattttactaaataatgtgtgctttgataagcatttctaattgtaagaaaggaaaaaagaagagagtgaggaattaataaaaagaaaaaaggtagagaaaaaggaaaggaaacaggagaaagaaggaagaggaggagggagaagagagagaatgccacatatcaggaaggggggacattcttaaagctagacataaacatggtataaaactgtaataatataaaatccccatcttcatttytgaactggcagaagaaagataagggcagtgatgtgcttcaagttatcgacttgagacatttttttggagctcttagtcaaacttatcc

SEQ ID NO: 708328 - DNA, 1153 bp, Homo sapiens
tcttttatttgttattaaattactaatccaaccaatgtgggattggcaggttttgccagatttttgacacgtttctctttttggagttagatttagatgctctatttgctatttcaagctgttccattttcatgatttcactatagtaatgtagttctatacattccaagygtcttacccttgttatgtttccttctatagtgatccaaactccagcatctcatgctaattaatatacttttgcaacttcaactataatgtctttattccttttggagcataattatcacttctgacccactacctatgagaacctagaatattcaacacaataacaaggtacttagaaaatttttctttaattgtgactttatgacaaagagaaatatttgacatatttattatgtctttaaataataaaatatatgaaatcacttggcacataatggttactaagacatattagtctcttccatccttaattataaaagaaattaagagtcagtggccttcaaagtggagtatgaatgcctttaggggaagtgaaaagagttaccactgggttagaaaaaaatcacaatttcacatgctactttgtattattacattatattaagttgtctattttatatgtcttatattacaattatatagatagatacagatttataatactttgattttcgtcattggcacatgctcaaaaagtttggaattcattggattaaatgaggttgctcaaatttcagtcctcacatactattttggaagttttgctgtatttgactattgccaaagataattttaatgtactgctaaaaaggacacagttaaggcttgaaaattcagaaagtgaaagcccatattagacagaagatatacaggaatgtgataaatatatgattgatgatagattagatagatgatagatagatagatagatagatagatagatagatagatagatagacagacagacagacagacagacaaatagagctagataaccatcattctcagaagactttaggctgaacttaacaaatgcttgaaacgttcgtggtcatctccagtcccacaccagtaattcatgtgttctatgtaactggatggcaatgcccccatcttactttttactttgtcctaaaaaata

SEQ ID NO: 708329 - DNA, 3070 bp, Homo sapiens
ctggagatgttcttatttggccatcttggctccacccgctcctgtcactattcttgaaacaattctggaaccaatcctccatggatagtgaaggaaaactatattatacttaataacttccaaaccagtaaattaataaagaaaaggttaagttgtacaaaatagtatcagtttaacagttacagaaaaaaatgaaaaaaaaggtaactatgaaaggcagagtaagataatggaaaaggtaaaatatattatcacaataaatgtaaatgacttacatatacctactaactaaaatacaaagactttgttgatagaaacaaaaatgtacctagctatcgtctgcttttaaatgtcataccacaaataaaattgctttgaaatgttccagataaagaaatgggaaaaatatctaatgaacaaagactgttcagaagaatgttattataccaatatagtaatagacaaaattaaaattaagggaatggcattaacataggtaaayaggtatatgcataataattaaaataaaatttacttagaaggttatgacattttatgtatataacaacattgtcaaaaaagtagtaaagcaaaaattgcaaactctgcagtgtcatcagacactgatatattaagcaaagtaaaataccttaaattcaacacattgttatataaaactaactaaaatttcaaagaaatgattacccgtaaaacacatttttaaccataaggcaactcaaaaacctacacttaaaagatagcttaaaaaataaaatatacttcaaaactttgaaatgcatttagaaataacatagttcttcaaacttttcttgtttgatttttttcaatctaaatgcagtatttgatattcacttttcttcattttattaaacacatggccgtttgtttcaacctgccaagatcatcttaattaattctgtaaccactgtaattgttattatttcatgatttctatcagttttatattataaacatgttttctgtacatttgagtcatgtatcaaagtgttgaatctgttaacatgaaggacagagacctaaattgttaatgtttctaactagagaggaaatgatgcattaactctttcaggttaagagatatttgtattttaattacatatttttaattttgtgtacttatatactacataaggtaatagtaatacagcttcccttttaagcctatgtcccgttatgaatataaacttttttattatccatcacatgactgagaaaatattgatacattataaaatgaaaaaaaacttagtaaaatgcttaacagggcaaagaataaataaacaatgacaatacataaatttttgacttgcagatacagtttgtttctggaagcatacagatcttccttgtttgtttacataagctataagaaagaaaaaaatgaaatttctgcaaacactgatttaccagttctttatctctctactcataggatgaacactaaccataaatttcacctctatctaaggagtgttctcagatagttagatccactagttaagaccaagaaaaagcaaaaatgattttagcccccacagaatttagtgattgatctttccaattttgtatatcatcaagatagttaaatctcaagataccaaaaatgacaataatattcatactaaaagagttctacccaaatggtcataaaggggattgttccagaaatgtggttcattattttctaaagcttttaatttatgatgacatcctgacatcagaccttgaattaggtactaaaaagccaatccttactggagtcacgcactggaatgtgagttgagagcatgatcttaccctctctgagcctcagttttctcatcttcaaaatgctgtggtttgccttagttaggtataaggtttcttgttcttctaatctttttcagggctatatccccttactccttcccatctgttcaaaattgtaatccccataaaacatagagaaatatattctctatatatctcagatgactagaaaaaaacttcaagaaatacttcttggaagaaatatgtccttagtttctggtttaagctcacgttcttcctttagttggcttaggtctcccttttcatgagtgtcctaattgagtatttggtctctctgcagctatgtgttatccagctggcattttgaatttcttgatggagcattacttcactttagattcccagttcttggaaagtgaatcaagctttctttttattgcctgactctttttcatgtaggatattttctgctatttctctaagcttactgaaggtaagtctttatggtaagccaatgcaatctgctacatgacctcaatcttctccaggcatatccttaatttacagtgctctgctgaccttgcaaatctgtttataatcccttttcttaaatgagcatatgcagagcaaagtcattaactttcctctcaaatatctgtatcaatgacttttgttcatagatattaaagggcaccaactatctgatataaatgttcatatactttattgcagcaaggcacaggcctgtgacatatcatggaattttaattcctggtcatctcactcttcaatatgctatggattggtaggaaacaactaaatctgagaaagtcaatttgtcatttgagagacgtgtagattctaatagattctaagtgaataagttaagtagtagcaggtatttttgatctgccattgaaatttataccttgccttagaagagtgctgacattttaactcagtgtttaaggataagtagtagttcatgcagtagagggagaaaagaatgtcagtacataatgtggaagaatgaatatgttgtacttagaatgacagaaaaatttgatatgtttagagtataaaggatattttagaaagtattatataataaggttaaaatgatagtgtggtaagcattatcacagatctagtactgaaaagctttccttaatattataataaaaggcaaggttttgaaaggcatatttgaggagagtagcatactctgatttgtgttgtagtataatcattaagagga

SEQ ID NO: 708330 - DNA, 3070 bp, Homo sapiens
ctggagatgttcttatttggccatcttggctccacccgctcctgtcactattcttgaaacaattctggaaccaatcctccatggatagtgaaggaaaactatattatacttaataacttccaaaccagtaaattaataaagaaaaggttaagttgtacaaaatagtatcagtttaacagttacagaaaaaaatgaaaaaaaaggtaactatgaaaggcagagtaagataatggaaaaggtaaaatatattatcacaataaatgtaaatgacttacatatacctactaactaaaatacaaagactttgttgatagaaacaaaaatgtacctagctatcgtctgcttttaaatgtcataccacaaataaaattgctttgaaatgttccagataaagaaatgggaaaaatatctaatgaacaaagactgttcagaagaatgttattataccaatatagtaatagacaaaattaaaattaagggaatggcattaacataggtaaataggtatatgcataataattaaaataaaatttacttagaaggttatgacattttatgtatataacaacattgtcaaaaaagtagtaaagcaaaaattgcaaactctgcagtgtcatcagacactgatatattaagcaaagtaaaataccttaaattcaacacattgttatataaaactaactaaaatttcaaagaaatgattacccgtaaaacacatttttaaccataaggcaactcaaaaacctacacttaaaagatagcttaaaaaataaaatatacttcaaaactttgaaatgcatttagaaataacatagttcttcaaacttttcttgtttgatttttttcaatctaaatgcagtatttgatattcacttttcttcattttattaaacacatggccgtttgtttcaacctgccaagatcatcttaattaattctgtaaccactgtaattgttattatttcatgatttctatcagttttatattataaacatgttttctgtacatttgagtcatgtatcaaagtgttgaatctgttaacatgaaggacagagacctaaattgttaatgtttctaactagagaggaaatgatgcattaactctttcaggttaagagatatttgtattttaattacatatttttaattttgtgtacttatatactacataaggtaatagtaatacagcttcccttttaagcctatgtcccgttatgaatataaacttttttattatccatcacatgactgagaaaatattgatacattataaaatgaaaaaaaacttagtaaaatgcttaacagggcaaagaataaataaacaatgacaatacataaatttttgacttgcagatacagtttgtttctggaagcatacagatcttccttgtttgtttacataagctataagaaagaaaaaaatgaaatttctgcaaacacygatttaccagttctttatctctctactcataggatgaacactaaccataaatttcacctctatctaaggagtgttctcagatagttagatccactagttaagaccaagaaaaagcaaaaatgattttagcccccacagaatttagtgattgatctttccaattttgtatatcatcaagatagttaaatctcaagataccaaaaatgacaataatattcatactaaaagagttctacccaaatggtcataaaggggattgttccagaaatgtggttcattattttctaaagcttttaatttatgatgacatcctgacatcagaccttgaattaggtactaaaaagccaatccttactggagtcacgcactggaatgtgagttgagagcatgatcttaccctctctgagcctcagttttctcatcttcaaaatgctgtggtttgccttagttaggtataaggtttcttgttcttctaatctttttcagggctatatccccttactccttcccatctgttcaaaattgtaatccccataaaacatagagaaatatattctctatatatctcagatgactagaaaaaaacttcaagaaatacttcttggaagaaatatgtccttagtttctggtttaagctcacgttcttcctttagttggcttaggtctcccttttcatgagtgtcctaattgagtatttggtctctctgcagctatgtgttatccagctggcattttgaatttcttgatggagcattacttcactttagattcccagttcttggaaagtgaatcaagctttctttttattgcctgactctttttcatgtaggatattttctgctatttctctaagcttactgaaggtaagtctttatggtaagccaatgcaatctgctacatgacctcaatcttctccaggcatatccttaatttacagtgctctgctgaccttgcaaatctgtttataatcccttttcttaaatgagcatatgcagagcaaagtcattaactttcctctcaaatatctgtatcaatgacttttgttcatagatattaaagggcaccaactatctgatataaatgttcatatactttattgcagcaaggcacaggcctgtgacatatcatggaattttaattcctggtcatctcactcttcaatatgctatggattggtaggaaacaactaaatctgagaaagtcaatttgtcatttgagagacgtgtagattctaatagattctaagtgaataagttaagtagtagcaggtatttttgatctgccattgaaatttataccttgccttagaagagtgctgacattttaactcagtgtttaaggataagtagtagttcatgcagtagagggagaaaagaatgtcagtacataatgtggaagaatgaatatgttgtacttagaatgacagaaaaatttgatatgtttagagtataaaggatattttagaaagtattatataataaggttaaaatgatagtgtggtaagcattatcacagatctagtactgaaaagctttccttaatattataataaaaggcaaggttttgaaaggcatatttgaggagagtagcatactctgatttgtgttgtagtataatcattaagagga

SEQ ID NO: 708331 - DNA, 3070 bp, Homo sapiens
ctggagatgttcttatttggccatcttggctccacccgctcctgtcactattcttgaaacaattctggaaccaatcctccatggatagtgaaggaaaactatattatacttaataacttccaaaccagtaaattaataaagaaaaggttaagttgtacaaaatagtatcagtttaacagttacagaaaaaaatgaaaaaaaaggtaactatgaaaggcagagtaagataatggaaaaggtaaaatatattatcacaataaatgtaaatgacttacatatacctactaactaaaatacaaagactttgttgatagaaacaaaaatgtacctagctatcgtctgcttttaaatgtcataccacaaataaaattgctttgaaatgttccagataaagaaatgggaaaaatatctaatgaacaaagactgttcagaagaatgttattataccaatatagtaatagacaaaattaaaattaagggaatggcattaacataggtaaataggtatatgcataataattaaaataaaatttacttagaaggttatgacattttatgtatataacaacattgtcaaaaaagtagtaaagcaaaaattgcaaactctgcagtgtcatcagacactgatatattaagcaaagtaaaataccttaaattcaacacattgttatataaaactaactaaaatttcaaagaaatgattacccgtaaaacacatttttaaccataaggcaactcaaaaacctacacttaaaagatagcttaaaaaataaaatatacttcaaaactttgaaatgcatttagaaataacatagttcttcaaacttttcttgtttgatttttttcaatctaaatgcagtatttgatattcacttttcttcattttattaaacacatggccgtttgtttcaacctgccaagatcatcttaattaattctgtaaccactgtaattgttattatttcatgatttctatcagttttatattataaacatgttttctgtacatttgagtcatgtatcaaagtgttgaatctgttaacatgaaggacagagacctaaattgttaatgtttctaactagagaggaaatgatgcattaactctttcaggttaagagatatttgtattttaattacatatttttaattttgtgtacttatatactacataaggtaatagtaatacagcttcccttttaagcctatgtcccgttatgaatataaacttttttattatccatcacatgactgagaaaatattgatacattataaaatgaaaaaaaacttagtaaaatgcttaacagggcaaagaataaataaacaatgacaatacataaatttttgacttgcagatacagtttgtttctggaagcatacagatcttccttgtttgtttacataagctataagaaagaaaaaaatgaaatttctgcaaacactgatttaccagttctttatctctctactcataggatgaacactaaccataaatttcacctctatctaaggagtgttctcagatagttagatccactagttaagaccargaaaaagcaaaaatgattttagcccccacagaatttagtgattgatctttccaattttgtatatcatcaagatagttaaatctcaagataccaaaaatgacaataatattcatactaaaagagttctacccaaatggtcataaaggggattgttccagaaatgtggttcattattttctaaagcttttaatttatgatgacatcctgacatcagaccttgaattaggtactaaaaagccaatccttactggagtcacgcactggaatgtgagttgagagcatgatcttaccctctctgagcctcagttttctcatcttcaaaatgctgtggtttgccttagttaggtataaggtttcttgttcttctaatctttttcagggctatatccccttactccttcccatctgttcaaaattgtaatccccataaaacatagagaaatatattctctatatatctcagatgactagaaaaaaacttcaagaaatacttcttggaagaaatatgtccttagtttctggtttaagctcacgttcttcctttagttggcttaggtctcccttttcatgagtgtcctaattgagtatttggtctctctgcagctatgtgttatccagctggcattttgaatttcttgatggagcattacttcactttagattcccagttcttggaaagtgaatcaagctttctttttattgcctgactctttttcatgtaggatattttctgctatttctctaagcttactgaaggtaagtctttatggtaagccaatgcaatctgctacatgacctcaatcttctccaggcatatccttaatttacagtgctctgctgaccttgcaaatctgtttataatcccttttcttaaatgagcatatgcagagcaaagtcattaactttcctctcaaatatctgtatcaatgacttttgttcatagatattaaagggcaccaactatctgatataaatgttcatatactttattgcagcaaggcacaggcctgtgacatatcatggaattttaattcctggtcatctcactcttcaatatgctatggattggtaggaaacaactaaatctgagaaagtcaatttgtcatttgagagacgtgtagattctaatagattctaagtgaataagttaagtagtagcaggtatttttgatctgccattgaaatttataccttgccttagaagagtgctgacattttaactcagtgtttaaggataagtagtagttcatgcagtagagggagaaaagaatgtcagtacataatgtggaagaatgaatatgttgtacttagaatgacagaaaaatttgatatgtttagagtataaaggatattttagaaagtattatataataaggttaaaatgatagtgtggtaagcattatcacagatctagtactgaaaagctttccttaatattataataaaaggcaaggttttgaaaggcatatttgaggagagtagcatactctgatttgtgttgtagtataatcattaagagga

SEQ ID NO: 708332 - DNA, 1025 bp, Homo sapiens
aaaatatgaaagcagaagtcttagaaactgcattagaccaggtgttctaggaagaactgtcacctggagatctgaatgacaaaaacgaactaggcatgcagagatcaggrgaaataccttagagacagaaaaaaaccaaggacctaaatatggaaggaaattggcattgcagagggacagagacagatacagaggtcaaaggttacctttttcaagatgagatgggtagattccagttatgtgagctttgcaatctgaggaaagaatcctaatgctttcagataatttttatcaagggaccctatttactcattcttagtctcatcttgtacgtgcttcccatttatatttttctttagtcttttttactgtttactcacagctctgattgtgtctggtcttgataacggtaatttcctattttctctcaccttaaaatctattataagtcaattacttgttgggagatgctaatttgctgatattgagctcctcagattttgccagtgtttcctttaaagtcaaaacactcagcctttatttgaggtccttcgtcatttagcctcaggcaactactctaatctttctaccattcttttttttaggatgtaatatatgtatgtcctgaaatggctttgtttcttccttttcattgtccaagttctgtttgtcctttaagacccaactttatgtccacttctgccacgtagcctttgcttaatacctctgcactcagtggtctctcccttctccttggacgtgtgttgcctgtattgcttattagacattttgcttgttatatgtatttcaggtatttttcctccaatagtattataggccctcttttaaaaaggtcagggtgtcccataaagacaatataacaattaggtgctttatatttcagaaagcaattgtacaaattttaaaaaaatcatcctcacaatagcactatggggtcactgggaaaagtacaactatttttattttagagataagggctgacagagggtaagtgacttgcttta

SEQ ID NO: 708333 - DNA, 1476 bp, Homo sapiens
ttaattctgagatgaaaaaataagttaaaattaaaatatcaaaattatccacaatgatgcaaggccatgtaaccaccgagagaaaagtccacagcctcaaatgcttatattaataattaaaaaacatttaaaaagtgaactaagtattcattatatagaactagaaaaaaaagaaacgagaaaacaatttaaaatataaaagcataaataatgaatttttaaaaaatcaacagtctagcaaagtgataaataaaactgaaagttggttctttgagaaaatcaatgaaatggacaatcctttggtatgtacgactgaggaaaaagacacagatgaacaatattagggatgagagcggggatatgatttcaaatatggaagagatgttaaaatagtggtatgtgtaaattttatggtaacatatttgaaaatctagatgaaatgaatgcttagtaggaaaatatatcttctcaaagttctctgaagaagaggcaaaaaactttactaataaagagaaaaatattaataatggagaaatagactattagattggtgcaaaagtaattgccattacttgtaatcgcacaaactgcagttacttttgcgccaacctaatataagtaaaatacaatatctagatgattctcatggagctcatgcataaaacyggacaagaaaaacttaatgttacttaaactgttccagaacaggaaaaatcagaaatagctgcagttcattttacgattctagcataaccattacacccaaacctgacagaggtggcataaaacagagaccaatcacattaataaatcaagatgcagggattccaaataaaatattatcaaataaaactcattggcgtgtcctgataaagcacagacttccttgatgtgataaaggatacatattagaaaattaaaacaatgttcttaatattgaaatcctattaaataggaacaaatcaagaatatctgacatactgctatcatttaacactatgctgaatgtgataaagcaagacaacaaatgtggaatattaaagatgcatatcacagtgtcatttttgcaggtgatatgattagttatcacattagtgatataattagacaatttaggataatcaactgaaaaactattagaataacaaagttaacttcaaaataaatatacataaatcaatgtcattcttatataacagtaatcatcagctagaaaacacaatggaaaaaaagggcaatttacaataacagcaaaactataaaacacctaggaataaacttagaaatgtgtaagacttatatgaataaaacatatttgatagaaaaataatatataacatttattaaaatcaagtatacacatatcctgggcctactaatccttctccaaagcatccattttactaaataaaggcacaattcataagaatacaaaccttttatctacatctctttgtatctgagttgttgcaatga

SEQ ID NO: 708334 - DNA, 1417 bp, Homo sapiens
gtcttcattactatgttaatcactgtggtctttattaatggatattttatcccaactatgtaacaacttacttacagtagaacaataactaataattagggacagaattggttcactcttraaacctagagactaatgattaactaacacaactgagtccagtttgaattggaatggctttgaactcatagaatggctttgaactcatagaatttgaacttatagaatgagtccttttggcttattatcagacttcttgtgtattctacaatacagtgtagaaaaataaacatacactcaatgttcaacataagttatgctaagaatgaatttataaatcacttaaaaatgttaaaaagtaaaatgtaactgaataatatgatgattaggtaatataaagacccatagtctttatttaatattattggtgttaggcttatctgagtaatcaacatatacaactttaattctacaaataacaccatcaataatttggattagtaatcttaagttatgtctatatagtagtacacaatatactacaatatacatataacttcaataagtctcacaggctgtgtggagccaacattgcactacagttacgttggaactggcttaataacaaagattaattttaactataggttgagtatcccttttccaaaatgcctgggaccagaagtgttttcgattttggatgtttttgaatttggaaatatttgcatatacatagtgagatatcgtgagaatgggactcaagtctaaacacaaaattcatttatgtttctaatataccttatatgcacggcctaaaggtaattttatacaatattttaaattattttgcaagaaacaaagttttaactgtgctttgactgaaacccattacatgaggtcaggtgtaaattttccacttgtggtgtcatgttggccctcaaaatgtttcagattttggagcattttggatttgggattttcagattaggcatgctccacctgtatttagtaaactgaactgtggtcaaagtaattttttagctgctgtgctgttttatttattgccatcagcgataaaggctagcttccccataagtactttataaatcatatcaccagtttaaggcttataaaaactattttaattctatgtgatttaatgctttcaataatccatcaggatttttctttagatctttaaaaggactgtaaggagttcagagatgatagagattaaatttacaggatactcacaatgagagcaaaaggaatatttcatcaccccatatacatgtacatacagcattctaatgtagtagattgttttactatcccaaagcattaagatgtgaatgtgacttctcaattttcctgaaaattatgtgggtcaagggggagagggccagtgccaacacca

SEQ ID NO: 708335 - DNA, 598 bp, Homo sapiens
caataagtgttacctccttctactctgtgtttctacactctacttgctactggaacccgggatggagctcaactctggcaaagcacacacggctgagggcccaggcagtgggcagcagcctcacagcagtgccctcaacctccacctcctcacacttgcagtacaagagagggggcagtggtgccctgtctaaaacaccctgtcccactctggtgcccacaacagccagaggcagcctgtggtgaagatctggaaacagccamccgggaacagctgtccacgtgcaaatgctgcagtggggaatgtgcaccagagcagggtgaggtgcagcagccgtgggtaaggtcgatggtcacttgagatggcaggagtgggagggcccagtggcgctaagtggaggaatcctagggacatatcccccatttcttgcacactgtcagacacatagcagacctccccagagagtgcactaaatgtacagaggccaaaattcaccgactttacatttagtccatggccagagtcagctgaccccctccaagctatctcttgaggttttcctgctctgagacataagcaaccccagtaacaaagacaa

SEQ ID NO: 708336 - DNA, 602 bp, Homo sapiens
acactccccatccatcactcctggtgctgccaagccctctgggtattgtggccaaatcctccaggagagaagctgatgaactttgtctcttgaaatacacagattccttggacatccctgggaggtcaatcrtgagagtcaacttggttttctttccctcattagggttcaaagcttaaagtccatgctcacaggcagtaagatgacatagataagtgacatcattaccccggttcagatgttaaagtgtccaggtggattagggatgatttaagaccacacaaccttgtgccacaaagtggaattcccaggccagatggagacattttattgccgtattatgatcttatcattgagtgcaaaggcagtcttgtttcattttggattatttcttatgtttctgtcttacttataagggcgttggaatttccaagcatatgagaatttgtggttagctttttatcattgacttctagcataattatatgatcagaaacacgctatgtgatttgatttctctgaaatgattgagatttgcttgatgaacaaaataagtagggttaatttttgtaaatgtaccatgtgtgcttaaaatgaatgta

SEQ ID NO: 708337 - DNA, 602 bp, Homo sapiens
acactccccatccatcactcctggtgctgccaagccctctgggtattgtggccaaatcctccaggagagaagctgatgaactttgtctcttgaaatacacagattccttggacatccctgggaggtcaatcatgagagtcaacttggttttctttccctcattagggttcaaagcttaaagtccatgctcacaggcagtaagatgacatagataagtgacatcattaccccgkttcagatgttaaagtgtccaggtggattagggatgatttaagaccacacaaccttgtgccacaaagtggaattcccaggccagatggagacattttattgccgtattatgatcttatcattgagtgcaaaggcagtcttgtttcattttggattatttcttatgtttctgtcttacttataagggcgttggaatttccaagcatatgagaatttgtggttagctttttatcattgacttctagcataattatatgatcagaaacacgctatgtgatttgatttctctgaaatgattgagatttgcttgatgaacaaaataagtagggttaatttttgtaaatgtaccatgtgtgcttaaaatgaatgta

SEQ ID NO: 708338 - DNA, 602 bp, Homo sapiens
acactccccatccatcactcctggtgctgccaagccctctgggtattgtggccaaatcctccaggagagaagctgatgaactttgtctcttgaaatacacagattccttggacatccctgggaggtcaatcatgagagtcaacttggttttctttccctcattagggttcaaagcttaaagtccatgctcacaggcagtaagatgacatagataagtgacatcattaccccggttcagatgttaaagtgtcyaggtggattagggatgatttaagaccacacaaccttgtgccacaaagtggaattcccaggccagatggagacattttattgccgtattatgatcttatcattgagtgcaaaggcagtcttgtttcattttggattatttcttatgtttctgtcttacttataagggcgttggaatttccaagcatatgagaatttgtggttagctttttatcattgacttctagcataattatatgatcagaaacacgctatgtgatttgatttctctgaaatgattgagatttgcttgatgaacaaaataagtagggttaatttttgtaaatgtaccatgtgtgcttaaaatgaatgta

SEQ ID NO: 708339 - DNA, 602 bp, Homo sapiens
acactccccatccatcactcctggtgctgccaagccctctgggtattgtggccaaatcctccaggagagaagctgatgaactttgtctcttgaaatacacagattccttggacatccctgggaggtcaatcatgagagtcaacttggttttctttccctcattagggttcaaagcttaaagtccatgctcacaggcagtaagatgacatagataagtgacatcattaccccggttcagatgttaaagtgtccaggtggattagggatgatttaagaccacacaaccttgtgccacaaagtggaattcccaggccagatggagacattttattgccgtattatgatcttatcattgagtgcaaaggcagtcttgtttcattttggattatttcttatgtttstgtcttacttataagggcgttggaatttccaagcatatgagaatttgtggttagctttttatcattgacttctagcataattatatgatcagaaacacgctatgtgatttgatttctctgaaatgattgagatttgcttgatgaacaaaataagtagggttaatttttgtaaatgtaccatgtgtgcttaaaatgaatgta

SEQ ID NO: 708340 - DNA, 602 bp, Homo sapiens
acactccccatccatcactcctggtgctgccaagccctctgggtattgtggccaaatcctccaggagagaagctgatgaactttgtctcttgaaatacacagattccttggacatccctgggaggtcaatcatgagagtcaacttggttttctttccctcattagggttcaaagcttaaagtccatgctcacaggcagtaagatgacatagataagtgacatcattaccccggttcagatgttaaagtgtccaggtggattagggatgatttaagaccacacaaccttgtgccacaaagtggaattcccaggccagatggagacattttattgccgtattatgatcttatcattgagtgcaaaggcagtcttgtttcattttggattatttcttatgtttctgtcttacttataagggcgttggaatttccaagcatatgagaatttgtggttagctttttatcattgacttctagcataattatatgatcagaaacaygctatgtgatttgatttctctgaaatgattgagatttgcttgatgaacaaaataagtagggttaatttttgtaaatgtaccatgtgtgcttaaaatgaatgta

SEQ ID NO: 708341 - DNA, 672 bp, Homo sapiens
ccatatcacttaaaaaattcttgtcttcttcccacctcatccccttttcctgcagatctttaaaggtagagaaatgatatgacattcagtggtggttgattatagccttgttggtatagctgtattgtttacaaaattggtgcaataatggtgactcgtaacaggattataataagccagaaaataattctagctggcaagctctgcagtgattttcctacagaaatcacacctcaagctcctctttttaaggagttttaatgcaacttattatttcccttctcggaggcaacttatctatgtagaaagaaaaagacaaagaaaacaatctacatggatcgtgattgcaaacatcatgattttaagacataaatttctagagggtgaggatagtatggaaacctgtataatgttaacagaagactccaggggcagggaccatgctgttggtttcttagtgtattctaaacctctagcacaatgcttatattatatttagaattcaatacttacctttcgaatatagttgtgaaggtcaagcrctgagtctaaaacatattgaaaatcatccacaaagggatggtaactaaggatatgaaagaggaagagattaaaaggaagtgaattagtgaaggaatgagtgattacatcctcagggctaataaacactaa

SEQ ID NO: 708342 - DNA, 1062 bp, Homo sapiens
cactgtctttggggttacataggctagagttcaagttctggtactagcatagataatggtcttggaggaagtcccttaacctctttgagtttcagtttccacgtctgtaaaggaggacaatgatagtatctccttccacagagttgtagcataggtgtagacatgacctaatgtagacagtgtctggaccatagaagtgtccaccatagctgtgtgattatcatgaaagggagaagcaacccaaaacatcagggctgaaacgactttataattagccaataagttcatgccagttcttgagtgtctaggatgccactgggagggtgtgaaaaatggtggggaagcacatgggtgaataagtcatgcccaaggcagagtggactgttatcttagacaggtgcagagggtgtcaggtgtgggaaagaagtgattcatttcaacaggtgatcaggcaggacttcacgaggaggcagtggcatatgaacttgtgggaccacgaagggtcaacatcactttatgaaatccccctctgtgtactctgctttctgctgggtgctttaggggttgactgaatgtaaatgagattagcagatcccagagaacaaatgaatgggaaccactggtagaattggacgtcactcatgacatcaaataaaatggaaagattggggacacgaagatcaaattttgttatttttcacacctaagcctctgataggagccaaatgcctgaagaacaaatcttatcttgtcttttaaagaatgaactttgattgtgaaggcgtctctgtaggtagagcccaggaactttgagatgctgctggtttggagctaaatttggcaacttctaggccctgtctgggcagagctaatcccaccagctcacccatcacctcatggtctgcgattggctgctcattattctgaacaccctgggctatgtcctgtcacctgtggtcagrggttggggcctggttcacatcatggtagagcagaaggtattgcctttcaagaagtagcccagcactgctgactttcacagcaaggactgggtagtttttc

SEQ ID NO: 708343 - DNA, 673 bp, Homo sapiens
ttactagataggatagaactattaccaaattaataattccacattaaaaaaaagtttctttctatacctatgtgtttatttgctgctttatgtttttgttattgttgtgatgtgttattttttttaatgggatgccaaccattataaattttatctttttttttttttagtttttttaatactttaagttctgggatacatgtgcagaacatgctggtttgttacataggtatacaaatgccatggtggtttgctgcacccatcaacccgtcatctacattagatatttctcctaatgctacccctatgtttttaaggaaatatctgtagctctatcctctagttgcccaaacataatcttcttgcgacactaagacctgttaaaattcactggaagagaatacctctatctgytgtattatttaataaaattcatttgcaggctatttagcaagttatatggttgagtaataacatacaatattttttagaagtaataaaggccaggcgtggtggctcacgcctgtaatcccagcattttgggaggccgaaggcaggcggatcacgaggtcaggagatcgagaccatcttggttaacacggtgaaaccccgtctgtactaaaaatacaaaaaaaagaaaaaaattagccaggcatggtggtgggcgcctgca

SEQ ID NO: 708344 - DNA, 3169 bp, Homo sapiens
  misc_feature 1210, 1211, 1212, 1213, 1214, 1215, 1216, 1217, 1218, 1219,1220, 1221, 1222, 1223, 1224, 1225, 1226, 1227, 1228, 1229,1230, 1231, 1232, 1233, 1234, 1235, 1236, 1237, 1238, 1239,1240, 1241, 1242, 1243, 1244, 1245, 1246, 1247, 1248: n = A,T,C or G
  misc_feature 1249, 1250, 1251, 1252, 1253, 1254, 1255, 1256, 1257, 1258,1259, 1260, 1261, 1262, 1263, 1264, 1265, 1266, 1267, 1268,1269, 1270, 1271, 1272, 1273, 1274, 1275, 1276, 1277, 1278,1279, 1280, 1281, 1282, 1283, 1284, 1285, 1286, 1287: n = A,T,C or G
  misc_feature 1288, 1289, 1290, 1291, 1292, 1293, 1294, 1295, 1296, 1297,1298, 1299, 1300, 1301, 1302, 1303, 1304, 1305, 1306, 1307,1308, 1309: n = A,T,C or G
ttggtctgcttagtttttaggcttttgccaacaaataatagagaagaaatatttatgtaacctaatgtaaaatggttcaccattttaaaagttgaccatgttaaaagatgacatttccaaacaagtagataaatgggtattaattcacataaaacatcattttgtttataagaggatcaagctcaaacttttaatttttgagttccccagtgaacttaaaatataattctcattttatataggagactggaaagaatatttattgaaaacctactgtcctccagacactgtgccagctactttcaaataaattttcttattcagtcctcataaagtacactgaaattctacttactgtcccatttttcagatgtgagaaccttagctttgttaagtaacttgctgaaggctatgcagcaattaatgaagtggatattgaatccaaactggacctgtgggaatacaaagcctatgctctttttcacataatgttttatatctagctttctaagattctgtttattatataacataatggagtagatggatgaatgcctatctatagaaaaatgtttttataaataaaattgtgtccctaaatgagtagcatgattaaaatatttgactgaggacatgaaaacagaatttgatgatttaattacatattttattatttcagtagaacatagggaggttgtattttaagtgtccaacattttggagctgaaaaactttttgccttagtgtctgccccactcttgaccatttcacattccattcctgtgaccgactaatgtgcatgactatgacgaacacttggcagcctcactgggaggggcctgtcagtgtgaggattcaacttgtcattaaactggggcctggagccaaggactgagtgcattctgaagacactgctccaagcttcaccaccctattggccaaggaacaagtggaaattgtacttgtgaatttatcataaattattttttttaaatggagcattttaaatgagacaaagaaaatgcattccctctgtaatggaatcccaccctattgcaatctgaatttgacttgataaataatgggacaggctactgaaggagattacaaattgtgtctctcatggggttcttaaggagagaataaccatccatccaggatgagtccaaggtgtctatgaatctaagaagcccagggtgttraaagcgannnnnnnnnnnnnnnnnnnnnnnnnnnnnnnnnnnnnnnnnnnnnnnnnnnnnnnnnnnnnnnnnnnnnnnnnnnnnnnnnnnnnnnnnnnnnnnnnnnnaccctattgaaatatgaatttgactttagtaaataatgcgacaggctactggaggagattacaaactgagtcgctcatgtggaactctaggtggaaataaccattcatccaggatgagttcaatgtgtctatgaatctgtgaagcccatggtgttgaatagagcatcttgcttaaagtaaggagaactagtctttggttctcagcttaacaggcacccttattgtgacctttagcaagttgattgaattctgaagtcttcatttgacaatgttgtgatactgccatagagtggagcccttatcgtcttccagccctatatataaaaaatcaactctccctatattaggatgagaaggttggactaaaatgcattctgtagcaaattatctacatgggcgataaataacaactctgttacggaagtgttttgtcatatactgggggaaagtgagctgaacaaaatttagcatttttttaaaaaaacagttaagagttctagaagccttgaacgtgtaagagatccgtgtgtttttcaggagtgaagaggtattcactgtttctcaaacacacttaactgtgaaccctgttttctgcaacatataatagatctgttattctatgaaacagcttaatagtcacaaatttgagctattaaacgtccgaccttgaaaattcagtgtgcctgtttttataaatatgtttcttttcatacctatcaagggaaacatgacaatttatttattcattgattagcacctattatgaacagtgctgagtgtggaggatacatcagtgaatatactacaataaaacaggattcctgcccacatgaaacttatgttttaggacagggagatagataataagcaattaagtaataacatataagtatgtgctatggggagaaataaagatagaattctgtgttgatcttagtgattcatttataaacaatagaattcagtagaagtgaaactgcttgatttctgaagctaggtcaggaaaggccatgctactctggctgctttgcttggaatggccattctcaagagatttacaacatactgtgaactaagagactcatgctggctgctgtacatatcatctctgttcagaaatctctattcaagacctcagatttttcagacagcatgaaattggagcaagagttatttgattacttcacatggctaaaaaaattaagctgtggtaaacgagtcattcccataagaggcataaacctctcagtataagaagttgagtttaattgactggttacctctatgcagtgctagataagcatggttcattttgttttactgactatatttctttctgttctatgtttatttccaaattttgagataaatagttcttttaaaaatcccaaatgccattaattttgttaccataaaatatttctttacacctgaaagccatcctgtttctttaaggtgaattttaatatagcttatcttataccattacttcaatattcagattcctaatattctagaaaccaatgatctctaccctcattactgaaaaggatggaacatttgtacttacatgggatattaagagggtatattttctaaaagtaccatgacatcagtaagtaggacacagttccaaataaatctataaaatggtacatttatttttaatttattttctttaaaattgacatgagaagcagaggcaattcacagaatataaatgtgacttgtgataacattggtctttataatataactaagtctttgtttgaatgaatattttaaaagttactcttaatagctttgatgacaatttatagcatccgtacctcctttactactagtccctataatcaatcc

SEQ ID NO: 708345 - DNA, 632 bp, Homo sapiens
tgtcagcattttatttttacatgatcatttgatgagtatataataatgtataatattcaatcccttgttatttatattttctctaaatatttctatataaacaatattatgaagagcacccacaattccttctttaggctaaatataagtgtgggtcaagggattctatgtgggtcaagggatacagtctaaatgtctacactcatactaatctttggaattctattgtcaaattatcttctagtaaggctgttctagtcttcattcctagctcagtatatgagagacaggtccgaaagatgagtaggaccttccagatggaaacactattataatcacactgtactaaaataacrtacataaatcagccactttttttcttctggcttaaaataatgagatctacattcacccagacggctctataataccaagataaacaaaaagaggtgtattaaatataacacaagaatagacaaaatagttaaagtagccaccatctgtttgacactgactagagtgaaagagtcggctgacagagaaaaaaacagtcctttacctcagtgccgtccttctcttccatatcttgttttttgattcacttttttagcaggcatttgccagcctccagg

SEQ ID NO: 708346 - DNA, 632 bp, Homo sapiens
tgtcagcattttatttttacatgatcatttgatgagtatataataatgtataatattcaatcccttgttatttatattttctctaaatatttctatataaacaatattatgaagagcacccacaattccttctttaggctaaatataagtgtgggtcaagggattctatgtgggtcaagggatacagtctaaatgtctacactcatactaatctttggaattctattgtcaaattatcttctagtaaggctgttctagtcttcattcctagctcagtatatgagagacaggtccgaaagatgagtaggaccttccagatggaaacactattataatcacactgtactaaaataacatacataaatcagccactttttttcttctggcttaaaataatgagatctacattcacccagacggcwctataataccaagataaacaaaaagaggtgtattaaatataacacaagaatagacaaaatagttaaagtagccaccatctgtttgacactgactagagtgaaagagtcggctgacagagaaaaaaacagtcctttacctcagtgccgtccttctcttccatatcttgttttttgattcacttttttagcaggcatttgccagcctccagg

SEQ ID NO: 708347 - DNA, 1768 bp, Homo sapiens
  misc_feature 987, 988, 989, 990, 991, 992, 993, 994, 995, 996, 997, 998,999, 1000, 1001, 1002, 1003, 1004, 1005, 1006, 1007, 1008,1009, 1010, 1011, 1012, 1013, 1014, 1015, 1016, 1017, 1018,1019, 1020, 1021, 1022, 1023, 1024, 1025, 1026, 1027: n = A,T,C or G
  misc_feature 1028, 1029, 1030, 1031, 1032, 1033, 1034, 1035, 1036, 1037,1038, 1039, 1040, 1041, 1042, 1043, 1044, 1045, 1046, 1047,1048, 1049, 1050, 1051, 1052, 1053, 1054, 1055, 1056, 1057,1058, 1059, 1060, 1061, 1062, 1063, 1064, 1065, 1066: n = A,T,C or G
  misc_feature 1067, 1068, 1069, 1070, 1071, 1072, 1073, 1074, 1075, 1076,1077, 1078, 1079, 1080, 1081, 1082, 1083, 1084, 1085, 1086: n = A,T,C or G
tgtgcccatgtgtgcatgtgcacacatacaatctcttatttcaaaaccaggtagaatgtctattctttctccagcaaaagtgctagtcattagtattgatcatgaaatattttcatttgactctctttccagatacatattaggattgttacttcctcttcttttttgtgtttggttaaccatataaatagatctggccaaggatttgtgggcagaattcatatgagtgaatgggaagaagatttttttttgacagagtctcactctgttgcccaggctggagtgcagtggcatgatctcggctcactgcaacctctgcctcccaggttcaagcgatttttctgcctcagcctcccaagtagctgggactacaggcacacaccaccacgcccggctaatttttgtgtatttagtagagacggggtttcaccatattggccagactggtctcaaactccccacctgacctcaggtgatccacccgcctcggcctcccaaagtgctgggattacaggcgtgagccactgtgtccggctgggaagaagatttaattgcatctgtgagtgcctcaagatcttcttgccctccagcacaattaccataggagatcatggatgccatgtcagcctgggtccctgagtaactacaatgagcagagtcccctgctgacttgttgtggatatttagccagaacaagagattaacctttgttgccttaagccactaagatgaaggggctatttgttctatataacctttgctatcctgattaatttggtaacacaccaatcattgtttgtataattcaaggacacaattacaaggataatattattattttaataatagtattgttcaaggaaagagttaaaataataatttgggagatttagactttatgtgccacattcatatttggtaagttttattttagcttccaaaatctctgacaggcttaggtgtattatctacattattttatttgannnnnnnnnnnnnnnnnnnnnnnnnnnnnnnnnnnnnnnnnnnnnnnnnnnnnnnnnnnnnnnnnnnnnnnnnnnnnnnnnnnnnnnnnnnnnnnnnnnntcttatttaagattcactagtagttttagtaaaacggaagcatcaaggtaagagttcaagtaaaatagagcaaccagccttttaaraaaacccttcatgggctgtaaattccagagaccagatcctgtaaaaaggcagtttctgctctcagccttactgttacctctgtttctgattctatatactcatataagattgagtccagtgatgctgaatcggttttgtatgtaaaatttccataagaagaaatattgaactgaatgtgttttcaaaaaatcaatgcatatcaaagcattcagatatggaagagtagaatactcttatataatattatttttgaaatttattaagttgaactgtgtgaaattattgacattcagctgtttttgaccttaagaatcacagtctcacatgattcaatgtaatattctaaggaaatatatttgaaactcatatttccaagtactataaaatctattcacactagattataacctttacattatggaaaatcatatttagccacacatctatgttatattttctttattcattagttaactaaaacttttcaaaatcctgttctgattacatacagactatggaataattattgcgtctcaactccacagaccaatgtgttgcatctgcatgttacacaaatctctgccttttagacttg

SEQ ID NO: 708348 - DNA, 1768 bp, Homo sapiens
  misc_feature 987, 988, 989, 990, 991, 992, 993, 994, 995, 996, 997, 998,999, 1000, 1001, 1002, 1003, 1004, 1005, 1006, 1007, 1008,1009, 1010, 1011, 1012, 1013, 1014, 1015, 1016, 1017, 1018,1019, 1020, 1021, 1022, 1023, 1024, 1025, 1026, 1027: n = A,T,C or G
  misc_feature 1028, 1029, 1030, 1031, 1032, 1033, 1034, 1035, 1036, 1037,1038, 1039, 1040, 1041, 1042, 1043, 1044, 1045, 1046, 1047,1048, 1049, 1050, 1051, 1052, 1053, 1054, 1055, 1056, 1057,1058, 1059, 1060, 1061, 1062, 1063, 1064, 1065, 1066: n = A,T,C or G
  misc_feature 1067, 1068, 1069, 1070, 1071, 1072, 1073, 1074, 1075, 1076,1077, 1078, 1079, 1080, 1081, 1082, 1083, 1084, 1085, 1086: n = A,T,C or G
tgtgcccatgtgtgcatgtgcacacatacaatctcttatttcaaaaccaggtagaatgtctattctttctccagcaaaagtgctagtcattagtattgatcatgaaatattttcatttgactctctttccagatacatattaggattgttacttcctcttcttttttgtgtttggttaaccatataaatagatctggccaaggatttgtgggcagaattcatatgagtgaatgggaagaagatttttttttgacagagtctcactctgttgcccaggctggagtgcagtggcatgatctcggctcactgcaacctctgcctcccaggttcaagcgatttttctgcctcagcctcccaagtagctgggactacaggcacacaccaccacgcccggctaatttttgtgtatttagtagagacggggtttcaccatattggccagactggtctcaaactccccacctgacctcaggtgatccacccgcctcggcctcccaaagtgctgggattacaggcgtgagccactgtgtccggctgggaagaagatttaattgcatctgtgagtgcctcaagatcttcttgccctccagcacaattaccataggagatcatggatgccatgtcagcctgggtccctgagtaactacaatgagcagagtcccctgctgacttgttgtggatatttagccagaacaagagattaacctttgttgccttaagccactaagatgaaggggctatttgttctatataacctttgctatcctgattaatttggtaacacaccaatcattgtttgtataattcaaggacacaattacaaggataatattattattttaataatagtattgttcaaggaaagagttaaaataataatttgggagatttagactttatgtgccacattcatatttggtaagttttattttagcttccaaaatctctgacaggcttaggtgtattatctacattattttatttgannnnnnnnnnnnnnnnnnnnnnnnnnnnnnnnnnnnnnnnnnnnnnnnnnnnnnnnnnnnnnnnnnnnnnnnnnnnnnnnnnnnnnnnnnnnnnnnnnnntcttatttaagattcactagtagttttagtaaaacggaagcatcaaggtaagagttcaagtaaaatagagcaaccagccttttaagaaaacccttcatgggctgtaaattccagagaccagatcctgtaaaaaggcagtttctgctctcagccttactgttacctctgtttctgattctatatactcatataagattgagtccagtgatgctgaatcggttttgtatgtaaaatttccataagaagaaatattgaactgaatgtgttttcaaaaaatcaatgcatatcaaagcattcagatatggaagagtagaatactcttatataatattatttttgaaatttattaagttgaactgtgtgaaattattgacattcagctgtttttgaccttaagaatcacagtctcacatgattcaatgtaatattctaaggaaatatatttgaaactcatatttccaagtactataaaatctattcacactagattataacctttacattatggaaaatcatatttagccacacatctatgttatattttctttattcattagttaactaaaacttttcaaaatcctgttctgattacatacagactatggaataattattgcrtctcaactccacagaccaatgtgttgcatctgcatgttacacaaatctctgccttttagacttg

SEQ ID NO: 708349 - DNA, 431 bp, Homo sapiens
ctcaattcagggctaaacagagagcttccttgattatgttcagattgaatgaaatcaaacccttttctgatattgtggyccaaaattacattgcctcatccatgggcaactgttaaaaccaagggaagtggtcagatagtaagcagttccatctgctgtgtttgcgttttggagttaaatagcctaggaataaacttttcttaaaacccttttacccaaagaatcatgtaattcctctttgagcctttccacatgtgttatctgaagaagcctgctgcaatggcgtagtctccgtgaaatggtcttaatctcatctgaattcaagtagcaattttcttcagcaaaatgaggctctttgagtttcagaagggaaagaaaaaatacatttcctattaatctgtaaattctctccccatgacaaagctgaatta

SEQ ID NO: 708350 - DNA, 1086 bp, Homo sapiens
tcagagaaatgcaaattaaaagcaccatgagatattatctcacaccaatcagaatggccattattaaaaaggcaaaaaaacaacagatgttggtaaggatgcagagaaagaggaatgcttatccactattgataggaatgtaaattagtataaaccctatggaaaacagtatgaagatttctaaaagaactaaaatagagctgccatttgattcagcaatttctctactggttatatatcaaaaggaaaataaatcattatatcaaaaagacaacctgcacttgtatgtttatcacagcaccattcacaatagcaaagatataggccaacttaagtgtccrtcaaccgatgattgaataaagaaaatgtggcatatacatataactcactgtaacttttgaactcctgggctcagttgatcttcctgcctcagcctcccgagcagctaggactacaggtgcatgcaaacacactctgacagattttaaaattttttggtagagacaagatttatataaatatatatatactcccaggctcaagtatatatatatattcttttttatggctgagtagaattctatggtatatagacatagaatactaccgagatatatatatatatatataatatacatatatataatatacatatatatatataccatagaatactacatagaatatacatagaatactactgatatattatatatatatatatatataccatagaatactactcagccataaaaaagaatgaaatcatatcttttgcaacaacatggatggaactggaggacataatgttaagtaaaataactcagaaacattcaaatactgcatcttctcacttaaagtggaaactaaataatgtgtacacagggactttgagaggagaatcataggcattggaggtgggagggtggaagggggctaagggatgagaaattacccaagaggtacaatgtacactattcaggcgatggttacacaagaatcaaagaagctcgttaaaattcagatttcaggttcctgccactcagagattttgattcagtagctctgaggtggagacaagtaacc

SEQ ID NO: 708351 - DNA, 1086 bp, Homo sapiens
tcagagaaatgcaaattaaaagcaccatgagatattatctcacaccaatcagaatggccattattaaaaaggcaaaaaaacaacagatgttggtaaggatgcagagaaagaggaatgcttatccactattgataggaatgtaaattagtataaaccctatggaaaacagtatgaagatttctaaaagaactaaaatagagctgccatttgattcagcaatttctctactggttatatatcaaaaggaaaataaatcattatatcaaaaagacaacctgcacttgtatgtttatcacagcaccattcacaatagcaaagatataggccaacttaagtgtccatcaacsgatgattgaataaagaaaatgtggcatatacatataactcactgtaacttttgaactcctgggctcagttgatcttcctgcctcagcctcccgagcagctaggactacaggtgcatgcaaacacactctgacagattttaaaattttttggtagagacaagatttatataaatatatatatactcccaggctcaagtatatatatatattcttttttatggctgagtagaattctatggtatatagacatagaatactaccgagatatatatatatatatataatatacatatatataatatacatatatatatataccatagaatactacatagaatatacatagaatactactgatatattatatatatatatatatataccatagaatactactcagccataaaaaagaatgaaatcatatcttttgcaacaacatggatggaactggaggacataatgttaagtaaaataactcagaaacattcaaatactgcatcttctcacttaaagtggaaactaaataatgtgtacacagggactttgagaggagaatcataggcattggaggtgggagggtggaagggggctaagggatgagaaattacccaagaggtacaatgtacactattcaggcgatggttacacaagaatcaaagaagctcgttaaaattcagatttcaggttcctgccactcagagattttgattcagtagctctgaggtggagacaagtaacc

SEQ ID NO: 708352 - DNA, 1086 bp, Homo sapiens
tcagagaaatgcaaattaaaagcaccatgagatattatctcacaccaatcagaatggccattattaaaaaggcaaaaaaacaacagatgttggtaaggatgcagagaaagaggaatgcttatccactattgataggaatgtaaattagtataaaccctatggaaaacagtatgaagatttctaaaagaactaaaatagagctgccatttgattcagcaatttctctactggttatatatcaaaaggaaaataaatcattatatcaaaaagacaacctgcacttgtatgtttatcacagcaccattcacaatagcaaagatataggccaacttaagtgtccatcaaccgatgattgaataaagaaaatgtggcatatacatataactcactgtaacttttgaactcctgggctcagttgatcttcctgcctcagcctcccgagcagctaggactacaggtgcatgcaaacacactctgacagattttaaaattttttggtagagacaagatttatataaatatatatatactcccaggctcaagtatatatatatattcttttttatggctgagtagaattctatggtatatagacatagaatactaccgagatatatatatatatatataatatacatatatataatatacatatatatatayaccatagaatactacatagaatatacatagaatactactgatatattatatatatatatatatataccatagaatactactcagccataaaaaagaatgaaatcatatcttttgcaacaacatggatggaactggaggacataatgttaagtaaaataactcagaaacattcaaatactgcatcttctcacttaaagtggaaactaaataatgtgtacacagggactttgagaggagaatcataggcattggaggtgggagggtggaagggggctaagggatgagaaattacccaagaggtacaatgtacactattcaggcgatggttacacaagaatcaaagaagctcgttaaaattcagatttcaggttcctgccactcagagattttgattcagtagctctgaggtggagacaagtaacc

SEQ ID NO: 708353 - DNA, 1032 bp, Homo sapiens
  misc_feature 157, 158, 159, 160, 161, 162, 163, 164, 165, 166, 167, 168,169, 170, 171, 172, 173, 174, 175, 176, 177, 178, 179, 180,181, 182, 183, 184, 185, 186, 187, 188, 189, 190, 191, 192,193, 194, 195, 196, 197, 198, 199, 200, 201, 202, 203: n = A,T,C or G
  misc_feature 204, 205, 206, 207, 208, 209, 210, 211, 212, 213, 214, 215,216, 217, 218, 219, 220, 221, 222, 223, 224, 225, 226, 227,228, 229, 230, 231, 232, 233, 234, 235, 236, 237, 238, 239,240, 241, 242, 243, 244, 245, 246, 247, 248, 249, 250: n = A,T,C or G
  misc_feature 251, 252, 253, 254, 255, 256, 264, 270, 271, 282: n = A,T,C or G
ttgcctgaatacatatgggatttaagcttttagttttcattcaatctcgttaacctgttcttgtttactgaaggtctgttattatgttctgcggtggggccctttctttctattaaatggttaatatggcattgccctggcttgttattcaagcctnnnnnnnnnnnnnnnnnnnnnnnnnnnnnnnnnnnnnnnnnnnnnnnnnnnnnnnnnnnnnnnnnnnnnnnnnnnnnnnnnnnnnnnnnnnnnnnnnnnncccgtgantggaannaaaaccccgcncttgggggcgagctaaaaaccctctcatacttatacctaaaaaactctctgttttttttttttacagaattattttrtttgtagttatataatgtaccaactctttctccatttcctttttcttttccgctttggcgagtagaaaggaaaactactaatacattagaataatagacttttaaagttaatacttgatttttcatctttctaacttcaaacacacacacacacacacacacacacacaaagataaacatttgtacgtacaaggaatcaggaaaaacatcaaatgtgagctattggaagtgctagattcatagctctgtgagtacacaagtaggtgaagataattagaaatttgtcttctaaaagtaacaaataataaaaagtctacaaaggaggcagaagtcagtagtcaggagctatacaggagacatacagaagtcttgtttttaaacaggacctataaaaaagtctgataaaataagacctaaagctacagattaaatgaaccagcaggtttaggaaaagagaagacagagtctcaaacacaacagccaaatgatggcacacttctagttactgcctgagctgttattgctatgtttgaatgtgtcattcaaaattaatgtatgggaaacttaattcccaatgcaacagtgttgagaggtaggacttttaggaggtgattaggtcattagggctctgctcttatgaatggaatcatgccattatcatgagagtgaatta

SEQ ID NO: 708354 - DNA, 558 bp, Homo sapiens
  misc_feature 61: n = A,T,C or G
agtaggattattacttgaattataactttaatggaacataggaagagttttttgtttattntttagccattctggtgggtgggtagtaatatctcaatgtggtttaattgttgggttttgatgactgtctaatgattgttaaataatttaaaattttcattgakgtactacatttataaaataagcatagctacataaattcaatgaacaagtttagtcttaagatcaagctttgtggtaaaagttgaactctaaaatactaaataagacatggttggtgctatattcattattactcatacacattttggaataattttgtgggtgtcttggaaatgcatgtgtctgtacagaggttgagatcataattcttgttagaggtgttgaattttcttatatgaactgacaatgctagaatatctttgcaagctataatgatttaagtaatgtagatgtttgtactggtaacaatatttattgaggatttacaaactgctactaagttatgtgattttaatgattaatttgtttatctcttataacaacagtattaggttt

SEQ ID NO: 708355 - DNA, 649 bp, Homo sapiens
ttccctacagaagtagctggacacttcacagattaaggatgagaaaaaaataattttccctgctttatagaggaataaggctgttgctgctcccctcccttcctgaaaaggtctccrtgggattgtaatggctctgagtcctaattccaaacccttgatagcgaaataaaatctttccaggggccagacggtcccctgcctcttagcctttaaaaacataagttgtttccaagttctgatgcttcactgattttgacaggataactcttcattcttcttgataccctgaggttgaatttagggatctattctggacactaacagttgactcattccttgacataaaagaaaatgtattatctatttggatcagagcaattaactagactaaagcgtagagatctgatccttaggacaggaagcttggggtttttacggaatagtagggaatccaaacaggcatttttctttcataaatgtattaagtcgattctgaaaattaaataaagtggcaatattaagagcatacctcatagacagagaaacaagaaagtgtttttgcttgagtagttctaataggaaatatcctactcttcaaacaaaaatttgtaatttgagagttattgtaatttacctctagcaaacaggg

SEQ ID NO: 708356 - DNA, 649 bp, Homo sapiens
ttccctacagaagtagctggacacttcacagattaaggatgagaaaaaaataattttccctgctttatagaggaataaggctgttgctgctcccctcccttcctgaaaaggtctccgtgggattgtaatggctctgagtcctaattccaaacccttgatagcgaaataaaatctttccaggggccagacggtcccctgcctcttagcctttaaaaacataagttgtttccaarttctgatgcttcactgattttgacaggataactcttcattcttcttgataccctgaggttgaatttagggatctattctggacactaacagttgactcattccttgacataaaagaaaatgtattatctatttggatcagagcaattaactagactaaagcgtagagatctgatccttaggacaggaagcttggggtttttacggaatagtagggaatccaaacaggcatttttctttcataaatgtattaagtcgattctgaaaattaaataaagtggcaatattaagagcatacctcatagacagagaaacaagaaagtgtttttgcttgagtagttctaataggaaatatcctactcttcaaacaaaaatttgtaatttgagagttattgtaatttacctctagcaaacaggg

SEQ ID NO: 708357 - DNA, 671 bp, Homo sapiens
attagctagtcctctctgaacgttagccatgaaaatctagacaaattatttgatgttgggactttctttcctgcataatattgttttactcttacgtactgctgattgcatgwccctatagatctactgcagctggttccccaggtgaggccactgttgtttcctattcagttgtacagctgtcactcaatcacagtgtgtattgttgcgagcagctcactcatttctgccaaaatttccatttgctcatggtcttatgggtacatttgtcaccagtttttacttgtatctgacattcctggttggggaatgttggggtcacccacatgtgtgggaaagtaagtgacagcatggggttgggccagcttggacctctttgtgcctgacctcctgagctccatatcttattgcagcatagccagggtgatatactctctctttaatacagggtcttctcctacatttgcaacataccatggccaaagtgcaagtctctgtgcactctaccacttagactccagtatctatttggatttcagcctccagggtcaatctttggagaactttgaatgacaggctgaggaatttaaacttaattcaataaaccataaaaagctgttaaaggtctttgtgtaaaaaagtgatatgataactcagcagcatttaagatt

SEQ ID NO: 708358 - DNA, 671 bp, Homo sapiens
attagctagtcctctctgaacgttagccatgaaaatctagacaaattatttgatgttgggactttctttcctgcataatattgttttactcttacgtactgctgattgcatgtccctatagatctactgcagctggttccccaggtgaggccactgttgtttcctattcagttgtacagctgtcactcaatcacagtgtgtattgttgcgagcagctcactcatttctgccaaaatttccatttgctcatgktcttatgggtacatttgtcaccagtttttacttgtatctgacattcctggttggggaatgttggggtcacccacatgtgtgggaaagtaagtgacagcatggggttgggccagcttggacctctttgtgcctgacctcctgagctccatatcttattgcagcatagccagggtgatatactctctctttaatacagggtcttctcctacatttgcaacataccatggccaaagtgcaagtctctgtgcactctaccacttagactccagtatctatttggatttcagcctccagggtcaatctttggagaactttgaatgacaggctgaggaatttaaacttaattcaataaaccataaaaagctgttaaaggtctttgtgtaaaaaagtgatatgataactcagcagcatttaagatt

SEQ ID NO: 708359 - DNA, 2536 bp, Homo sapiens
cttctgatccgcctgccttggcctcccaaagtgctgggattacaggcatgagccaccgtgccctgcccttttttttttttgggatggagtcttactctgtcactcaggctggagtgtagtggtgtgatcttggctcactgcaacctccacctcctgggttcaagtgattctcctgcctcagcctcccgagcagctgggactacaggtgcacaccaccatgcccagctaatttttgtatttttagtagagacggggtttcaccgtattggccaggctgatctcgaactcctgaccttgtgatccacccacctcagcctcccaaagtgttgggattacaggcatgagctactgcacctgggctaccatttctatatagaaatggtgagataaagttaactccaactccttttcattttagtacaatttagtatcctgatatggtttccgtgatttccagtcagagcattttcaaaattctttgtaatgttgtatgtacataatactgtacttattatctaatactcaattggtacttttacatttgtcttgtggttttttgtatagtgtttgaagtcacaagcttgtaaatgtttgatggatttaaaaatttatatattttatatatatatatatatatatatatatatatatatttttttttttttttttttttgagacggagtttcactcttgttgcccaggctggagtgcaacggcgcgatctcggctcaccgyaacctccacctcccaggttcaagcggttctcctgcctcagcctccctagtagctgggattacaggcctgtgccaccacgcccagctaattttgtatttttagtaaagtaggggtttctccatgttggtcaggctggtctcgaactcccgacctcaggtgatccacccaccttggcctcccaaagtgctgggattacaggcatgagccactgtgcccggcctattttttgtatttaatatcacattgtttataccaaagcatatcattcaaccatactaccctctaccattgcccgtttttttccccttgagacaggctcttactctattgcccaggctggagtgcagtggcgcagtcatggctcactgcagccttgacctcctgggctcaagtggtcctcctatctcagtctcctgagtagctgggatcacaggcatgcgctaccatgcccagctaatttttaaatttttgtagagatggaggtctcactatattgcctattgcccagcctggtcttgaactcctgagctcaagtgatccacctcagtcttccaaagtgggaggattaaaggcatgagcccctgtgcccagccccattgctcttttggattactatattgttggcttagttctctctttcatccagatttttgacatcatcttggcagatgtcaatgactatgtaaataaacaataacagaaacaacaatagtgataaaatagcttattcatattgagcactttctgtgtgccaggcttttttctaagcactttacgtttattaactaatttaaccctaatagcagccatatgaaataaatactgttattcccattttacagatgaaactaaaacaggccaagtgacttccccaaaatcataagtactagtaagtaaccactatgctgagtttcctttgtaactaccgttaactgtgaaatttcttgaattgagctcaagcaaacattggcttcattctgttccagttgtttagtgttatggccacatttttaacttgtcatcatgttaaggtctcaaattcaccttcaagtcttaaactgtgataattgatagctttcactttcataatcactttatgtgtgttctcccactctaagtctcctaaaccgtcggcctcttccagattttacttcttttccttccttttctatactacgacctctgggttgcattgcttgcagtttttattctttcttattattcttcaggacttactatgcagaagccagcctcacatcatccctaccatccataccctccattcttactccgtgtcatggagaaacctgcatagtgctggggattagtgccacaattaatgtgtagtccgaggtctcccttaaatctgtctttggtccctgtcggagcagttctgcttagctccctccccatttctccacagttgctattataaaatctggaccccttgactcaaacctgtcactgccccatgcttggcagaataccttgcctgccacctcataggaaaaaagggcatgaactccctgagctttcccttcctctacttacaaacttctctgccctctttcttctgttctttcccccagtgtgagaaagaggttactctgtcttggcctctgttagggatagcactgttctaatctgtaggaactcgcagtattggttactcttcttttccctgcagtacttgcccattttcttttttttttttttttttttttttttttttttttgagacagagtcttgttctgtcaccaagactggagtgcagtggcctgatcttggctcactacaacc

SEQ ID NO: 708360 - DNA, 2536 bp, Homo sapiens
cttctgatccgcctgccttggcctcccaaagtgctgggattacaggcatgagccaccgtgccctgcccttttttttttttgggatggagtcttactctgtcactcaggctggagtgtagtggtgtgatcttggctcactgcaacctccacctcctgggttcaagtgattctcctgcctcagcctcccgagcagctgggactacaggtgcacaccaccatgcccagctaatttttgtatttttagtagagacggggtttcaccgtattggccaggctgatctcgaactcctgaccttgtgatccacccacctcagcctcccaaagtgttgggattacaggcatgagctactgcacctgggctaccatttctatatagaaatggtgagataaagttaactccaactccttttcattttagtacaatttagtatcctgatatggtttccgtgatttccagtcagagcattttcaaaattctttgtaatgttgtatgtacataatactgtacttattatctaatactcaattggtacttttacatttgtcttgtggttttttgtatagtgtttgaagtcacaagcttgtaaatgtttgatggatttaaaaatttatatattttatatatatatatatatatatatatatatatatatttttttttttttttttttttgagacggagtttcactcttgttgcccaggctggagtgcaacggcgcgatctcggctcaccgtaacctccacctcccaggttcaagcggttctcctgcctcagcctccctagtagctgggattacaggcctgtgccaccacgcccagctaattttgtatttttagtaragtaggggtttctccatgttggtcaggctggtctcgaactcccgacctcaggtgatccacccaccttggcctcccaaagtgctgggattacaggcatgagccactgtgcccggcctattttttgtatttaatatcacattgtttataccaaagcatatcattcaaccatactaccctctaccattgcccgtttttttccccttgagacaggctcttactctattgcccaggctggagtgcagtggcgcagtcatggctcactgcagccttgacctcctgggctcaagtggtcctcctatctcagtctcctgagtagctgggatcacaggcatgcgctaccatgcccagctaatttttaaatttttgtagagatggaggtctcactatattgcctattgcccagcctggtcttgaactcctgagctcaagtgatccacctcagtcttccaaagtgggaggattaaaggcatgagcccctgtgcccagccccattgctcttttggattactatattgttggcttagttctctctttcatccagatttttgacatcatcttggcagatgtcaatgactatgtaaataaacaataacagaaacaacaatagtgataaaatagcttattcatattgagcactttctgtgtgccaggcttttttctaagcactttacgtttattaactaatttaaccctaatagcagccatatgaaataaatactgttattcccattttacagatgaaactaaaacaggccaagtgacttccccaaaatcataagtactagtaagtaaccactatgctgagtttcctttgtaactaccgttaactgtgaaatttcttgaattgagctcaagcaaacattggcttcattctgttccagttgtttagtgttatggccacatttttaacttgtcatcatgttaaggtctcaaattcaccttcaagtcttaaactgtgataattgatagctttcactttcataatcactttatgtgtgttctcccactctaagtctcctaaaccgtcggcctcttccagattttacttcttttccttccttttctatactacgacctctgggttgcattgcttgcagtttttattctttcttattattcttcaggacttactatgcagaagccagcctcacatcatccctaccatccataccctccattcttactccgtgtcatggagaaacctgcatagtgctggggattagtgccacaattaatgtgtagtccgaggtctcccttaaatctgtctttggtccctgtcggagcagttctgcttagctccctccccatttctccacagttgctattataaaatctggaccccttgactcaaacctgtcactgccccatgcttggcagaataccttgcctgccacctcataggaaaaaagggcatgaactccctgagctttcccttcctctacttacaaacttctctgccctctttcttctgttctttcccccagtgtgagaaagaggttactctgtcttggcctctgttagggatagcactgttctaatctgtaggaactcgcagtattggttactcttcttttccctgcagtacttgcccattttcttttttttttttttttttttttttttttttttttgagacagagtcttgttctgtcaccaagactggagtgcagtggcctgatcttggctcactacaacc

SEQ ID NO: 708361 - DNA, 2536 bp, Homo sapiens
cttctgatccgcctgccttggcctcccaaagtgctgggattacaggcatgagccaccgtgccctgcccttttttttttttgggatggagtcttactctgtcactcaggctggagtgtagtggtgtgatcttggctcactgcaacctccacctcctgggttcaagtgattctcctgcctcagcctcccgagcagctgggactacaggtgcacaccaccatgcccagctaatttttgtatttttagtagagacggggtttcaccgtattggccaggctgatctcgaactcctgaccttgtgatccacccacctcagcctcccaaagtgttgggattacaggcatgagctactgcacctgggctaccatttctatatagaaatggtgagataaagttaactccaactccttttcattttagtacaatttagtatcctgatatggtttccgtgatttccagtcagagcattttcaaaattctttgtaatgttgtatgtacataatactgtacttattatctaatactcaattggtacttttacatttgtcttgtggttttttgtatagtgtttgaagtcacaagcttgtaaatgtttgatggatttaaaaatttatatattttatatatatatatatatatatatatatatatatatttttttttttttttttttttgagacggagtttcactcttgttgcccaggctggagtgcaacggcgcgatctcggctcaccgtaacctccacctcccaggttcaagcggttctcctgcctcagcctccctagtagctgggattacaggcctgtgccaccacgcccagctaattttgtatttttagtaaagtaggggtttctccatgttggtcaggctggtctygaactcccgacctcaggtgatccacccaccttggcctcccaaagtgctgggattacaggcatgagccactgtgcccggcctattttttgtatttaatatcacattgtttataccaaagcatatcattcaaccatactaccctctaccattgcccgtttttttccccttgagacaggctcttactctattgcccaggctggagtgcagtggcgcagtcatggctcactgcagccttgacctcctgggctcaagtggtcctcctatctcagtctcctgagtagctgggatcacaggcatgcgctaccatgcccagctaatttttaaatttttgtagagatggaggtctcactatattgcctattgcccagcctggtcttgaactcctgagctcaagtgatccacctcagtcttccaaagtgggaggattaaaggcatgagcccctgtgcccagccccattgctcttttggattactatattgttggcttagttctctctttcatccagatttttgacatcatcttggcagatgtcaatgactatgtaaataaacaataacagaaacaacaatagtgataaaatagcttattcatattgagcactttctgtgtgccaggcttttttctaagcactttacgtttattaactaatttaaccctaatagcagccatatgaaataaatactgttattcccattttacagatgaaactaaaacaggccaagtgacttccccaaaatcataagtactagtaagtaaccactatgctgagtttcctttgtaactaccgttaactgtgaaatttcttgaattgagctcaagcaaacattggcttcattctgttccagttgtttagtgttatggccacatttttaacttgtcatcatgttaaggtctcaaattcaccttcaagtcttaaactgtgataattgatagctttcactttcataatcactttatgtgtgttctcccactctaagtctcctaaaccgtcggcctcttccagattttacttcttttccttccttttctatactacgacctctgggttgcattgcttgcagtttttattctttcttattattcttcaggacttactatgcagaagccagcctcacatcatccctaccatccataccctccattcttactccgtgtcatggagaaacctgcatagtgctggggattagtgccacaattaatgtgtagtccgaggtctcccttaaatctgtctttggtccctgtcggagcagttctgcttagctccctccccatttctccacagttgctattataaaatctggaccccttgactcaaacctgtcactgccccatgcttggcagaataccttgcctgccacctcataggaaaaaagggcatgaactccctgagctttcccttcctctacttacaaacttctctgccctctttcttctgttctttcccccagtgtgagaaagaggttactctgtcttggcctctgttagggatagcactgttctaatctgtaggaactcgcagtattggttactcttcttttccctgcagtacttgcccattttcttttttttttttttttttttttttttttttttttgagacagagtcttgttctgtcaccaagactggagtgcagtggcctgatcttggctcactacaacc

SEQ ID NO: 708362 - DNA, 2536 bp, Homo sapiens
cttctgatccgcctgccttggcctcccaaagtgctgggattacaggcatgagccaccgtgccctgcccttttttttttttgggatggagtcttactctgtcactcaggctggagtgtagtggtgtgatcttggctcactgcaacctccacctcctgggttcaagtgattctcctgcctcagcctcccgagcagctgggactacaggtgcacaccaccatgcccagctaatttttgtatttttagtagagacggggtttcaccgtattggccaggctgatctcgaactcctgaccttgtgatccacccacctcagcctcccaaagtgttgggattacaggcatgagctactgcacctgggctaccatttctatatagaaatggtgagataaagttaactccaactccttttcattttagtacaatttagtatcctgatatggtttccgtgatttccagtcagagcattttcaaaattctttgtaatgttgtatgtacataatactgtacttattatctaatactcaattggtacttttacatttgtcttgtggttttttgtatagtgtttgaagtcacaagcttgtaaatgtttgatggatttaaaaatttatatattttatatatatatatatatatatatatatatatatatttttttttttttttttttttgagacggagtttcactcttgttgcccaggctggagtgcaacggcgcgatctcggctcaccgtaacctccacctcccaggttcaagcggttctcctgcctcagcctccctagtagctgggattacaggcctgtgccaccacgcccagctaattttgtatttttagtaaagtaggggtttctccatgttggtcaggctggtctcgaactcccgacctcaggtgatccacccaccttggcctcccaaagtgctgggattacaggcatgagccactgtgcccggcctattttttgtatttaatatcacattgtttataccaaagcatatcattcaaccatactaycctctaccattgcccgtttttttccccttgagacaggctcttactctattgcccaggctggagtgcagtggcgcagtcatggctcactgcagccttgacctcctgggctcaagtggtcctcctatctcagtctcctgagtagctgggatcacaggcatgcgctaccatgcccagctaatttttaaatttttgtagagatggaggtctcactatattgcctattgcccagcctggtcttgaactcctgagctcaagtgatccacctcagtcttccaaagtgggaggattaaaggcatgagcccctgtgcccagccccattgctcttttggattactatattgttggcttagttctctctttcatccagatttttgacatcatcttggcagatgtcaatgactatgtaaataaacaataacagaaacaacaatagtgataaaatagcttattcatattgagcactttctgtgtgccaggcttttttctaagcactttacgtttattaactaatttaaccctaatagcagccatatgaaataaatactgttattcccattttacagatgaaactaaaacaggccaagtgacttccccaaaatcataagtactagtaagtaaccactatgctgagtttcctttgtaactaccgttaactgtgaaatttcttgaattgagctcaagcaaacattggcttcattctgttccagttgtttagtgttatggccacatttttaacttgtcatcatgttaaggtctcaaattcaccttcaagtcttaaactgtgataattgatagctttcactttcataatcactttatgtgtgttctcccactctaagtctcctaaaccgtcggcctcttccagattttacttcttttccttccttttctatactacgacctctgggttgcattgcttgcagtttttattctttcttattattcttcaggacttactatgcagaagccagcctcacatcatccctaccatccataccctccattcttactccgtgtcatggagaaacctgcatagtgctggggattagtgccacaattaatgtgtagtccgaggtctcccttaaatctgtctttggtccctgtcggagcagttctgcttagctccctccccatttctccacagttgctattataaaatctggaccccttgactcaaacctgtcactgccccatgcttggcagaataccttgcctgccacctcataggaaaaaagggcatgaactccctgagctttcccttcctctacttacaaacttctctgccctctttcttctgttctttcccccagtgtgagaaagaggttactctgtcttggcctctgttagggatagcactgttctaatctgtaggaactcgcagtattggttactcttcttttccctgcagtacttgcccattttcttttttttttttttttttttttttttttttttttgagacagagtcttgttctgtcaccaagactggagtgcagtggcctgatcttggctcactacaacc

SEQ ID NO: 708363 - DNA, 2536 bp, Homo sapiens
cttctgatccgcctgccttggcctcccaaagtgctgggattacaggcatgagccaccgtgccctgcccttttttttttttgggatggagtcttactctgtcactcaggctggagtgtagtggtgtgatcttggctcactgcaacctccacctcctgggttcaagtgattctcctgcctcagcctcccgagcagctgggactacaggtgcacaccaccatgcccagctaatttttgtatttttagtagagacggggtttcaccgtattggccaggctgatctcgaactcctgaccttgtgatccacccacctcagcctcccaaagtgttgggattacaggcatgagctactgcacctgggctaccatttctatatagaaatggtgagataaagttaactccaactccttttcattttagtacaatttagtatcctgatatggtttccgtgatttccagtcagagcattttcaaaattctttgtaatgttgtatgtacataatactgtacttattatctaatactcaattggtacttttacatttgtcttgtggttttttgtatagtgtttgaagtcacaagcttgtaaatgtttgatggatttaaaaatttatatattttatatatatatatatatatatatatatatatatatttttttttttttttttttttgagacggagtttcactcttgttgcccaggctggagtgcaacggcgcgatctcggctcaccgtaacctccacctcccaggttcaagcggttctcctgcctcagcctccctagtagctgggattacaggcctgtgccaccacgcccagctaattttgtatttttagtaaagtaggggtttctccatgttggtcaggctggtctcgaactcccgacctcaggtgatccacccaccttggcctcccaaagtgctgggattacaggcatgagccactgtgcccggcctattttttgtatttaatatcacattgtttataccaaagcatatcattcaaccatactaccctctaccattgcccgtttttttccccttgagacaggctcttactctattgcccaggctggagtgcagtggcgcagtcatggctcactgcagccttgacctcctgggctcaagtggtcctcctatctcagtctcctgagtagctgggatcacaggcatgcgctaccatgcccagctaatttttaaatttttgtagagatggaggtctcactatattgcctattgcccagcctggtcttgaactcctgagctcaagtgatccacctcagtcttccaaagtgggaggattaaaggcatgagcccctgtgcccagccccattgctcttttggattactatattgttggcttagttctctctttcatccagatttttgacatcatcttggcagatgtcaatgactatgtaaataaacaataacagaaacaacaatagtgataaaatagcttattcatattgagcactttctgtgtgccaggcttttttctaagcactttacgtttattaactaatttaaccctaatagcagccatatgaaataaatactgttattcccattttacagatgaaactaaaacaggccaagtgacttccccaaaatcataagtactagtaagtaaccactatgctgagtttcctttgtaactaccgttaactgtgaaatttcttgaattgagctcaagcaaacattggcttcattctgttccagttgtttagtgttatggccacatttttaacttgtcatcatgttaaggtctcaaattcaccttcaagtcttaaactgtgataattgatagctttcactttcataatcactttatgtgtgttctcccactctaagtctcctaaaccgtcggcctcttccagattttacttcttttccttccttttctatactacgacctctgggttgcattgcttgcagtttttattctttcttattattcttcaggacttactatgcagaagccagcctcacatcatccctaccatccataccctccattcttactccgtgtcatggagaaacctgcatagtgctggggattagtgccacaattaatgtgtagtccgaggtctcccttaaatctgtctttggtccctgtcggagcagttctgcttagctcyctccccatttctccacagttgctattataaaatctggaccccttgactcaaacctgtcactgccccatgcttggcagaataccttgcctgccacctcataggaaaaaagggcatgaactccctgagctttcccttcctctacttacaaacttctctgccctctttcttctgttctttcccccagtgtgagaaagaggttactctgtcttggcctctgttagggatagcactgttctaatctgtaggaactcgcagtattggttactcttcttttccctgcagtacttgcccattttcttttttttttttttttttttttttttttttttttgagacagagtcttgttctgtcaccaagactggagtgcagtggcctgatcttggctcactacaacc

SEQ ID NO: 708364 - DNA, 2536 bp, Homo sapiens
cttctgatccgcctgccttggcctcccaaagtgctgggattacaggcatgagccaccgtgccctgcccttttttttttttgggatggagtcttactctgtcactcaggctggagtgtagtggtgtgatcttggctcactgcaacctccacctcctgggttcaagtgattctcctgcctcagcctcccgagcagctgggactacaggtgcacaccaccatgcccagctaatttttgtatttttagtagagacggggtttcaccgtattggccaggctgatctcgaactcctgaccttgtgatccacccacctcagcctcccaaagtgttgggattacaggcatgagctactgcacctgggctaccatttctatatagaaatggtgagataaagttaactccaactccttttcattttagtacaatttagtatcctgatatggtttccgtgatttccagtcagagcattttcaaaattctttgtaatgttgtatgtacataatactgtacttattatctaatactcaattggtacttttacatttgtcttgtggttttttgtatagtgtttgaagtcacaagcttgtaaatgtttgatggatttaaaaatttatatattttatatatatatatatatatatatatatatatatatttttttttttttttttttttgagacggagtttcactcttgttgcccaggctggagtgcaacggcgcgatctcggctcaccgtaacctccacctcccaggttcaagcggttctcctgcctcagcctccctagtagctgggattacaggcctgtgccaccacgcccagctaattttgtatttttagtaaagtaggggtttctccatgttggtcaggctggtctcgaactcccgacctcaggtgatccacccaccttggcctcccaaagtgctgggattacaggcatgagccactgtgcccggcctattttttgtatttaatatcacattgtttataccaaagcatatcattcaaccatactaccctctaccattgcccgtttttttccccttgagacaggctcttactctattgcccaggctggagtgcagtggcgcagtcatggctcactgcagccttgacctcctgggctcaagtggtcctcctatctcagtctcctgagtagctgggatcacaggcatgcgctaccatgcccagctaatttttaaatttttgtagagatggaggtctcactatattgcctattgcccagcctggtcttgaactcctgagctcaagtgatccacctcagtcttccaaagtgggaggattaaaggcatgagcccctgtgcccagccccattgctcttttggattactatattgttggcttagttctctctttcatccagatttttgacatcatcttggcagatgtcaatgactatgtaaataaacaataacagaaacaacaatagtgataaaatagcttattcatattgagcactttctgtgtgccaggcttttttctaagcactttacgtttattaactaatttaaccctaatagcagccatatgaaataaatactgttattcccattttacagatgaaactaaaacaggccaagtgacttccccaaaatcataagtactagtaagtaaccactatgctgagtttcctttgtaactaccgttaactgtgaaatttcttgaattgagctcaagcaaacattggcttcattctgttccagttgtttagtgttatggccacatttttaacttgtcatcatgttaaggtctcaaattcaccttcaagtcttaaactgtgataattgatagctttcactttcataatcactttatgtgtgttctcccactctaagtctcctaaaccgtcggcctcttccagattttacttcttttccttccttttctatactacgacctctgggttgcattgcttgcagtttttattctttcttattattcttcaggacttactatgcagaagccagcctcacatcatccctaccatccataccctccattcttactccgtgtcatggagaaacctgcatagtgctggggattagtgccacaattaatgtgtagtccgaggtctcccttaaatctgtctttggtccctgtcggagcagttctgcttagctccytccccatttctccacagttgctattataaaatctggaccccttgactcaaacctgtcactgccccatgcttggcagaataccttgcctgccacctcataggaaaaaagggcatgaactccctgagctttcccttcctctacttacaaacttctctgccctctttcttctgttctttcccccagtgtgagaaagaggttactctgtcttggcctctgttagggatagcactgttctaatctgtaggaactcgcagtattggttactcttcttttccctgcagtacttgcccattttcttttttttttttttttttttttttttttttttttgagacagagtcttgttctgtcaccaagactggagtgcagtggcctgatcttggctcactacaacc

SEQ ID NO: 708365 - DNA, 648 bp, Homo sapiens
atatgagtgcagctgaggagaatttaatgcattttttacatggtataattttattttgctcatacaatgtgaggtgagtaataatgatattcgaatattaagtgcaaaatatacatattgatgaataatagccatgtttttcagacctccttgccaagtcatattaaaatgacaaataattgcaattgcttaacagagaaatggtgcagaatctgtagtcaaaagcacattagggaccaagagtatccatttgttatcctttgtcaggaaaacatggctcctaatgaaagtgaatgtagaaatactgattgaggaccgcgacactaaacctttttcttgacaagagtcatgatgtgggtattaataagaggattgaaaggtgaagtcaaagctttgattcttaaaatgtgtataacctggatttgttttttgtttgatttctttaaaattaagacctgttaattttgagggatgggggggatcatggctgtgggggaagaaagtacagaataaaacgtggtagagacatcccagtgatattccacartcggtgtgttcaagcaggattgctcaggtaacttgggcaaatgttatttaaaatctggacagttctcaaatcagaatctgaatacctcttaaaaaagaaaa

SEQ ID NO: 708366 - DNA, 1372 bp, Homo sapiens
tttctagtttcagtgcagttgtatgactaaatcaagttacagagctgtgttctgtatcaaatgcttaacactrtttaaacatgtattaaaatctattaaagccactaccgaggttttaagaagtttcctttaactaacagcgctgtctctggttacagaagatatttgttctctaggtatgctgcccctcaaatacaaaataaattaacacctgtactatgtgttttcgtacttccaaaattatggtgggcttcagggttttctgttctcaaagtcattcgccaggaaaataaacatgtctgacacagcagatctcaaaaatattggatggctgatggatgaatgggtgggtggatggatgagcgagcgggtggatggattaatgagcaggtggattaatggatggatggattaatgggcggatggatgaataaatgagccaatgcaccaaacgtgtttctttaaaatcactgtgatcatatcctcactcaaattcatcagcttctaattgtgacatgatcattagaccattgatgactggaaaattctcccaaaaaaaaaaaaaaaaaaaaaaaaaaacagttaaaaaaaggcagaagcagaacatttgttaattttattaaaaaaaatttttttaacagttctgttgtctgaaactaaatgaaaaatataatctaaaagtaaaattaacattagcaaggctttgcgttaaacactaaaaagtcttgtgataaaagcagtgcaaaaaaatttttaaacattaaacgctctaaaattatttaagtaggattccaaagagacttacatacatctctaaatcaatatacatcttaattcataatatacctaaatataatatgacaagttttaatattttgaggactgttttatatcttaagggaatttaaagtttaccttagaagaaataatcaatacttttcaaaatagaccataaaaataacacgggcatccttttgatcctcatgggtttactttatttgcccttgaaaaatatatatatccagtgtacctttcagaatgatttattaggtgttattgttacggtgttcaatattgttcaatactgaactactatactgattaccactctccactctgttttagttctatcatgtgcttttatttacctcctgaggcaaaaacattttaattggtttagagaagcttgaactctcttttatcaatgacagatttcatcaaaatgaaactaacccagtagccatagtcccagggcagaaaaaccatgatctactttgagtttccaaggtttaagacttataaaccaacagtttagaaataaaaaggaaaataaaacctctttgtaatctaagaactttattgtaatctaagc

SEQ ID NO: 708367 - DNA, 1724 bp, Homo sapiens
cataggcatgtacaagtgtgtacatacatatctaacataaaagtttcacataatcttaccaatgtgatgtactctaatattttctttcttattctagtctcatctagtcatctgaaaacacaggttaaaccaataaaagtgatttcctgrctttcttaagggatctgaccaatggtttgaaaaatgttgtcttacagcctatgactacctctagggtgagaactactataatccatttttaccccaatactgagcacgtggcttctccctaaataaatatttactgaacatttatagagcagaataatacaactttaaaaaaaataatgaatgtgtccatatcccaggaaaaacaacaaaaacccaaccaaccaacaaactaaaacaagacacaaccaaaacagcagcaaagaaacgaggctgaggcaggcggatcacgaggtcaggagatcgagaccatcctggctaacacagtgaaaacccgtctctactaaaaaaatacaaaaaattagctgggcgtggtggcgggtgcctgtagtcccagctactcgggaggctgaggcaggagaatggcgtgaacctgggaggtggagcttgcagtgagccgagatcgcaccaccgtactccagcctgggcgacagagagagactccttctcaaaaaaaaaaaaaaaaaaaaaaagaaacatgagaaactttattactacctatgtagccttttgatcccagtgatctagacccacaccctgccaagtactaaggcagcctctttttcaatggcatgtcacaccacatcctgtgaaattaggctcttagcagactttttttttttttaaatgatgaaaataaggtacaaaatacctcgcttcttggactgattttaaaacacttggttatacctgatggagaatctatggattgcaaaggttgtggctgatacagcagtaacccctcccttcccctgagatcagtatttcggtgaaaaaggtagggaagttgccttgagtacaaaaaaagagaagagggctaaccaatagcagcggtgtggcagacagcacagtctgaatttttaccaaatgcgagataaatagcagaaattgtgcataagaaagaatggattctcttccttatgctgagaacaggcctctctcccaacaatgaggagctcttcccctgaggaggagaaaggatcttgtttagggctttgacctccattgaaggacagtgttcagattgtcatcaacaagcagagagaacatagaggtaccagaacagggagcaaggctctactaacccagtgagacaatgacacctagggcattaagtggctgaaatctactgaatcaaaaatcctcggctaaagggagacaggaatctgtattttagagaagttccccaagcaactcttacgtgaggccagattttaataccagggaattagtccagttcttcagttagctagaggagcttgggagtgggtgagaaacaaagctgggttccagaacaattcagtgacaagcctagatgacccaggtggtgatataacagcaagactcggacccaaatcccatatgatgttgtgaggtgtggcaggtttgcttgtggagaaaccaaggcaggaaagcaagagtggtcgggccagagttttgcaaagcccaactgctgccaacaagaccctgaaacaaatggcaggcctccgagatgagatacacttgaagccccagag

SEQ ID NO: 708368 - DNA, 1724 bp, Homo sapiens
cataggcatgtacaagtgtgtacatacatatctaacataaaagtttcacataatcttaccaatgtgatgtactctaatattttctttcttattctagtctcatctagtcatctgaaaacacaggttaaaccaataaaagtgatttcctgactttcttaagggatctgaccaatggtttgaaaaatgttgtcttacagcctatgactacctctagggtgagaactactataatccatttttaccccaatactgagcacgtggcttctccctaaataaatatttactgaacatttatagagcagaataatacaactttaaaaaaaataatgaatgtgtccatatcccaggaaaaacaacaaaaacccaaccaaccaacaaactaaaacaagacacaaccaaaacagcagcaaagaaacgaggctgaggcaggcggatcacgaggtcaggagatcgagaccatcctggctaacacagtgaaaaccygtctctactaaaaaaatacaaaaaattagctgggcgtggtggcgggtgcctgtagtcccagctactcgggaggctgaggcaggagaatggcgtgaacctgggaggtggagcttgcagtgagccgagatcgcaccaccgtactccagcctgggcgacagagagagactccttctcaaaaaaaaaaaaaaaaaaaaaaagaaacatgagaaactttattactacctatgtagccttttgatcccagtgatctagacccacaccctgccaagtactaaggcagcctctttttcaatggcatgtcacaccacatcctgtgaaattaggctcttagcagactttttttttttttaaatgatgaaaataaggtacaaaatacctcgcttcttggactgattttaaaacacttggttatacctgatggagaatctatggattgcaaaggttgtggctgatacagcagtaacccctcccttcccctgagatcagtatttcggtgaaaaaggtagggaagttgccttgagtacaaaaaaagagaagagggctaaccaatagcagcggtgtggcagacagcacagtctgaatttttaccaaatgcgagataaatagcagaaattgtgcataagaaagaatggattctcttccttatgctgagaacaggcctctctcccaacaatgaggagctcttcccctgaggaggagaaaggatcttgtttagggctttgacctccattgaaggacagtgttcagattgtcatcaacaagcagagagaacatagaggtaccagaacagggagcaaggctctactaacccagtgagacaatgacacctagggcattaagtggctgaaatctactgaatcaaaaatcctcggctaaagggagacaggaatctgtattttagagaagttccccaagcaactcttacgtgaggccagattttaataccagggaattagtccagttcttcagttagctagaggagcttgggagtgggtgagaaacaaagctgggttccagaacaattcagtgacaagcctagatgacccaggtggtgatataacagcaagactcggacccaaatcccatatgatgttgtgaggtgtggcaggtttgcttgtggagaaaccaaggcaggaaagcaagagtggtcgggccagagttttgcaaagcccaactgctgccaacaagaccctgaaacaaatggcaggcctccgagatgagatacacttgaagccccagag

SEQ ID NO: 708369 - DNA, 1724 bp, Homo sapiens
cataggcatgtacaagtgtgtacatacatatctaacataaaagtttcacataatcttaccaatgtgatgtactctaatattttctttcttattctagtctcatctagtcatctgaaaacacaggttaaaccaataaaagtgatttcctgactttcttaagggatctgaccaatggtttgaaaaatgttgtcttacagcctatgactacctctagggtgagaactactataatccatttttaccccaatactgagcacgtggcttctccctaaataaatatttactgaacatttatagagcagaataatacaactttaaaaaaaataatgaatgtgtccatatcccaggaaaaacaacaaaaacccaaccaaccaacaaactaaaacaagacacaaccaaaacagcagcaaagaaacgaggctgaggcaggcggatcacgaggtcaggagatcgagaccatcctggctaacacagtgaaaacccgtctctactaaaaaaatacaaaaaattagctgggcgtggtggcgggtgcctgtagtcccagctactcgggaggctgaggcaggagaatggcgtgaacctgggaggyggagcttgcagtgagccgagatcgcaccaccgtactccagcctgggcgacagagagagactccttctcaaaaaaaaaaaaaaaaaaaaaaagaaacatgagaaactttattactacctatgtagccttttgatcccagtgatctagacccacaccctgccaagtactaaggcagcctctttttcaatggcatgtcacaccacatcctgtgaaattaggctcttagcagactttttttttttttaaatgatgaaaataaggtacaaaatacctcgcttcttggactgattttaaaacacttggttatacctgatggagaatctatggattgcaaaggttgtggctgatacagcagtaacccctcccttcccctgagatcagtatttcggtgaaaaaggtagggaagttgccttgagtacaaaaaaagagaagagggctaaccaatagcagcggtgtggcagacagcacagtctgaatttttaccaaatgcgagataaatagcagaaattgtgcataagaaagaatggattctcttccttatgctgagaacaggcctctctcccaacaatgaggagctcttcccctgaggaggagaaaggatcttgtttagggctttgacctccattgaaggacagtgttcagattgtcatcaacaagcagagagaacatagaggtaccagaacagggagcaaggctctactaacccagtgagacaatgacacctagggcattaagtggctgaaatctactgaatcaaaaatcctcggctaaagggagacaggaatctgtattttagagaagttccccaagcaactcttacgtgaggccagattttaataccagggaattagtccagttcttcagttagctagaggagcttgggagtgggtgagaaacaaagctgggttccagaacaattcagtgacaagcctagatgacccaggtggtgatataacagcaagactcggacccaaatcccatatgatgttgtgaggtgtggcaggtttgcttgtggagaaaccaaggcaggaaagcaagagtggtcgggccagagttttgcaaagcccaactgctgccaacaagaccctgaaacaaatggcaggcctccgagatgagatacacttgaagccccagag

SEQ ID NO: 708370 - DNA, 1724 bp, Homo sapiens
cataggcatgtacaagtgtgtacatacatatctaacataaaagtttcacataatcttaccaatgtgatgtactctaatattttctttcttattctagtctcatctagtcatctgaaaacacaggttaaaccaataaaagtgatttcctgactttcttaagggatctgaccaatggtttgaaaaatgttgtcttacagcctatgactacctctagggtgagaactactataatccatttttaccccaatactgagcacgtggcttctccctaaataaatatttactgaacatttatagagcagaataatacaactttaaaaaaaataatgaatgtgtccatatcccaggaaaaacaacaaaaacccaaccaaccaacaaactaaaacaagacacaaccaaaacagcagcaaagaaacgaggctgaggcaggcggatcacgaggtcaggagatcgagaccatcctggctaacacagtgaaaacccgtctctactaaaaaaatacaaaaaattagctgggcgtggtggcgggtgcctgtagtcccagctactcgggaggctgaggcaggagaatggcgtgaacctgggaggtggagcttgcagtgagccgagatcgcaccaccgtactccagcctgggcgacagagagagactccttctcaaaaaaaaaaaaaaaaaaaaaaagaaacatgagaaactttattactacctatgtagccttttgatcccagtgatctagacccacaccctgccaagtactaaggcagcctctttttcaatggcatgtcacaccacatcctgtgaaattaggctcttagcagactttttttttttttaaatgatgaaaataaggtacaaaatacctcrcttcttggactgattttaaaacacttggttatacctgatggagaatctatggattgcaaaggttgtggctgatacagcagtaacccctcccttcccctgagatcagtatttcggtgaaaaaggtagggaagttgccttgagtacaaaaaaagagaagagggctaaccaatagcagcggtgtggcagacagcacagtctgaatttttaccaaatgcgagataaatagcagaaattgtgcataagaaagaatggattctcttccttatgctgagaacaggcctctctcccaacaatgaggagctcttcccctgaggaggagaaaggatcttgtttagggctttgacctccattgaaggacagtgttcagattgtcatcaacaagcagagagaacatagaggtaccagaacagggagcaaggctctactaacccagtgagacaatgacacctagggcattaagtggctgaaatctactgaatcaaaaatcctcggctaaagggagacaggaatctgtattttagagaagttccccaagcaactcttacgtgaggccagattttaataccagggaattagtccagttcttcagttagctagaggagcttgggagtgggtgagaaacaaagctgggttccagaacaattcagtgacaagcctagatgacccaggtggtgatataacagcaagactcggacccaaatcccatatgatgttgtgaggtgtggcaggtttgcttgtggagaaaccaaggcaggaaagcaagagtggtcgggccagagttttgcaaagcccaactgctgccaacaagaccctgaaacaaatggcaggcctccgagatgagatacacttgaagccccagag

SEQ ID NO: 708371 - DNA, 1724 bp, Homo sapiens
cataggcatgtacaagtgtgtacatacatatctaacataaaagtttcacataatcttaccaatgtgatgtactctaatattttctttcttattctagtctcatctagtcatctgaaaacacaggttaaaccaataaaagtgatttcctgactttcttaagggatctgaccaatggtttgaaaaatgttgtcttacagcctatgactacctctagggtgagaactactataatccatttttaccccaatactgagcacgtggcttctccctaaataaatatttactgaacatttatagagcagaataatacaactttaaaaaaaataatgaatgtgtccatatcccaggaaaaacaacaaaaacccaaccaaccaacaaactaaaacaagacacaaccaaaacagcagcaaagaaacgaggctgaggcaggcggatcacgaggtcaggagatcgagaccatcctggctaacacagtgaaaacccgtctctactaaaaaaatacaaaaaattagctgggcgtggtggcgggtgcctgtagtcccagctactcgggaggctgaggcaggagaatggcgtgaacctgggaggtggagcttgcagtgagccgagatcgcaccaccgtactccagcctgggcgacagagagagactccttctcaaaaaaaaaaaaaaaaaaaaaaagaaacatgagaaactttattactacctatgtagccttttgatcccagtgatctagacccacaccctgccaagtactaaggcagcctctttttcaatggcatgtcacaccacatcctgtgaaattaggctcttagcagactttttttttttttaaatgatgaaaataaggtacaaaatacctcgcttcttggactgattttaaaacacttggttatacctgatggagaatctatggattgcaaaggttgtggctgatacagcagtaacccctcccttcccctgagatcagtatttcggtgaaaaaggtagggaagttgccttgagtacaaaaaaagagaagagggctaaccaatagcagyggtgtggcagacagcacagtctgaatttttaccaaatgcgagataaatagcagaaattgtgcataagaaagaatggattctcttccttatgctgagaacaggcctctctcccaacaatgaggagctcttcccctgaggaggagaaaggatcttgtttagggctttgacctccattgaaggacagtgttcagattgtcatcaacaagcagagagaacatagaggtaccagaacagggagcaaggctctactaacccagtgagacaatgacacctagggcattaagtggctgaaatctactgaatcaaaaatcctcggctaaagggagacaggaatctgtattttagagaagttccccaagcaactcttacgtgaggccagattttaataccagggaattagtccagttcttcagttagctagaggagcttgggagtgggtgagaaacaaagctgggttccagaacaattcagtgacaagcctagatgacccaggtggtgatataacagcaagactcggacccaaatcccatatgatgttgtgaggtgtggcaggtttgcttgtggagaaaccaaggcaggaaagcaagagtggtcgggccagagttttgcaaagcccaactgctgccaacaagaccctgaaacaaatggcaggcctccgagatgagatacacttgaagccccagag

SEQ ID NO: 708372 - DNA, 1091 bp, Homo sapiens
aaagagttaaatacatcattcaatatatgttattgaacatacaagtatgtggtgaataaaaaaaggtacatgcatgataaaaggaatcatttaagtgatggttggacagggaacttgtgacaagaaggaggttggattttttaacctaaattccctcctggcaccttgattaaaatgaaatgaactgaggcagccaaagagattattttattcagatgagtgttattagcctttctggcttattttctctattatgcattttgctgatgctgacagaagcaggcaggctggatagagaggcaaagctgcagcggatttatggtctgacagtgtcatgcataaaatcagacccttgctgacccagataagccagaggatggattggatttgctggggaaggtgttaaaagaaggagggggtaaaaatcaccaaggtaggaaatgacttgaaaacgattctgcctgtaatggtggatgctggttttgtgacccagtagtacagcggcagcctgaaggtatctttcaaagacagacgggcaggcagggggcgggcacacttctcygggcttatcacagctttggcttcagcgttgccagcaatgagatcagaggaggagagttcagagacagagaaaagtgccaaaggcaaaaataatatagtctacatatggagaaatgaacttttaaattttcagggacaagtgagtaccacaaattgtcttcggtagcctagacagatgattagaaaggattcaagcagtggtagacccaccttctcaaaatagcctaaattgtcccctataatcaggtttgggggaaggactgtatgaaaataagattcttgtggctctggattagttccatggagcagaaccacacccttgagagaacagcatgcccaagagccggaccttaggaatctgctttgaagtagagaactggactagcaccatgtctgacatctattaagtgcttaatcacgatttcctgaatgattataggaccaaggttcttgtgggttaggtcagagaactaggaatggcccccaaatttaagctatcgtagacactaactggaaatgtctccatcaat

SEQ ID NO: 708373 - DNA, 1091 bp, Homo sapiens
aaagagttaaatacatcattcaatatatgttattgaacatacaagtatgtggtgaataaaaaaaggtacatgcatgataaaaggaatcatttaagtgatggttggacagggaacttgtgacaagaaggaggttggattttttaacctaaattccctcctggcaccttgattaaaatgaaatgaactgaggcagccaaagagattattttattcagatgagtgttattagcctttctggcttattttctctattatgcattttgctgatgctgacagaagcaggcaggctggatagagaggcaaagctgcagcggatttatggtctgacagtgtcatgcataaaatcagacccttgctgacccagataagccagaggatggattggatttgctggggaaggtgttaaaagaaggagggggtaaaaatcaccaaggtaggaaatgacttgaaaacgattctgcctgtaatggtggatgctggttttgtgacccagtagtacagcggcagcctgaaggtatctttcaaagacagacgggcaggcagggggcgggcacacttctccgggcttatcacagctttggcttcagcgttgccagcaatgagatcagaggaggagagttcagagacagagaaaagtgccaaaggcaaaaataatatagtctacatatggagaaatgaacttttaaattttcagggacaagtgagtaccacaaattgtcttcggtagcctagacagatgattagaaaggattcaagcagtggtagacccaccttctcaaaatagcctaaattgtcccctataatcaggtttgggggaaggactgtatgaaaataagattcttgtggctctggattagttccatggagcagaaccacacccttgagagaacagcatgcccaagagccggaccttaggaatctgctttgaagtagagaactggactagcaccatgtctgacatctattaagtgcttaatyacgatttcctgaatgattataggaccaaggttcttgtgggttaggtcagagaactaggaatggcccccaaatttaagctatcgtagacactaactggaaatgtctccatcaat

SEQ ID NO: 708374 - DNA, 2776 bp, Homo sapiens
ggtgtgagtttcctgtgctttgcttacttaccaaattatcttcagaacctccgacttccacaggagggttggagacagcaggtagggattccaggttaacaagctcttctcatagatggccctgtgtcctsaaattctgtgctgtacaaatgggaaccacgcccactgtcttgaggccagtgctttgacattttaaaacccacctcctcttcactatgactaaacaaagatatatatatatatgtaacgtgaaagtgaaccaagtgccgtatctctggaaagcccacactgctgagaaaatggcaaataggcctcctttctcttttaactgagagtgtggagagtgaggaacatcagaaattctgagttttgtttgctttcccacaaggccagtggggacagctgttggttttaattcacatcttggcccagataaatattttctctatggagagtacaaccagaattttccagaagtttcacattgggtaggtgctttccggtggtcaggcctccctgccccccagagaatggcttctgtgcggatagctccatctggaacaggactagccctcaataagcaccaaattgagggtacaaaggagttcagggacccccttgtgtgccctggctccgcttggtggcccccttacttcctgtttctaaaaggaggctccaaaataccaggggtctcacaacctgatgcagctactgatttcagattctgatttactcttaagatttgtaattatgtctgaatatgttttatggaatttgtcattggcttatgtctacttaatttaaacagcccatagccccttgttcttgtcgtatgtgaagtaacagtactgtttcaatgaattgtgatgaggtcagttactttagaaggccaggaattacgggcagagcagacgccccaaggatccttctctcatgggccataaaattgtcagaaacacaaaaatactaaagcacaatattaacatgatcataaataaagattcaaagatgattgtgataaagaacagaatgccttataggaacttttgcagtctctataaaccagagcatcataaaatcataatctggcaataaacgtgagaggccacattcactctgaggttagaagtcacatgtcccttgtgatatcaaacctgcctataatttttatttttaaaatgttactataaatcagagcatcataaacctggcaataaacttgaggagccagttttcatgtgcgactaggagtcagaattccccagcaatagaaaaaagttatttttttataatttatattttttaaacataatacccaagtaattattatactgaatgtatttgacaaatgtctacatgaaacattagagttaaattactcatcagccttacattataataccatttaaaatgtttcagacttagtatgacttttaatcattcggttgacataattcgcaaaggaattatttttcttcttattgttttgagagctgcttataacattcgaagagatgtgtagaatctcaggtctaaagtccgcactcccctgacaaccttcctcctatttgtagcttttaaactgacacccttgcctacattttagaaggttcttttttaaaaaatagagagagatgagaggagatttactaaggaaattggctatcatgattatggaggctgagaagtcctacaacagaccatctgcagctggagaccctgggatgctgggttcatggctcagtacaagcctgaaagtgtcagaaccagggaagctgatggcgtaactcagcctgaggcccaagggtgagaatctggggtggctgatgtgagttctggagtccaaaagctaaagagcctggagttctgatgtccaaggactcttagaagctggaccgtgtactaggctaccagggatgtatcagtgaacaggacagacatggttctagttctcatagggtgggaaagatattgtccaagtaattacacaaataattacctaattacaaatctgtatgtatgatttaaggaagacatacagggcactgtgagagtgcaggaaagggcaccctcactaagcctgagaaagcagaaagaagtgacttttaagctaaaggagatgacctgcaaaaggagtgtgaacacatctggctcctgaatgttccttagaagatgacgactttttcctcctacccaaccctaatacagctgtcattcagaactttctgttctcacttcaagcaacaacatagaatatctacctacagatacttgtttaaaaattcagccaaaacttgagcacttttgaaacttgatgaaggcatcagattttgaataatacttattttctctacctgtcaatctgtcaccctttgtcccactcatttgtgtataacctctcactgcctaatatctcttaccaggatttctgcagccacctccttgccttcagtcttgtcaaaggaattgtccccactgctatctgggcattctcagtaaaacctgaatttagccaagaggtttccattctttgccagctcctactcatcaggctgggttagatagccttcatcaacagcatctctgcatatttctttcattgtcttcagtggggcacactggtgtcattagcattgttttgattgtatgtacagcgtcaggcaggcaaaggcttaggaaatactcgaaatccacaagttggtgttcacttatctcaagagtcaaagagagacaaatccagctaagacagtggagggagttggttacgtcttggtgg

SEQ ID NO: 708375 - DNA, 600 bp, Homo sapiens
gaacttcaattttattttaatatcaaattcttttaaaaaaaatacctctctctccccacttcctccatgagtgcctctgctttgttgcttgtttaagtcatgtatgatccaccaactgagtaacccagcaatgaacacattggtgccttgtttattgtgggttgaatggtatctccctaaaagatatgtcttcccagaacctcagaatgtgaccttatttggaacaagggtctttatagatgtaattaaggtaaggatttctagatgagctcatcctggattaggatgggccctaactgcaatgataagcgttcctcataagaaacagaaaagggctgggcacagcggctcacgcctgtaatccyggcactttgtggggccgaggcgggtggatcacgaggtcaggagatggagaccatcctggctaacacagtgaaaccctgtctctactaaaaatacaaaaaattagccgggcgcggtggcgggcgcctgtagcctgtagtcccagctactcgggaggctgaggcaggagaatggcgcgaacctgggaggcggagcttgcacccgggaggcggagcttgcagtgagctgagatcaggc

SEQ ID NO: 708376 - DNA, 600 bp, Homo sapiens
gaacttcaattttattttaatatcaaattcttttaaaaaaaatacctctctctccccacttcctccatgagtgcctctgctttgttgcttgtttaagtcatgtatgatccaccaactgagtaacccagcaatgaacacattggtgccttgtttattgtgggttgaatggtatctccctaaaagatatgtcttcccagaacctcagaatgtgaccttatttggaacaagggtctttatagatgtaattaaggtaaggatttctagatgagctcatcctggattaggatgggccctaactgcaatgataagcgttcctcataagaaacagaaaagggctgggcacagcggctcacgcctgtaatcctrgcactttgtggggccgaggcgggtggatcacgaggtcaggagatggagaccatcctggctaacacagtgaaaccctgtctctactaaaaatacaaaaaattagccgggcgcggtggcgggcgcctgtagcctgtagtcccagctactcgggaggctgaggcaggagaatggcgcgaacctgggaggcggagcttgcacccgggaggcggagcttgcagtgagctgagatcaggc

SEQ ID NO: 708377 - DNA, 1418 bp, Homo sapiens
atctgatagaatctctcatgactttgtccaaatctagtcatagttctggggactatgaccacagcaaatctcaggctttctcaaggtcccagatcctcaaagacttctgctgggctggactagccaataccaacaagaaggacagtgataatagtaatggtagaagtagcagtaacagtcataacagctattaacagaaatcagggcacaaaacgagtagccctaygatgaggagccataattccaaacttcacagacaacagtggggctgatgctgatatttataacccaattagtccacagtccagcttaacttcagtaaatgtatcttctgtgcaatacgtatttttaaacattgacattctccctcacttttttatacctttgggctttcaactgacagtaaacatttcaaaatactacatagtgctacagcaacccatcaatggtttactttcagcaccattaccatctttgtctgtacaacattaatttgagtagtttattgcattataatcctattgtttaagaagaaaatgaaaacaaagggcaggtgccagtgatgcaaaacacagatttcataaacttattctaattgagttcaagacagaaatcatcataggtatcaaaaaataaactcacaaacttcactaacagactcctgagcacttgggaaaaattggtgcattctagccagagtgtcacacttgtccaaggctgctggttcagacctggtaaaccacagccaatcacactcaagacaatcagactctccatctcagccaggcatggtggctcacacctgtaatcccagcactttgggaggctaagacaggcaaatcccgatatcaggagttcgagaccagcctgaccaacatggtgaaaccctgtctctattaataatataaaaattagccaggtgtggtggcacgcacccgtagtcccagctactcaggagcctgaggcaggagaattgcttgaacccaggaggcggaggttgcagtgagctgagatcgcaccactgcactccagcctggatgacagagtgagactccatctcaaaaaaaaaaagattctccatctcacccacatgaagcctttctgaagcctcaaccccagaagctagaggttacggccaagggcttctaagaaagaaaaatcttggcgcttgtctggctaggtaaatagccagacaagggccaagattttttttgagccaacattttctggattgttcccatttacaatccaagttaaccatgggctggccatgcctccccttggtgctctgcagacacatgctttttgcactctttggaagcaagcccatgataaataaaccataacacaataaattaaatttctatcatggcatccatctcctagtatgaaaagaagctcctgatcttattctttca

SEQ ID NO: 708378 - DNA, 1418 bp, Homo sapiens
atctgatagaatctctcatgactttgtccaaatctagtcatagttctggggactatgaccacagcaaatctcaggctttctcaaggtcccagatcctcaaagacttctgctgggctggactagccaataccaacaagaaggacagtgataatagtaatggtagaagtagcagtaacagtcataacagctattaacagaaatcagggcacaaaacgagtagccctacgatgaggagccataattccaaacttcacagacaacagtggggctgatgctgatatttataacccaattagtccacagtccagcttaacttcagtaaatgtatcttctgtgcaatacgtatttttaaacattgacattctccctcacttttttatacctttgggctttcaactgacagtaaacatttcaaaatactacatagtgctacagcaacccatcaatggtttactttcagcaccattaccatctttgtctgtacaacattaatttgagtagtttattgcattataatcctattgtttaagaagaaaatgaaaacaaagggcaggtgccagtgatgcaaaacacagatttcataaacttattctaattgagttcaagacagaaatcatcataggtatcaaaaaataaactcacaaacttcactaacagactcctgagcacttgggaaaaattggtgcattctagccagagtgtcacacttgtccaaggctgctggttcagacctggtaaaccacagccaatcacactcaagacaatcagactctccatctcagccaggcatggtggctcacacctgtaatcccagcactttgggaggctaagacaggcaaatcccgatatcaggagttcgagaccagcctgaccaacatggtgaaaccctgtctctattaataatataaaaattagccaggtgtggtggcacgcacccgtagtcccagctactcaggagcctgaggcaggagaattgcttgaacccaggaggcggaggttgcagtgagctgagatcgcaccactgcactccagcctggrtgacagagtgagactccatctcaaaaaaaaaaagattctccatctcacccacatgaagcctttctgaagcctcaaccccagaagctagaggttacggccaagggcttctaagaaagaaaaatcttggcgcttgtctggctaggtaaatagccagacaagggccaagattttttttgagccaacattttctggattgttcccatttacaatccaagttaaccatgggctggccatgcctccccttggtgctctgcagacacatgctttttgcactctttggaagcaagcccatgataaataaaccataacacaataaattaaatttctatcatggcatccatctcctagtatgaaaagaagctcctgatcttattctttca

SEQ ID NO: 708379 - DNA, 587 bp, Homo sapiens
cacctgtagtcccagctactctggaggctgaggtgagaggatgacttgagcccaggaggtcaaggctacagtgagctgtaatcacaccactgcattccagcctgggcaacaaagcaagaccctgtctcaaaaataaaataaaataaaacaaaatgaaatacttcgaaagaaatatacctcaaatgctaacattttattggtgtatgaatgttgtattacgggattttttttttcttctttatattttagtgtattcacttttatgagagtttgtattaattttataatctagaaagaatttggcaaacatcccctctgaaaaaaaaaatcagaacaaaaactacccccaaatagggaaaactctacaaatggcttaactgtgtatacagtcaagatcctataacctaggtctctgtatctaaaggcagaatttacgtgtgaattaatctcatttttgtttctgctgactccatagaaactgtgctctccayggcttcctcaagatgagcaaacaagagtgatacagatttttctgagatggacagtgcctctcactgaccccgcccccagtatcctacgaccaagga

SEQ ID NO: 708380 - DNA, 591 bp, Homo sapiens
gaacctcaacattattgtcacaatccttaaatcaatttgcaacaggcacttgaagctctctcagagacgagaagtgcatggtttgtttgtccttctctattgaccaagttttgactttctaaaatactctccctccttgaaagtggatttcaaaaagtgttccagttacaattcttttagactctgatcctctcccagatgtataaacaaatatgtatattaaacatcctgttcaaacaaagtagggaaaacaggctaagattatggggcagggaagcagcagtctctctttcagtgcctctttgccatcccctaccttgtgtccattagaacatcttcaaaattacatgagactcattgcagcttcttcctaaaacaaggctagtgacactttagctytaagattccaaaatcatttgaaggaatagcctgtagaaccaatcctctgtatctttgcatctcagattgaatacttccaaaaataagcattaaaacatataggcaccacttattatacttttattaactcacataatctatacaacctcattgggaatgggtatccttacacccaatcaaaaggtcatgaaa

SEQ ID NO: 708381 - DNA, 615 bp, Homo sapiens
ctgagccccaccctggaaccagggacctgacctagaacatctgaagcgctccctaattccaggaattggttggtgctccaccttggactagaagagcttgacttgcttgatgtgggaaaacccaaaygacctggggaaacagcttcaccaggtgatatgctctaagtcttcaggagcttttttttttggaaggtctctggtatttgcccattaattactaaaagtttcttagctgcagagtagtgtggcaatggtaagaaattaaatgtgttggctttttaaaatgggttctaatatctgcctgtaagaaatcttaattctagggcattagtcacaccatatcagtggtttaaagttgaagaactgtcagatgagaaaagaggaaaaagatatacatagccttaaaatatcattccacataatatttattattacaaagggaaaaataactttacagtggtgacatctagagaatagataccaactcaaaccacctgcctcctgacatgagggactgagaatacagtaacactcctgtaatatgcagaggtaagaatgtgtgagatcctcgttcctcttacttctgggctgctcttaacctccatcactcatatg

SEQ ID NO: 708382 - DNA, 650 bp, Homo sapiens
gccagcacacccagctaatttttgtatttttagcagaggtagggtttcacattggccaggctggtctcgaactcctgacctcaggtgatccgcctgccttggcctcccaaagtgctgggattacagacatgagccactgtgcctgaccaaaaataatttaaaattaatttatgtggtaagacttgagtttgaccattgaatgaggaaatgagaccagattctgggatattgccagagctatgaatttgatgactgaagtctttcaagtccaggtctggttaactgttgggaaggttgttttctcagttagataaacccaaggagctttataagttccaggtttgttttcttgctgagtctacgtaggactgtcttgaattgaacagttgatttgtaaaaactaaaaataaaattaaccaaataaggtacctatggagatgttccgctctcagaactattaaaggagtgcttggaaggtgtgctcaggttcctgtttgtatatatttttattaactctacaactrttcaaccatccagctaaaaccaccatgaactctctcacggtttttaaaagggcatctttactattcccaaattgtagaactagagagttagcaacagtagcccccaaagcagtcacccagtggtgg

SEQ ID NO: 708383 - DNA, 1284 bp, Homo sapiens
ggcaatgcctcaccctgcttcggctcgcgcacggtgcgcgcacacactggcctgcgcccactgtctggcactccctagtgagatgaacccggtacctcagatggaaatgcagaaatcaccggtcttctgcgtcgctcaccctgggagctgtagaccggagctgttcctattcggccatcttggctcctccaccctatgttttcttttcttttcttttttttttttttttgagacagagtctcaatctgtcacccaggctggagtgcagtggctcaatctcagctcactggaacctccacctcccggatttaagggattctcctgcttcagcctcccaagtagctaagactataggcatgcaccaccacactcggctaatttctgtatttttagtagagatggggtttcaccatgctggccaggctggtcttgaactcctgacctcaagtgacccacctgcctccgcctcctaamgtgctggaattacaggtgtgagccaccgcatctggccttttcatttacttctacttacctatcctcttcggtaaattcttaaaatctattatgattataaatataccttacattaatgtttcatttagtatacaagaactcacatatcatattaatttaagtcttataataactccatgcaatatatattactgttactactctaaaaataaagaaaaaaggattaaaataactgatttatttttagtcctagtaacagctaacatttattgagtacttgtaatgagcaaggccttgtgctaggtgctatatcagcactgttttttaattctctcaatgacccagtgaggtagatattattaaccttccttatgctacagatgagaaaacataatttctagcaagcttaagtaacttgcccaccatcacatagctagtaactggcatagccaagattttcctgaggttacataaccaccaaacagcaggcccagcactagaacctaggttttctgattctgaatctggggcaaacctattactgttcttttctttccacttcatgctctgtattatggcaaaacacatttggttgccttctttggttcaaacattctaaataaaaagtgttggaaggcatcctaataaacggaagtattttctctagcagttatgcttcacacacaaggaagagcagaaagagttaaaagacatcactgaactgatttaccctgtaatttatctggtgctataaaaatgaacgacttctttagtttcctgacggctttgctgtcttaaaggtgaaatgcc

SEQ ID NO: 708384 - DNA, 1220 bp, Homo sapiens
catatagaccagaataagttcaagttaatggctacaaacaagcagggcagtgctagagctaagctcaggggctcactacctgcttcctgtacattggagagaaaagccatatacaggccgcaagaatgcaaagacacagggaagagaacggccacctcaagacagatcaataaaacagcacaggaaagaaaaatatgaacaagggcaaggacaaatgtgaatgtctcctctgttaaaattatggcccaaatccaaacgatgctcatctagaaacccagcatttgattcggtctttcttgttcattagtgctaattgcagctttttactcttaacaatgattgtattgttgagacttagtaaacatgacccatatgactgggaagtctattcattatccatttaaatagttaaagaaaatgaagagagaaagcttttatcctcctcttattacaggaagcttccaaagtctgaataaacaaatttcagatgctgttttgctgtaccttaaggaatgatggtagttttagtctttctcgtaagcatttataatgcattgataacatttttgaataatgttctgttcacttccaatacacttttagagttccttacaaaattaagaggctataaaataaattccttcttatcatattcttttatataaaaattatgagattttgatatatttttattaaggataaagactcaattgaccctgttttgaagccccagtggagtgtttgggactcagtgtaagcctactagggtgcgtatcttcagaaagaacaagaaaagctaagtaggtcaataaagcctctcattgaattgtttgcctgcattatagctaacattttagagtagtgtttttcaaactctatgagccataggataagtctcttgacatggcatttagcagacaatggattcctcccctatagtttaaagggaagyatcttcattcataagaaagcatgggaaatatggcttacatgccaaaacattgtaaccatagcaggaattgccaactaggcaatgtacatccatggtttctcttagagtgaaaaatacctttttttcattcctaagagaattatactctaaatatgagaaaagtgcattctattctacctctcaacagacaaacaagaatatttgtaatttactataatttattcctgtcattttccctcatgaaatgtgtttggatgtgcttggctga

SEQ ID NO: 708385 - DNA, 1220 bp, Homo sapiens
catatagaccagaataagttcaagttaatggctacaaacaagcagggcagtgctagagctaagctcaggggctcactacctgcttcctgtacattggagagaaaagccatatacaggccgcaagaatgcaaagacacagggaagagaacggccacctcaagacagatcaataaaacagcacaggaaagaaaaatatgaacaagggcaaggacaaatgtgaatgtctcctctgttaaaattatggcccaaatccaaacgatgctcatctagaaacccagcatttgattcggtctttcttgttcattagtgctaattgcagctttttactcttaacaatgattgtattgttgagacttagtaaacatgacccatatgactgggaagtctattcattatccatttaaatagttaaagaaaatgaagagagaaagcttttatcctcctcttattacaggaagcttccaaagtctgaataaacaaatttcagatgctgttttgctgtaccttaaggaatgatggtagttttagtctttctcgtaagcatttataatgcattgataacatttttgaataatgttctgttcacttccaatacacttttagagttccttacaaaattaagaggctataaaataaattccttcttatcatattcttttatataaaaattatgagattttgatatatttttattaaggataaagactcaattgaccctgttttgaagccccagtggagtgtttgggactcagtgtaagcctactagggtgcgtatcttcagaaagaacaagaaaagctaagtaggtcaataaagcctctcattgaattgtttgcctgcattatagctaacattttagagtagtgtttttcaaactctatgagccataggataagtctcttgacatggcatttagcagacaatggattcctcccctatagtttaaagggaagcatcttcattcataagraagcatgggaaatatggcttacatgccaaaacattgtaaccatagcaggaattgccaactaggcaatgtacatccatggtttctcttagagtgaaaaatacctttttttcattcctaagagaattatactctaaatatgagaaaagtgcattctattctacctctcaacagacaaacaagaatatttgtaatttactataatttattcctgtcattttccctcatgaaatgtgtttggatgtgcttggctga

SEQ ID NO: 708386 - DNA, 498 bp, Homo sapiens
ggtggcacacacctgtagtccctgctactgaggaggctgagacaggagaattgcatgaacccaggaggcagaggttgcagtgagctgagctcgtgccactgcactccagcctgggcaacaaagcgagactccgtctccaaaatactaaaataaaaataatatatatatatttttatttttttatatgtatatatatataagttcttgctcccacagctgtggtccctttagctaaaagagtttgaaatggctatagtgtccttggagacctatttttgaggaggaggctgagagcttccttcctctgcccagccccccttctcccatgacttttttttcctctctttttcagaaayctgatgctgtcaggcccaagcattggccaggaaaggactcagtacagacaggaccactcagagaaacagtaagataagtccacgtatttacaatactctgaaaagcaaattgtccagagaggggaagagaactagctgttct

SEQ ID NO: 708387 - DNA, 1018 bp, Homo sapiens
caaatgagtagtcagaataaagacagtgcaaaataaatgagaaaataaaaaatgcatataaataagtcattaataaaaawtttttaaaataattgacaattgtgactgactacttatatctttattaactccccaaatgtaaacgtccaagacttcagagcagaaatacaagagcttaaggcaattacaaaaggataacaggaatgaagcaacacatgagcagaattcagaggagaaacaggagagagttgcttacttatattaacagaaatcaaatacacctaccatgtactctcaaaaattaaaattttaaaaattaaaataagaaaatactgttaacaacaacacaaaatagaaatcaaattggaatcagcctcacagaataaaataaaatcatggaaaatagtagtgacaaggatatcaggattgagaaaaacaagcaaatgaaatggaaatgaaataaataaaatgagctaaaaacaaaattatgaacatttaagacaaaatagaatggatatatgtaattggtgggtgtttgtttgtttgagacaggatttcgctctgctgcccaggctggagtgcagtagtagaatctcagctcactgcaacttccacctcctgggctcaagcaatccttccaccttggcctcccaagtagctgggactacaggggcccgccatcgcgcctggctaatttttgtatttcttgtagagacgtagttttgccatgttgcccaggctggtctcgaactcctgagctcaagcaaaccacctgcctctgcctctcaagatgctgggattacaggcatgagccactatgcccattgtaattggtgtttttgaagaagagataaaaataatagaatgaaaaaaatttatttttttaaattgcagaaataagagactttatataatgaacaggcacaataagttgcaggcaaaattgacactgaatatttaacaatgacatatctattactaaagttaccagatttcaaatatatagcatgaatctttg

SEQ ID NO: 708388 - DNA, 1018 bp, Homo sapiens
caaatgagtagtcagaataaagacagtgcaaaataaatgagaaaataaaaaatgcatataaataagtcattaataaaaattttttaaaataattgacaattgtgactgactacttatatctttattaamtccccaaatgtaaacgtccaagacttcagagcagaaatacaagagcttaaggcaattacaaaaggataacaggaatgaagcaacacatgagcagaattcagaggagaaacaggagagagttgcttacttatattaacagaaatcaaatacacctaccatgtactctcaaaaattaaaattttaaaaattaaaataagaaaatactgttaacaacaacacaaaatagaaatcaaattggaatcagcctcacagaataaaataaaatcatggaaaatagtagtgacaaggatatcaggattgagaaaaacaagcaaatgaaatggaaatgaaataaataaaatgagctaaaaacaaaattatgaacatttaagacaaaatagaatggatatatgtaattggtgggtgtttgtttgtttgagacaggatttcgctctgctgcccaggctggagtgcagtagtagaatctcagctcactgcaacttccacctcctgggctcaagcaatccttccaccttggcctcccaagtagctgggactacaggggcccgccatcgcgcctggctaatttttgtatttcttgtagagacgtagttttgccatgttgcccaggctggtctcgaactcctgagctcaagcaaaccacctgcctctgcctctcaagatgctgggattacaggcatgagccactatgcccattgtaattggtgtttttgaagaagagataaaaataatagaatgaaaaaaatttatttttttaaattgcagaaataagagactttatataatgaacaggcacaataagttgcaggcaaaattgacactgaatatttaacaatgacatatctattactaaagttaccagatttcaaatatatagcatgaatctttg

SEQ ID NO: 708389 - DNA, 650 bp, Homo sapiens
ttgataaggaaaacaatggagatataaagatagttaaaagattaaggaaaaactaagaaaataatagaccttgattgtatagtctttgagataaactctacccaattcttttttgtgtgttgtgtgtgtgtgtgtgtgtgtgcgtgtgtgtgtgtgtgtgtgatggagtttcactcttgttgcccaggctggrgtgcagtggtgtgatctgggctcactgcagcctccacctctcctgttcaagcaatactcctaactcagtctcccaactcagtctcccaagtagctgggattacaggcacctgccaacatgcccagctaatttttggtatttttaatagagatggggttttgccatgctgggcaggccggtcttgaactcttgacctcaggcgatctgcctgccttggcctcccaaagtgctgggattacaggtgtgagccaccatgcttggagagcgctacgaaattcttgaagagaaaaattccatcgctgcttacatggttccagggcaaaaaataaaaaaaattaaaagggggacagatttcaattttatcttatcaagtaaccataaaactgataacacaatttaacagaaagggaacaaaatgcaaaaattatacaccaatctcacttataaacaggatttg

SEQ ID NO: 708390 - DNA, 650 bp, Homo sapiens
ttgataaggaaaacaatggagatataaagatagttaaaagattaaggaaaaactaagaaaataatagaccttgattgtatagtctttgagataaactctacccaattcttttttgtgtgttgtgtgtgtgtgtgtgtgtgtgcgtgtgtgtgtgtgtgtgtgatggagtttcactcttgttgcccaggctggagtgcagtggtgtgatctgggctcactgcagcctccacctctcctgttcaagcaatactcctaactcagtctcccaactcagtctcccaagtagctgggattacaggcacctgccaacatgcccagctaatttttggtatttttaatagagatggggttttgccatgctgggcaggccggtcttgaactcttgacctcaggcgatctgcctgycttggcctcccaaagtgctgggattacaggtgtgagccaccatgcttggagagcgctacgaaattcttgaagagaaaaattccatcgctgcttacatggttccagggcaaaaaataaaaaaaattaaaagggggacagatttcaattttatcttatcaagtaaccataaaactgataacacaatttaacagaaagggaacaaaatgcaaaaattatacaccaatctcacttataaacaggatttg

SEQ ID NO: 708391 - DNA, 604 bp, Homo sapiens
tgtacaaattacagtgtattaaaggactggctaagcaagtctgaagtccatggggcaggcaaggaagcaagaagggaagacataaagtgtctggaatcctgtgagtatgagctaaaatatggaatctctctagttcatcctagcaaggcaaagacttatatagccacatcataaagtaaccatgggagtatcattgcatcatctttgccatackctatttattataaatgaaacagggttgtgagatacttttaggaagtgaaacatcatgttaaatatagagtcatttgaaaataagattctttttactccataaagagatgtctttattttgtaatcactggactatatctcagtagtttgaagcagagaaagggattgttaagtgatggaaaattccagaacaattactgatactgaaaaataagcaccataaaattatagaaatctaattttgctattggaaaggctcctcagcagctattcactcctaatcagcctgaagttgtaatgaatagaataataagcaccattagaataattctctattcaccaagaataataaaccacttagaataacaaggctaaaataataagccaaatg

SEQ ID NO: 708392 - DNA, 604 bp, Homo sapiens
tgtacaaattacagtgtattaaaggactggctaagcaagtctgaagtccatggggcaggcaaggaagcaagaagggaagacataaagtgtctggaatcctgtgagtatgagctaaaatatggaatctctctagttcatcctagcaaggcaaagacttatatagccacatcataaagtaaccatgggagtatcattgcatcatctttgccatactctatttattrtaaatgaaacagggttgtgagatacttttaggaagtgaaacatcatgttaaatatagagtcatttgaaaataagattctttttactccataaagagatgtctttattttgtaatcactggactatatctcagtagtttgaagcagagaaagggattgttaagtgatggaaaattccagaacaattactgatactgaaaaataagcaccataaaattatagaaatctaattttgctattggaaaggctcctcagcagctattcactcctaatcagcctgaagttgtaatgaatagaataataagcaccattagaataattctctattcaccaagaataataaaccacttagaataacaaggctaaaataataagccaaatg

SEQ ID NO: 708393 - DNA, 1369 bp, Homo sapiens
caagcggccgggagcattatgccacctcccttgccctcatctctcactgccatgcaagaaagcgttaatggcaaatagggcacgtagccacactccgtcgttcctgcttccaagcaaaccttgtgccaggttcctcatttcgcgaggctccactctcttgggcttcaggctgccgctgggcctccagcaccaaagggcaataggggtctgagagtccgggcctcaggcatcttcaggccgcaggtgggtggagaatarcgcccgcgcgtggcagcggcccaggccgtctcagccggatttttccatccccggggtaggcttggtcccctgtacactccagcggaactacaactcccagcaccgtggctgcccggactcccggaagccgaatcccggctgggaggaagcagctgagacccggccaacagactgggggttaatttagccagaaaagggggcgggaagggctgtagggtacttgtcaattcgccgccatgaacgtggtttttgctgtgaagcagtacatttccaaaatgatagaggacagcgggcctggtatgaaagtacttctcatggataaagagacggtgagtttgcttttgctcagcatttgtgaaggaaccctctcaaccttacaattgctcgtcccattccactgtaggacttagcatttaattaaacatacgaaaatgagggtcggtttgtgtggaattgaaaagttgtttatataaagcttgcccggtgggttttcagtctacatggctccagccactgcctagagactacttctacccggaacaatttattggaatcagaaatccttttctaaatgtccccgccaagaaatcattaatatgtcagagcacttggaaggctttgggatgggcctactgtttccactcaacattgtgtttttaaagtaaagctgttggagctcaagctgaaatgacagattatttgttggccacagaccagaaaacaaaactctttaaggtgatagaaaaaaatatttttggaaacttatggattgttcctgttcaaagagaccatgttttttgtttttaatcttgaagcttcagctgaaaggatagagcgtatttttcattctcgtatgttacctacctgtttggatgttcagtaaatgttttccgtatattactatttaagttatccagctaagtattaatgaaaaaagagggttagatgtgctacttgtttttattattctagactagcatacttttagttaatcttttgtttttacagactggcatagtgagtatggtatacacacaatcggagattctacagaaggaagtgtacctctttgaacgcattgattctcaaaatcgagagatcatgaaacacc

SEQ ID NO: 708394 - DNA, 629 bp, Homo sapiens
ccttgctccaaaacaattccacattaacattgttggttcatttttccaatttaagctgttaaaaaatgcatgctaaatttccctatatcgtatttcaatcaattgcctaagctgagactagtgtcacaaataaagcataggatcataaatttctcagaagacataaaatcaaagactctctcacctaaacataaagataaaaaacagcaaaaaaaatacccacaagaaccatgaagctatatgaaattccagctgatcagctggttaaacagtctattctgaacagacttagtctttactctctaaactgatattaagattacaaccatgtaccagaatcatcttggtctagtcttttcattttatgttttcttataaattatggtgctataggaaaaaagtcaatcgcctttcagatgtttaactgcaaaagcactacttagaatagcaatgaactgagttatttaaawacaggactctgcatgaaatgagggctatctgcaaaacagcacatacttaaactacggtatatattacaatatttcaaacagtgcctagaagatctcaagcctcccatgattctatgatcacacagttgacaaggaactctagaatacagaaaaatcttt

SEQ ID NO: 708395 - DNA, 580 bp, Homo sapiens
gcaaggaaataacattgatgactcttacacatacacatgtataaaatttgaatatttcaaaaatataaaatatatattgatgtggggtggaggtgttcaatgaataatgctgaagctgctgtttatttaaagaaaaaactccagatcttaaatttgtaaaacagtgcaagytaacattgtctgagaactcattctgtgttcatttctgttctctgtacattacatgtatgtatattttcatgtaaaattcagaatcatcacaaagagagctaataacgacatgtatatttcacatatgaggaaactgaggtactgagagttacatatttggcaaggacacacaggtgatacttttagaggttaaattattggaaataacctttaaaatataagaataaggacattaaaaaatattgtgacaaatgaagacttcttaagattaacagcatgaaaatagtcatagaagaaaagagagacgataacataaaaatgattccaaaatgtttaaacaaaattaaaatttgaagataaagatggaaaaaaatctaacagtataattttaagtacttaaatgtgcaaa

SEQ ID NO: 708396 - DNA, 663 bp, Homo sapiens
catatggagtggtcaaagtcaaatttttgggtttccagtatatctttttttttttttttttgagacagagtctcgctgtggcacccagactggagtgcagtggcacagtctcggctcactgcaagctccgccttccgggttcacgccattctcctgcctcagcctcccgagtagctgggactacaggtgcccrccactgcgcccagctaattttttgtatttttagtagagacggggtttcagtgtggtctcgatctcctgacctggtgatccacccacctcagcctcccaaagtgctgggattacaggcgtgagccaccgcccccagccttccagtatatcttgtataacatgtagatcctaatcatggtgacaaaaatggtagtagctgaaatatttgagtgcttactatactatgtgcaaggccctgtaccaaggattttaatattttgatttaaatcatcttgaaactcctgtaaattttattaccccactctgcagataaggagacacaccaaggcttcaaatattcatcaagccctgactcaatttcatgcccagtgctatatatgctaaggtgatatcagaattagtaattagcccttcctctgtcaaatgaaggctgtgaccaatcctgcccaatgtccaaacaatgtcttaaaa

SEQ ID NO: 708397 - DNA, 663 bp, Homo sapiens
catatggagtggtcaaagtcaaatttttgggtttccagtatatctttttttttttttttttgagacagagtctcgctgtggcacccagactggagtgcagtggcacagtctcggctcactgcaagctccgccttccgggttcacgccattctcctgcctcagcctcccgagtagctgggactacaggtgcccgccactgcgcccagctaattttttgtatttttagtagagacggggtttcagtgtggtctcgatctcctgacctggtgatccacccacctcagcctcccaaagtgctgggattacaggcgtgagccaccgcccccagccttccagtatatcttgtataacatgtagatcctaatcatggtgacaaaaatggtagtagctgaaatatttgagtgcttactatactatgtgcaaggccctgtaccaaggattttaatattttgattwaaatcatcttgaaactcctgtaaattttattaccccactctgcagataaggagacacaccaaggcttcaaatattcatcaagccctgactcaatttcatgcccagtgctatatatgctaaggtgatatcagaattagtaattagcccttcctctgtcaaatgaaggctgtgaccaatcctgcccaatgtccaaacaatgtcttaaaa

SEQ ID NO: 708398 - DNA, 621 bp, Homo sapiens
tcagggttcaatcaggacagagctgatgtgcagcaagtggggagattggtcttgatcatgtaaaataataattcctccatgtagtcttctattcttctgtcaaattcaggtatgtccacagactgaacagatgagttgaagggatgttaagattctttcattctgcccggmgtggtggctcatgcctgtcatcccagcactttgggaggccaaggcaggcggatcacaaggtcaggagtttgagacctgcctgaccaacatggtgaaacctcatatcatcatcgaaatacaaaaattagccagggttggcggcacgcacctacagtcctggctactcaggaggctgaggcacgagaatcgcttgaacctggaggcagaggttgcagtgagccaggatcacaccaatgcactccagcctgggcgacagagccagactccaactcaaaaaataaataaataaataaagattcttccattctgactcccccagtgtcctaaggacagtgcatctgacccctggcctggaaccaaggcaggtcctgggaatgctggtcttaaccaccagattgattgtcagcctggataataagagatgatccttgttggctgaagcactgctgg

SEQ ID NO: 708399 - DNA, 1211 bp, Homo sapiens
aaaaagtgtatttaaataaaatagataccgtaaggttttgtaccattgacagaatgtaaattcagctctgaattttcagaggatagaagaagacattatttcaaaattgatataaggtgaatttacaccagttcctcagaaaaagtagcttttactgaacatgaaatttgagaggaaattcttccttggactctcatggagagtcttttgtttctgtgttgaacagtatctccaacaatagttttacaaagaacatgacggtgagttttaataggctgcttcttataatccaaggatgtaatgtaaaaatgtattactatgaactacaattcctaaataatctggtcttaaatcataaatgtccatgatctcaccttctacatttcccccattttttcctaggctcctttctttacctaaatcaggccaagcttcctcttgcagtctaatatagccacttagtcactttatattgcttcactgtagtttatttctttgcatagcatttgttacttactgatatcttgttttaaaaattgattaattctctttctgggatgtaagtctcttgtgactagtgattatgactttttaaaatttttatatctagtatccgaaataggcatgtagtttacatatttacttgacacatcattgagtaggaataaaagtgaatccttttcctcaattccttgaagccaatgtactgtttataaaaaaaggagtaaattaacctaggttgcttctctatgtgtgtgtgtgttttaaaaatttttcaaattctcttgatctattatgtttagatgcagaattttacctgctggttagatggccaaacatattattagtagttgttgttttacagtactggcattttggtttcataaggtatagtctgagatgacacatayggtattttttaaaattagtagaggagcagatgatacaagattataattttaaaggttttttgtttttgtggcatcatgttttattgctgagaaactatattttatgaagtattgagagactatgtattttgtcaaaacaccaattaaaccgtttctttttgtgtttttatgtttagtatgcctcctttcaaagatacatgaaattggcatagatttgaaagaccatatgtgagttgttagaggattttttgatatatatctactcagtggaatgtattttttagactatttaaattaaaa

SEQ ID NO: 708400 - DNA, 1211 bp, Homo sapiens
aaaaagtgtatttaaataaaatagataccgtaaggttttgtaccattgacagaatgtaaattcagctctgaattttcagaggatagaagaagacattatttcaaaattgatataaggtgaatttacaccagttcctcagaaaaagtagcttttactgaacatgaaatttgagaggaaattcttccttggactctcatggagagtcttttgtttctgtgttgaacagtatctccaacaatagttttacaaagaacatgacggtgagttttaataggctgcttcttataatccaaggatgtaatgtaaaaatgtattactatgaactacaattcctaaataatctggtcttaaatcataaatgtccatgatctcaccttctacatttcccccattttttcctaggctcctttctttacctaaatcaggccaagcttcctcttgcagtctaatatagccacttagtcactttatattgcttcactgtagtttatttctttgcatagcatttgttacttactgatatcttgttttaaaaattgattaattctctttctgggatgtaagtctcttgtgactagtgattatgactttttaaaatttttatatctagtatccgaaataggcatgtagtttacatatttacttgacacatcattgagtaggaataaaagtgaatccttttcctcaattccttgaagccaatgtactgtttataaaaaaaggagtaaattaacctaggttgcttctctatgtgtgtgtgtgttttaaaaatttttcaaattctcttgatctattatgtttagatgcagaattttacctgctggttagatggccaaacatattattagtagttgttgttttacagtactggcattttggtttcataaggtatagtctgagatgacacatacggtattttttaaaattagtagaggagcagatgatacaagattataattttaaaggttttttgtttttgtggcatcatgttttattgctgagaaactatattttatgaagtattgagagactatgtattttgtcaaaacaccaattaaaccgtttctttttgtgtttttatgtttagtatgcctcctttcaaagatacatgaaattggcatagatttgaaagaccatatgtgagttkttagaggattttttgatatatatctactcagtggaatgtattttttagactatttaaattaaaa

SEQ ID NO: 708401 - DNA, 1207 bp, Homo sapiens
ttagttatagatttagagaacagtgagcagtgataacctgttatgcttgcaaactgtcacttgggcatcttccattccttgactatgctcttcagtagattaatgtatctttctctttgtgaatagttgcaaccagagagtaaacatcatcattcccattactaaatcaattatcttgatcccaattccgtaccttcctctgagctcattcctttggagtcagttaacatcaaaaatgaatattgattaaacctcaagaggctatagagaaatacaagagattcatgtgaaatgagggaaggtgggattcagactattgttagtaagtatttcaaaaatggttgcatttattttttctaaactaatgtttgcaggttgaagtctgcacaatatatgcctgcgtgaaaagcaatggaacccaaattaccactgtggaagacactccaagtgatataccaacacccacaattcgtggcatcacttcaaggtacaaaattttgtgtcagttaaatctaaggaactctgatcagaagaaatgaaaataaaaatcaaaggtatcctctcagccatgacaatctcatttaatgggttattataagtatgtgtgtaaatcaaatttttgatattatttcacagatattaatcttcactggacatccaatggcatttaatctttaatttccctgattgcccagcctcagatttcttatttagtaacctgtaagcaaatayttgaaatacatgtctccttatttgaatgtgtcctttagtgaatccttttgcggagcataatacaagcttaattgtaatgactaccttctaacttaatctttttgaaaaaaaattgatttatatacatcagagtgccctaaagctagaaatctgtaaaattagtagggcagataatgtttagataagcattaccaattttgtcagcttcttggtagaatcactttatttttctttattcttttgttgctgagaaatgaccatagtttgaaagcgagtctctttataattcataattagtaacaacaacaataataataatatttggtattgtttccaaagctgaaaataagatggtaaattgttcatccgtttgtatcaagttgaggctgggaaaagaaatcttagtgctttcacattatactttttgcttaagccaaatgaatcacccttctcttacatgtgcaaacaacacaca

SEQ ID NO: 708402 - DNA, 728 bp, Homo sapiens
tatattaatatatgcaaacaaaatgcaatatttggtattataactaggttcttattaacttctcatttttgtaattttttggtaagttttaaaaacactagtaatatatcagaacaaactctaaagaaactctcctttgagattctcctattcaatttttgtttttgcttctatgactatactttatatttttactctaagatatgctccatggtaaaaaaatttttttaatccattgtggatttttttaagtttcttaaaatacttcattctctgtccatattttgtattaagtttacattttaacttgttttgcaagtaataattaaacaagtattcaaataaaaacagcataccagcttttaatcctcaaatttaattataagatttgaaaatattaatatagtatattaattacttctcctcccttcactccctagaaaactggagataaatagcagcgctttccccaacagttgtagagagagtcttcaaaaataagggtccttcataagtgataaacataatttaaaagattaaaatcattaatagtgatggggggagaagatgactcttgaaaactttttccctcaactatttkagcagtttatctgcaacctcccaaaggtaatgatgtaaagaatttattaaagctgagcatagcccccaggcagagtgactcaacacaggaacctgccatatgggttaatggacctgaatctgatccc

SEQ ID NO: 708403 - DNA, 1950 bp, Homo sapiens
tgaaaggaatcacactgtgagtctgctactccactgcaattgtgaactgccaaagggaagaaggaacaattctgtgccatctaagtaactcagcagcccagttyctcactcctgccctgtttctcctgacccctcacaaatatacaagtccgcaaaggctttatattcccttctgtgtacatgttatcctccagggcagtagcattaaagggttaatagctgaacaaacagaaagctcacattcattctaacttatcttctttctatcattccatgtttcctttcctcaaggcaggcctgatattactaactagatgtaagtataaaaacagaacaaccaataatgcatgacacatgaaagtagtatttatgtctataaaaaccactttgatgaccgaaaatgtgcatttgagaggctttatgactatttactgaattttcgtgctttgaaataccacctgtaattggcagtctttagtctcctgaaaaggatataatttcaaagagaaaaattgctataattggggagcaatgagaaaaagcaatgtcactattatgaatgaacaaatcaggaccaattcaaatgaataatagaatgtagtctgtagcaccactgtgaaaggagcaattatagctaagattggattatgagggaaagggtcttttaacagaaagatgtcctaactctgaattttggattcattatggctgaaggcacactaagcaaacagctcctgagagagaagcccagatttccttacctacttaaaatgtggttgttcatccaaccaagaaggggaaaattacaattaaatctcagttctcccctttgtgtccatcaatagcaaatgccttatatgagactgatttaactcaattttgattctgttttacggtctcccggttcaggtaggaagcatttgaagaatcctacccgagtcctcatcttcccagctcccctccacgcttgatactgatccccaacagtagatatcaggggtaaaaggcagtgcaaagtcaaaagaagtatttacatctcactaaacaagtcagtcaagagatgtgatagcaacaggcagaaaggaatatacataaggtatttcaaaatgaggcataggtagaaacaaacagaaaacattggttctccctttatgtctacatcattaggaaaacctaaaatattgaatgacaacaaaactccccgtagatgttctataaaaaactaaattagtttccacagcataaaacttcattcaagtgtataactggaatttcagagggccagcaactagtgcccttttactaaacctaggtaccatttagattctcaaaataaacatgcagagaattaagatgaaaataactcctaaacagagtccttgtatatcattcatgctcaaaaacttataaaataacaaatgagggtaaaataaataaaagagaaaaatcatatcagaaagcaaaagaaataattttaaaattgtaactagagaaaacagactgcccagcaagatctggcacatcattattcttaggatttcaactctggattgaaatataagtaaagtgatttttcgttgtgaaaagcatctcacaggagtttctctaggctagtatggccatccacacacaccaggcttagaatgaggacagtaactcattgctctgatacatcccctccagtactcaccttctgtatgtagattcacattaaaagcctagcactgttaacatgattctctgggtaacattacagccactgcccctcttttggtaccctcatgcaaaataatttaaatggactttattacaatgaaaggtataattagcagtcatgttgtactacaaagcattgatgccacaagccaattttctgaaagtgcctctaaagcagcacctgcaccattcatgtttataaatcaggtaattgtacatctagccacttatgtg

SEQ ID NO: 708404 - DNA, 686 bp, Homo sapiens
gaccagcctggccatcatggtgaaactacgtctctactaaaaatacaaaattagctgggcgtggtggcaggtgcctgtaatcccagctactcaggagtctgaggcaggaaaatcgcttgatcccaggagacagaggttgcagtgagccgagatcatgtcaytgcactccaacctgggcgacaagagtgagacttggtctcaaaaaaaaaaaaaaaagaagaaaagaatgtatgttggatggagaaagtaaactaacagctacccaacattaatacgtgcaatgagaaataattcacttaaggttattttcctatcttttcttttggtcaggtctcttattttttattcagtttcatacctatactttccatcaagtttttcatttgatagaggtcacgagagaagtttctgaaattgttacttataatgtattctaaagttaactttcttctttctgtcaagacttctaaattgtcactttgtatccataagtcaggaatactttctatcattaaagccagaaaggaaatctcaactttattttagccataggtggtggagatctgaagctattttatttttttttctctatcccttagccacattccagctgtgatatagataacctagcaccggactttagtactaatttgaaatatgatttcctatgttgaaaaaaagtccca

SEQ ID NO: 708405 - DNA, 686 bp, Homo sapiens
gaccagcctggccatcatggtgaaactacgtctctactaaaaatacaaaattagctgggcgtggtggcaggtgcctgtaatcccagctactcaggagtctgaggcaggaaaatcgcttgatcccaggagacagaggttgcagtgagccgagatcatgtcactgcactccaacctgggcgacaagagtgagacttggtctcaaaaaaaaaaaraaaagaagaaaagaatgtatgttggatggagaaagtaaactaacagctacccaacattaatacgtgcaatgagaaataattcacttaaggttattttcctatcttttcttttggtcaggtctcttattttttattcagtttcatacctatactttccatcaagtttttcatttgatagaggtcacgagagaagtttctgaaattgttacttataatgtattctaaagttaactttcttctttctgtcaagacttctaaattgtcactttgtatccataagtcaggaatactttctatcattaaagccagaaaggaaatctcaactttattttagccataggtggtggagatctgaagctattttatttttttttctctatcccttagccacattccagctgtgatatagataacctagcaccggactttagtactaatttgaaatatgatttcctatgttgaaaaaaagtccca

SEQ ID NO: 708406 - DNA, 686 bp, Homo sapiens
gaccagcctggccatcatggtgaaactacgtctctactaaaaatacaaaattagctgggcgtggtggcaggtgcctgtaatcccagctactcaggagtctgaggcaggaaaatcgcttgatcccaggagacagaggttgcagtgagccgagatcatgtcactgcactccaacctgggcgacaagagtgagacttggtctcaaaaaaaaaaaaaaragaagaaaagaatgtatgttggatggagaaagtaaactaacagctacccaacattaatacgtgcaatgagaaataattcacttaaggttattttcctatcttttcttttggtcaggtctcttattttttattcagtttcatacctatactttccatcaagtttttcatttgatagaggtcacgagagaagtttctgaaattgttacttataatgtattctaaagttaactttcttctttctgtcaagacttctaaattgtcactttgtatccataagtcaggaatactttctatcattaaagccagaaaggaaatctcaactttattttagccataggtggtggagatctgaagctattttatttttttttctctatcccttagccacattccagctgtgatatagataacctagcaccggactttagtactaatttgaaatatgatttcctatgttgaaaaaaagtccca

SEQ ID NO: 708407 - DNA, 686 bp, Homo sapiens
gaccagcctggccatcatggtgaaactacgtctctactaaaaatacaaaattagctgggcgtggtggcaggtgcctgtaatcccagctactcaggagtctgaggcaggaaaatcgcttgatcccaggagacagaggttgcagtgagccgagatcatgtcactgcactccaacctgggcgacaagagtgagacttggtctcaaaaaaaaaaaaaaaaraagaaaagaatgtatgttggatggagaaagtaaactaacagctacccaacattaatacgtgcaatgagaaataattcacttaaggttattttcctatcttttcttttggtcaggtctcttattttttattcagtttcatacctatactttccatcaagtttttcatttgatagaggtcacgagagaagtttctgaaattgttacttataatgtattctaaagttaactttcttctttctgtcaagacttctaaattgtcactttgtatccataagtcaggaatactttctatcattaaagccagaaaggaaatctcaactttattttagccataggtggtggagatctgaagctattttatttttttttctctatcccttagccacattccagctgtgatatagataacctagcaccggactttagtactaatttgaaatatgatttcctatgttgaaaaaaagtccca

SEQ ID NO: 708408 - DNA, 615 bp, Homo sapiens
tttatttggatcctatgtttattttatttgctcatcctatgttttgatctttgaaaatctattcagatcaaatgagtttgtcaactaagaaggctttgcattaaagggaagatttggctacacctaaaatcactgaacttacattgaaaacgttgtcctgccagtgtstaagtgccagataaagccccttgattggtgagagcagagtgatattgacccacatcggcatcatacaaagtccaaagctattggtcagttctcctttcatacatgagatagattgcccaatatccttgttcatctaatagtttcatgcttatctgtggaatgactctggactgggctgcttatctttcttagtctgacttttgttctgactggtgaaccctgttttggattctagttttagtgttgttgacctcttttctgctagtactcacacatgaactatgctctgtatgctctgtaggtttgatatttgctttttctctgctcagagttctatttccttttctctttgatttcaatgaggctttcaaaaaatatttcaatttcctaaagagaataattttctaaatcactgctattatggagttgcctctataattatttcag

SEQ ID NO: 708409 - DNA, 662 bp, Homo sapiens
ggagaacagcaatgagaaaagagtcacaagaatggggtgaacaaagttggggtacaaccaaaatatgggttaggaagaggaagtggcattatcatgtagggccttttagacaaggactttgtgtaagcttgtcatggagtatmgcacaagtagagaaaggtacacaaatcataagtgtacaactcagtgaatttttttctttttttttttttagacagggtttcactcttgttgcccaggcaaaattacagtggcacaattcggctcactgcaaccttgcaacctttgcctcctgagctcaagcaatcctcctgcgtcagccccctaagtagcagggaccacagtcacgtgccaccacacctggctaatttttgtattttttctagagacagggtttcaccatgttgcccaggtgggtctcaaactcctgggcgcaagcaatcaacccgtcttggcttcccaaagtgctgggacacaggcgtaagccaccgtgccgggtctgaatttccaccaactggcaaattttcaccaacccacacatttagaccaccgtccaaaccaagctatagaacagggtactatagaacaaccctgaagcctccttcatgtttcctctgtcattactatctgcccatccaaggataaccactatttcactttcc

SEQ ID NO: 708410 - DNA, 1882 bp, Homo sapiens
tgagagagcctgcatccctccccacccccctgacccctggcaattaatgccacaggggatcatgagcccagggctgccagctyttccagtgtattcagagaagtgagaaacctgaattttatcagaaaaactctcaaacttacccctaaggatggcatttggccctcaggatgccagttttgtcttctttggtttaagcatcaaagcttacatcctttaaatccctctgaggcttagcctgttaaatcttagtttagacacgatcataaaatgttcttatagctaagcagatgcaaagtcacaaattagaacagggaaacaaaactggcaggctcaggtcccctgccgacagcagtaggtgaagtaagttcaactacaaacgcagagctgtgtgagatcatttggtgtaaggataccggcatttatacagctccatgcccattttattacttgttttttttttttttttttttttgtttgttttttgagatggagtctcgctctgtggcccaggctggagcgcagtggcacgatctcagctcactgcaacctccgccttccgggttcaagccattctcttgcctcaacctcccgagtagctgggattacaggtgccagccaccacagccagctgatttttgtatttttagtagagacgggatttcactctgtaggccaggctggtctcaagctcctgacctcaagtgatccacccgcctcagcctcacaaagtgctgggattataggcatgagctaccatgcctggccccattttattactttactagatcaatatctctagtacttatagagatcaaacaagttaatgtctatgaaaggacttgaaagctgtgaagaaaacaggccaacctagctttctttgaatataagcagaatacaaacatttagtgaaacaaatagaaatggattaatagacatgttatacatatattctgcacattctatttaaaaatgcatttctgaaatatatttatttaatatagtgggttttttcattgagtcattgtttttaatagcacagaatacagaaataatagattgggacaacagttttgtaagactagaggttaatattcctcttgtgaagaggtagcctataaattaataagaaaaggtaaataaccaaagagaaaagcaggcagagtacatgacaatcacaaagcagaaaaaactaatggccaatgaacatatagaaacacactcttctcacactagagatcagagaaattcatattaaaacaaaattatgcagtgtggtgaattcctatagtttgatgttgcctcagcatccattctgaagataagcttaactttctcataccagaagcagggtttagtcaacccctacttaacacagtttccagttctccgcctcctcccagttcctcaatgtggttaatccagatatctgccttaaacaagtgctcaaaagtgatgatcttaacaacaacaacaacaaaatggatctaagttaacttcatttttgtatgcttatccttttccatgttctctcctccacaagaatataagctccgggccgggcgcagtggctcacgcctgtaatcccagtactttgggaggccaaggcaggcggatcacgaggtcaggagattgagaccatcctggctaacacgatgaaaccccgtctctactaaaaatacaaaaaattggccaggcgaggtggcgcgtgcctctagtcccacctacgcgggaggctgaggcaggagaatggcatgaacccaggaggcagagcttgcagtgagccgagatcatgccactacactccagcctgggcgacagcgagactccgtctcaaaaaaaaaaaaaaaaaaaaagaatgtaagctccatgaagacaggga

SEQ ID NO: 708411 - DNA, 1882 bp, Homo sapiens
tgagagagcctgcatccctccccacccccctgacccctggcaattaatgccacaggggatcatgagcccagggctgccagcttttccagtgtattcagagaagtgagaaacctgaattttatcagaaaaactctcaaacttacccctaaggatggcatttggccctcaggatgccagttttgtcttctttggtttaagcatcaaagcttacatcctttaaatccctctgaggcttagcctrttaaatcttagtttagacacgatcataaaatgttcttatagctaagcagatgcaaagtcacaaattagaacagggaaacaaaactggcaggctcaggtcccctgccgacagcagtaggtgaagtaagttcaactacaaacgcagagctgtgtgagatcatttggtgtaaggataccggcatttatacagctccatgcccattttattacttgttttttttttttttttttttttgtttgttttttgagatggagtctcgctctgtggcccaggctggagcgcagtggcacgatctcagctcactgcaacctccgccttccgggttcaagccattctcttgcctcaacctcccgagtagctgggattacaggtgccagccaccacagccagctgatttttgtatttttagtagagacgggatttcactctgtaggccaggctggtctcaagctcctgacctcaagtgatccacccgcctcagcctcacaaagtgctgggattataggcatgagctaccatgcctggccccattttattactttactagatcaatatctctagtacttatagagatcaaacaagttaatgtctatgaaaggacttgaaagctgtgaagaaaacaggccaacctagctttctttgaatataagcagaatacaaacatttagtgaaacaaatagaaatggattaatagacatgttatacatatattctgcacattctatttaaaaatgcatttctgaaatatatttatttaatatagtgggttttttcattgagtcattgtttttaatagcacagaatacagaaataatagattgggacaacagttttgtaagactagaggttaatattcctcttgtgaagaggtagcctataaattaataagaaaaggtaaataaccaaagagaaaagcaggcagagtacatgacaatcacaaagcagaaaaaactaatggccaatgaacatatagaaacacactcttctcacactagagatcagagaaattcatattaaaacaaaattatgcagtgtggtgaattcctatagtttgatgttgcctcagcatccattctgaagataagcttaactttctcataccagaagcagggtttagtcaacccctacttaacacagtttccagttctccgcctcctcccagttcctcaatgtggttaatccagatatctgccttaaacaagtgctcaaaagtgatgatcttaacaacaacaacaacaaaatggatctaagttaacttcatttttgtatgcttatccttttccatgttctctcctccacaagaatataagctccgggccgggcgcagtggctcacgcctgtaatcccagtactttgggaggccaaggcaggcggatcacgaggtcaggagattgagaccatcctggctaacacgatgaaaccccgtctctactaaaaatacaaaaaattggccaggcgaggtggcgcgtgcctctagtcccacctacgcgggaggctgaggcaggagaatggcatgaacccaggaggcagagcttgcagtgagccgagatcatgccactacactccagcctgggcgacagcgagactccgtctcaaaaaaaaaaaaaaaaaaaaagaatgtaagctccatgaagacaggga

SEQ ID NO: 708412 - DNA, 1882 bp, Homo sapiens
tgagagagcctgcatccctccccacccccctgacccctggcaattaatgccacaggggatcatgagcccagggctgccagcttttccagtgtattcagagaagtgagaaacctgaattttatcagaaaaactctcaaacttacccctaaggatggcatttggccctcaggatgccagttttgtcttctttggtttaagcatcaaagcttacatcctttaaatccctctgaggcttagcctgttaaatcttagtttagacacgatcataaaatgttcttatagctaagcagatgcaaagtcacaaattagaacagggaaacaaaactggcaggctcaggtcccctgccgacagcagtaggtgaagtaagttcaactacaaacgcagagctgtgtgagatcatttggtgtaaggataccggcatttatacagctccatgcccattttattacttgttttttttttttttttttttttgtttgttttttgagatggagtctcgctctgtggcccaggctggagcgcagtggcacgatctcagctcactgcaacctccgccttccgggttcaagcsattctcttgcctcaacctcccgagtagctgggattacaggtgccagccaccacagccagctgatttttgtatttttagtagagacgggatttcactctgtaggccaggctggtctcaagctcctgacctcaagtgatccacccgcctcagcctcacaaagtgctgggattataggcatgagctaccatgcctggccccattttattactttactagatcaatatctctagtacttatagagatcaaacaagttaatgtctatgaaaggacttgaaagctgtgaagaaaacaggccaacctagctttctttgaatataagcagaatacaaacatttagtgaaacaaatagaaatggattaatagacatgttatacatatattctgcacattctatttaaaaatgcatttctgaaatatatttatttaatatagtgggttttttcattgagtcattgtttttaatagcacagaatacagaaataatagattgggacaacagttttgtaagactagaggttaatattcctcttgtgaagaggtagcctataaattaataagaaaaggtaaataaccaaagagaaaagcaggcagagtacatgacaatcacaaagcagaaaaaactaatggccaatgaacatatagaaacacactcttctcacactagagatcagagaaattcatattaaaacaaaattatgcagtgtggtgaattcctatagtttgatgttgcctcagcatccattctgaagataagcttaactttctcataccagaagcagggtttagtcaacccctacttaacacagtttccagttctccgcctcctcccagttcctcaatgtggttaatccagatatctgccttaaacaagtgctcaaaagtgatgatcttaacaacaacaacaacaaaatggatctaagttaacttcatttttgtatgcttatccttttccatgttctctcctccacaagaatataagctccgggccgggcgcagtggctcacgcctgtaatcccagtactttgggaggccaaggcaggcggatcacgaggtcaggagattgagaccatcctggctaacacgatgaaaccccgtctctactaaaaatacaaaaaattggccaggcgaggtggcgcgtgcctctagtcccacctacgcgggaggctgaggcaggagaatggcatgaacccaggaggcagagcttgcagtgagccgagatcatgccactacactccagcctgggcgacagcgagactccgtctcaaaaaaaaaaaaaaaaaaaaagaatgtaagctccatgaagacaggga

SEQ ID NO: 708413 - DNA, 576 bp, Homo sapiens
gtgtccccacccaaatctcatcttgaattgcagctcccataattcccatgtgttgtgggagggatgcagtgggagatagttgaatcgtggggggcagtttcccccatgattgttcttgtggtagtgagtaagtctcacaagatctgatggttttataaggggtttcctcttttgcttggctctcattcttggctctcattctgtttttcctgccaccatgtaagatgtgccttttgccctctgccaggattgtgaggcctccccagtcacgtggaactgtgagtccattwaacttctttttctttataaattacccagtcttgggtatgtctttatcagcagtgtgaaaacggactaatacaccttgggagcttaaaggtgagcaggaaagctgaaaaggtgtcccttaggaagggcactaggaaaataatgaggtaaacaaaaggataagtaggtagccaggaggcctagctgaaggtagatgacaggacccaatggtgggtttgtcttaagagagttccgcaacactccccaccaatactctgcctagggaagtacaaacggcaaaaaaggcag

SEQ ID NO: 708414 - DNA, 665 bp, Homo sapiens
  misc_feature 461, 481, 489, 537, 539, 553, 554, 555, 556, 557, 558, 559,560: n = A,T,C or G
gggactgcygcccacattcagtggccaagcccaaggatgctgaatgtactagagggcgtaagagagtctggcacaatgaagaaacataccagcaaaagtgcttccaagcactcactgcccccaagttacctgccagcagctgcttgaccccagcagccctccccagagctcacctcctgcactggagcaaagggcaccaatgctcagaatgggagtcagtcccacgtgcccaatcctgactgcggtgcccatgacctggctgcttccttgccctggggtccatgggccattttaaatctccctccctgaggctaggtccagggagttgctgtcccactccccaaaagtcataattaataagagcatcgttccgtgggctagattgcaagcctcttgagggcagagcgagatcctgtctcaagaaaaagaaaggcatggcaagatttcacattgaatgattntcctttcttcttcttctttntttctttntcttttttttttttttttttttttggagacagagttctttttatagcncntgggggaggagagnnnnnnnncccccgttttagctcactgggaaatttctccttccagattcaatcaattctcctgtgtcagcctcctgagtagctgggcttacaggtgtgtgccacgaaacctgg

SEQ ID NO: 708415 - DNA, 639 bp, Homo sapiens
tgaattatcttatttgcatgaagcctacactcctgagtaaaggctttcccatacttgttacattcataggaatcctcaccagtgtgaatttctgatgctgaattaggacagagttctgagcaaaaattattccacattcatcactgtggtattttctggatattttcctagtctttcctcatacatttggacatctacacaaagttctcaggaatactgccatcaaatctgacagtgttttcctgttggcatgttatttcatttcttttgtttgggaagaacattctcattcttcattttgatcaaatcatctgaaagaagagactgaaaatgtcagcataattcactcattcacatatactttactcaatcacttgctcacgaaataagcactttttagaactacatgccagaagagataacagaaggaacttatgtgtatatccactggtggcataaccatataaaagartaattatttcatatgtccttaaagcagtaaatttttttttttgtatagcccaagtgagatatatcttaagaacaaaaagaacagaaaacatgtgtatacacacacacgccaccattaagctatttacagtaatcatatttgtgggtaatgcgatgttttttattatg

SEQ ID NO: 708416 - DNA, 621 bp, Homo sapiens
ccagggaggcaagaattacagaggtctataaatgcctgggatgaggatttaagtgctagaataaggatgggaataaaaggggagaacaggagtgctggggaggagagagacctaagaatgggaatggggccattggaaaggtacacactgggagtggagggagtgggtagaagacggtgaggatccaggactatgctggggatgtatgtggttggatccaggactatgctggggatgtatgtggtcgttctaagttctaagaattgtaaggcagggccatgcacctaggattagatactaaaacggttgaacagaaagtgacagtaaatggagcatgtggaaggatttctgaaatacctttgagaaacagcgactgggaggctcaggctggcagatcacttgaggtcaggagttcaaaaccagcctggccaacatggtgaarccccatctctattaaaaatacaaaaattagccgggcatggtggtgggtgcctataatcccagctactcaggaggctgaggcaggagaatcacttgaacatgagaggtagaggatgcagtgagccaagactgcaccactgcactccagcctgggcgacagagtgagactccatctcaaaa

SEQ ID NO: 708417 - DNA, 1026 bp, Homo sapiens
tccccatttaccaaatgaggaaactgaggctgtcttagtccatttgtactatgataataagatgccttagactcagtaatttataaacaacagaaatttatttctctgggttctggaggctggagagtctaaaatcaaggctctggcaagttcagtgtctggcgaaggttgctttttgcttccaaaatggcaccttgttttgccattctccagaagggacaaatgctgtgtcctcacaaggcagaagagacagagggcaaaaggcctgaatgttgtgtgaagcttctcttataatggccttaatccccctcacaaaggaggaaccctcaggacctaatcacctcccaaaggtcccacttcttttctattattattattgtgattattattatactttaagttctgggatacatttgcagaacgtgcaggttcattacacaggtatacacgttaaaggccccacttcttaatactagtacattggaaattaactttcaacatgaattctggagaggacacaaacattcaaaccatagcagaggccaaggtgaattcaaggtcacaaaactcctaagaaagccagtaagtaccgaacccaagcttctgtctctaagattattctacccctcatttttcacaatgcctctgtcccatcaygcagagggcaagcaggatggagcttatttcctgtccccagccagtagtagttgttagatggtgccacgctggcaccatctgcaaaaaatagaaacgggttagcagaatgtctcctagtctctgttttctccagagacttttcttggttcagcatactgagactttcaggaagaataatgggttttcaattaaaaaaaataaataaataaagacaagcattgaatggtctatcaattagagaatcaagggagtaatttattccaaagactggccagtgggggtgggtaggaaacttctagactgaggaaggccagtaagttagatcacttcagtctgctggtggtggcttcccggaatactttgttcagg

SEQ ID NO: 708418 - DNA, 1026 bp, Homo sapiens
tccccatttaccaaatgaggaaactgaggctgtcttagtccatttgtactatgataataagatgccttagactcagtaatttataaacaacagaaatttatttctctgggttctggaggctggagagtctaaaatcaaggctctggcaagttcagtgtctggcgaaggttgctttttgcttccaaaatggcaccttgttttgccattctccagaagggacaaatgctgtgtcctcacaaggcagaagagacagagggcaaaaggcctgaatgttgtgtgaagcttctcttataatggccttaatccccctcacaaaggaggaaccctcaggacctaatcacctcccaaaggtcccacttcttttctattattattattgtgattattattatactttaagttctgggatacatttgcagaacgtgcaggttcattacacaggtatacacgttaaaggccccacttcttaatactagtacattggaaattaactttcaacatgaattctggagaggacacaaacattcaaaccatagcagaggccaaggtgaattcaaggtcacaaaactcctaagaaagccagtaagtaccgaacccaagcttctgtctctaagattattctacccctcatttttcacaatgcctctgtcccatcacgcagagggcaagcaggatggagcttatttcctgtccccagccagtagtagttgttagatggtgccacgctggcaccatctgcaaaaaatagaaacgggttagcagaatgkctcctagtctctgttttctccagagacttttcttggttcagcatactgagactttcaggaagaataatgggttttcaattaaaaaaaataaataaataaagacaagcattgaatggtctatcaattagagaatcaagggagtaatttattccaaagactggccagtgggggtgggtaggaaacttctagactgaggaaggccagtaagttagatcacttcagtctgctggtggtggcttcccggaatactttgttcagg

SEQ ID NO: 708419 - DNA, 767 bp, Homo sapiens
ataactcattactgaataaataaatgagtgaatgagttgtgttccctcttgctcctatctaaatagaccaccacagctacccttcttagttccatctctcatcctgttttctcccagatagcacttatcacaatttgtatttacttatttttgttttttatttattttcttctttttttgtagagawgggttcttgttatgttgcccaggctgtcttgaactcctgggctcaagggatcctcttgccttggcctcccaaagtgctgggattacaggtgtgagctaccatgcccagcccagtttgtatctatgagtgtacttcattgtttattatctgtctctctgtctagattggataccctggcactagcatcatgcttttcacatagtgggtgctcagtaaatatttcttaactaaatgaattgactggtaagaaaatctatgaacctgataaaggggcacagtttgagatgtattcattgaaagtaaatgaactgaaaaataggaatatgtttgcttaagggaaagaaaaaaccaacctcagaacattatggtgagacaagtgtaggttttgagttagcatccccttctcctcaagcctctttctacccccagactcccctcaggtagcatcaggacccctctgacttcctcatggtgggccctgaccttgccaactgttaatcagggctgatggctgtcatgctccaagaaactgagatcccttttctaacaaggagccaaggtatcaataggctaactaaaa

SEQ ID NO: 708420 - DNA, 1420 bp, Homo sapiens
  misc_feature 966, 967, 968, 969, 970, 971, 972, 973, 974, 975, 976, 977,978, 979, 980, 981, 982, 983, 984, 985, 986, 987, 988, 989,990, 991, 992, 993, 994, 995, 996, 997, 998, 999, 1000,1001, 1002, 1003, 1004, 1005, 1006, 1007, 1008, 1009, 1010: n = A,T,C or G
  misc_feature 1011, 1012, 1013, 1014, 1015, 1016, 1017, 1018, 1019, 1020,1021, 1022, 1023, 1024, 1025, 1026, 1027, 1028, 1029, 1030,1031, 1032, 1033, 1034, 1035, 1036, 1037, 1038, 1039, 1040,1041, 1042, 1043, 1044, 1045, 1046, 1047, 1048, 1049: n = A,T,C or G
  misc_feature 1050, 1051, 1052, 1053, 1054, 1055, 1056, 1057, 1058, 1059,1060, 1061, 1062, 1063, 1064, 1065: n = A,T,C or G
gactttagagtggttcataagacccctagatatttttgtaaaacttggcttccttcatgatattgcagtgtgtatccaatgtgaaatgaagaatgagtatgttctagtttgatgaaaaaaaaaacgccagacgtttttaggccctgacttgattcattttctgttatctccaagaattagtgcctatttgccatcagaacctaaattttgttaaatgtaagataacaaattaactttcataatttttagcttcatttttcaaggsaaagtcaccatcccaattaagtgaatgcacttaaagtcatcttttcctgatctcaatgacatgtgaataactggctatgtagactcccgccatccccatcccattgtgtataaactcgctcaccatccccagctttctaagtagaattctctgtattactaggggagagagggatgtgaaaagtccaaaggagacgaaattgctttacataataaaggaactgacagcccctggaagtgctgctaagtgaaatatgatgtcacttcactttatcatccccaagagactttcagggaaatcaacgtttcgcatcagtgctttggaggaggagttggttttgctttgagtttttatgagaccatacggtgacactggccttcaagccaaatgccagagtggtcacttaaatgttgaatacccctgcagttggtaattcctgagccccttcctctcttaggtgagcctgcaaggaaaatggggcagacattatcaccctgttttgtgaaggtgaaactgaggccccgcggggttaagcaggctgcctcccttgtttatggactgtaaacacaaatgccttcgtagccagggagagagctctcaggctgagtgatgcaaccatggtgaacaagaaaagatatgccccatccaaagggtgttgtcacacagaaagtgtgtccagtgcagcccactcttctgatttnnnnnnnnnnnnnnnnnnnnnnnnnnnnnnnnnnnnnnnnnnnnnnnnnnnnnnnnnnnnnnnnnnnnnnnnnnnnnnnnnnnnnnnnnnnnnnnnnnnnaaagtgtgcccagcgcagcccactctcctgaatttccaaaagaggccaggactctggatttttagatcatactgccccatgactctttgttctgttttgtttttaacataaaaaagagttaccaagtaagccaagtctgtggtctatatacttccatgggatgccactttgcaatttctggatggggaaaatattaaaacttaggttaagcatgcagaggttcctgacacgttggaaaataaatttgctttgtcctaatatgagtgatctctaccttgtcctctacatgttagtaaattctgggtcaccatgtatttatatatccataaatgcatgcatatctccatagagagag

SEQ ID NO: 708421 - DNA, 1420 bp, Homo sapiens
  misc_feature 966, 967, 968, 969, 970, 971, 972, 973, 974, 975, 976, 977,978, 979, 980, 981, 982, 983, 984, 985, 986, 987, 988, 989,990, 991, 992, 993, 994, 995, 996, 997, 998, 999, 1000,1001, 1002, 1003, 1004, 1005, 1006, 1007, 1008, 1009, 1010: n = A,T,C or G
  misc_feature 1011, 1012, 1013, 1014, 1015, 1016, 1017, 1018, 1019, 1020,1021, 1022, 1023, 1024, 1025, 1026, 1027, 1028, 1029, 1030,1031, 1032, 1033, 1034, 1035, 1036, 1037, 1038, 1039, 1040,1041, 1042, 1043, 1044, 1045, 1046, 1047, 1048, 1049: n = A,T,C or G
  misc_feature 1050, 1051, 1052, 1053, 1054, 1055, 1056, 1057, 1058, 1059,1060, 1061, 1062, 1063, 1064, 1065: n = A,T,C or G
gactttagagtggttcataagacccctagatatttttgtaaaacttggcttccttcatgatattgcagtgtgtatccaatgtgaaatgaagaatgagtatgttctagtttgatgaaaaaaaaaacgccagacgtttttaggccctgacttgattcattttctgttatctccaagaattagtgcctatttgccatcagaacctaaattttgttaaatgtaagataacaaattaactttcataatttttagcttcatttttcaagggaaagtcaccatcccaattaagtgaatgcacttaaagtcatcttttcctgatctcaatgacatgtgaataactggctatgtagactcccgccatccccatcccattgtgtataaactcgctcmccatccccagctttctaagtagaattctctgtattactaggggagagagggatgtgaaaagtccaaaggagacgaaattgctttacataataaaggaactgacagcccctggaagtgctgctaagtgaaatatgatgtcacttcactttatcatccccaagagactttcagggaaatcaacgtttcgcatcagtgctttggaggaggagttggttttgctttgagtttttatgagaccatacggtgacactggccttcaagccaaatgccagagtggtcacttaaatgttgaatacccctgcagttggtaattcctgagccccttcctctcttaggtgagcctgcaaggaaaatggggcagacattatcaccctgttttgtgaaggtgaaactgaggccccgcggggttaagcaggctgcctcccttgtttatggactgtaaacacaaatgccttcgtagccagggagagagctctcaggctgagtgatgcaaccatggtgaacaagaaaagatatgccccatccaaagggtgttgtcacacagaaagtgtgtccagtgcagcccactcttctgatttnnnnnnnnnnnnnnnnnnnnnnnnnnnnnnnnnnnnnnnnnnnnnnnnnnnnnnnnnnnnnnnnnnnnnnnnnnnnnnnnnnnnnnnnnnnnnnnnnnnnaaagtgtgcccagcgcagcccactctcctgaatttccaaaagaggccaggactctggatttttagatcatactgccccatgactctttgttctgttttgtttttaacataaaaaagagttaccaagtaagccaagtctgtggtctatatacttccatgggatgccactttgcaatttctggatggggaaaatattaaaacttaggttaagcatgcagaggttcctgacacgttggaaaataaatttgctttgtcctaatatgagtgatctctaccttgtcctctacatgttagtaaattctgggtcaccatgtatttatatatccataaatgcatgcatatctccatagagagag

SEQ ID NO: 708422 - DNA, 579 bp, Homo sapiens
attcacagggctgttggtgggaaccaaatgaaagcttggatgcaaacacgcctggtggggtgtctgacagtccaggttaaataaatctcaccttgattttatttcatttgctggattttgtgttcagttccacccaaggacccacagagaacataagagaaggagaaaatgtattcttgtcctgaagggctttacgcaagacagagaagtaggaagctgttcgtttagaggacaagctacaattaggtgttgaagcagaagtcccctgggagttcagagagcaccttgtggactgcagcagtctggagggcctctgggaggaggtgtttgaaagagccatccacctcattatctgccacatgaagggcctcgtggatcacgttcccactaggcaagactggaccggcaatgtgggtgaggacatgaaaaygctgcctcaaggtttgaaacccactgcctctgaggggagaaagaggctctcagcacttctcttggatcaaaggatcagggatggcagcggaaccaactggagtgctggcagcgggcgaggctgagtgagtgatgttcaaaaccgcacac

SEQ ID NO: 708423 - DNA, 666 bp, Homo sapiens
ctccactccaatgtcagcttccttagggcagccactgttgtcttgttcatggctatatctgcagagccctgtgcagtgtatggtacatagaaggtgctcagtaagtatttgttgagagctgtaactctaaccccactgcctcttcctaacagcccactgagggtctcctctctctcacctacctatccactcttgtcctagggacaggctgggaggccgtagggacaagatgtcacctaccctgatgatttgtgatatgtgtcctggacattggtgtatccattccggtccttgggagtggctgattaaaggcatcatcttcctgcttcctccttttcctcctctttctaggctgccaggatcttattagccctgtttacacrgccgggatgtcgagcgattaatttttaatggcttggtttattgcatgtttgaatggtttattgagtaattctcacatttaagtgattaattctccagagttcagaacgactggttagttttacattaatgggggtttctgaatgccaagagacaatcaatcaagccttcctgccagggagagtaatgttaagatacctcaaggtacaatgaggttaagaagaggcataattaaaaccctgtcctcccctcatgcaaatttgatgtctttctctgtttctcctt

SEQ ID NO: 708424 - DNA, 643 bp, Homo sapiens
tctatttgaaaaagaggaccttggctgctattttgagaaatggctggtggggggacaattttctgagagtagtaatggagggagccccctcccactgaggggagacgatgggcttgtgggggcttgaagaggtgagtaagtggctgggaccacagaagggttgactgttaggatctttctgcttctatgggattagaaccttggggaggctgccagagctgaggaatggggggcaggggggctttgtaaagattcagggggtgaggagcagggggagaaaaccagcccagggactctggcaaaccctaaataccagaattccgggtttgtcttgacgtttgtaaggtttttatttaaaagaaaaaataaggcttttcctgccaggcagtgagcatcttttccctttttttcttttttcttttcttttcttttcttccttcctttcctttttccttcgttctggcgtcttttttcttgtctgtcttatctttctggtctgtcttttcyagtcttcctccactgtttggagacagtggtgaatacgcaacacttgtttcttttctaatctgttcttccttctaaagaggcggttcaggctgcacatgtgacccgtggccatgttgctcctgcagccagtgtccca

SEQ ID NO: 708425 - DNA, 643 bp, Homo sapiens
cttcttcttctttttttttttttttttttttttttgagatgaagtctcgctctgtgtccaggctggagtgcagtggtgtgatctcagctcactgcaacgtgagcattctttaaccttggcaaaataaacttctaaattgattgaaacttgtctcagatactttttggtttacaatatcaacaacttaggagtcatctttatgcctctcattgtgatatccaacgcaccaccagatcctattgatcttatatatgagatatcataaatacatatacttctcttctttatcactcccaccctattctaaattcctaccatttctcacctgaaccctttattagttaggaaagactagtccattcctctaatctcttttctcctttacagttagagagatcttttttttcctaaaactttgaccwttttttctctttaaacttaactgacagatagtaataatatatatttatgggatataatgtgatgccctgatatatgtataagtcgtggaatgattaaatcaagctaattaatatatctattatggcctatacatttttaattataagaacatttcaaaactactcttttagtaattttgaaatatgtaattcatcattaggtcacttaaaatattatttta

SEQ ID NO: 708426 - DNA, 465 bp, Homo sapiens
ttaaagtaaaatcactgtttcactgtttcattttttctttctctttctttccatcttcaatgaaatattttgcctcaaatgtatgataaaaactcagtttcatttccagaacatattttatgttatcaaaagaaaaaaaytgtgatacaagcaaatgatcgaaaataatggaaaacatgtattacagagcagttggtggtagatggtgtagcaatatttttaagaccctgaactgagttgtcaagaaagatttctttaagtatttgacatataagccaagacctaaaggaggccgaaagctaagtaaagaacatacaaggaatcagaaacatttagttcaaaacccacacgtcaggaatcatcataacatcatcaaggaacaaaaagaaagctgtggtgaggaagcctattgaaggagagaaagtacgatgtaagttggggtcagagagataagcattataaggg

SEQ ID NO: 708427 - DNA, 1754 bp, Homo sapiens
atagaatctaacccaatttgagatttgcaattttctgtaaaacagatttatttcatttcaataacacaagtaaaaagcacgtttctgtttttccagttgcttcaatacttattttagtacaataaatataatcttttttgatgtttcaggctattaaatactcaaaagggggctcaaatttcctctaccctagtgcagaacagttttaatttcattaacctccttttcttttatacctctcataaatacatagcagtcttaatatttttgaaaaattattttcctccaatttctttaggttctaaccaagagtatactttatcagcttctgatagtatcgaagatacttactgaagcttctttttagtaataaaataataatactaaataatatttctgctttcatgctaagttatatatatatattattaaacctctcaaaagttctatgatatatattgtgttaagtagttttcagataagcaatcagatattcagaacagtgaagtaacttggctgaatttattacttattaaattcaaactatctacaaaggactctacaaaagctatacgactctaaaattgattaaccagcacttaaaataggtaacagaatgtagcagtgtttccctctgtagaaaccacttaaagatgaccacttgctaccagatgaacaaatggctggagcatccattacactgaactgatgactgagaaaacacaaccaccaagctccccgaacacctgtcgtgtaatagtgaagtttgagagaacgtaggcaaatttgcctttgagatcagtttcattccttttcaaccacaaaacacaatattgtagctgaactaaaataatttgaatgactgattcaaaaatattttggaagatttctggaagatttattagtagcaaataaatactgcaataaatggtaaaaagaaagtaaatgcatatgtattaagaggatatacmgatactttgcctgctctgagggaatgaaaaaagcctcacttaaggaaataatgtttaaccaaatttatttatttatttatttatttatttatttatttatttatttatttttgagatggagtctccctctgtcccccaggctggaatgcagtggtgcgagcgcggctcactgcaagctccgcctcccaggttcatgccattctcctgcctcagcctcctgagtagctgggactacaggtgcctgccaccacacccggctattttttattttttttttgtatttttagtagagacggggtttcactgtgttagccaggatggtctcgatctcctgaccttgtgatccgcccacctccgcctcccaaagtgctgggattacagacgtgagccaccgcgcccggcctgtttaaccaaatattttaaagataattaagaaaagttgtttgaaaggtgaagaaagtatgcagaatttcgtaaaaataaaattggagaggtaggaagaaacggaaatgtttacacaaatatattaagaaagaaagaaatctaaagattaaggaaggaaaaatattgctgaggttgctgatagggtatgaggtaattgggcactcagcaaagatatggaaaggaaatccatcaattataataggaaaaagcaggaagcaataagtgaacataaattaacatttggaaaataagttgcaaaatttaaggaagttttcatgtattggcttcccatatctctgtgtattagaaaatgagataaatttgaaatagtaattacaa

SEQ ID NO: 708428 - DNA, 626 bp, Homo sapiens
tttattggccccaggagcaggtcttgagarggggaggccctgggccaaagagcctgttgtgccagaccaaacaggctgagcctgatgccatactgcacggattgggagggtgaacctgcctcagcttcccaagtagctgggattacaggcgcaggccaccacacctagctaactttttattttgaaataacttcagacttacagaaaagtttccacgcataataaaaagaacttgcagactgggcatggtggcttactcctgtaatcccaacacttagggaggccaaggcaggaagatcacttgaggccaggaatttgagaccagtgtgggcaacatagggagacctcatttctacaaaaaataaaatcagctgagtatggtgacgtgcaactgtggaccaagctactcaggagactgaggtgggaggatctcttgtgcactcttcaaggctatagttagctatgattgcgccactgcactctagcctggggtgacacaagaagaccctgtttcagaaaaaaaaaaaaagttcatagacccttcatccagatttccaaattaacactttgctgcatctgctttatcccctttctgtgatatgttttttctcccctaagccaataag

SEQ ID NO: 708429 - DNA, 585 bp, Homo sapiens
tgtatttactgtgatatttgtactagcaatagttatacacctaaagggtgtttgatttcaatctttgggaaaaatcagatttttttcttcttcctcattttttaaaaattattttagatttcaagaagacttagggaaattgaacacatctcttagatgatcagagttgtgttactagactagactgaagaggttgcttatttagggacgggtgttgttactagaaaaaacttccttttctgcagttcatcttggtcacagctttctccagtctactcactgtgctccacctgaaaaacaagccagtgtattttaataccgattcttaattcacttatttccaatgattagctgtccgagtgacttacaacaggcagtgtataatcttttaaatactgttagtatgatgaggagagtttagaaccgtgttgttwtaaaacataaggaccctggcgttttaatttgctccttagcttgttacagacattaccttgcctaaagcaaacagaatgttaggagttgtaattgccttttaatattattgaatatttaatagtcttttcaaatttcatttctacaaatgca

SEQ ID NO: 708430 - DNA, 568 bp, Homo sapiens
catacgggtgtccgtatgttgacttatgttttctttcttcaactatgtactatgtttcccactcatttcttaatgcagaattaatttttttccccacaggaaggaaaagctgatgcgatgctctcagtgccgcgtcgccaaatactgtagtgctaagtgtcaggtaagacttttcagccatatataagtgaagctttcaaattctttactcttaaatttgtccttcactatacctgttggcctgtgtctacttctttacagcctttaatttacttttacttgttattcacctgctgagtcacacaggttgccagggacattaaaatgttaaaactgatgttaaatatatatggttaaaaattgggtgtgtgtgtgtatatgtctactatgtgaaagtaaatgtctattyctccccatcttattgccccccgacttcaattctcatttccacaggcaatcactgttaagtttctcatgtgtctttgcagcatttgcttgtgcagacatatttgtgtatctacatcctatgtttaaaaaaaaaaagatatagtttaatctggcatgaatt

SEQ ID NO: 708431 - DNA, 735 bp, Homo sapiens
gtctaaccttgaaattggcctgtaacttcaaggcttaactttcgagtgtgagagtttcagacacatcaacacattttcaaggccataaacactgggtaatttttcatgctcaagtgtctggagtttcgttttcctaatatcaataagcaatatcacaactagcaaggcagaaggaataaaagcacctcagcctctcacaatgaactgaaaaaccctatattctttccttttttttccttcacatcccatttcttttaccttgcccagctggtggaaaaaaatctagcttccttctgaactaaacacacataattaaatacacacaatcttaatttaccacactgatgtcttcatcatcagctaccctagcaccatttcaaagcagcagaaagaaatataataatttataagccagctcctgaggttatatatttattttaaaacatgccagtttcaacaatataaaatgctttcccatgtttaaaaaacaagactatttgttaccttgtgatgggacaattaaacaagcttttaagcgtgataaaaaaaaaaatacataggttaataaagtrgtcttgataaaaacaaagcaaagatttgaaaacattggtatttccataacctacagaatactgatgactagatggtcaagacaagcatcagttacaaattatgtatacagcttgctaacaaattagggaaacgttcccctctggtttctttcccgactacttg

SEQ ID NO: 708432 - DNA, 649 bp, Homo sapiens
ttaaacccgaagtaattaacactaatccacagactgaagattcaaattgaattaggctgttctaaaggaatcatgctgtgggcacattcattttcaattttcttgaaaagaaagactggaagttccactagaaatttaaaatatatattttcccatagcagtatactttacttctttaggatactaatgaattcttccatatccttagacataaacaaacagagtgcctgccctaaaccctgcacctcagggacttgatctctggagcgttgacatgtcaacctcaaaaatttctaagtctggccgggagcggtggctcacacctgtaatctcagcactttgggaggccgaggcagatggatcacaaggtcaggagttcaagaccagcccggccaatatggtraaaccccgtctctactaaaaatacaaaaattagccaagcgtggtggtgtgtgcctgtaatcccagctactcgggaggctgaggcaggagaatcacgtgaacccgggaggcagacgttgcagtgagccaagatcgcgccattgcgctccagcctgggcaacaagaatgaaactctatctcaaaaaaaaaaaaaaagtttctaagtccactttcagtggctgagaccaactagggccatcagtgctcc

SEQ ID NO: 708433 - DNA, 649 bp, Homo sapiens
ttaaacccgaagtaattaacactaatccacagactgaagattcaaattgaattaggctgttctaaaggaatcatgctgtgggcacattcattttcaattttcttgaaaagaaagactggaagttccactagaaatttaaaatatatattttcccatagcagtatactttacttctttaggatactaatgaattcttccatatccttagacataaacaaacagagtgcctgccctaaaccctgcacctcagggacttgatctctggagcgttgacatgtcaacctcaaaaatttctaagtctggccgggagcggtggctcacacctgtaatctcagcactttgggaggccgaggcagatggatcacaaggtcaggagttcaagaccagcccggccaatatggtgaaaccccgtctctactaaaaatacaaaaattagccaagygtggtggtgtgtgcctgtaatcccagctactcgggaggctgaggcaggagaatcacgtgaacccgggaggcagacgttgcagtgagccaagatcgcgccattgcgctccagcctgggcaacaagaatgaaactctatctcaaaaaaaaaaaaaaagtttctaagtccactttcagtggctgagaccaactagggccatcagtgctcc

SEQ ID NO: 708434 - DNA, 1771 bp, Homo sapiens
taaagagaaaattgttaggaagtttttcatccttgaggaagttaaactttcctgatgctgcattttgtatatgccttttcccacagaagaactcatcagaagcaatgatcttgttattccaacccaaattcctaagtggattttatagggacattgataaatacccagcttatgatatataatactcttcatattatatctggaacaactgtttcttccttttttcttttttcatcaggcttatgtgaactagtttcaaatttaatggctattgatgtcaattgtattaaaatacactctgaattttgaaaaactgactttaaaagaactaccagagcctaactaatttgtaagttttagacaatttaattaataatatggttgattatttggttattaaattgaaatgttgaggttagtaaagcacaacttttctaaaaataatgacatacaatttagagatgagcaaatgcaattgcatattctaaaaagaggatttcaaggcaccagctgcttacccgcaccactccaataggaatacactaatatttgactatcttaagtgggctagtgatcagcttattgaaaaattctaattaattctaagttttcatttcttattcatacaatcatagcaaataaactctaactgcagttattaacatagattatgaaaaagcatttaaaagaatatatctaaatctcataaaacacatggcttattattacatgcaatcaattatatttaaaataaatacttgtctcctacaagcaactatttaaacaaaacctgctatgactaagttggccaacagggtagttattcatcctgccttgcaacatccatgttacaaaaagtctccactgtggttttatttaaagatcacctttcaaaagcctatcacaaaataaaatagtttaaggtaactttggcttcagtttttgttttatatttgtgttttgtatataatgctcatgttcttcagtgatagaattgtaattttcttatttgacatgcactatctcacctgctgcttcaggtaattacatagtagaactcctgaaatcccttgaccccttattaggatgtacattctcttccacccatcagtcaccaagtgtttgctacctgtggagtcttgatgacatagctcagttctgcatgtcaaatagtcactttagtccaattaaattctcattgcatggcattttggattgctgatgaaagctagaagaagtgatgcttctactctggggtttaatagtgtggctttttgacacaaagtaaagataagtattccaaagttgtgctgcatggctattttctctcttaaaaaataatcatctgacagtgcaatattttcctgtctcaaacaccgtaataaataggaatttgaccaccgtggttaatatagtggctccatggactgagatactgatgttttattattgacttctcaccaggaattagacctkccaggctatttcactgattaaaatcttgattaatcacctgttaacgttgtcagattttactcactatgacaaggggcactatccatgaagaataggtgaacaaaatgctaaagaaaatgccatttatagccaatcagatttttatctacctcccattccaagtattaaattatttttcatccaatttttttgggaaaataattccataggcactatgaaagaaaaaaatgaccttttgtatttaaattcaatggatttacccaatcagttggtaattttacgttgtgatatcaag

SEQ ID NO: 708435 - DNA, 2205 bp, Homo sapiens
  misc_feature 2189: n = A,T,C or G
taggaacccacagcgtgggtcagggcctcccacattaaccgcacccactacttactatgaaccaaccagcactgtgctagcccttcgtaagtactactgtctcatttgacatgagacctgtaacaaccctatgaggtaagaatgatgatcccccttttacagaaggggaaactgaggcacggggtgtgaaataatttgctcaaggacacctggctgagctgggatttgcagcaggcagtgagactctactctgttcctcaccatcatgctacactgccttctgaagttctgtcaggattatggttctctacagtcctgggatggcatttcccaaactgagttccttgtcttcccacaactgaatgtccaatcaggatggagggacaagaaggaacccacacccactccctcagcagtcctgccgggcatctgctagctccccggggtcccgcggacacaccttcactccctgctcttgtcacaagtcagtacccacagttctgagactctgcccctgtggctgggtgttccccactagagtcccagaagtccacccccactcccccaccagcccagccctgtcccctggccgcaccgaagttgttggtggggtagcgcttgcggagccgctccgtgagccgagacaccttgctgcgcagcacctcattcttgctcaggaacccgttgtcctgcagggccagctcatcctctgctgggcacggggcgccctcatcatcctcctgtgggaacagctccttccagtcctgcccacctcttgcaaggctgcaggacccgtgtgcagaggcatcctgcgcggcagcccccacgaggtgtggcagcagccggttcagccaccctccccagcccagcccctgcccacccaccaaggcttccacttaccagcaccaccaagtgggtctcctgcctcccaaggtgcggggaagaggagagaaaacagaaagaaaaagatagcaagaagaaagaagctacctggaggggcccccaagcagaaggaagcatggaagcgctgctctgagctctgcgcacttcccaaatggtgacattgacagacgccccccacaagaggatcccagcatcaaacagccttggagaaagctaggtactacagtttctcaaactgggtgaaaataatttagtaggtctttatttgaatagaacagaaaaggaaagaaaatatcccttacaacgtattttccggaaacttttgtttcacttaagttttacatattttatagacctaagtgtgacctgggtcaagatgcaaaatgtgttccttactatgggtcatgaacaaaaatgcttgaaaacccctgctctacatattccctccaccaagattcacggtctacaatcatatatcaaagttttggagcaatcttttagccatcagaaagtcaaatgcctgcatggcctgggctgatgtatgattgaggtgagttggggtaaatcacaggcctggtggaaatccacgaggtgtttttcttatatctcaatttcccactttacaaagagaaataaataaagagaaatgatatcctactctaagaaaaacaaaaacgcaaatgtgacaaatggcaactsccacttgacctcagtgacaaaatacagcagggggtgttgaggaccacctgtagccacagcatgtgacctgcgtaaaggggacagcagctccttagctacacctactgctgcagactcaggactaccagagaaactggaaacctgcagttctaataaaaatctctccatatttaaacattggctcaaaaaattattttgaaactttgcatgccaaataaaacacttctgcaaactaccaatttgaattaccatcctaaaatcaagaaagctgtttaacttcctctgacctagcacttggccatgcaactactttctccaacctcccctcccagccccgcaaagggacatcttacggaactcactctgcagaagagcggagacccagggcagtagcctcctcaaaagctgcctttcctatatcaaaggcaccaagcccacggtctccagcaaaggccagaaatcgtccagctcccctagcagggcattacccggagacttccagagccactcttgccctggcacccaggacagctggctcaaccagaaacaggatggggaggggttagtgcactctttcaccatgagtnctactacagcaagttt

SEQ ID NO: 708436 - DNA, 849 bp, Homo sapiens
gtacagcttgtgattaaaagtccagttttagaggaaccaaaatctgttcttcctttagagccaatctctgtttgcattgagttttctcattttcccctagccatgaatgaaatatcaggaaattccaaatgcatctcaatatcagaactgtcttctttgtgctaccctctgcatagcactcctcggtggctgccctttgcttctgtggtgagagccgcatgtggtggtgcagcccacaaggccgtcctggtcacgcctctgtcttgcctcactgcttatcttgcctcatctgcagcagcagttgcataccgtgcctcatcttatgatgtgtccattcatgtcagcccagctatctacttgttcatctcattgattctgcccattgttgaggacttagtctaagtgtcawagcacccaaagtcttctctgataccttgccacccatcacctctctgttagtcaggatgagttagtttttctcctctgttgttttataggaaattgtgtacctctgtcttagtacttattcattctgttgaaattaattgctcacctgtctctctgtgtccaccatttgactcccaagactgaatttcgtaaaaagggactatgccccaaagcaagcattgtgctttttaaaatagtaggcactccagatattatcaaatggataatccccctgcctagcccactctttgatggataggtgcttcaggacatgtttggtgaagtactgaaaatctaaggctaccctggtcaactctcacctcttttattatgcgtgtaagtcatttgtggtgtggagcatcaggcaaatttaaaataccaactggctccctttccctcaac

SEQ ID NO: 708437 - DNA, 1322 bp, Homo sapiens
tttttgtatttttagtagagacagaatttcaccatgttggccaggctgttctcgaagtcctgttctcaagtgatccactcacctcggcctcccaaagtgctgggattacaggcgtcagccaccgcacctggctaatgattattgttttaagttttactttttattcataaatgtattggtttcctattgttacctgtcaaagaatgatgaagttgatatatttttatgtccttcttctttccctcctttccctttgacagtgaatttttattaatttgtatatttaatatttatcttttcttttataaatatacttctattgtttcttggtcatttaaaataatctcgattgatcctcaccttgatctaaaaaattacttattacctcctatctttctgtccttccccttcccgactttcttcagctgtctcatttctaccttgtcaggatttctactatttacattctcttctagtatcgtaatcaacatatttgttttgtcttagtcacagaattagtttcagtatttgatatcactccttttacaattgwttatcaaacattttttggttgattgaagtgttttctagtactttcttcaagaaggctcatgggatccatagcctatgagttcttgctttttaaaatgtattttcttttcttttattcttaaacaacaattagagcataaaattcttgggttttattttcttttgatggctttgtaaaaaattgctccacttttatcaaagttgactgttttattgggaaatcagacattagccaggcattttttttacaggtgcatgtataacatcatcttttggctttttggcaaaaagattctttcattattatgacattcagtaactagtaactaaactaagatatgcctcagtagtgatcattctacatcattttcctatggataaagggcattctttcaatatttagattcaactttttttttttttttttttttttttacttctggaacactgtctttaattatatacttacatgtttttttctctgttccattatttttcttcctttattctaggactccagttataaatgttttgcatttctttgacctaaactccatatttaacattttcactataatccatttgaaaattggcatcattttctttttgcctactttcctcaaatcccggaccttatgtctgttcctgtgctgttagccacatctttattcattctttatcaatattagaaccttttaaaaagttaatatttgtgacctgctgtttggattttttttctatttattcctttttttagaaaaagaaaatgt

SEQ ID NO: 708438 - DNA, 983 bp, Homo sapiens
aaagttactccgtgaataaaggtgagattgcaattctgctggctcctggcacattgatgcttcaaaactctcactaagctctataatatcacatggctcagagatgctacatccagtattgctcttccaaacttatgcatgagcatgtagtaataagaatggcctatatggataataacaggaatcaaacgtactggctcatgcttagaaaagaggccattagaaatttgtgatgagtataaattagaaaggcaaagcaacataactcattgtagaggtccttgactcatatataaggagcaaagctattcattggtttaaacatttgtacttgaaaattactgtggtggacaggttaggaatatgaataagatatattccctatcttcaagtaactggataagaaaagtagccaacagctttaagacaakgtgcattatcttaatctcccaaaggaaatagtcaaaggaaagagaaaatgaggcagcttgagcaagaaggctgagaactgatgggaaaaatcatgagtttcaaatctggagatgactagtgaccttggagagagcaggtatagtaaaatgtttgccgtggaagttggccacaaagagctactacataactatatacacctaagaacatgcaccttgttagaaagaaggctcagtgtcctaaggagaaatgggcacttagataaaggattttttgtaaagcaaatttacttttgtgcagaagggtgtctcccatatggctggttgctactagagtacttagaacaaaggagagtagaagtttttatttttaacgtgacttttgcctttgtgtcttttccccagtggtggggttggactgtataatttaaactagacttgactggctaaacatttaagcttttttaaataaggtagacgtgtaatgggagagaggggaaaggaggaaggggtcatctgcagcaaactagagagtcagtctatttttaaataagg

SEQ ID NO: 708439 - DNA, 983 bp, Homo sapiens
aaagttactccgtgaataaaggtgagattgcaattctgctggctcctggcacattgatgcttcaaaactctcactaagctctataatatcacatggctcagagatgctacatccagtattgctcttccaaacttatgcatgagcatgtagtaataagaatggcctatatggataataacaggaatcaaacgtactggctcatgcttagaaaagaggccattagaaatttgtgatgagtataaattagaaaggcaaagcaacataactcattgtagaggtccttgactcatatataaggagcaaagctattcattggtttaaacatttgtacttgaaaattactgtggtggacaggttaggaatatgaataagatatattccctatcttcaagtaactggataagaaaagtagccaacagctttaagacaaggtgcattatcttaatctcccwaaggaaatagtcaaaggaaagagaaaatgaggcagcttgagcaagaaggctgagaactgatgggaaaaatcatgagtttcaaatctggagatgactagtgaccttggagagagcaggtatagtaaaatgtttgccgtggaagttggccacaaagagctactacataactatatacacctaagaacatgcaccttgttagaaagaaggctcagtgtcctaaggagaaatgggcacttagataaaggattttttgtaaagcaaatttacttttgtgcagaagggtgtctcccatatggctggttgctactagagtacttagaacaaaggagagtagaagtttttatttttaacgtgacttttgcctttgtgtcttttccccagtggtggggttggactgtataatttaaactagacttgactggctaaacatttaagcttttttaaataaggtagacgtgtaatgggagagaggggaaaggaggaaggggtcatctgcagcaaactagagagtcagtctatttttaaataagg

SEQ ID NO: 708440 - DNA, 458 bp, Homo sapiens
gtgtaatgcaatattatccagtaataaaaagaaataackactgatgctctcaacatggatgtgtgtcaaaaatgttatgcagagtaaatgaatacagactcaaaagagtacatgttgtatgactctgtatatataaaagtaaagaattatcaaaaggcctctatagtgacagcaaacaaattagtgattgtctgggactaggacaaaacgacatggggtaactttttagaaggacaaaaatattctatatctttattggctcgtggttacattgcgtgtacgtttgttaactcttgcggaacatacctgtaaagtgagtgtattttttatactgtatgtacataataatttcatcaaattgattttaaaaaacaaaaatagtatatcattttgcaactatcaacctgactaaaaatttaagatgtgaggacgtgaggacaggatgctttcatacacat

SEQ ID NO: 708441 - DNA, 684 bp, Homo sapiens
tgtttcaacagatgttgaaaaatagctacttccaattttataacaactaaaataagtggggaaaaaacttagtggaaataatcttattaccagggggtggaaaaaaaagaaagaaaaacagatactatacagatttggcactatattactctcaaatattcactgaacgtacaaaaggtgccggtgttgtgattaatacaaagcaatagatattctgacaaatcatcaccatctggctgtgaattatatttctgttgagcatctctgtattttgttacactttcaaccaaactatatgatgatatttgggaaactcctctttcccatgttttaaaatgtttttaaattatgtctgcttatcattggagcagaggacatttctaagaagagcatcaaagcttttgcatgccaaacagtatctttcaagaaagcctcttaaatggcactgtaataaataaaataataataataacaataacaataataaaatcttagagtacaaaatcaatgttgaaaaatgctcatgcataaccagcaacatggttctaaaagtcacatcactcagcctgtactaataagaaaaatcctyctgatgaactatttaattgagtttaacaaggctgtttatagctaatcttaaatgcactaataggaaattgaaggccgatactcaatgttagtttt

SEQ ID NO: 708442 - DNA, 2399 bp, Homo sapiens
tagaaaggtacctcttgtcatgaagctttgagaaattttactttttctgtgggcaaagccaattagcagaaatggcttatgatctatccctttcagctcttaattttttggctcttaaaattttccagtcctagtttcaaagcaatagacttgaataaagtttatctttcatatttaaattactccagtgcaatttttgctttgacattgttttcatgtttttattttggttaacttaaatatgtatttgaatgtttacctttgactaagaaaatggcagaagcaacagaaacctttttgaatagacgtattccttcttgtggccttctactgcttcgacttcccttccagtaaagttatttacacaagcatataatttaaccatggtaatagtactatttaagaattgattcttaattgattcgtaaccactgaaataaaattttgttttcattatggtagacgaggagttaacaacctaaatctatgtttcagctttgacatttgtaaggtttgatacacctaattaccttaataaaacttgagaatttaggggggattttgcattcattttagacatagagaagtgattttcatttaccaaatgtgtacaattgtaaaayataaagacaaaaattaaattcaagaaaatacagattaaaagcagtctgctaaaatatacaaatcccaaagtcaatcatttttgagtttcttcctttaaaattctttctcactgatagaagtaaggttggaaatttgctatattcaaaatagagttgtgatgcatctcccctttagactcctgaagtacatatgccttcaaaatgcatatgaaaagcaaaaggaatttatatagttttgtacactttggttaaaccatttttaaaaatggaatttcttcacctcacatgcctaaaatttaaaaagtagtctaacttctgtctatgcaattttcaggtcttctttctttcatattttatgcattatcaatattaaatgatttataagtagatgactgcaacagctactccctacatcctcttgggttgaagtacagaacagaaaaaacaaatgcttctctctgtgatctcatataggtcttgttgcatattagtggtgctgaatattcatgaccaggttgtatgacactccaaatggctagaaatgcctactcctaaatccaggtgttgataactagatgtgaagcatatcaactgtgagttgagcaggaatagctgccagcaggcatatttacccagaaaagaaagaactctctttaacaattagtaaataatgagcagttcttgcacattatgcaaaagctaatacatgagtcacctccctatgtattgacaattagttgagtaaaaatgtaagtcatactttatttgcctcatagtacctcacacacttgaaaaatactgaagtttataggtatgcacatgtatgtactgcatattaaggacaatgtttatatctatcacggtggcattattttgattaatagccaatcaagacattaagattacttttattttaaagttcaatttattgatataatttatttaatatcctaacataaaccacattaaaatagcaaaaaaagcatatctttcttttcaaaagggccaaaatatattttaagaaagcaaaaatttttgtactagaatacacaaaagaagacatgaatcagtaaaatacatgacatagttgtgtcttaaatgagtcaatgttgtaaagttgacattttttttcaccattgatttacaaaccccatcatttcaggtgaaatttccatgctttttttggtaacatttccataatttatctagaggagaattgttaagaaattaatctaatttgataacagagtaagaggaagaagtagattttggaatgactaatgacttgcacatctaggtgtcagattcaatattcctggaaaaattaaaactgtacataaatgacatatcaacagacacatagatcaatgggataaaatcaagagtgtacaaataggaatatctatagatgagattttaggttttacactaagaaagacgttttaaatatttggtaaaatgatgagtaatcaaacaaatatgtgaaaggaattgacagccaattaagacatccacatactcatagagctcttctgcatattgtacttagcaataatacatccttgaagggataacactccatttgccctaatgtgataattatgcacttagcaataatacatccttgaagggataacactccatttgccctaatgtgataattatgcattgtatttctttatcaaaatatctcatgcaccctgtaaatctaaacacctactatatacccataaaaattaaaaaataaattaaaacaaaataaatcaaataataaca

SEQ ID NO: 708443 - DNA, 1060 bp, Homo sapiens
tctaggacctggaggatggtggccctcttctcacagctccactaagcagtatcccagtggggactctgtgtaggggtttccaccccaaatttcccttccacactgccctagcagaggttctccatgagggctctgcccctgcagcacacctctgcttggacatccaggtgtttctatacatcctgtgaaatctaggtggaggttcccaatccttaattcctcacctctttgcatctgcaggcacaagacctcgtgtaagccatcaaggcttggsgattggaccctctgaagcaatggcctgagctgtacattggccccttttagccatggctggggcacagggcaccaagcagcaaggccctggccctggcccatgaaaccatttctttctcctaggtctcccagcttgtgatgggagggactgccgtgaagacctctgacatgccctggagacattttcccccgttgtcttgataattgacatttggctcctcgttacttatgcaaattggctaagttcacagaggtatttcatctcccctggcccaaagcactcccactagtgctgcatacactccaatccatccctttgggaaaacatcaattgtccccttatgaaattataatgggaaggcccatgtgtatgggaatgaaaataaccaatccaacttttctcaagggagttatattgtaatattgtgagggaatcatttatcaccttaaaaaaaaaaagccaagatttgataaagaattcctttcacagtgtgctccctgaagataaggtacctgggctgggcacggtggctcacacctgtaatcccagcactttgggaggccaaggtgggtggataacttgaggtcaggagttcgagaccaacctggccaacatggcgaaaccctgtctctactaaaaatacaaaaattagctgggtgtggtggcgcacgcctgtaatcccagctactcaggaggccgaggcacaagaatcgcttaaacctgggagacaaaggttgcagtgagccgaggttgcaccattgtactccagcctgggcaacagaatga

SEQ ID NO: 708444 - DNA, 1060 bp, Homo sapiens
tctaggacctggaggatggtggccctcttctcacagctccactaagcagtatcccagtggggactctgtgtaggggtttccaccccaaatttcccttccacactgccctagcagaggttctccatgagggctctgcccctgcagcacacctctgcttggacatccaggtgtttctatacatcctgtgaaatctaggtggaggttcccaatccttaattcctcacctctttgcatctgcaggcacaagacctcgtgtaagccatcaaggcttggggattggaccctctgaagcaatggcctgagctgtacattggccccttttagccatggctggggcacagggcaccaagcagcaaggccctggccctggcccatgaaaccatttctttctcctaggtctcccagcttgtgatgggagggactgccrtgaagacctctgacatgccctggagacattttcccccgttgtcttgataattgacatttggctcctcgttacttatgcaaattggctaagttcacagaggtatttcatctcccctggcccaaagcactcccactagtgctgcatacactccaatccatccctttgggaaaacatcaattgtccccttatgaaattataatgggaaggcccatgtgtatgggaatgaaaataaccaatccaacttttctcaagggagttatattgtaatattgtgagggaatcatttatcaccttaaaaaaaaaaagccaagatttgataaagaattcctttcacagtgtgctccctgaagataaggtacctgggctgggcacggtggctcacacctgtaatcccagcactttgggaggccaaggtgggtggataacttgaggtcaggagttcgagaccaacctggccaacatggcgaaaccctgtctctactaaaaatacaaaaattagctgggtgtggtggcgcacgcctgtaatcccagctactcaggaggccgaggcacaagaatcgcttaaacctgggagacaaaggttgcagtgagccgaggttgcaccattgtactccagcctgggcaacagaatga

SEQ ID NO: 708445 - DNA, 627 bp, Homo sapiens
ctgatttataataatggtaattgacaagtatgccatcgtaaaggtacaaaataatatatgcatgttcagggtacagcaaatataaaggctatactcccaattgagtgccagacactgtgtggtacacaaaagtaccacaagccatagtcctcatctttgaccaaaaagtagaaatgactagcaaaaactgctacaagatgaaattagagtcagggatagatatcaacaagaggtatgtctaagataatcgaactgaatgtcaagttttattcttgtcaaaataggttttcgtgtactaaaaaaaaaaagacaacacgaattgayagcagcatatttcctaagatttagtatctccaccaatttagagctcaacaggaataaacattgaatacagctgcaaaaatggtgaaatcaatctctgactgatttaacagaagtaaatggtctacagccataccaccctgaatgcacctgatctcatctgatctcagaagttaagcagggtcgggcctggttagtacttggatgggagaagtaaatgaaagcacgagggtaatgatggctctattagtcagcttatgtgaggagtactgtgttcaattctagactttaaacatgacaaacagg

SEQ ID NO: 708446 - DNA, 631 bp, Homo sapiens
atacataagataacattttaacccatgaaatcagtttatcacagtgttatttgaaatagcaaaatcctaaagaaacaagcttaatgtctaaattggagaataattaacataaactaaccttactgcagaaaaacgctcaatgaacaagtataaagactttctttaaaaaacctaaaagttgccgagattataaggagtaactaggcccaaactctaaccctgtgacactgagctttggtttgatcagctcatggggtagcaggccagaagcaaatcccagggttagcccacagtgagaagtcaacaggatactctcactgcattaacctattaatataagctgaaaataacctaccctatctactattcctcccatcttcaaaagactacaaggaaggtttgctttgtgaccagcagagaagggagaaaagtcccctgaaaagttctaaccaaaaggaagctttcacaaaaatttacagtccaaatttacatttcttggaagtccaaaggaaaatcaarctataaatttaggttgaaatgatcctgaacgtagagcctttaatgctgcaggcaagcaaattctctctggaggaacaaacaccttaatcctgagcctcaaaggacaatcata

SEQ ID NO: 708447 - DNA, 597 bp, Homo sapiens
taaaagaatagacattatgaatctgctaggaacattagaatcattacttatctggtttctttatactagtagagttggaaactctacatcagaacccagtggctccagaatgtggtaattccagcaaaattattactagagttttatcacttcagcataaactgttttgataaaaaacacacaaaggaaagtgatgaattcccattataggttgaaatagacaacaggaaaaaaagctttgatgtagaaacagtaagactacaaataggtctatcactcctaactatacctaacccagcatcccagttcatttatcacaaatgttagacattaaatactgggcacagcttgtctgacgatgtcctcttatttctacaattgttyttttaagtaatggcatttgtcttagaaataatcattgctctgatatggctatttatctctaagagtaaaaaggacaaattatggcagggtctatattcctacatattcacaactagctgtaggatagttatagccatatgtattctgagaagtgcctcagagaggcctcatgatccatttttggggattcctattgaaggcaggagttcaaaa

SEQ ID NO: 708448 - DNA, 1332 bp, Homo sapiens
tgctgctttttcgtagttgattgcaaagactaggaataattttctccacacattaataatcatctctcatgtgataatacaatctctacaggttatagatatatttttgttatattggggggcactgtgtgtaaaatgccatttcaaatctattacttattgtttagaattgtatggtttctcaatgtcatatattaaatagaagttaatccatacattaattatcaaaagggaaacaaaaaatttcacacatttttggccacaaaatattattaagcaaaggaaattaactattgtctcctggtattagagactactgattaggctggattataaagagatgcccttgatcttcctcttttacatcttacttcggaaaatattcaagagctattctatgtagatcataagcctttccaaatagcttttgggaattctggatgccaaatatctttgtaatcttatttgggtattattcaaaatagtaattgtcagatatgcttggtggggttgttctttgtggttcttgccacaytctattctctttagcaaagtttatttttatctactgaatacctcttctttccttaatttttacttaaaaaaatctacgtaagcaggtcttagtgtgtcttctcaaaaataagagctttgtttctaactataggataaatggcaatagggtaaaaatttaccatcgttttatatatagcttttagcttttggacaatggttatgctaaataattattttactttatttatttcagtcaaacaattaggttaattgatttctaggatctgaaatgttgtgcaattaaccaggagtttggtcatatgtgcaatacatgccatatttttctacatatcttctgagtaattaatgtcatgctagaatttttaagtgctatataattaaaatttcacaagccaattttgattatcatgaggattcttcaaaagcagttgttttttcggattccctatttaataactggtgctgggaaaactggctagccatatgtagaaagctgaaactggatcccttccttataccttatacaaaaatgaattcaagatggattaaagacttaaattttagacctaaaaccataaaaaccctagaagaaaacctaggcaataccattcaggacataggcatgggcaaggacttcatgtctaaaacaccaaaaacaacggcaacaaatgccaaaattgacaaatcatgacaggcaacctacagaatgggagaaaatttttgcgatctactcatctgacaaagggctaatatccagaatctacaatgaactcaaacaaatttacaagaaaaaaa

SEQ ID NO: 708449 - DNA, 986 bp, Homo sapiens
aaaggataccttgaagacacctttccccactctgactcagtgactcagtacccaatacttttccactcacaggccttcctccattacactcatcatccacccccaacctcatggtccaaaaagtgattggaaccttttgtttcaagcttcttcaacagtcagatgaccgcaaactctgcactaatctacctgwcccctccaccctccaggtagcagttacatggcaagagatggaacatggggagttagtgctttctccagattggactcttgcttataccattacagaaagtgattacaggcttaaatgtttcatttagggcttgctgttttaattggataactccaacacctggcagcccagatctttctcccagcacagccaacctcctgacagagcattttaccaagaggataaagggtgtgtttatatttgaaaagttacatatgactaaaattcactaaacatataaattgcatgtcaggttcaatgaaagtctaataatataaatatgaatacaaatctatccattctcttagagaaaagcataataaactacccaccatttaggaagcttagagctacactagcagaattaacaaaacaaagcctatatagaaaagaacagtgaagaattttctaatgaaggattggaactcctggtatgtatacatggcatctgaagtaggttttgtaaaggataagtataattttttcagattataaagaggcagggtattttaatcatatcaaagtgtatgtaccaaaaaaggcatagaagtagataaacatgacatgttggaatcagcagtaatctaaatgaatgatagttttattaagtaaagggtgtgaaaaatgacgatacatatgtaatgttagaagccagatgatggcagggattctaataaagggatcaattttttctatagaaaatattaaggctagaaattggttagattattaatactatttgattaatttttaa

SEQ ID NO: 708450 - DNA, 783 bp, Homo sapiens
ttttgttacaagcgtacaatgtgtaatcaytgattcaaggtaattgggctattggtcaccttaaacatttattatttctttgtgttaggaacatctcaatcccactcctctagttattttggaatatacaatacactattgttaagtctagtcactctattgtactgctgaacactagatcttatttctcccatctaactatatatttgtagccattaagcatctccttttcatcccctatccctactacctttctcaggctctgataatcattgttctactgccaatttttaaattaacaggaaagaatatgagaaaataaggataagtcagtgcataactgagcagagcttttgactctcttgcgacactagaaaaacaaaagttatcgttcaggaccatagaggaaggactccagtaaatacctcagagtgtcagttggaaacactggagggctgcatcttaggaaaggactaaactttacaaagaatacaaagagttaaacgcgattccccatcagctgagactctaattggatggtggtgatctgcccctattctagctgtctgccagagaatagggtgaacagtctctgagatagatagatagatagatgatagatagatagatagatagatagatagatagatagatagataaataggtcatttttcataaaaaatgtctggtattcagttaaaaatgagcacactcccataggcaggaccaagaattacaaaacagacaatagaaaggaactcacaggtaatatggaattagaga

SEQ ID NO: 708451 - DNA, 1251 bp, Homo sapiens
  misc_feature 442, 443, 444, 445, 446, 447, 448, 449, 450, 451, 452, 453,454, 455, 456, 457, 458, 459, 460, 461, 462, 463, 464, 465,466, 467, 468, 469, 470, 471, 472, 473, 474, 475, 476, 477,478, 479, 480, 481, 482, 483, 484, 485, 486, 487, 488: n = A,T,C or G
  misc_feature 489, 490, 491, 492, 493, 494, 495, 496, 497, 498, 499, 500,501, 502, 503, 504, 505, 506, 507, 508, 509, 510, 511, 512,513, 514, 515, 516, 517, 518, 519, 520, 521, 522, 523, 524,525, 526, 527, 528, 529, 530, 531, 532, 533, 534, 535: n = A,T,C or G
  misc_feature 536, 537, 538, 539, 540, 541: n = A,T,C or G
gacttatttctctctctctttatttctctctgacaattatcttgtcatattggggaggcctatgtggcaaggaactgaccttgcctccaaccaacagtcaccaaggtactgagattcttagtccaacaacacttaagaagctgaatcttgccaacaatcatgaaagcaagcttggaaatggattctttttcagtcagttcatcatatgaggccccagctcaccctggagaatatggtgattgccacctcatggaaactgaagccaagggcctagttaagccatgcctagattcctgacctgtaggaattgtaagataataaatatgtgttgttttaagctgctaaatcttgaggtaatttgtttcacagcaaaagtagacaactaatacagaaggaaatgcaaataatcaaataaaaaattagttattaaaataggaaaggnnnnnnnnnnnnnnnnnnnnnnnnnnnnnnnnnnnnnnnnnnnnnnnnnnnnnnnnnnnnnnnnnnnnnnnnnnnnnnnnnnnnnnnnnnnnnnnnnnnntcattatcatctattattcttattggacattttaaagtacctgtacaaaaatggcattagttagggatatagtaaagttacttctagtcttttaattggcttctgcccttggcgctgtttgagcaaagagaagagaccctcatagagaactctaaggacaaaaaaacttacttttaattgtgaccccaagaattatcaatatctctattaacagagacaagggcttcatcttctcttaagcagcttctcttcactgtaacacaggcagaaactaggtgattggyccaagagctcctcttctcagggactgtggtgggggcaggagtcagttgctaagcaaccatttccttactcttgggccaatgggctgccagagtgttcctttcaagccggaatgaaggcagctgctggagaatgtaggctgtggaaaggatccactgctattcctctggctgaagataaggggtaggctagaaattaggggtggctctctaacatgaaaggaagggaccagaagtccgactcgtacgtgtccacacgttcaactgtgttcaggggtgctggaagttcttatttttatgttgcctctagaggtacaaactacacttatgtaaaaacacaattaaggtacatgaactgatctgacatcatcctgtaagctggtatctctaggctatggcggaaaagaaacaatgggccaagtctgcttt

SEQ ID NO: 708452 - DNA, 828 bp, Homo sapiens
ttgggagggcacttggtggccattttggcccattcccactggctgcttgaactcctttgagttggccattaaaatgaaaaaaaaaaaaaaaagtaaatatttgggagaagttacaaaataaggcactgatgtttgagccagctggaaaccgggagaaatctgcctggcccctttcaagatttccggttgctttgcactgtggcccatctcactgagctctgacatcccagttgtgacagagagaattttcctgtacacaccagtaagtggaacaacgcttacccgcccctttccagcttctagacactttctatatttccttcctacagataaaagtgtccacccattcagatgctaaatgataaatgttccaagtaatttttattttagaatacaagagaggtacaaatgtatttacagttgtacatatacaatcaaataataatatatyacagttttgtaaatatcattttagataaatatttacaaggttaaagtgaccatcttctggaagtagaacgcagtttcttgaaaactctatacattttatacttttcattaatattatagtttattttacaaaacgccctacgggaatcctggtaaatgactgcaaagtgtgagaggcgacaccagagggcgcgcacggcccgaatttgaggaaacgggcagggaccgagggaagtgtgggcagactgggcggaattcccgggactgggcacagctcggaagcgcttcgtggccacagaagccaccttaacctctcgggcagcggttccagtcttgccctcctctcgctggagtgtgtgtgttggaaggggctggggg

SEQ ID NO: 708453 - DNA, 540 bp, Homo sapiens
gtcaccaaggagcctaacagagcccacttccttttactccagstgttttcactggaccaaggctgaaaaacaaaaagcatctaaccttcagaacaacatctcaggatcttacccagagtggggacaaggcagcagaatttatttttctatgttgcagaggaaatcagcctcctgttttggtcaacagtactttttcatcaattattctgccacctgctggtaattttttgttaaggacagaccgaggaaggacagacagtatgagctatgggagctagccacttgtctcaacatcaaagtaccagaaggaatctggtcaaagcaccaagacaggattaagcctcctcttcttgccggtaatgcatacctaaagtggatgagggaggagtgtggctcatttgcttcactctgagttctattttccttttttttttttttttttttgagacagagtcttgctctgtcgcccaggctggactgcagtggcatgatctcagctcactgcaacctccacccctgggttaaagcgattctcctgcc

SEQ ID NO: 708454 - DNA, 540 bp, Homo sapiens
gtcaccaaggagcctaacagagcccacttccttttactccagctgttttcactggaccaaggctgaaaaacaaaaagcatctaaccttcagaacaacatctcaggatcttacccagagtggggacaaggcagcagaatttatttttctatgttgcagaggaaatcagcctcctgttttggtcaacagtactttttcatcaattattctgccacctgctggtaattttttgttaaggacagaccgaggaaggacagacagtatgagctatgggagctagccacttgtctcaacatcaaagtaccagaaggaatctggtcaaagcaccaagacaggattaagcctcctcttcttgccggtaatgcatacctaaagtggatgaggraggagtgtggctcatttgcttcactctgagttctattttccttttttttttttttttttttgagacagagtcttgctctgtcgcccaggctggactgcagtggcatgatctcagctcactgcaacctccacccctgggttaaagcgattctcctgcc

SEQ ID NO: 708455 - DNA, 569 bp, Homo sapiens
atccatcactagccaccatctttcctattccctcaaaatgtatgtagttaagatttaacaatatttaacaatattgactatgtagttaacaatattgattcatatatttgtcagcattttgatgtttgatagttacactttcatacccatcaaactaaacgttctcccagaagccacaattttgaacttttaaaattacttcagtcaggccaggcacggtggctcacgcctgtaatcccagcactttgggaggccaaggcgggtggatcacctgaggtcaggaggagttcaagaccatcttgggcaacatggtgaaaccccatctctactaaaaatacaaaaattagctgggcgtggtgatgcatgcctgtaatgccaggtactcaggaggctgaggcrgagaatcgctctaacccaggaggcagaggttgcagtgagctggggtcaggccactgcactccagcctaggcaacagagcaagattccaccttaaaaaaaaaaattacttcagtcagagttccacctcctctgctcccagtaactcaatcaatattgttaaccaactgaaa

SEQ ID NO: 708456 - DNA, 536 bp, Homo sapiens
actggaggatgtgtactacagataaatatccaacatatggttggtggctattttgaggtggagagataatggtcaatgttcttttttatctacttatttgtattttaaatatagtttacaatttacagttcattagaatatactaattatagtacattttccttttgtaagaaagaaaaattaatgtggtactcagaacaaaactttaggtatgggagcataggaatcggtcataggagataacactacaggtatgcgttgatgaatgcatagtataataggatcacagtttcccttcctctgagaaacatagttttagtaagacaacctaagatggcattctttttcttttgcaattatgttactccgtggtaaatttataatcatttaaaatttaatatttttttcacatggagattatagttcttatgggatagtagatggaactcattaatcaagtcttcctacactctacagatttaaaatgtattgtttaatcmacttgttgggctataatttacattaaatagagtgta

SEQ ID NO: 708457 - DNA, 612 bp, Homo sapiens
tgataacattttctgtttctctaggatcattttggaatgttgaaagtgttcctctgtaccttgaaaaatcgggagagagagagagagagactgcaaggttttgattaaggacatctacttatgagttatttctttattcacattggcccaatggttacataacagttatctgctgggacatttcccatacatcatacctctgaaatgtgtctataggcatttgaagcccatgcctcccaacgttgcattgtctccttagttaaattcaaggactactttgtgataattgctaattcctgagtggtaacttctagtgtattagttcaaactgaaagatcttacagatctttttgcataacattggtcaaagcatcataaacaagttttaaaggaagaaaaaagacttcagtggtgaaaggaaaaaataatgacaaagctgtttcctrtgagggtacatgtgcatatttctgagtgctaacatacaggtacataaagcagggtgctttaattttgctactgtgttgagaagctcttttctgtcttacctaggcttttatacctagcccataaaagaactgtaaaaagcattcttgtaaataattggagacttgc

SEQ ID NO: 708458 - DNA, 612 bp, Homo sapiens
tgataacattttctgtttctctaggatcattttggaatgttgaaagtgttcctctgtaccttgaaaaatcgggagagagagagagagagactgcaaggttttgattaaggacatctacttatgagttatttctttattcacattggcccaatggttacataacagttatctgctgggacatttcccatacatcatacctctgaaatgtgtctataggcatttgaagcccatgcctcccaacgttgcattgtctccttagttaaattcaaggactactttgtgataattgctaattcctgagtggtaacttctagtgtattagttcaaactgaaagatcttacagatctttttgcataacattggtcaaagcatcataaacaagttttaaaggaagaaaaaagacttcagtggtgaaaggaaaaaataatgacaaagctgtttcctgtgagggtacatgtgcatatttctgagtgctaacatacaggtacataaarcagggtgctttaattttgctactgtgttgagaagctcttttctgtcttacctaggcttttatacctagcccataaaagaactgtaaaaagcattcttgtaaataattggagacttgc

SEQ ID NO: 708459 - DNA, 652 bp, Homo sapiens
actattctataaagctgactcaaccacaaaatctcaacttaagcagaggtagtgagaattaagatccaatatggaagtcatatattatatatatttatagtcagaatcacttgagtattttgattacagataaaagtaagctggacaaaatggactgtggctgaaatggctgcccctgtgccttgataccataggccatgttccctgggtctctcctggcctctgacagtcatgtcagggacagctggagaatgtccaaagcttatcttcctgacatccacaggcttccgcttccagatggaaattctcagagttacacctcaagctggagaaggcatagtgtccttggagttagtttttcttctaaaatgcacaayggtattttagaatgattcccaaatctttcataaaagagctttggcaaaataacaaaacagctgtaaaaggctcttgactaaatttaatggcttaatttccctgtaagtatgcactgtagaccaaaaaagcacctctctacatttactttcatttcaaggcacttctcacctcaatctgaaggtaggcatgcagttgaaaaaaagaaactgttttacgttctggaaaaaacaacaagctagtatttgacagataagttaaaaagaaaccttagtca

SEQ ID NO: 708460 - DNA, 652 bp, Homo sapiens
actattctataaagctgactcaaccacaaaatctcaacttaagcagaggtagtgagaattaagatccaatatggaagtcatatattatatatatttatagtcagaatcacttgagtattttgattacagataaaagtaagctggacaaaatggactgtggctgaaatggctgcccctgtgccttgataccataggccatgttccctgggtctctcctggcctctgacagtcatgtcagggacagctggagaatgtccaaagcttatcttcctgacatccacaggcttccgcttccagatggaaattctcagagttacacctcaagctggagaaggcatagtgtccttggagttagtttttcttctaaaatgcacaatggtattttagaatgattcccaaatctttcataaaagagctttggcaaaataacaaaacagctgtaaaaggctcttgactaaatttaatggcttaatttccctgtaagtatgcactgtagaccaaaaaagcacctctctacatttactttcatttcraggcacttctcacctcaatctgaaggtaggcatgcagttgaaaaaaagaaactgttttacgttctggaaaaaacaacaagctagtatttgacagataagttaaaaagaaaccttagtca

SEQ ID NO: 708461 - DNA, 652 bp, Homo sapiens
actattctataaagctgactcaaccacaaaatctcaacttaagcagaggtagtgagaattaagatccaatatggaagtcatatattatatatatttatagtcagaatcacttgagtattttgattacagataaaagtaagctggacaaaatggactgtggctgaaatggctgcccctgtgccttgataccataggccatgttccctgggtctctcctggcctctgacagtcatgtcagggacagctggagaatgtccaaagcttatcttcctgacatccacaggcttccgcttccagatggaaattctcagagttacacctcaagctggagaaggcatagtgtccttggagttagtttttcttctaaaatgcacaatggtattttagaatgattcccaaatctttcataaaagagctttggcaaaataacaaaacagctgtaaaaggctcttgactaaatttaatggcttaatttccctgtaagtatgcactgtagaccaaaaaagcacctctctacatttactttcatttcaaggcacttctcacctcaatctgaaggtaggcatgcagttgawaaaaagaaactgttttacgttctggaaaaaacaacaagctagtatttgacagataagttaaaaagaaaccttagtca

SEQ ID NO: 708462 - DNA, 680 bp, Homo sapiens
attcttagcctctttttgttgttactaaacaagttggaggcaaaacaatctagtgtagattctcgcttccttctttttattttctgaaacagtttatgtaaggcaagtattattatacttgttccttgacagtttgatagaattcatcccccaaattactctaggcttggtgttttgggcaggaggttggggaggtggtggtkaagtatgattaaatttctttaaaggttacgggacttctttgttttgccatttcttcctaagtcattttgatattttatattttcccagaagagtgtccacttaaactaagttttcaagcttattgtcataaagttgctcaaaataatcttatattttaaatatgtttatcttaattttgtccctatttctcttccaaatactatttgttttcacctatagtttttctctagatcagcttttgaaaggtttactgcattttaccctccctgatggggctcagtgtgcagcagctggaaaaagtagatgccctggttatgtatgcagctcaattgttctatgtgttgctttaagggaccttgaagactcttctctctccctattgttgccaaaataactgcctctgatctgtttttgtttgcatcccaggccccagactagcatgtaagatgcctttgagaagtcctagaacactgcag

SEQ ID NO: 708463 - DNA, 680 bp, Homo sapiens
attcttagcctctttttgttgttactaaacaagttggaggcaaaacaatctagtgtagattctcgcttccttctttttattttctgaaacagtttatgtaaggcaagtattattatacttgttccttgacagtttgatagaattcatcccccaaattactctaggcttggtgttttgggcaggaggttggggaggtggtggttaagtatgattaaatttctttaaagrttacgggacttctttgttttgccatttcttcctaagtcattttgatattttatattttcccagaagagtgtccacttaaactaagttttcaagcttattgtcataaagttgctcaaaataatcttatattttaaatatgtttatcttaattttgtccctatttctcttccaaatactatttgttttcacctatagtttttctctagatcagcttttgaaaggtttactgcattttaccctccctgatggggctcagtgtgcagcagctggaaaaagtagatgccctggttatgtatgcagctcaattgttctatgtgttgctttaagggaccttgaagactcttctctctccctattgttgccaaaataactgcctctgatctgtttttgtttgcatcccaggccccagactagcatgtaagatgcctttgagaagtcctagaacactgcag

SEQ ID NO: 708464 - DNA, 988 bp, Homo sapiens
tttcttaacaacttcttagcccaatagataaagtgatccactgggatcaagtaaagaaaaccaagcaaatgattttttaaatttactcattgacacattgaaattgaggccattggccaggygcggtggctcacgcctgtaatcctagcactttgggaggctgaggctagtagatcagctgagatcaggagttcgagaccagcgtgatcaacatggagaaactccatctctactaaaaatataaaattagccgggcgtggtggcgcatgcctgtaatcccagctactcaggaggctgagacaggagaatcgcttgaacctgggaggcagaggttgcggtgagccaaaatcgcaccattgtactccagcctgggcaacagagcaagactccgtctcaaaaaaaaaaaaaaaagaaaagaaaagaaaagaaattgaggccatgtatgcctgagagtgtaagttccagcacaggctgcaggagttcagatctttgcttcatcgtgtattagctggataatcttaaacaagttacttcacttctctgagccgtggtttttgcaactgcaaactggggataataatagtagccatttcatagggtgaaaatcaaattagaaaaaatctgtatgatatgtgttagcctagggcatggaatatagtaaatagcaaataaatgttaattatattgctgttttccagggcatactgaagtgtgtgaaatagtccctgcccttgaaggagcacatgaaggaaaattcacaaacagtaattataatagcataggacgtcagctgtggcgcaggcagtcaggtcacctgggagcctggatagtctctcagagtggacatcttggaggagccatttcagtggccttaggagagaagctaaattgcagtggttagactcttacatattgtacattttggctcaaatatctttagcatgaatcaagccctagtcttcagggtcattaatttattacctgaaga

SEQ ID NO: 708465 - DNA, 988 bp, Homo sapiens
tttcttaacaacttcttagcccaatagataaagtgatccactgggatcaagtaaagaaaaccaagcaaatgattttttaaatttactcattgacacattgaaattgaggccattggccaggtgcggtggctcacgcctgtaatcctagcactttgggaggctgaggctagtagatcagctgagatcaggagttcgagaccagcgtgatcaacatggagaaactccatctctactaaaaatataaaattagccgggcgtggtggcgcatgcctgtaatcccagctactcaggaggctgagacaggagaatcgcttgaacctgggaggcagaggttgcggtgagccaaaatcgcaccattgtactccagcctgggcaacagagcaagactccgtctcaaaaaaaaaaaaaaaagaraagaaaagaaaagaaattgaggccatgtatgcctgagagtgtaagttccagcacaggctgcaggagttcagatctttgcttcatcgtgtattagctggataatcttaaacaagttacttcacttctctgagccgtggtttttgcaactgcaaactggggataataatagtagccatttcatagggtgaaaatcaaattagaaaaaatctgtatgatatgtgttagcctagggcatggaatatagtaaatagcaaataaatgttaattatattgctgttttccagggcatactgaagtgtgtgaaatagtccctgcccttgaaggagcacatgaaggaaaattcacaaacagtaattataatagcataggacgtcagctgtggcgcaggcagtcaggtcacctgggagcctggatagtctctcagagtggacatcttggaggagccatttcagtggccttaggagagaagctaaattgcagtggttagactcttacatattgtacattttggctcaaatatctttagcatgaatcaagccctagtcttcagggtcattaatttattacctgaaga

SEQ ID NO: 708466 - DNA, 566 bp, Homo sapiens
ggagtgcaatggcgcgatcttggctcaccgcaacctccgcccccgggttcaagcgattctcctgcttcagcctcctgagtagctgggattacaggcatgcaccaccatgcctggctaattttgtatttttagtagagatgggttttctccatgttggtcagactggtctcaaactccccacctcagatgatccgcccacttcagcctcccaaagtgccgggattacaggtgtgagccaccacgcccagccactgggcactgttcttaagcttcattcctgcagtttaactcaggtcatccttgaaaccatctgtattagggttctctagagggacagaactaataggatatatatatatacactatacatatatatatataaacgtatatatatgtgtgcgtatatatatatgtatatatatgtgtgtgtatatgtgtgtgtgtgtgtgtgtgtgtgtrtatatatatatatatatatatatatatatatatatatataaaggggagtttattaagtataaatttgcatgatcacaaggtcccaaaataggccatctgcaggctga

SEQ ID NO: 708467 - DNA, 1222 bp, Homo sapiens
tgtagctccttgtgcacacttgggaacatttaaaatatactccacctgcagcttatgcttgcatcacaattatacaaggcactttatatacgttattcgactttgaaatctattttttttttttgagacagagtcgtgctctgtcacccaggctcaagtgcagtggcgcgatcttggctyactgcaacctctgcctcctcggttcaagtgattcttctgcctcagcctcccaagtagctgggattacaggcatgtgccaccctgcccaactaattttgtatttttatcgactttgaaattttataacaaccttgagagaggacacaggaaaagccttatgatccttattttccaggacagtaaacagcagctgaaaaacgtgaagcgtatttctcaaatcaacctgcaagaaaatagaagaagcagaacctgaagccaggattgtggggtctgggtcctttgcttctagcccagctcttcttcctctaattggtctaatcaccaatccacatgttctttcttgcaccaatgcattcatgtgtctttatcttcacatttcaaacaactagtatggtagacattgctggttgcctacctaatatttatttgtcctttcttcattgttagcagagctttagttttgtttgggatggcaatatgcctagtttttattttttaaaaaagaaacattactccccatttcccacagtgctgggcaggagtgggagtggggtggaagactctgtgactcaggtttgccactgaagctacgagaaagtctgctgggaagtcaccagaaagtcttgtttttctgatgtctgtgttgtcgtccccttccttcttagcgtgtttctgcttctttttgtctgaaacaaggatgagaggctggaggtagagcctccaccttgaatcatgaaactgaggccacatgtggagtggcctgtcaaagcaaatcaacagggtgtatcggtttgttagggctgctgtaataaaataccacagactgagtggcataaacgactcacagttcatggaagtccaagattgaggtgtggggaagtttgggcagccaaatacaatccctaactgatacaaataatttcacttcattcatttgtgtttgctcctctctttctttgagtcctttatggactggggccgtctcttgagttagatcaggttcttggactatgctggtctgtatgtaggtaatgataggtaa

SEQ ID NO: 708468 - DNA, 1222 bp, Homo sapiens
tgtagctccttgtgcacacttgggaacatttaaaatatactccacctgcagcttatgcttgcatcacaattatacaaggcactttatatacgttattcgactttgaaatctattttttttttttgagacagagtcgtgctctgtcacccaggctcaagtgcagtggcgcgatcttggctcactgcaacctctgcctcctcggttcaagtgattcttctgcctcagcctcccaagtagctgggattacaggcatgtgccaccctgcccaactaattttrtatttttatcgactttgaaattttataacaaccttgagagaggacacaggaaaagccttatgatccttattttccaggacagtaaacagcagctgaaaaacgtgaagcgtatttctcaaatcaacctgcaagaaaatagaagaagcagaacctgaagccaggattgtggggtctgggtcctttgcttctagcccagctcttcttcctctaattggtctaatcaccaatccacatgttctttcttgcaccaatgcattcatgtgtctttatcttcacatttcaaacaactagtatggtagacattgctggttgcctacctaatatttatttgtcctttcttcattgttagcagagctttagttttgtttgggatggcaatatgcctagtttttattttttaaaaaagaaacattactccccatttcccacagtgctgggcaggagtgggagtggggtggaagactctgtgactcaggtttgccactgaagctacgagaaagtctgctgggaagtcaccagaaagtcttgtttttctgatgtctgtgttgtcgtccccttccttcttagcgtgtttctgcttctttttgtctgaaacaaggatgagaggctggaggtagagcctccaccttgaatcatgaaactgaggccacatgtggagtggcctgtcaaagcaaatcaacagggtgtatcggtttgttagggctgctgtaataaaataccacagactgagtggcataaacgactcacagttcatggaagtccaagattgaggtgtggggaagtttgggcagccaaatacaatccctaactgatacaaataatttcacttcattcatttgtgtttgctcctctctttctttgagtcctttatggactggggccgtctcttgagttagatcaggttcttggactatgctggtctgtatgtaggtaatgataggtaa

SEQ ID NO: 708469 - DNA, 1222 bp, Homo sapiens
tgtagctccttgtgcacacttgggaacatttaaaatatactccacctgcagcttatgcttgcatcacaattatacaaggcactttatatacgttattcgactttgaaatctattttttttttttgagacagagtcgtgctctgtcacccaggctcaagtgcagtggcgcgatcttggctcactgcaacctctgcctcctcggttcaagtgattcttctgcctcagcctcccaagtagctgggattacaggcatgtgccaccctgcccaactaattttgtatttttatcgactttgaaattttataacaaccttgagagaggacacaggaaaagccttatgatccttattttccaggacagtaaacagcagctgaaaaacgtgaagcgtatttctcaaatcaacctgcaagaaaatagaagaagcagaacctgaagccaggattgtggggtctgggtcctttgcttctagcccagctcttcttcctctaattgrtctaatcaccaatccacatgttctttcttgcaccaatgcattcatgtgtctttatcttcacatttcaaacaactagtatggtagacattgctggttgcctacctaatatttatttgtcctttcttcattgttagcagagctttagttttgtttgggatggcaatatgcctagtttttattttttaaaaaagaaacattactccccatttcccacagtgctgggcaggagtgggagtggggtggaagactctgtgactcaggtttgccactgaagctacgagaaagtctgctgggaagtcaccagaaagtcttgtttttctgatgtctgtgttgtcgtccccttccttcttagcgtgtttctgcttctttttgtctgaaacaaggatgagaggctggaggtagagcctccaccttgaatcatgaaactgaggccacatgtggagtggcctgtcaaagcaaatcaacagggtgtatcggtttgttagggctgctgtaataaaataccacagactgagtggcataaacgactcacagttcatggaagtccaagattgaggtgtggggaagtttgggcagccaaatacaatccctaactgatacaaataatttcacttcattcatttgtgtttgctcctctctttctttgagtcctttatggactggggccgtctcttgagttagatcaggttcttggactatgctggtctgtatgtaggtaatgataggtaa

SEQ ID NO: 708470 - DNA, 1222 bp, Homo sapiens
tgtagctccttgtgcacacttgggaacatttaaaatatactccacctgcagcttatgcttgcatcacaattatacaaggcactttatatacgttattcgactttgaaatctattttttttttttgagacagagtcgtgctctgtcacccaggctcaagtgcagtggcgcgatcttggctcactgcaacctctgcctcctcggttcaagtgattcttctgcctcagcctcccaagtagctgggattacaggcatgtgccaccctgcccaactaattttgtatttttatcgactttgaaattttataacaaccttgagagaggacacaggaaaagccttatgatccttattttccaggacagtaaacagcagctgaaaaacgtgaagcgtatttctcaaatcaacctgcaagaaaatagaagaagcagaacctgaagccaggattgtggggtctgggtcctttgcttctagcccagctcttcttcctctaattggtctaatcaccaatccacatgttctttcttgcaccaatgcattcatgtgtctttatcttcacatttcaaacaactagtatggtagacattgctggttgcctacctaatatttatttgtcctttcttcattgttagcagagctttagttttgtttgggatggcaatatgcctagtttttattttttaaaaaagaaacattactccccatttcccacagtgctgggcaggagtgggagtggggtggaagactctgtgactcaggtttgccactgaagctacgagaaagtctgctgggaagtcaccagaaagtcttgtttttctgatgtctgtgttgtcgtccccttccttcttagcgtgtttctgcttctttttgtctgaaacaaggatgagaggctggaggtagagcctccaccttgaatcatgaaactgaggccacatgtggagtggcctgtcaaagcaaatcaacagggtgtatcggtttgttagggctgctrtaataaaataccacagactgagtggcataaacgactcacagttcatggaagtccaagattgaggtgtggggaagtttgggcagccaaatacaatccctaactgatacaaataatttcacttcattcatttgtgtttgctcctctctttctttgagtcctttatggactggggccgtctcttgagttagatcaggttcttggactatgctggtctgtatgtaggtaatgataggtaa

SEQ ID NO: 708471 - DNA, 1000 bp, Homo sapiens
gttaaattaatataatgtggggaaaagagaatactatccacagtgagaatggacacataaacaaaaaaacctaggcattaacttagccaaacatgtgcttcttacataaaagaaaaccacagaactgtagtaggataaataaaggaagatgagaattaaggagagctaaactctgcttcttcatgagttcatttaatatccaaatttcccaagctaatttatagatttaacacaactgaacttaaaatagcgatagggtacttttttgagcttgataaggtaataacattcaatggggaaaaaacagataaaaatatcaaaagatattctgagaggcaaaaaggtaagtgggggacaatgagctcccccatatatcagaatgttcatcaaattcagggtacattctgggctctatcagcaccaaaactaaaactacatatcaaatgaccaaatgaataactccaaaattgctccctacacatctttttttttttttttttttttttttttttttttttttcagacagagtttcactctgttgcccaggctggagtacagtagtatggtcatagctcactgcagccttgaccacctrgactcaagcaattctcctacctcagccttccaagtagctgggactccaggcaagtaccaccatgcctgactaatttccttatttttatagagatggagtcttgctatgctgcccaggctggtgttgaactcctagtctcaagcaatccccccacctcagcctcccaaagtgctgggaatacaggcatgagccaccatatccaggttttaataaatgtcccaaaaataactagaaaaggaatcactatttaatcaagtgattatttattaaataatcactgggatgacatgatatgaatgtgaagaaaaattaattttagacccatccctaacagcatacatgccaatgagacctgggaaaactaaagtgaaatcttaaggatcacatcagaaaaatgctagaga

SEQ ID NO: 708472 - DNA, 1091 bp, Homo sapiens
tgcttttcctagtaratgtgtattatactgaacgcttttatttaaaaaatgaatacattccagtgattttcattacagaaattcattttaacatcgaaaaatccatattttacggctcaatattttataatgtaaacataaactattgtgttacatttaatatgtattggattattaaattaacacattttcacccaacgtagattttcaataaacactgcatctctttctgatttgattctgtctcctggggcatcatttattaggaagtgtgcgtttgaatgccacagattcagatgttatgctgaatttttacatgtccatggatcttaagaagacaattataaacaagagttaaatttgatttttactaaattaatgtgcagggaactcaagcaattttctcctaggttgcctctgagatatcaaaccaaaggagaaaattgggtaatgactgagttagttaagcaattgaatggagcttccaatgactttggatattatattcaatccaggaaggcatgcttctgggtacttacgacttgccccgtaattgcaatccaaacatatgcataaatataaaacaacatagaagaaaaacaatttctgccttaagataaagtccccttgcctattatagtactcttttttttattttatagactttgaacatactcaatttttacaatcaattacacctatatatgtgaacattaacaaaagcttaaagagaaatcaacatctgccttagaattaattttctttgttgttattgatgtaatactgatcactgacttgttgcagactttggacataattttttaatcaaaatataacaaatactatctatatatttatttattcaattattatatgcttttcaagtacctacatttcagattccggacaatgatctaggagtgaagatagagcatttaagaacatacattaccagacacttggatcttttcaattagtgaaataaagacaagtatacagacaatcacaaaatatgaggcaaaatgaaaactatgatagaaataaacaggatatcctcccagggcccatcaaagagaaacctaatccaatcc

SEQ ID NO: 708473 - DNA, 1091 bp, Homo sapiens
tgcttttcctagtagatgtgtattatactgaacgcttttatttaaaaaatgaatacattccagtgattttcattacagaaattcattttaacatcgaaaaatccatattttacggctcaatattttataatgtaaacataaactattgtgttacatttaatatgtattggattattaaattaacacattttcacccaacgtagattttcaataaacactgcatctctttctgatttgattctgtctcctggggcatcatttattaggaagtgtgcgtttgaatgccacagattcagatgttatgctgaatttttacatgtccatggatcttaagaagacaattataaacaagagttaaatttgatttttactaaattaatgtgcagggaactcaagcaattttctcctaggttgcctctgagatatcaaaccaaaggagaaaattgggtaatgactgagttagttaagcaattgaatggagcttccaatgactttggatattatattcaatccaggaaggcatgcttctgggtacttacgacttgccccgtaattgcaatccaaacatatgcataaatataaaacaacatagaagaaaaacaatttctgccttaagataaagtccccttgcctattatagtactcttttttttattttatagactttgaacatactcaatttttacaatcaattacacctrtatatgtgaacattaacaaaagcttaaagagaaatcaacatctgccttagaattaattttctttgttgttattgatgtaatactgatcactgacttgttgcagactttggacataattttttaatcaaaatataacaaatactatctatatatttatttattcaattattatatgcttttcaagtacctacatttcagattccggacaatgatctaggagtgaagatagagcatttaagaacatacattaccagacacttggatcttttcaattagtgaaataaagacaagtatacagacaatcacaaaatatgaggcaaaatgaaaactatgatagaaataaacaggatatcctcccagggcccatcaaagagaaacctaatccaatcc

SEQ ID NO: 708474 - DNA, 1091 bp, Homo sapiens
tgcttttcctagtagatgtgtattatactgaacgcttttatttaaaaaatgaatacattccagtgattttcattacagaaattcattttaacatcgaaaaatccatattttacggctcaatattttataatgtaaacataaactattgtgttacatttaatatgtattggattattaaattaacacattttcacccaacgtagattttcaataaacactgcatctctttctgatttgattctgtctcctggggcatcatttattaggaagtgtgcgtttgaatgccacagattcagatgttatgctgaatttttacatgtccatggatcttaagaagacaattataaacaagagttaaatttgatttttactaaattaatgtgcagggaactcaagcaattttctcctaggttgcctctgagatatcaaaccaaaggagaaaattgggtaatgactgagttagttaagcaattgaatggagcttccaatgactttggatattatattcaatccaggaaggcatgcttctgggtacttacgacttgccccgtaattgcaatccaaacatatgcataaatataaaacaacatagaagaaaaacaatttctgccttaagataaagtccccttgcctattatagtactcttttttttattttatagactttgaacatactcaatttttacaatcaattacacctatatatgtgaacattaacaaaagcttaaagagaaatcaacatctgccttagaattaattttctttgttgttattgatgtaatactgatcactgacttgttgcagactttggacataattttttaatcaaaatataacaaatactatctatatatttatttattcaattattatatgcttttcaagtacctacatttcagattcyggacaatgatctaggagtgaagatagagcatttaagaacatacattaccagacacttggatcttttcaattagtgaaataaagacaagtatacagacaatcacaaaatatgaggcaaaatgaaaactatgatagaaataaacaggatatcctcccagggcccatcaaagagaaacctaatccaatcc

SEQ ID NO: 708475 - DNA, 1881 bp, Homo sapiens
agattttctaattaaatttatatttgaactacttacctttgctaatgatttcacagcctcttctttctgtaattgagctaatatcacaataacagaagagttttccaaggcctattgaatagcatctctgatgtaattaattcattcaacaaataattatagattgtcttttctgcaccacacagttttatagaccctggagacaaagcaatgggagaaaaaaataataaaaactgtcccatcctcatgtaacttgcatcctaaagctgtgggggtgggtggtgttggcacaagcaattaaaaataaataagtaaaatatgtattatatcagttagtgacatctaactgacatgatatatatatttatgaattaagaggggagaagttgagagacagcaaaaagagaaaaaaagatagtttggtaatgaagataactacctttgtcaaaggaaaatatttatggaatagtgccatggagcaaataaagcagaacaaaggaatatggactataaccaggtgatcagtaacagcctcactaggcaggttacatttcagaaagactaaagaaaaatgaggagcaagccttgaggaattccacttcagaccaataacatagcaagtatatgcaataccttatttgtgaaaaataaacattcccttgggaaacatcattgtaattttgcaagtttattagaaattaattaaatgaaaatttagtttttmaccttattatggacttgacatgcaaaattggcttttttgaataatattctcttcataggcttaggcatgtttgtaattttagggaaccataaatttagtctcaacatatagatacatactaacattttcgttttttttctagaacgaaatatggatataaaattgtttttcaaattatgtattgacatttgtatccatatgtatatatgtccatgtacagaatttgaaaacaattttataattttaagtgcatgatgctaattttatctaattgtattcaaaataaaattgaaacaatctgttttctcaaaaaagagcccttgaaaatgaaattcatagccagatccccgaagctacatggagctccctgtgtgtctacagtcatagtcaatagttagttgagacagatactcatggaatgactttcaaatattgagatcattaaaactataaaaattagtaattgattttttggtattacctcacagaatcagatgccttttaaagtatctgatatatgtatacaaagcctgacaaaaatgtgcaaactgatgtgtgttgagtcaaaattgtctaaaaccatttcagtttgtctgcaacttggttctacaagtacaggcagaatttctctaaaatcattctaaaaatatttttccatagtaagagatgatcatattccatattaacagttgtggattagtcagtcttcttggaaaggcagagtgtgaatttcctcaagatgccttaatataagaacacagaatttgagatcagatctgggtttaatttctggcttcactacttactctgtgatagtgtttgttcattcattccaacttcttgagtacctttggtgattatgggccaaaaactctgcaggcccagagagataatgatgcccaaaacagataggattaatgtccttgtgcaatttactggaattctctaaacttttgagtccttatttgtgatagtgcacatttcaaagagctgtgtaaactataaagtatattctaattgaaaattacataatatagttttactttcttacaagtaaagccaatctgaatagaaaaatatttgcttctgagaagattaacaaactaagagactttaaaagaccaaataagattaaaatgaaatattagaataaagtc

SEQ ID NO: 708476 - DNA, 1881 bp, Homo sapiens
agattttctaattaaatttatatttgaactacttacctttgctaatgatttcacagcctcttctttctgtaattgagctaatatcacaataacagaagagttttccaaggcctattgaatagcatctctgatgtaattaattcattcaacaaataattatagattgtcttttctgcaccacacagttttatagaccctggagacaaagcaatgggagaaaaaaataataaaaactgtcccatcctcatgtaacttgcatcctaaagctgtgggggtgggtggtgttggcacaagcaattaaaaataaataagtaaaatatgtattatatcagttagtgacatctaactgacatgatatatatatttatgaattaagaggggagaagttgagagacagcaaaaagagaaaaaaagatagtttggtaatgaagataactacctttgtcaaaggaaaatatttatggaatagtgccatggagcaaataaagcagaacaaaggaatatggactataaccaggtgatcagtaacagcctcactaggcaggttacatttcagaaagactaaagaaaaatgaggagcaagccttgaggaattccacttcagaccaataacatagcaagtatatgcaataccttatttgtgaaaaataaacattcccttgggaaacatcattgtaattttgcaagtttattagaaattaattaaatgaaaatttagtttttaaccttattatggacttgacaygcaaaattggcttttttgaataatattctcttcataggcttaggcatgtttgtaattttagggaaccataaatttagtctcaacatatagatacatactaacattttcgttttttttctagaacgaaatatggatataaaattgtttttcaaattatgtattgacatttgtatccatatgtatatatgtccatgtacagaatttgaaaacaattttataattttaagtgcatgatgctaattttatctaattgtattcaaaataaaattgaaacaatctgttttctcaaaaaagagcccttgaaaatgaaattcatagccagatccccgaagctacatggagctccctgtgtgtctacagtcatagtcaatagttagttgagacagatactcatggaatgactttcaaatattgagatcattaaaactataaaaattagtaattgattttttggtattacctcacagaatcagatgccttttaaagtatctgatatatgtatacaaagcctgacaaaaatgtgcaaactgatgtgtgttgagtcaaaattgtctaaaaccatttcagtttgtctgcaacttggttctacaagtacaggcagaatttctctaaaatcattctaaaaatatttttccatagtaagagatgatcatattccatattaacagttgtggattagtcagtcttcttggaaaggcagagtgtgaatttcctcaagatgccttaatataagaacacagaatttgagatcagatctgggtttaatttctggcttcactacttactctgtgatagtgtttgttcattcattccaacttcttgagtacctttggtgattatgggccaaaaactctgcaggcccagagagataatgatgcccaaaacagataggattaatgtccttgtgcaatttactggaattctctaaacttttgagtccttatttgtgatagtgcacatttcaaagagctgtgtaaactataaagtatattctaattgaaaattacataatatagttttactttcttacaagtaaagccaatctgaatagaaaaatatttgcttctgagaagattaacaaactaagagactttaaaagaccaaataagattaaaatgaaatattagaataaagtc

SEQ ID NO: 708477 - DNA, 1881 bp, Homo sapiens
agattttctaattaaatttatatttgaactacttacctttgctaatgatttcacagcctcttctttctgtaattgagctaatatcacaataacagaagagttttccaaggcctattgaatagcatctctgatgtaattaattcattcaacaaataattatagattgtcttttctgcaccacacagttttatagaccctggagacaaagcaatgggagaaaaaaataataaaaactgtcccatcctcatgtaacttgcatcctaaagctgtgggggtgggtggtgttggcacaagcaattaaaaataaataagtaaaatatgtattatatcagttagtgacatctaactgacatgatatatatatttatgaattaagaggggagaagttgagagacagcaaaaagagaaaaaaagatagtttggtaatgaagataactacctttgtcaaaggaaaatatttatggaatagtgccatggagcaaataaagcagaacaaaggaatatggactataaccaggtgatcagtaacagcctcactaggcaggttacatttcagaaagactaaagaaaaatgaggagcaagccttgaggaattccacttcagaccaataacatagcaagtatatgcaataccttatttgtgaaaaataaacattcccttgggaaacatcattgtaattttgcaagtttattagaaattaattaaatgaaaatttagtttttaaccttattatggacttgacatgcaaaattggcttttttgaataatattctcttcataggcttargcatgtttgtaattttagggaaccataaatttagtctcaacatatagatacatactaacattttcgttttttttctagaacgaaatatggatataaaattgtttttcaaattatgtattgacatttgtatccatatgtatatatgtccatgtacagaatttgaaaacaattttataattttaagtgcatgatgctaattttatctaattgtattcaaaataaaattgaaacaatctgttttctcaaaaaagagcccttgaaaatgaaattcatagccagatccccgaagctacatggagctccctgtgtgtctacagtcatagtcaatagttagttgagacagatactcatggaatgactttcaaatattgagatcattaaaactataaaaattagtaattgattttttggtattacctcacagaatcagatgccttttaaagtatctgatatatgtatacaaagcctgacaaaaatgtgcaaactgatgtgtgttgagtcaaaattgtctaaaaccatttcagtttgtctgcaacttggttctacaagtacaggcagaatttctctaaaatcattctaaaaatatttttccatagtaagagatgatcatattccatattaacagttgtggattagtcagtcttcttggaaaggcagagtgtgaatttcctcaagatgccttaatataagaacacagaatttgagatcagatctgggtttaatttctggcttcactacttactctgtgatagtgtttgttcattcattccaacttcttgagtacctttggtgattatgggccaaaaactctgcaggcccagagagataatgatgcccaaaacagataggattaatgtccttgtgcaatttactggaattctctaaacttttgagtccttatttgtgatagtgcacatttcaaagagctgtgtaaactataaagtatattctaattgaaaattacataatatagttttactttcttacaagtaaagccaatctgaatagaaaaatatttgcttctgagaagattaacaaactaagagactttaaaagaccaaataagattaaaatgaaatattagaataaagtc

SEQ ID NO: 708478 - DNA, 1881 bp, Homo sapiens
agattttctaattaaatttatatttgaactacttacctttgctaatgatttcacagcctcttctttctgtaattgagctaatatcacaataacagaagagttttccaaggcctattgaatagcatctctgatgtaattaattcattcaacaaataattatagattgtcttttctgcaccacacagttttatagaccctggagacaaagcaatgggagaaaaaaataataaaaactgtcccatcctcatgtaacttgcatcctaaagctgtgggggtgggtggtgttggcacaagcaattaaaaataaataagtaaaatatgtattatatcagttagtgacatctaactgacatgatatatatatttatgaattaagaggggagaagttgagagacagcaaaaagagaaaaaaagatagtttggtaatgaagataactacctttgtcaaaggaaaatatttatggaatagtgccatggagcaaataaagcagaacaaaggaatatggactataaccaggtgatcagtaacagcctcactaggcaggttacatttcagaaagactaaagaaaaatgaggagcaagccttgaggaattccacttcagaccaataacatagcaagtatatgcaataccttatttgtgaaaaataaacattcccttgggaaacatcattgtaattttgcaagtttattagaaattaattaaatgaaaatttagtttttaaccttattatggacttgacatgcaaaattggcttttttgaataatattctcttcataggcttaggcatgtttgtaattttagggaaccataaatttagtctcaacatayagatacatactaacattttcgttttttttctagaacgaaatatggatataaaattgtttttcaaattatgtattgacatttgtatccatatgtatatatgtccatgtacagaatttgaaaacaattttataattttaagtgcatgatgctaattttatctaattgtattcaaaataaaattgaaacaatctgttttctcaaaaaagagcccttgaaaatgaaattcatagccagatccccgaagctacatggagctccctgtgtgtctacagtcatagtcaatagttagttgagacagatactcatggaatgactttcaaatattgagatcattaaaactataaaaattagtaattgattttttggtattacctcacagaatcagatgccttttaaagtatctgatatatgtatacaaagcctgacaaaaatgtgcaaactgatgtgtgttgagtcaaaattgtctaaaaccatttcagtttgtctgcaacttggttctacaagtacaggcagaatttctctaaaatcattctaaaaatatttttccatagtaagagatgatcatattccatattaacagttgtggattagtcagtcttcttggaaaggcagagtgtgaatttcctcaagatgccttaatataagaacacagaatttgagatcagatctgggtttaatttctggcttcactacttactctgtgatagtgtttgttcattcattccaacttcttgagtacctttggtgattatgggccaaaaactctgcaggcccagagagataatgatgcccaaaacagataggattaatgtccttgtgcaatttactggaattctctaaacttttgagtccttatttgtgatagtgcacatttcaaagagctgtgtaaactataaagtatattctaattgaaaattacataatatagttttactttcttacaagtaaagccaatctgaatagaaaaatatttgcttctgagaagattaacaaactaagagactttaaaagaccaaataagattaaaatgaaatattagaataaagtc

SEQ ID NO: 708479 - DNA, 2847 bp, Homo sapiens
ttttttattaatattttgaatgtcctcttttttggttcaaaataaccrtttatcataatatttacataagcaataaaattgtgcaattgctactcactagaaagattttaatttcaaatcagataaatatagattgatagcatgagataactacgaaaatgtatatcatttaaattatcagtaaaacattttgtgaatatgttatttttctaggataacgtttctgtgaattaattgttccttaacaaaactttttaaacttaaacttagagatcctaaatgctctgcatttcctaaactttgagatagagaaaagtaggcctgtcttttgataaaattgattacatttttatcttttgataaaaaattgattgtatgtattatgtttttcttatcaaatttgttagtagcattcagaaacatttccaaatgaattttttcctacttataaagggaaggaaaattgaaaaaaatgactcagactttttattttttacttttttagtttttatttttatttttgtacttcaaaaagtgataagttcacgtaaactacatgccattattattcataatgataattgcattttctatacaatcgatatcatttccatttttattataaaacagcagactggtttctgtcataaaacaaatctggcttgtattagaacaaatacatcctcatttaaagaattttaaggtttctttcttgcattgagtatcttaagctttataacaacgtctggctcttaattttagtaaatggcatgacacactatatccatggagagcttctgacaaaaacttacttatcagacagaatttcttcggtgtgttgtttactcagatggcttcagtttctctttagtaaaataatatttccatgttggtgctagagtacagaaaaatgttgttactgtgcacgcatcttctgcagatgatatcctgttccctttctttgttgatatttttctttcttaaactttgttgctcagaatatctttaatgctagccaaggagtcagggatttggacgtattttcatggacttccaaagcttttttcccccaggtgagttaactgtaaggaacaataatattttattcaggtatttcagcatgtataacaaattttgtgtctttaaaacctttgcttaagattaataaaaccttttaaccaaaaaaagatctatatgaagtgctgcaattgagttttctcactcctgccaaaaagaatgtattattagtttaagtgatacttccacatgacttcaaatttgctatatttagttttatgagtagcttttccaatgactatatctaagattagtgttttcacaactaacttatttaggtgacagtgtcctggccttatggctcttttattttttctgctgccaacactttcacattccctctttgaatgttcatctgagaatgggatgggaatggagggagaaaataataatattgaaattcatgaatttaatatgctggtacctgggtcttacatttctgtattgaataaagcatgtattttactattgcttgagcatgataggcacagttctatgactttatgtctgtcagtgttttatactgtttagcacaagaattggataaactttgttttatacttattaatatagttttattaccttttcaataaaatattattttaaatttttaacaagttttcataattgcctttcagtgactagtttgcaattataattagttgtgccaaggcttaactcccagtgttaccctgaatgatcaaaagttagaattattgttataattaattaaatgcactaggaatattattaaataccagtgaagttgggtttttttgctaaatctatggatatttgcttttttatgttgccatgtaatttttaagaatcagttgtgagtgggattaaaacttgccccttccaactatgaaatggcatgatgtatttatttattaaccatttacaaacagacattttaaaatgtttacagaaaatcttgtgagtgtaatagcaagtactatgtaaagtttagacctgtgttactctcaatttttatcttgagtgctctctgtgtattcatgtaggtttgcatatatataaattcttacaaatatatatgatgagtatataaaatgcgtattttacatttattttcggttgtaaatctaagttttttgagtgtttaaaattctcatttccgttaaatttccaatatgtaaccaaagaatattggtaaataaaatataattacagtaaatgtaaattaatttttcttagtacatatttgtataagtaaaaattggttattcatcactatagtgagattcacaaaatattatgtgaaagttaatggtgactttaacattttccctgaccagtcatgtatggaattaacaaagtagcaggtatacagaattcttgaatctacatatttttaaacctgaggattctatttttaatattctactgtgttactgtgtgtatgaacatgtatacatatctcttcattatgaggctactggtagggatagaactatttaatacaattctatcttgcataatgttagttgttaaatttttattctatttataacattattaaatatcagttttaacctaatgtttgcatgtgtgtctctttatggttatctattactctatctgaatatgaaataaattatagagttcatattactgtatttaaaaatgcagttttaaatctcttttaaaggagtaatgatgacaatgagaacacccagtgtggaccctttatttacatttagttgggaaaaagagaaaatatggaaaggttattatttctctttatta

SEQ ID NO: 708480 - DNA, 580 bp, Homo sapiens
caggaagaaaatcagtgacacccagacatatgacgatggcaaaatcatggcttactgcagcctcaacctcacaggctcaagtgatccacccacctcagctttcttagtagctgggactacacatgcaccactatgccccactaattttttattttttgtagagacagtcttgctatgttgcccaggctggtctcaaactcctggactctaaccctcctcccactgcagcctcccaaagtgctgggattacaggmatgagacagagcgcccggcctatctttctactttctgtagatgaattagtgctccaaactgtcagccaagaggcatctgaatagattcattgaattcctgtaagatttttaagggcaataaaaccaactgtggacagcttctccctcctcataccctcagaccggtatcagtgaccagttctgaccagtgatccctgggtatgaatttcaggagagaagtaggaatagctgaatagtcaccctctccttctccgccccaggccacatggctccatgtgctcatcatttgtagggttctgcttctcttgcattcctgagaaatacaa

SEQ ID NO: 708481 - DNA, 624 bp, Homo sapiens
atataagtttgaaacatgctaagagctgggaacacaaaggcccctgtcctcggtgggctcataatctcatgatgcaaacccacacttgaacgcccctaaccgtggtacagcagcatgcgggatgcaccacacattgcaggagaagggaaaggagcctacctggcygggcaaagctggaggagggcttcatcatagaaggtattagtcactttctgatgaagaagattccacaaagggcccatctccagaaattgactgagctggaatgcatcgcataacttggcctccccatcacgaagtggtagcagagccaagatgcttgactgtctgtctctgactcttgccgccccttccagtcctatttgcagatgtgaatgtctccactggtccagcctgaacactctgacatcatctaaatcatgagctgctctgacaataatgccaggcttgctaaacctgccaggacaccaagggccaggatgaaatttgaaattcaagctaagccttggacaaatgtcagctgccctgccaagtgccagggaatcctcccgctggccatctccacttggcagttccactggatcacagtttgtcttttgcttgatttgctttggttttgtcttc

SEQ ID NO: 708482 - DNA, 2167 bp, Homo sapiens
ggctgaagtgaggtaccccccaaaggcaacttcatcttcagtcatcattcagtcctacacacagttgtccccacagaagacatttgttaaattaacttcttccagattttatagttctgtgttcagaatgtttctgtacttggccaggcgtggtggctcatgcctgtaatcccagcactttgggaggccaaggcaggtggatcacctgagatcaggagttcgagaccagcctggccaacatggcaaaaccctgtctctactaaaaatacaaaacttagccaggcatggtggtggcaggcgcctgtaatcccagctactcaggaggctgaggcagggagattgcttgaactggaagtttcccagaggttgtagtgagctgagattgcgccactgcactccagcctgggtgacagagcgagactctgtctcaaaaaaaaacaaaacaacagcaacaacaacaacaaaacacctttctgcattttcccactcctacaagtactttaactttcaaggctgttcaagtgtgggccagtcctttcttttaagtcctgatttctttcccttctctgacattaagaccaccagtgtttgctcgtgccatttccttcttatcgagagtctttcatcctttgggttcatttcaagtgccgtgccttgtttgaagcaccttgcctgacaagtctgccatttccccctccctccgcaccccaccacacacaccccgtggaagtgattgctccttctgagaactcctgcagacacattatctatgccacttacttaacaattatgtactctgtattattaatcatgtctttgatgtttacagtcttttatcagcaactacattgcaagccttgaagacctgggttctgtcttatccttgtagtatatgtctctctcacgcacacacacacattcagcacttaacacaatgagttgtacagaagtagcactcagtatttgttgattttagaaagcaaactcaacttcatcctaccatctgcatttttcatatatctgcatttttttttttacctgctagtttatcattgctttagttctgtgggtcctactatgaatagctttattcataaagtccaaagccgaggggaactctgtaggatgacaaatttggtacaagggaaggaatccttcttaactccacagtgcacctggcattcctgtaacatctgtggcttttcctttgacaaggacatagttttacgttgtaagactaatgcctaaaactcccccagcgccactgtaactcttaccttcctttggcactaatgtaatgggaagaaagcctcaacagggagctaggacctgagttctagtcctgggcctataactcagtgaccctgggcaagtcatctaacctttctgggtcacactttcaatatttcagaaagggggagggttatacaagatcattagagctgttttatcatcttcacaaaggcagctgtttaaagcgagaaagttattgaggtgaaatctttatggcttgtaatgtcaccctttgtccttagttctgccttcttagtcacttggtagacaaagcagagacacaatactgtctggtcagggattcttgcattagggagaagggagaggtcctctcgtctcatcaagttttgtgattgtcactcatatgtgtgtgtgtgcgtrtgtgtgtatacatatatacgtatatatacgtatatatgtatatatatacgtatatatatgtgtgtatatatgtatatatatatttttttttttttgagagagagggtcttgttctctcgctcaggctggagtatggtggtgcagttatagctccctgcagcctttaactcctgagctcaagtgatcctctcccctcagtcttcccagtagctagggctagaggtgtgcaccaccacgcccagctaactttttattttttgtagagatggggtcttgctatgttgcccaggctggtctgaaactcctggcctcaagtaatcttcttatcttggcttccgaaagtgctgggattactggcgtgagccgccacacccagccttaaaaattttttttggattgttactcttaatgcatccccagtaggtctgtgttcttctccttcagatgctgggtggttcttgtatgcttcggagaatacttggggatttactcc

SEQ ID NO: 708483 - DNA, 648 bp, Homo sapiens
tctgatgccctaatccatggaaactgtgactatgtcagattacaagaccaaggggaatgaagactgcggatggaattaagattactggtcatctgactttgagaaggcaaagattatcctggattatccatgtgagcccacagtaatcacaaaggtcctttaaatgtggaagagtatggccagagtcagagaaagatgtgcagatgcagcaacgctgccagatctgaagatggaagaagaggccatgagccaagcaatgcaggtggcctccacaagctggaaacggcaaagacatggatatttccctagaacccccaaaaggaggcagccctgacaacaccttgactgtagcccagtgggacgcatcccgtgcttctgacctccagaactgcaggataatgaatctgtgctgtgttgggccactgcatttggtaatttgctacagtaataacagcagattcatgcagatgcaaaagcagctcccacttctctcctgctcaaagcgcagcaggycgcagggctctgcagaagaatctaaaggcaaaaccccatcccaaaaccctcccttgctccctgtgtggatgtcctcctgaggcccacctgggctttgtctggctacaaggtgtgaccggacattgtatcctgagg

SEQ ID NO: 708484 - DNA, 648 bp, Homo sapiens
tctgatgccctaatccatggaaactgtgactatgtcagattacaagaccaaggggaatgaagactgcggatggaattaagattactggtcatctgactttgagaaggcaaagattatcctggattatccatgtgagcccacagtaatcacaaaggtcctttaaatgtggaagagtatggccagagtcagagaaagatgtgcagatgcagcaacgctgccagatctgaagatggaagaagaggccatgagccaagcaatgcaggtggcctccacaagctggaaacggcaaagacatggatatttccctagaacccccaaaaggaggcagccctgacaacaccttgactgtagcccagtgggacgcatcccgtgcttctgacctccagaactgcaggataatgaatctgtgctgtgttgggccactgcatttggtaatttgctacagtaataacagcagattcatgcagatgcaaaagcagctcccacttctctcctgctcaaagcgcagcaggtcgcagggctctgcrgaagaatctaaaggcaaaaccccatcccaaaaccctcccttgctccctgtgtggatgtcctcctgaggcccacctgggctttgtctggctacaaggtgtgaccggacattgtatcctgagg

SEQ ID NO: 708485 - DNA, 648 bp, Homo sapiens
tctgatgccctaatccatggaaactgtgactatgtcagattacaagaccaaggggaatgaagactgcggatggaattaagattactggtcatctgactttgagaaggcaaagattatcctggattatccatgtgagcccacagtaatcacaaaggtcctttaaatgtggaagagtatggccagagtcagagaaagatgtgcagatgcagcaacgctgccagatctgaagatggaagaagaggccatgagccaagcaatgcaggtggcctccacaagctggaaacggcaaagacatggatatttccctagaacccccaaaaggaggcagccctgacaacaccttgactgtagcccagtgggacgcatcccgtgcttctgacctccagaactgcaggataatgaatctgtgctgtgttgggccactgcatttggtaatttgctacagtaataacagcagattcatgcagatgcaaaagcagctcccacttctctcctgctcaaagcgcagcaggtcgcagggctctgcagaagaatctaaaggcaaaaccccatcccaaaaccctcccttgctccctgtgyggatgtcctcctgaggcccacctgggctttgtctggctacaaggtgtgaccggacattgtatcctgagg

SEQ ID NO: 708486 - DNA, 648 bp, Homo sapiens
tctgatgccctaatccatggaaactgtgactatgtcagattacaagaccaaggggaatgaagactgcggatggaattaagattactggtcatctgactttgagaaggcaaagattatcctggattatccatgtgagcccacagtaatcacaaaggtcctttaaatgtggaagagtatggccagagtcagagaaagatgtgcagatgcagcaacgctgccagatctgaagatggaagaagaggccatgagccaagcaatgcaggtggcctccacaagctggaaacggcaaagacatggatatttccctagaacccccaaaaggaggcagccctgacaacaccttgactgtagcccagtgggacgcatcccgtgcttctgacctccagaactgcaggataatgaatctgtgctgtgttgggccactgcatttggtaatttgctacagtaataacagcagattcatgcagatgcaaaagcagctcccacttctctcctgctcaaagcgcagcaggtcgcagggctctgcagaagaatctaaaggcaaaaccccatcccaaaaccctcccttgctccctgtgtggatgtcctcctgaggcccacctgggctttgkctggctacaaggtgtgaccggacattgtatcctgagg

SEQ ID NO: 708487 - DNA, 623 bp, Homo sapiens
aggtcaattatgatctcaatcttttcttgtaattttactgacaattctccttcacactgatttgttctttctctaattcctgtaaatagaaagaaccaaaaaaagttgaaaaaacatgtattgtacatataacaaacaatcatatgtggtatacaatatatatcaaatgagtattaagataaacattcaaagagttttaaagaaaaaagtgttatagatattggagggcagaagagacgattgccattaagaacaggtggaggaggttatgccaaggacattgacctgaccctttaggaattagtgaaaattgaataggagaagaatgaggtatacaatgtgtgaaaaatwcctaaattgatataacaggaggagaccttttcatatcaattatcattacttctgtgtatataaccatattagatacccacaaacgaatagaaagtggatagttcttgattgacaagtaagactaataatcccagatcatagtaaggtcttaacttcaagtcaataatctttattacttatggttcattcctctccctcatgttttccaataattttaaaatgcataattaaaacaattctcatttaaaaacatagtagccatgactaatgat

SEQ ID NO: 708488 - DNA, 1404 bp, Homo sapiens
aataagaaatattctggataagatattgtggctgctaccagaatggctcttgatgatctctacctcttggtatttatacccttatataatctctttcctatagtgtaagctggtcccaggtacttgtttctattgaatagaatagaacaaaagaaatgagatgccacttctgagattagattataagatactgtgaatttcttcttgtgycctctccctctctctctttctcttgccctctcatttgaatgaagccaaccggcatgctgtcagtggcccagtgtaagtcctgttacaagaaattgatgattacctgtagccaaccctaagtgaagaactgaggtcctcagtcctacaaatggagagaaactgaatctagctaagaaccatgtgagtgagctgggaagaagatccaccctcagttgaaatttaagatgacatattgagcagacatactgagacacactgaaagtaagagagcaggaggaaacaaaaccagggtcatacaaagaacacaactgattttgagattctcacataagtattacaccttcagtgagcacgtgtactagaaatttaaaaaataaataaaataaaccttcaaagtgagctagcaaataaatttccctatggtctcagctctgagtggagagagaaaatgttccctgtggagtttatagccagaatccagctctcaaacaggtttcagcctgaactcacacaatctgtgtggcttccaaatttgcaagctgagaatttaattcaaagtggtctcaggttgacagcagtccaaaatgctaggtaggaaaaaaaatcctctctggacaaataaatcatcaaagcaagctcataagagcaggtttcaaaggtcatgagcttctaacacacacacaaaaatcacacacacaaaatgggggtagcagcaacatgggtagcgtattcaaacttgaaaagactttaaatatttgtattattagatgtagattatgaaacacatattttaatgtggttaatttttttaaggaatcaaaactatgagtaaagaccaagaaaattgtgctggatggccacttccaccatggctcccctcctatttaagtctgggtactgtgtcacccgaagtcttcaggcacattgttccaggtttgggtttgcctatgaaagaaactcatgagagctggaaatgaggagtgaagaggaggtcttcacataaagcaggcttaaggattagacatagcaggtttgacagatgtgatggcttgcagaatcctttatgagctcccactgtccatctggataagatttacagacctttcagaaattcctataagcttgggttctgtgcccacactctagactgtcaggctaagatctctgatataaaacagacctcttctgattttt

SEQ ID NO: 708489 - DNA, 1404 bp, Homo sapiens
aataagaaatattctggataagatattgtggctgctaccagaatggctcttgatgatctctacctcttggtatttatacccttatataatctctttcctatagtgtaagctggtcccaggtacttgtttctattgaatagaatagaacaaaagaaatgagatgccacttctgagattagattataagatactgtgaatttcttcttgtgccctctccctctctctctttctcttgccctctcatttgaatgaagccaacyggcatgctgtcagtggcccagtgtaagtcctgttacaagaaattgatgattacctgtagccaaccctaagtgaagaactgaggtcctcagtcctacaaatggagagaaactgaatctagctaagaaccatgtgagtgagctgggaagaagatccaccctcagttgaaatttaagatgacatattgagcagacatactgagacacactgaaagtaagagagcaggaggaaacaaaaccagggtcatacaaagaacacaactgattttgagattctcacataagtattacaccttcagtgagcacgtgtactagaaatttaaaaaataaataaaataaaccttcaaagtgagctagcaaataaatttccctatggtctcagctctgagtggagagagaaaatgttccctgtggagtttatagccagaatccagctctcaaacaggtttcagcctgaactcacacaatctgtgtggcttccaaatttgcaagctgagaatttaattcaaagtggtctcaggttgacagcagtccaaaatgctaggtaggaaaaaaaatcctctctggacaaataaatcatcaaagcaagctcataagagcaggtttcaaaggtcatgagcttctaacacacacacaaaaatcacacacacaaaatgggggtagcagcaacatgggtagcgtattcaaacttgaaaagactttaaatatttgtattattagatgtagattatgaaacacatattttaatgtggttaatttttttaaggaatcaaaactatgagtaaagaccaagaaaattgtgctggatggccacttccaccatggctcccctcctatttaagtctgggtactgtgtcacccgaagtcttcaggcacattgttccaggtttgggtttgcctatgaaagaaactcatgagagctggaaatgaggagtgaagaggaggtcttcacataaagcaggcttaaggattagacatagcaggtttgacagatgtgatggcttgcagaatcctttatgagctcccactgtccatctggataagatttacagacctttcagaaattcctataagcttgggttctgtgcccacactctagactgtcaggctaagatctctgatataaaacagacctcttctgattttt

SEQ ID NO: 708490 - DNA, 1274 bp, Homo sapiens
atatgttaggaagggtcccaggaggtagacccacacagatgggatttgggcataggtttggtttcccagggggcagtgctgagctctttgccagtgggaaatgggatgctggtgatttccagtaggtgacctcacagtgactcaagctaccacttactgttgattgtgacgaaatgccagctgaggcacatgccttgggagctaagtggttgctgccctkgaccactgtgaagactggtgtgggaagggtcgctttggatgcacttgagcaggggttccccaacccctgagccatggagccgcaaggagccacacagcaggaggtgagtggtgtcgagtgagggagtgagggaagcttcgtctgtatttacagccactcccctttgctcacattcccgcctgagctccaccttctcagatgagcagcagcattagatgctcataggagaacgcaccctgttgtgaaccatgcatgtgagggatctaggttgcgctgtccttatgagagtctaatacctattgatctgtcactttctcccatcacgctcaggtgggaacatccagttgcgggaaaacaagcttaacacgcccactgattctacattatggtgagttctataattattttattatatatcacagtgtaataatggaaataaagtgcctaataaatgcaaatgtgcttacatcttttggcccagctcctacctcccggcagcctctccaggcccagaactttctccagtcagcctctacagaccaagctcatgactctcaatggcctatttaggcccataccctacgtcacggcagcctccgcagatgaggctactgcctcacaacagcctccacaggcacagctccatcgttacaatggcctctttagacccagctcctgcctcccagccttctctccaggccctgaacattctcagtaagttcaggtagctgggactgtaggtatacatgatgatacttggctaatttttaaattgttttgtagacacggggtctcactttgttggccaggctggtgtcaaactaatggcctcaagtgacccttccacccctgcctcccatcctcgaggcatgtgccaccacaaggagcacttgttcaattttctaaaaaaaaaatttctaaagtaaggctgtgggatgatggcaggaagataaaagaaaaacagaagaataagttaaaatgacttattcacgcatattcttttgacagcaagaagaacttttagtatgtacattccttacaaacaaacaaaagg

SEQ ID NO: 708491 - DNA, 954 bp, Homo sapiens
ggcatgatctcggctcaccgcaacctccaactcccagattcaaatgattctcctgcctcagcctcctgagtagctgggattacaggcatgcccccctacacctggctaattttgtatttttagtagaaacgggtttctccatgttggtcaggctggtctcgaactcccaacctcaggtgattcacccacctcggtctcccaaagtgttgggattacaggcgtgagccaccgtggccggccgctttacttttattaaaaggatataattttcagcaaaatgtaacaaatctatatatcatggtcattgtatcacttgagaatgttgaaactataaatgctaaataagtagatgccaagatattcacagcatctaaggcataatgtgattaaaaacaagaaaagtgttcacttctcttcagccagtcatctaccttcattgagtgcttgtatgcaaagcatcagagaaaatactatcgtttactttctagcttattctcccttttataaaatgctttgaatgtgaagcaaaaattgggagatagtgcatgatcataacttaagctgaagggcatatataagcagtaattttaattattatcttctaatgatgaatacacttgctcacaccccataaaaatatttggccaccaaccgatgtgacttcagggtaagttgatgttcgcttcactcccacatggattttattaagattcattaaggtatcttgttaactacaccttctcatttactgtgagatgtatttttttcctttcataaatccgaagtgaattcaaatgaataaaataatgtaaattaaagagcttggatgtttggtaaaacctaagggagattatatttattgtgtggcataacgctgactataatgaagacaagactttctccctagtgttcattttgtgtgttaaatgttttaatcattttgarcataagggc

SEQ ID NO: 708492 - DNA, 2267 bp, Homo sapiens
gatggaagataaagcttgtgatttaggatgacacagatagcatagaaccttgccactcaagctaagatatttgaatgctgttagtagtgtatagggaggtttataagagggcaaggtcattatggcatttgtattttaaaatgtcccttttactcttctttacagattgggagataattgattagaggtgttagcagcaaatgaaaatagagataaacagatttgaggtgtgttttgaggtgaaactgaaagtattggctgatagattcagtgtgggggagagggaatggaaggactcaagaatgatgtttacttttgttttcatgagcaatggggttggtaagactgaaagaaacagattgtggggtgacgaaagagaatcaagattctaatatatgcagtttaaattttcggtgcctaaaaaaatatcccaagtaacgacgtggactctgaaaatttccaatgtagagataaaagtttgaaatttatcagaatagatataacatttaaagccatgtgacgaggtgagatgacctagagagaggcacagattgagcgaagtgccttgggaaactccaaaatgtagtaaaaaaggagaagccaggaaaccagtcagagaggaaacaccaaaaaaagtgagagatcaactaacaatctcgaattctttagtttgctagatattaaaaataagaccagtaaaattttacattcatttgaaacatcaaaatgtgatatttaaggttaacattaaggcccctacagaaagcatttcaccttcatattttagatatcatctccaacttcgtttatcaagtgatatttgttaaatactaaagtgtacacaattcttatttatcaacatttttgtttttgggcactctaaaaaatatgtaattttgatgtgcaaacctgtattatatccatcattacaactgttaatatattctcactctcgctattatcagctaattgatttttatggaggaagaagtctgcaaagagcaattttggaggagatttggaatcatctgagaatagtaagcttttgttttaagtttaaccacaccatcacaaatatcctgagagataattttaaagcttaaaatgaaaattgctcctgggctgaaagctcatatgccaagtgaaatttcactaaagtaggagtttgtaagtgctgacaagttcttaactacagcgatgctagcaacattactattacaagaacacaacagaagctattagagctctcaaatatactcttcagtgttcacttactaaagtaaagtacaaatatgcaacaagagaatgaaagaggtgttatttttcagagggaaaggctattgaaatttttaaagtcactttgggatattacaggaattcatcacatgatagaagagtttcttttctattcatggggggcagggcaaaacagaaaatctgtgatgacacagagctttctaagactctgttggacttcataaacattatatcgttttattaaaagtgaacatctggcagtttaatgtcccaccatactgggatataatacaaacttaagggctcttctgatttcctgttatgaggttaatttagtaattgcaagcacaagcatatataggaaatacagtacttagaaaagtgaatcattgattggcacattactttctgtgaaacagagatcattctcatctcatctgtattaatttcaaaagagcagtcttagctcttttgtcagaaaggcaagtctaataacaagtatgctatcctcatgttacraaatatttccccattgccattatttagaaattctgagttagagctcagcattttattccttgtgagtcataatgaactgagtgtctatctctgaaactaggaagcatctatcttacctcagtcttgtagtccagaaagagatttattttaggcttattatatgcttttggctcattatgctcttagtgttaccactaacctcattcattttttgataatatttccatgtagaaattatatttccctttaataaattcaccaacacaaaaacacataaacaaaattgttttttacctctttatgtttaggacttttgatttatagttaggtaatatcctaaatcctcaaatcctttgcacaaaactgcagacttcccccagctaacacaagtaacacaggtttattttagcagaactgggaatggaaacaatttcttggcataaagtactcaaacatagaattttggacaaaataatagggcagtggggaat

SEQ ID NO: 708493 - DNA, 554 bp, Homo sapiens
taaaataccatgccagtagaaaataacggtataggaaagaaggaaaaaaatgaatcagtgttgttgttttcaagtaccttaatcactgtttgcaattgtttcctgcacacctccaacacctatttgatgttgctgagtctttgaatttaaacggtttctctgcaaggtaaattaactatcaccagagttggcctayattttttgaaagttactggttattggatttgaatttcatgttaactaatctgacctagccatattcaatttcattaccctacatgttctaatgaatgagttttcctcatgcaacgatataatttgcaaagttttttgtctggttttgttttgagttaacatgacacactgctcccctctatattgttgaatggagattttgatattgatgaacgtcataatattatatttcaaatttgttgatataaaaatgtctataacttttttaacattatgtttgcaagaaatggattaaattctgagaggaaaggggagaatgttgtcaatatacctataatgtgacataaaccttttaaatt

SEQ ID NO: 708494 - DNA, 554 bp, Homo sapiens
taaaataccatgccagtagaaaataacggtataggaaagaaggaaaaaaatgaatcagtgttgttgttttcaagtaccttaatcactgtttgcaattgtttcctgcacacctccaacacctatttgatgttgctgagtctttgaatttaaacggtttctctgcaaggtaaattaactatcaccagagttggcctacattttttgaaagttaytggttattggatttgaatttcatgttaactaatctgacctagccatattcaatttcattaccctacatgttctaatgaatgagttttcctcatgcaacgatataatttgcaaagttttttgtctggttttgttttgagttaacatgacacactgctcccctctatattgttgaatggagattttgatattgatgaacgtcataatattatatttcaaatttgttgatataaaaatgtctataacttttttaacattatgtttgcaagaaatggattaaattctgagaggaaaggggagaatgttgtcaatatacctataatgtgacataaaccttttaaatt

SEQ ID NO: 708495 - DNA, 554 bp, Homo sapiens
taaaataccatgccagtagaaaataacggtataggaaagaaggaaaaaaatgaatcagtgttgttgttttcaagtaccttaatcactgtttgcaattgtttcctgcacacctccaacacctatttgatgttgctgagtctttgaatttaaacggtttctctgcaaggtaaattaactatcaccagagttggcctacattttttgaaagttactggttattggatttgaatttcatgttaactaatctgacctagccataytcaatttcattaccctacatgttctaatgaatgagttttcctcatgcaacgatataatttgcaaagttttttgtctggttttgttttgagttaacatgacacactgctcccctctatattgttgaatggagattttgatattgatgaacgtcataatattatatttcaaatttgttgatataaaaatgtctataacttttttaacattatgtttgcaagaaatggattaaattctgagaggaaaggggagaatgttgtcaatatacctataatgtgacataaaccttttaaatt

SEQ ID NO: 708496 - DNA, 554 bp, Homo sapiens
taaaataccatgccagtagaaaataacggtataggaaagaaggaaaaaaatgaatcagtgttgttgttttcaagtaccttaatcactgtttgcaattgtttcctgcacacctccaacacctatttgatgttgctgagtctttgaatttaaacggtttctctgcaaggtaaattaactatcaccagagttggcctacattttttgaaagttactggttattggatttgaatttcatgttaactaatctgacctagccatattcaatttcattaccctacatgttctaatgaatgagttttcctcatgcaacgatataatttgcaaagttttttgtctggttttgttttgagttaacatgacacactgctcccctctatattgttgaatggagattttgatattgatgaaygtcataatattatatttcaaatttgttgatataaaaatgtctataacttttttaacattatgtttgcaagaaatggattaaattctgagaggaaaggggagaatgttgtcaatatacctataatgtgacataaaccttttaaatt

SEQ ID NO: 708497 - DNA, 554 bp, Homo sapiens
taaaataccatgccagtagaaaataacggtataggaaagaaggaaaaaaatgaatcagtgttgttgttttcaagtaccttaatcactgtttgcaattgtttcctgcacacctccaacacctatttgatgttgctgagtctttgaatttaaacggtttctctgcaaggtaaattaactatcaccagagttggcctacattttttgaaagttactggttattggatttgaatttcatgttaactaatctgacctagccatattcaatttcattaccctacatgttctaatgaatgagttttcctcatgcaacgatataatttgcaaagttttttgtctggttttgttttgagttaacatgacacactgctcccctctatattgttgaatggagattttgatattgatgaacgtcataatattatatttcaaatttgttgatataaaaatgtctatawcttttttaacattatgtttgcaagaaatggattaaattctgagaggaaaggggagaatgttgtcaatatacctataatgtgacataaaccttttaaatt

SEQ ID NO: 708498 - DNA, 1477 bp, Homo sapiens
  misc_feature 1077, 1078, 1079, 1080, 1081, 1082, 1083, 1084, 1085, 1086,1087, 1088, 1089, 1090, 1091, 1092, 1093, 1094, 1095, 1096,1097, 1098, 1099, 1100, 1101, 1102, 1103, 1104, 1105, 1106,1107, 1108, 1109, 1110, 1111, 1112, 1113, 1114, 1115: n = A,T,C or G
  misc_feature 1116, 1117, 1118, 1119, 1120, 1121, 1122, 1123, 1124, 1125,1126, 1127, 1128, 1129, 1130, 1131, 1132, 1133, 1134, 1135,1136, 1137, 1138, 1139, 1140, 1141, 1142, 1143, 1144, 1145,1146, 1147, 1148, 1149, 1150, 1151, 1152, 1153, 1154: n = A,T,C or G
  misc_feature 1155, 1156, 1157, 1158, 1159, 1160, 1161, 1162, 1163, 1164,1165, 1166, 1167, 1168, 1169, 1170, 1171, 1172, 1173, 1174,1175, 1176: n = A,T,C or G
cagcctgagtgacaagcaagattgcatctcaaaaaaaaaagtaaaatcttcatatgtcttaaaatgtaaacgcagccttctatttcactttatgtaaatattcttacatttgacatggacctagtaaaaggtcaatatggtcatagttcttaagttctttaaattcaacttcttattggtatgagaataacaaaaagaataattcagtcacatgagattattacaaagtttacacagagaagacctgaaaatttgtacaatgctgaaatacagtgataaagtctgtaataacaagatacgattacaacttatgcatgacagtagacaatgatatatacccaaaacaacctcttagatttcatttacaatatttttgttatctccttaagttagaaggatcaggaattccagtggtcatcagggtatcttttttacagattctgctaaaatcttctacaaattattgctaatgggttatttggctcttgattattggtttgtaattgccacagccatttcttatttgatccatggcttatttaaaagtgttttttttaatttaaaaaatagagtgttctaaatatattttgttatcaaagttctgtttaattttatgatggattctgctttatgcactagtatgtggtataatatagcccaagccacttgaaataagaggctatacgtaatctctgtgagcagctagcccagagtccatacatcactgtgcaccactcttgcagtagtgctttatccccagtttgcacctatgaccacagagggtgaggtctcacagaataaactgaaaaagakaaagcaagcttaactatgaaaattttactgaaggctgtagctagttgaatgaggcaagaaaaagaaatgaaaggcacacagattagaaaggaagaagtaaaactgtctttaatagcaggtaacatggttcttcatgtaaaaaatcataaggaataagcacaacacatttgcacacacacacactacttgaactatttaaatttagtaagatgatgggatgccagattgatatttaaacatcaatttatatataacatttctgtnnnnnnnnnnnnnnnnnnnnnnnnnnnnnnnnnnnnnnnnnnnnnnnnnnnnnnnnnnnnnnnnnnnnnnnnnnnnnnnnnnnnnnnnnnnnnnnnnnnnattacaggcgtgagccaccgtgcccggtgatctttttattgttaaaaaaatagtaaacattttacatcttgctgttaaaacaactttttctgttatatttattttatctatgtctttggtttataggacattgttggtgaatttcattcttatatcaggctctgctttataaatggggatattcgtccatttgaacatctggagtaagtgatatatttggtgttatttctaattagaagcataattaaagaaatagatttacaatgtaaacaaaattcacgttttcaatttattctccttt

SEQ ID NO: 708499 - DNA, 1741 bp, Homo sapiens
ttctttcgcttttagtcttcatgacttatttttttcatcatgtcctgaagatttctgcatgttagtaacacattcctggttcttcagaagtagagaaagctaattaaatttaatatgagaatttttcaacattgtcagtgtataactggaatatcacattttagagattagaaaccatgacaagaggttaagtgatttaatctgtataaccatgtaataaagtaatggtaattgttaaattagcttctgaacggcgttagctattttttaaaagtacttgatagttttattttaggttttcagaggttgtactttacttcagatcatgaaatgcattaatctgaacacatgtcatattagaatttcaataagccagagattttccttgtaaaaccacattaccacattacagaaatcatagtaaagctgtatactttatgcctggtgcaaactctctaaccatggaatattatagagaatacttggaacgtcaggaaatatttttactagtttggaaattgtgttgagtttatcaggaagttattgcctagtgaaaaattcagatttaaggaaacaattaccatagattaagagccaattcattcagtagcttttcactaaatcaaatctctcgcttcagttgaaatctatacatgttatgaaagaataaaactcagacytacaaatactgcttaagacttattgttttattttattatatcacttatggttctacacttctgtccttcactagcgctactagcgcagtatgggacaccatcctgagaatgctcaagaatagcaggtggaagtaagtataggggctctgcctgccagattgcaggcatcttcatccccgtagttactgtgtaacttggagtgtcattgtttggtcatctgcaaagtaggaataatactgaaaatcaattatttggaatgttttcagcattaactgcaaactacttagaaacatgtctggatcaaagtagatgctttattattgttgttattaataactgtcaaactggtctattggtttccagccttgatccctttcattctatgctttcgttcttttgaagtccagtcaagatatagctttgtcttcaggatgcattctttcctctcacatctagcctgcataattctgatgaaggcccattaagaggttacagacccagaaatatctttttctctttgatcataggttagcattatagctctgtaaaatgagtgctgagactatgctgtgatggcacgattgatgcgaagaactgagttctttagctttcaaagctgctcaagatgacaggtggctcagaggtgcctaaggatatttgccctaatctcagactcctataggttttctttcctcagaatgtgatatgaaaagaaaatgtatataacaggaaaagaaggagaaatattccatttctatgttcttttctttaatctcatttcttgggataaatatgaacttttaatccagataggtggatgatagaattttcacctaaattctcatcgcttggatacccagtgaaattcattaaaaacacaattgataattgtgctacaaacatgttgctaatttaaataaaaaatctggcgtctgagtcaaagaacatcttaactattactttgtagtttggatttaccatcatgtagtgtgaaaatccatttattctctactgattataaacttttattattttccttgagggattcttatcatgtatgt

SEQ ID NO: 708500 - DNA, 1542 bp, Homo sapiens
ccttacccccaaccctgtgccctctgaaacatgtcctgtgtccactcagggttaaatggattaagggcagtgcaagatgtgctttgttaaacagatgcttgaaggcagcatgctcgttaagagtcatcaccactccctaatctcaagtacccagggacacaaacactgcggaaggccgcagggtcctctgcctaggaaaaccagagacctttgttcacttgtttatctgctgaccttccctccactattgtcctatgaccctgccaaatacccctctgcgagaaacacccaagaatgatcaattaaaacaaaaaacaaaaaacaaaaaaaaaaacaaagttactgcagagtagagctaaaagacaacctcacaacggttagatacacaggcccatcttcatcacatttgcatgtgccattctagatattttcttagaataccacaaactaaacctgtggttacgatccaagcagattgaaaactgccttggctgaggccagaaagaatggttaaagcttgaagactgattttttttacttgaaactgctctccagcactttccccagctaccccatccattgctaattagaggcagccaaggcttgacatgtacacagttctctgtggtaaaattgattattatattactatggaaaataaggaagtcatttcattcgaaatatcaaattccacaaaaatcatacatggcagctgttagcatatgcatgtgggggaagggcaagtgtgtgaacatattaaccctctccccttcagttttctgacatctcagaattgcaagaaagaaaagattccaatgyatataaggcagaaaccaatggcaaagctgcataaaagctatttttgaggttaaaaaaaaaatctccgtgatataagacaccccgtccatgccgttttatgagtatggatttgcttttacacacttgcaagcagaaaactagtattcctctaccacatgtgttgaagctacttgtaattgcatcagatagagaaatgaggtgagtcatgtttggttgtgcttgagtctgctaacagaccatcatgtccatgtccaaatttgtaccctgaaccgcacaacagaagtttatgcacttgcttgcttgcttggcgacaatgaaaatagttttgtttaaacacttaactttacttaaagatacctaagaggtgctgaaattcatattccagctacttcaggggtgctcagaagctattctcaagccttgtttcttggcgaaatatcccctgctcatgaattttaacacggcactcccctcctggtccagaatgagtcaacactcaacacatacgagatgtttcaaacacctttaagttcattttccatcactgccaaattccagcaattaacacaaagcacctcacccttaagagatgcccatcatttataaagttttgggattctgaatgcatccccttccattctcccagatctggtgataactcaatctgttttccagtagccttgcgacttttctttaaagaagagtttagtaaccagcgtaaaa

SEQ ID NO: 708501 - DNA, 1542 bp, Homo sapiens
ccttacccccaaccctgtgccctctgaaacatgtcctgtgtccactcagggttaaatggattaagggcagtgcaagatgtgctttgttaaacagatgcttgaaggcagcatgctcgttaagagtcatcaccactccctaatctcaagtacccagggacacaaacactgcggaaggccgcagggtcctctgcctaggaaaaccagagacctttgttcacttgtttatctgctgaccttccctccactattgtcctatgaccctgccaaatacccctctgcgagaaacacccaagaatgatcaattaaaacaaaaaacaaaaaacaaaaaaaaaaacaaagttactgcagagtagagctaaaagacaacctcacaacggttagatacacaggcccatcttcatcacatttgcatgtgccattctagatattttcttagaataccacaaactaaacctgtggttacgatccaagcagattgaaaactgccttggctgaggccagaaagaatggttaaagcttgaagactgattttttttacttgaaactgctctccagcactttccccagctaccccatccattgctaattagaggcagccaaggcttgacatgtacacagttctctgtggtaaaattgattattatattactatggaaaataaggaagtcatttcattcgaaatatcaaattccacaaaaatcatacatggcagctgttagcatatgcatgtgggggaagggcaagtgtgtgaacatattaaccctctccccttcagttttctgacatctcagaattgcaagaaagaaaagattccaatgtatataaggcagaaaccaatggcaaagctgcataaaagctatttttgaggttaaaaaaaaaatctccgtgatataagacaccccgtscatgccgttttatgagtatggatttgcttttacacacttgcaagcagaaaactagtattcctctaccacatgtgttgaagctacttgtaattgcatcagatagagaaatgaggtgagtcatgtttggttgtgcttgagtctgctaacagaccatcatgtccatgtccaaatttgtaccctgaaccgcacaacagaagtttatgcacttgcttgcttgcttggcgacaatgaaaatagttttgtttaaacacttaactttacttaaagatacctaagaggtgctgaaattcatattccagctacttcaggggtgctcagaagctattctcaagccttgtttcttggcgaaatatcccctgctcatgaattttaacacggcactcccctcctggtccagaatgagtcaacactcaacacatacgagatgtttcaaacacctttaagttcattttccatcactgccaaattccagcaattaacacaaagcacctcacccttaagagatgcccatcatttataaagttttgggattctgaatgcatccccttccattctcccagatctggtgataactcaatctgttttccagtagccttgcgacttttctttaaagaagagtttagtaaccagcgtaaaa

SEQ ID NO: 708502 - DNA, 677 bp, Homo sapiens
aaaccacgtaccaattttacccattactcatggaagcacaatcttactttactaatggttgacggtttatgtcaaagggcattttaagatgttgtgagatagcttagttcaaggggaagaattgcaaaaacatactaaacaacagcatttctagattctgggaactatttagaaaataaacacacattaaaaagaaaacatccataatcctgaactaaaattaggaatraacaacttaaaaaaaatggaataaacaaacagaaaacatcaaattgtactaagaaacataaaaagacagcccccctcacacacacacacatacacacacaaaaggtgtggtgggatgccaccattctggagaacaccaagcactgtaaagtgatttctctttcccaatttgaattctagtagacttccaattaaaaccttggtggtgaagatttagcaggaagacaagctaaaatttttttgaaaagaataatgagtgaaatatgcctaactagttgtatattacaaatctacacgaaaagcacagttctagcacaggggaaaatgatgagctagaggaaaatgatgagctagaatcagtttaagaacagcttctatgatgaggatacatgcatcatgaatcaataagctggtataaaacattcaataaatagcaaaagtcttgttta

SEQ ID NO: 708503 - DNA, 632 bp, Homo sapiens
atctggcaaccagcagggagctctgaagcacgtactggtgggcaccacctggattacgccgtgctgctcgttaaagctgcacccaaggaaacacgctcacccattcacagtgaaatggtctccaatgtagacacactttaactgctggttcttgtactgcttgtatttatacttttttaacaatatcattcaggaagataaaaatgttcacatattaattaatcatctgtcctcaggattcattgcccatgcattgataactctttccaactttgttttattcttcaccaaaagcaagaggggaaatcccagtgaacgatcatactggcttttcagagcaaggtggtcacaggaggtcagagacacagatactgaggcaacgggtcggcaaccagcatctgtggacccatcactgctggccgggcagtaccaggtgtctcacccaacccccaagccataatcccctgaagatgaaaacttcaggtccaggatgcctaaccacctcgcctgcccaaggtcactgagcaggtgaggggtgctaagctcataccaaattcaggcccatgaggctgcacaaatgcagcctccgtcatacccagctgccaccacagaggcaggaacggtacytacgt

SEQ ID NO: 708504 - DNA, 589 bp, Homo sapiens
atatatatatatatatatatatatatatatatayatatacacacgtatacggaattaacagaagaatgaatgcaaacagtcaattaacttgcaaaaacagttttcctgttttaaaattaaaacaatgagatagcaatttctcatctgccagacactgaaaaatagattaaaatgttggttaagaataggtaaatatgtactcacaatcttttcagcttttttagagagcaatttggcaacatctattaaaattttaaatcaattacaggccttgtgttttatcgtttacaatagcaagttgccgactaactctcaaatagtgtaaaatgtatcctcgaataggaaaaaaatgtatatgcatatgtgtatgtgtgtataaacatatatgggggagaaagaggagagggaaagtaaatgaggcaaaatgtaaacaattggtgaatctgggtaagggatactatatgggtatttcttgtactggtcttgcaacttgtaagtttgaaatcatatttatataaagtttaaaacataaaaagaaataatttgagtcttaaaatagagagttctccaagacatgatgttaaataaa

SEQ ID NO: 708505 - DNA, 589 bp, Homo sapiens
atatatatatatatatatatatatatatatatatayatacacacgtatacggaattaacagaagaatgaatgcaaacagtcaattaacttgcaaaaacagttttcctgttttaaaattaaaacaatgagatagcaatttctcatctgccagacactgaaaaatagattaaaatgttggttaagaataggtaaatatgtactcacaatcttttcagcttttttagagagcaatttggcaacatctattaaaattttaaatcaattacaggccttgtgttttatcgtttacaatagcaagttgccgactaactctcaaatagtgtaaaatgtatcctcgaataggaaaaaaatgtatatgcatatgtgtatgtgtgtataaacatatatgggggagaaagaggagagggaaagtaaatgaggcaaaatgtaaacaattggtgaatctgggtaagggatactatatgggtatttcttgtactggtcttgcaacttgtaagtttgaaatcatatttatataaagtttaaaacataaaaagaaataatttgagtcttaaaatagagagttctccaagacatgatgttaaataaa

SEQ ID NO: 708506 - DNA, 589 bp, Homo sapiens
atatatatatatatatatatatatatatatatatatayacacacgtatacggaattaacagaagaatgaatgcaaacagtcaattaacttgcaaaaacagttttcctgttttaaaattaaaacaatgagatagcaatttctcatctgccagacactgaaaaatagattaaaatgttggttaagaataggtaaatatgtactcacaatcttttcagcttttttagagagcaatttggcaacatctattaaaattttaaatcaattacaggccttgtgttttatcgtttacaatagcaagttgccgactaactctcaaatagtgtaaaatgtatcctcgaataggaaaaaaatgtatatgcatatgtgtatgtgtgtataaacatatatgggggagaaagaggagagggaaagtaaatgaggcaaaatgtaaacaattggtgaatctgggtaagggatactatatgggtatttcttgtactggtcttgcaacttgtaagtttgaaatcatatttatataaagtttaaaacataaaaagaaataatttgagtcttaaaatagagagttctccaagacatgatgttaaataaa

SEQ ID NO: 708507 - DNA, 646 bp, Homo sapiens
atttcctgtcctacagtctcttccccctacttcttgagaaaaggcagaccatgatttactggccctcttggccctcaaaaaacatctgatgcggggaagtggagctcaaacatggccaaggacagcatctctggctctattatctgggtgaccacaaaagccacttaggggcagatgacactccaaccttcaataagaagtcctggggccacctcctccccagccaccagcctggccctgagacaacttatgcccacagttaacgactccatttgcacttagtgcctttcaggcctgggtgcacaccccagagaatggtaacctaggcatcaccgtatacrccatacacatagccagaaaggacacagataggcttcccattttgctcatagcatcacattttttcattgatatttatgttttaactgttctatatttttagatcctctgcatcaaataagtaactgccgttaatgaactaatctcactttctatactgtcttgattattgatgtgatggttaatcccgaatgtcaacttgattggaatgaaggatacaaaatattaatcttgggtgtgtctgggtgggtgtggccaaaacagattaacatttgagtcagtgggctagggaaggcagatctaccct

SEQ ID NO: 708508 - DNA, 646 bp, Homo sapiens
atttcctgtcctacagtctcttccccctacttcttgagaaaaggcagaccatgatttactggccctcttggccctcaaaaaacatctgatgcggggaagtggagctcaaacatggccaaggacagcatctctggctctattatctgggtgaccacaaaagccacttaggggcagatgacactccaaccttcaataagaagtcctggggccacctcctccccagccaccagcctggccctgagacaacttatgcccacagttaacgactccatttgcacttagtgcctttcaggcctgggtgcacaccccagagaatggtaacctaggcatcaccgtatacgccatacacatagccagaaaggacacagataggcttcccattttgctcatagcatcacattttttcattgatatttatgttttaamtgttctatatttttagatcctctgcatcaaataagtaactgccgttaatgaactaatctcactttctatactgtcttgattattgatgtgatggttaatcccgaatgtcaacttgattggaatgaaggatacaaaatattaatcttgggtgtgtctgggtgggtgtggccaaaacagattaacatttgagtcagtgggctagggaaggcagatctaccct

SEQ ID NO: 708509 - DNA, 644 bp, Homo sapiens
cagttaagtaaccccctaagctgctttgggggccacacccagctgctttctgacttctcacactgtttggttcacaggactctgttacccattggggacctcttggccattattaacacaggccaacaggactaaaagtttgtatcagtccttcccaaaacattagggaaggttgtgcgggaargtaaagcacaatttttgccttacaataggactcctttgaaactactattgagttcccttttaaatagcccttcagaaccgcttttaataatgtgttgtttctgggggttaatagtgataattctcctaagtcatttttccatttcgtttttctgtcacgggcttggagcggttaagagactgcggctcccagcatgcggtacgttactgatcagggcaaaatcaagtatgttactacatgcttctcaaactagagaggcacagccccaattctgcactggcaggatacaaaacagcagaatattggtgatacatcttcctggaacatcagtttttctatgagatgtggaagaaatggaattaagtagtttacaaggtaaataattaagaatttaaaactaagccagtcacagtgggtcatgcctgtaatcccagcactttgggaggctgaggtgggagga

SEQ ID NO: 708510 - DNA, 644 bp, Homo sapiens
cagttaagtaaccccctaagctgctttgggggccacacccagctgctttctgacttctcacactgtttggttcacaggactctgttacccattggggacctcttggccattattaacacaggccaacaggactaaaagtttgtatcagtccttcccaaaacattagggaaggttgtgcgggaaagtaaagcacaatttttgccttacaataggactcctttgaaactactattgagttcccttttaaatagcccttcagaaccgcttttaataatgtgttgtttctgggggttaatagtgataattctcctaagtcatttttccatttcgtttttctgtcacgggcttggagcggttaagagactgcggctcccagcatgcggtacgttactgatcagggcaaaatcaagtatgttactacatgcttctcaaactagagaggcacagccccaattctgcactggcaggatacaaaacagcagaatattggtgatacatcttcctggaacatcagtttttctatgagatgtggaagaaatggaattaagtagtttacaaggtaaataattaagaatttaaaactaagccagtcacagygggtcatgcctgtaatcccagcactttgggaggctgaggtgggagga

SEQ ID NO: 708511 - DNA, 666 bp, Homo sapiens
ttcatgattttattagccacttttaacttaaaagtgctgtagcactggcccctgtattggcgggagttcaagcacagccaacagttggtttagctgaaggaaaattcccactagtcaaaaccagactccagtttgatctctttttagaacaagccttgaaaagcagctctgctttaaacaaaaataaaagtaaaagaattcttcctccaaagggaaggtaactgtggaaagctatgttcttccaaagcattgacatttgaggataaatcttcctgagattcacagcccttgtgggtggagagggctgagtttgtaatcaggatcttgagtgatttacatgtttccayagggtcagttcactccagtatgctgaaagacctacacatgtgtgttgggttggtgggctggatcatttagtaactattggccaaaaggactacaggaaacttttgagaggagaagggaactcatagcatctaagccgtaaattaggagtctggcaattgagaattccagttccccaagggactcatgttggagtccagtgcatagggtggggggtggatacagaacattcataaatgttcaaggtttttattttatgactacacacctcagtcgccatatagtcatacggttcagatcagcacctccatggtcctcggc

SEQ ID NO: 708512 - DNA, 833 bp, Homo sapiens
tcttgggttgtcttcatggggcaatactctcctctttggaaaaaaatgccagtctaaagaaagccatactgctattttggagaggtgaggaggatggttaagattaaccagtagtgaaatgcttcctgtgggttccagtgcctctcagagaaaacaccaatcagtgataatagaagatatcctttgaatgtgagacatagragaatatttctcacattcactttcattttaacattaggtgcaactgacttgaaattcacaagaatgttatccaggggagaagaaaatcagaagcttattaaggaatactaaaataagcacttggaaagacaatttatcattttgttgcaggcacagacttcttgggaagcgctttctccctctggtttggcagtattaaattacattgttggaaaacacacttggatgggtgacttaagccaagtctgcacacactaggtgaaaccgtatctattgacttacaagctggatgcatgtgtcaaaatgcaatccggtatttttgtaataatagctagcagtcatggttgtaaattatttatggagagtattcagtgcaaacaggttagtgcacacatcctcttcagcttgactgccctggttttagatcacgcagacattcaactcctcagagatctgctcttatcactgcaaaccctaaaagggggccccaactgcagtcagttcagcgactcacagcagcccggccacttgcttgctaaagctctacctcaaggttcagtgagtgaacacggtccctctgccccgctctctcacacccgcctggccctggcgatgtaaggtaatatcagaca

SEQ ID NO: 708513 - DNA, 664 bp, Homo sapiens
gcatgttttgtgaacatggcacgtagtcacttgttcaatgaatgcgtgatctgcaattgaggagacaagctgttctagaatcagaaaacagcaattccttgcaagacaaattattcctaagaggaattttcatgtcacttttcacatatagacattaaaataagcttcttcccttgggaatcatttaaaagagaaagcaaatttgaaatattctkaggttttcttatagctaatcaacacatcataggaaaacaaatagtgcttcctagactagcatcacacaaaaagtagttagaacttatgtaatgaactcattatacatctgtttttaaaaggatgaaaccagttccctatcacagaaatctcagaaataatgagtagatttcaaaatatttcccatactgtcttgctttgggattttagcacactctcctgccttcattcaagttatccaaacacaaagaaatgagattgccgcccattaaccccaggaggacactggactggaatgagatgctacctttaccatcaaaacctttgattaagaaaagtaactgaacagggcagtgtgacacaatgtgtaagccattggtgtcactggctttgccagtgctccttctctgggtcatgttggaggcctttgtgacacgagcagcaattgctg

SEQ ID NO: 708514 - DNA, 610 bp, Homo sapiens
tttctacctaaaatgtctcatggaatagagaggcttgaggagacagagatgagggatgggctggtcagtggagcagtctgaacacccacaacatttagtaattaagtttgccatcttatatgggtgatgatgcccccctcaaaattactatagtaacatcgaagatcactgattacagatcaccataccagatataacgataatttaaaagtttgaggttttgtgagaatkaccaaaatgagacccagagacacagtgtgagctcatgctgttggaaaaatgtcactaacaaacttgcttgatacagggttttcgcaaaccttaaattgataaaaaatgcaattatttatgaggcataataaagtacaataaaacaaagtacatgtataatctagttggccaaagtttactacatacgccctcacaaataattcattttcaagaaactaaacatatgtacagtatcttccatattaagaggatactcattacaatgtaaccttttcatttgtttgcattatgatgattcagaaggcactgggggaccctttcaagaataaggcagtgatccatacatcagagatcatggtacagtaatgctgtaaataga

SEQ ID NO: 708515 - DNA, 670 bp, Homo sapiens
atccatgcctgaggaatgactaagcaatgaatgaacagagaggcgtggaagaacatctagggtgagggctgcaggcatatccatgccagccctccttttcccccagggcaagcccagaaggaagcagacactggagagaaaggactggctgttaatcttttacccaaagttcagctccacagtaatgctctttgtgctgcccctgctaactagaggcagaaaatgtggaaacatcacatatttgccgtaaatctgctgctttttatgtaaaaacattcatgactggcttcatgttttggtccttactttctctccctcttcctgtatccatttttataaccccctgttctcacatgtcaaaacagtgtaactaatcactctgtcaccttgatcccctgcaaagatgccttctccactgtttcccccccacmcgtcttcaccatctacttttccagctgttccctccagggcagcagactcttgcatccatagtcaccagggcacacagatctcattttctttatgattcatctcccaagaggagaaatgaccaggatcaagaaatgcatatgtgacattgctggggaaatgtggcttcagacaagacaggagttggcagaaatggaggttactcactttactcaaagcgaggagctgggagagattgcct

SEQ ID NO: 708516 - DNA, 598 bp, Homo sapiens
cttgtttgtgacaaggtaaccaaattatctgcaataggaaatacttgccctaccagtctctagcagacagaatgaggagaacacacatgggctgggcatccraaagtgtacgacgttaaaaatgttcccgtgttcaccccgtagaaattatcatgtgattcagcaaaagaatggcgctgccatgttgccgctcgatgtgtatccaggagcagattttgaatgcaatcacgactagtgttttaacattgaatacatataacttagcccacactgaattattgccacatatgcaaaaattgtggataaaccaataaagactgtaaatatgttttgagttttttttctgtttttgttttttttgagatgggggctcacactgtcacccaggctggaatgcagtggcacgatcatggctcactgcagcctcgacctcccaggctcaagcaatcctcccaccttggcctcctgaatagctgagactacaggtccatgccaccatgcccggctttttttttttttgtattttttttgtagagatgggtcttgccatattgcctgggttggtctcaaacttctgggctcaagtgatccacctgcc

SEQ ID NO: 708517 - DNA, 598 bp, Homo sapiens
cttgtttgtgacaaggtaaccaaattatctgcaataggaaatacttgccctaccagtctctagcagacagaatgaggagaacacacatgggctgggcatccgaaagtgtacgacgttaaaaatgttcccgtgttcaccccgtagaaattatcatgtgattcagcaaaagaatggcgctgccatgttgccgctcgatgtgtatccaggagcagattttgaatgcaatcacgactagtgttttaacattgaatacatataacttagcccacactgaattattgccacatatgcaaaaattgtggataaaccaataaagactgtaaatatgttttgagttttttttctgtttttgttttttttgagatgggggctcacactgtcacccaggctggaatgcagtggcacgatcatggctcactgcagcctcgacctcccaggctcaagcaatcctcccaccttggcctcctgaatagctgagactacaggtccatgccaccatgcccggctttttttttttttgtattttttttgtagagatgggtcttgccatattgcctgggttggtctcaaacttctgggctcaagtgatccrcctgcc

SEQ ID NO: 708518 - DNA, 867 bp, Homo sapiens
tttttggtttggttttgtttcgtttcgagatggagtttcgctcttgtcgtccaggtatgagtgaaatgatgtgatctcggctcactgcaacctccgcctcccggattcaagcgattctcctgcctcagcctcccgagtagttgggattacaggtgtccaccaccacrcccagctaatattttgtatttttagtagagacagggtttcatcctgttggccagtctggtcttgaactcctgacctcaggtgatctgcccacctcggccttccaaagtgttggcattacaggcatgagccaccacgcccagccatgagtaggttctttattagatgtttttcattcttagcatggaataaatgatgaagtcataaatatttggaagtgaaggagtctgaactgataacacttttccgtggcttttaaactgtattcagtgaatctcctgggtgtgtcggggggctgatgtgatcagagaagctctgacctggcctcgtggtccacacggaactgccgcagccggtcatagcaacagcagcctagtgttttagggtgtgtgcatcagatttcacgcacccacacacacacacacacacccacacacaaaattggttctgctgctttaacatatataatacaaataggcttgtctcaaactagctttttgctatctggggcccaaagaagttaagtgacttcttaaggctacatttgaaactactgtcagagcagactcattgctctgatttttttttttttttttttagtgatttttactgtggtaaatatacacaaaataaaattaaccactttaaccatttttaagcatacagttcagtggcattaagtatatttacattgtccaacca

SEQ ID NO: 708519 - DNA, 867 bp, Homo sapiens
tttttggtttggttttgtttcgtttcgagatggagtttcgctcttgtcgtccaggtatgagtgaaatgatgtgatctcggctcactgcaacctccgcctcccggattcaagcgattctcctgcctcagcctcccgagtagttgggattacaggtgtccaccaccacgcccagctaatattttgtatttttagtagagacagggtttcatcctrttggccagtctggtcttgaactcctgacctcaggtgatctgcccacctcggccttccaaagtgttggcattacaggcatgagccaccacgcccagccatgagtaggttctttattagatgtttttcattcttagcatggaataaatgatgaagtcataaatatttggaagtgaaggagtctgaactgataacacttttccgtggcttttaaactgtattcagtgaatctcctgggtgtgtcggggggctgatgtgatcagagaagctctgacctggcctcgtggtccacacggaactgccgcagccggtcatagcaacagcagcctagtgttttagggtgtgtgcatcagatttcacgcacccacacacacacacacacacccacacacaaaattggttctgctgctttaacatatataatacaaataggcttgtctcaaactagctttttgctatctggggcccaaagaagttaagtgacttcttaaggctacatttgaaactactgtcagagcagactcattgctctgatttttttttttttttttttagtgatttttactgtggtaaatatacacaaaataaaattaaccactttaaccatttttaagcatacagttcagtggcattaagtatatttacattgtccaacca

SEQ ID NO: 708520 - DNA, 1262 bp, Homo sapiens
tcgtgccctgcactgcgccggaaccattcggttctcatcctctccctctgcgctcgccttgcgctccgccgaaaccattcgggtcccgtcctctccctccgtgctcgcgtccctccttgaagtcggagtttctctcgtgcacgtttgcactttgcaggctccagccgggtcccttgcacacgccgatgccctggggatgccggttgtagtgacctggtccctgtgactaaggggccttggggaggcctgtctgtccctccttctgcctctgatctccatatgaccccgccatgccgctgtagaacttggcccaggaagctccagcaaatggggacgagaaccagactttgcccccaaacagaagccctggctgggcacccgctcaccaagcctaggtttgccattctcaccccagcacctgaatcaaattcctttcaagtttcaaagaagtaaaaactcggtctgtgacaaatgtctctaacatgaaacatgttcccagacttccaggacacaacacagagccgcggtcctctttccctgtatgaacagtgtctttgtgagagagcgtctttgttcagaaggggaagaaagaatgaatcatgctacggaacactcaggcaggtgccggccattctggaaacacgtgtatttcggcgtatcgtgtactggcatgctgcggggaatagcaatgaatagcgtggaggacaatcgtgcattgttgatgtttgttaaaataaagatattcaatttataataaaagggattaaaagcttaattcatgactatgttaatatttgtctgcaagtacacagataaatggcaacgcaccttatcacgttgaacacctgtgcgcacaagttcctctgctgagatcgccatgggattgtgtgtttcacagagcttaaactttcatttcccaaaataatgatatcattcatttacaggtacagataggctcgccttgctctcactctatcctgaaatgagtattgtggcttcagctacaaaaatacgggattaattatggcagtgatatgccacaatctgccggcggcaacaacagctggctsaacgcaccactgccgctggcgtccgcatgcacccctcctaaaagcccgtgggacggggcggcacccagctgcttcctcctcccgcagagtgggtgcagcgaacacagcttcatggagaattgctattcacggatgcttggacatcaaatcatgtttccaaatgtcccagggaacttgctcttaaaagagatt

SEQ ID NO: 708521 - DNA, 1659 bp, Homo sapiens
gggagtcaaatattaggcaattataagacttcagagactcgaagatgaattcagtccctttctctccagtcgggtgatggatttaaatcagaaacaataatcttgccccaaaagggagttgcactcccttctggactaagacagcacgggatgaggaagctgtgtcttctctttgcttgtgtgtgtgtctcctcaggtaaactgggggctcatcaaagatgggtgcagcttagcagcaccatccctgcccttgggtaattatgaaaattcttgtgtggacttgcagcaggtggcatgggcccttggagcacctagttcattccatctctctcccctctaatctactgttgtacatcagcccctgtattaatgctgaaacacctacattcttccacacacagacctgtggcagggttgccagagtttccaaaaaagacagagtgcctgcaaatccacttgactggatatttgtgatcatgctttcactttgcttccttgagtcacttaactctggagggctctcatttctcaatatgtggaattgggtcgatagccaatgaccccatgctttgcaggctgctgatgcgatgtcggcagtcacacctgagcgtggcagccaggtgctgagctgatgcaatggggccagcttctgatgagactggtgcgggttgtgcaggctgctgccctcagccgtgagcaagaagaggacctctcaaggggcaggacagagccctaggtctggatttcggttcctctagatttatcattttctgatgatggcggctgttactgggaagcatgagaagcagggaacagctccccagaaaaaatagggtactggatccccagtgtgtagatgctggtgggaataatgagggtcttcagagacgtgaatgagcctcatggttaaggcaaagggggagaggggtaacacaaaggaggagaaaaggagaacaaaaacctcagaggaccaggacatgaaaagcagcaagatgtaggaaaggtggattggagaggagagatggggagtgaagatggaggaagggcattagagccagaacaggcagcggggctgaaatcacagctgctttgtcatagcttccctttactgagaacatattaaataccaggcaccatgctgagtacctcacatatggagtctcacagcctccccaacaagcccatgaggtggatattatggtccagactttacggtgaggaaaccacgtctcaaagaatggagtttccagcgtcgcacagctgctaagggacaggggcagaattcacagccggatctgtcccgcctgcccactggccttgccattgcacagaatatggtctgcatcagaggtggcaaatgttttctgtacagagctaggtagtcatgcttttgagctttacttgtctcataatctctcttaacagcttcttaaccctatttatgtagccccaaaggagctgcaggcatatataaatgaatggtcatagctgtgcaccaataaaactttatttacaaaacaggcagtgggccagagttggcctgagagcctaatttgctgtggcctggtttacataaaagtgagcagctccactgcaggaagggggtycagtatcccctgagggtaacagaaagaggatagcgtaggagaccgaggagca

SEQ ID NO: 708522 - DNA, 933 bp, Homo sapiens
ggcaaaggcacaagttcaacagagcttggtgggtgagaggcactcgctcagcctctgggtgagtgaaaaggacgagcacccagttcagtggagggatgtcagcaaatgactgggtctgtctgtgcctcatacctgtaaaagggtgacaataattgcctgctacttctttagatcttccaaatctcctagactcaggatggatgaacaagtggttttgcttggaattgccccctccttgatcccttcattatactgcatttgaccaagcactacatcaacccaaataacggtacctatcctagaaggctgtcagaaaacactgagtgaatggctaaacgtgaggcctttaaaacagagcctggcacagagaagctagaataagcagttggttccgatgacyaccacctttctacagaactgcagagagaatgctctacaacatgagagaggcatctagtcctgcttaggggcatgacagcagacctgagtctccatgaaccaggtgaaaggtgtcattcggggctggagctgaggcaggagcagcaaaaacttcaggtgctgaagctagagagaaagcagaccaaatatgctccaaaagaaaggagctcagcctgggtgcagtggctcatgcctgtaatcccagcactttgagaggccaaggcaggcagatcacaaggtcaggagtttgagaccagcctggccaacatgacgaaaccccatctctactaaaaatataaaaaaaaatagctgggtgtggtggcgggcacctgtaatcccagctactcaggaagctgaggcaagagaatcacttgaacctgggaggtggaggctgcagtgagctgagattgtgccactgcactccagcctgggtgacaagagcaagactccatttcaaaaaaaaaaaaaggagctcattggctgaacctgggatct

SEQ ID NO: 708523 - DNA, 1346 bp, Homo sapiens
tcttgagagtgtgccaccaagggtctgcactaaccaggggtgtgcccagaggctcgctgcaggcttgaaattcctgcggagtcttgtgttttacctggagcacatgtgcacagtttccattctgctccatagtatgcacatgtttgtatttatttcaacctaaaaatgtttgtttcccataactctttgcgtataattgatactctacgtatttgtagcctcttttactcttttccctttcctcagggagtggtttgctcatttagaaaaggccaagatatatcactgtagagtttcgtttcttttcttttcctccaccccccatctttaccttgttctgggagaaaggagaattagaagtctgagttgcagctggagaaactggcaaattaaaatcacattgggaaagagaattactgtgtttcacaccataccagtagaaatgacaggctgttttctgggggtagggatttggcctttggtattggmagtcttgagaagtattagataatctttgctgatacagtctattttctcctcaggttctaggtcccaattctactgcaaatagtatcatggcatcttatcagcaacagaagacttcggttcctgttcttggttagtattttttctcatttaatattacaatactaagcagaaggactatctttctgtaagtattgagaagatcagcagtataaggagagattggatacaatttttcactacaaaaaattgactacaattcttcctcaattctaagaccgcatctttagtatgatcagtttcatgcttctagcggtgggggacctggtgcaggaaaatccagcatgaccattgtatgtgtaatttttaaaaatatttatgtggcatatgcttgttcataaaggcacaccacagttccagtttcagtctaaactgtctacatttacatatacatcaaaagattcttctgaagcatcattactggctattggcagttatgctttgcatcttgggggcattttcataaaccttgcttatgagtgggacctttttattatgtttaggattgacaatataatttgaaggcaaatccaaagaatattagcattttatacatatttcctgtttagttatgcatgaagtgttttatttgttgaggggagatgattctcaattagattacttatatccctaaaaattaaaaaccctaagcgctttcttttgaaagttggttagaaacatttgatgagtcagcttgggactttcagtatttgcccttacttatagttggatcaatgaagcatcttagctttgaaaagtgaatgatagtttctaaaataattggcagttttaactgctat

SEQ ID NO: 708524 - DNA, 1346 bp, Homo sapiens
tcttgagagtgtgccaccaagggtctgcactaaccaggggtgtgcccagaggctcgctgcaggcttgaaattcctgcggagtcttgtgttttacctggagcacatgtgcacagtttccattctgctccatagtatgcacatgtttgtatttatttcaacctaaaaatgtttgtttcccataactctttgcgtataattgatactctacgtatttgtagcctcttttactcttttccctttcctcagggagtggtttgctcatttagaaaaggccaagatatatcactgtagagtttcgtttcttttcttttcctccaccccccatctttaccttgttctgggagaaaggagaattagaagtctgagttgcagctggagaaactggcaaattaaaatcacattgggaaagagaattactgtgtttcacaccataccagtagaaatgacaggctgttttctgggggtagggatttggcctttggtattggcagtcttgagaagtattagataatctttgctgatacagtctattttctcctcaggttctaggtcccaattctactgcaaatagtatcatggcatcttatcagcaacagaagacttcggttcctgttcttggttagtattttttctcatttaatattacaatactaagcagaaggactatctttctgtaagtattgagaagatcagcagtataaggagagattggatacaatttttcactacaaaaaattgactacaattcttcctcaattctaagaccgcatctttagtatgatcagtttcatgcttctagcggtgggrgacctggtgcaggaaaatccagcatgaccattgtatgtgtaatttttaaaaatatttatgtggcatatgcttgttcataaaggcacaccacagttccagtttcagtctaaactgtctacatttacatatacatcaaaagattcttctgaagcatcattactggctattggcagttatgctttgcatcttgggggcattttcataaaccttgcttatgagtgggacctttttattatgtttaggattgacaatataatttgaaggcaaatccaaagaatattagcattttatacatatttcctgtttagttatgcatgaagtgttttatttgttgaggggagatgattctcaattagattacttatatccctaaaaattaaaaaccctaagcgctttcttttgaaagttggttagaaacatttgatgagtcagcttgggactttcagtatttgcccttacttatagttggatcaatgaagcatcttagctttgaaaagtgaatgatagtttctaaaataattggcagttttaactgctat

SEQ ID NO: 708525 - DNA, 1234 bp, Homo sapiens
tttatggattctaagtatgataaattatactaatagtcctggtaaatttttgtggtaggttttaattcccagataaaagaggatattgaatagagtgaaacctaccctggtaaatccagaaataagtcaacaaaataaataaaaagaagattagaattagaatataaacaactctatctttcttatatcctccaatctttattggctttaatagttcacagatgaaaggtttgtgttaaaatataccacgcaagcctcaaataaagttcgttaacatctaaaattgtcatccagtaagtcaaaatcaataaagcccaaaaaatcaacgctccaaaaagatgccaaaataaatggtttgatataggtacaacataagagcttcttccaggtgatctctggggagaaaaagaaacaaaattggcagcctagagttgccaattagcaggttggttatatgagaaattgtgtcagaatgtaaaatttccagtgatttatcaaagatccaggaacactcttcctcttagaatcattaattaattgtgcacgtgtttgtgtatttggtattgttgagcaactgtgttttgtcgttatttgaaaactacaatctcgtctataattaggaattcccacagttctttaaacatctgttctgcagaaattgcactctaatgttttctagtaatgtttttagtttcccaaaaaggattatcattcaaataaaaatggacmcagttctaaaatttaaaaattaaaatatatgctattattttaatctttaagcatgtctatattttactgctgtcattattattatctagaaatagtttttatttgtttgcttgcattgtttttgtttttgtttgagatggagtctcactctgtcacccaggctgaagtgcagtggtatgattttagctcactgcaacctgtgcggcccgggttcaagcaattctcctgtctcagcctcccaagtagctgggattacaggtgcctgccattgtgcctggctaatttttgtattttcagtagagacagggtttcaccatgttggacaggctggtcgtgaactcctgacctcgtgatccacctgcttcagtctcctgaagtgctgggattacaggcgtgagccactgcacccagcctagaaatagttaatacaatattaaataagactgaaatatgggagacaatactctttgaagagaataagagctatttctaaacctggtctttt

SEQ ID NO: 708526 - DNA, 621 bp, Homo sapiens
attccctatcccttctagagcacatgaggttggataggtgatatcaaatgttgaacttactttgcaactggttacaggcttcatatccagtctcatcgcagagatgattcaagcctctgcttatgtggctcatccaaatgtaacccccagctcctctggccccctaattcctccattagaacattaaactgcagagggcgtgtggtagcccatcagtcttctgatgaatggaattggctgatggtctaagtcatcgtagcctcccttgtcccgggtggaatcaactctttgaccctttacctatggctgtctgtgggaatcccttctcactggaaatgatgtaggggcaaataaaaatrgaacccatcaagaacatggggcgtaggagcagaagagagatgtttctgtttgcatggggtcagattctgcacttgatagggatacgctaaattgggatctgatctcaagatctttaaaaaatgtcctcctcttgttcctctcttgcctttggcctctgtggccttggaggtaatggcattgactgatgtctaaagatttttgggatttatttacagtcagggtcgtgaggcccaggaattggagtcagatgcctggggtaca

SEQ ID NO: 708527 - DNA, 621 bp, Homo sapiens
attccctatcccttctagagcacatgaggttggataggtgatatcaaatgttgaacttactttgcaactggttacaggcttcatatccagtctcatcgcagagatgattcaagcctctgcttatgtggctcatccaaatgtaacccccagctcctctggccccctaattcctccattagaacattaaactgcagagggcgtgtggtagcccatcagtcttctgatgaatggaattggctgatggtctaagtcatcgtagcctcccttgtcccgggtggaatcaactctttgaccctttacctatggctgtctgtgggaatcccttctcactggaaatgatgtaggggcaaataaaaatagaacccatcaagaacatggggcgtaggagcagaagagagatgtttctgtttgcatggggtcagattctgcacttgatagggatacgctaaattgggatctgatctcaagatctttaaaaaatgtcctcctcttgttcctctcttgcctttggcctctgtggccttggaggtaatggcmttgactgatgtctaaagatttttgggatttatttacagtcagggtcgtgaggcccaggaattggagtcagatgcctggggtaca

SEQ ID NO: 708528 - DNA, 621 bp, Homo sapiens
attccctatcccttctagagcacatgaggttggataggtgatatcaaatgttgaacttactttgcaactggttacaggcttcatatccagtctcatcgcagagatgattcaagcctctgcttatgtggctcatccaaatgtaacccccagctcctctggccccctaattcctccattagaacattaaactgcagagggcgtgtggtagcccatcagtcttctgatgaatggaattggctgatggtctaagtcatcgtagcctcccttgtcccgggtggaatcaactctttgaccctttacctatggctgtctgtgggaatcccttctcactggaaatgatgtaggggcaaataaaaatagaacccatcaagaacatggggcgtaggagcagaagagagatgtttctgtttgcatggggtcagattctgcacttgatagggatacgctaaattgggatctgatctcaagatctttaaaaaatgtcctcctcttgttcctctcttgcctttggcctctgtggccttggaggtaatggcattgactgrtgtctaaagatttttgggatttatttacagtcagggtcgtgaggcccaggaattggagtcagatgcctggggtaca

SEQ ID NO: 708529 - DNA, 888 bp, Homo sapiens
tgccaaagattcttagcatagacaaatggcttgaagagatcaagtgtctccacattttttaaatgaagatcttcatttttaaaaaaggaatagactgataatgacagaagaaaactatccattaaatcagtggtccttgaccagaaagattcatccctgtgttgattatgtacatgttgaagcaaagcaaaaattattaatcagaaaatgctggatgtctgggaaattgrgggagaacagttggtctctcttgagaacatgatttctatgaaccatctgcttgtgtctcttctatgagtattcagtttttactagtggtactaaaattaaaagcagtttctgatatggttctagttgctaaataagaatcacacattttgttcaattgtcttatggtaaaaaagtgtctgtcatgcaccaaaactggctgcaggagaactgtggtgccacttcacattggccatttggtgagattagtgtccttctctcttccctagtggtatcagagatgtatagagagtcagaaaattaaaatgcccctcagcgttcccactgtggcacatctgtgtctgttggctctccccccttggtcacccaggtgacattgttgtacttcttccatttaaccctgtatcactagaccttttcctcatcctctcatgtctccattcctggcgtcccagtgtatgctgtgtgtgatggagaggagatgtcgagagaccccttaaaaatgaagctgggaaacaggtgcagacgtgtgtgcctgtacctttgccagtggagttaaaatcctcttttgatactaatagcaaccctataggatatgatagggctggcatttttgtctccattttgcagaggtggaatctgagcagagatggcgaataa

SEQ ID NO: 708530 - DNA, 678 bp, Homo sapiens
ttttttgtgccttagtattaatatttctcaaaaatttttaaagtatttaactcagtaaggggcgctaccgagtcaggccaaatctgtcctgaaagtctactgtctgagcctcatcattgtataagcaagatgtaaatcctatttttaatatggagagttcatgaggccctctgtaaactaaagaattccccctaygagacatgctaggcctcaaagatttagaattaaaatctctacccacctacagatctttttgtaaaataaatgttttcttttatctgattaaaaaagtgataaattttcatttttaaaaaggcaagcattttgcaaagaaaaaagacaaaacagaaaagttaaaaatgtcaaccaatagacaaatgaatgctgtgtgctaacagatgtaaggagacgcccaaaactacagagacagcactaggaaataatttgggactaataaagtgtgacctagcagagcaggtcaagttactataattctgtcatgacagaccagtcacatgatcaagggtgaccatgggttcagataaaaagccttatctggaatctctgaattacgtcctattgtttcaggagtaactgaaaagactgttcctcctcgatatctcaaagatgctaccacaattctcatttaagctctatctcatacttcaaggtgttgac

SEQ ID NO: 708531 - DNA, 1081 bp, Homo sapiens
atattctttattgaccttgtccctaaaatatgaagttgcttaatttttctactttctgttcctcttggacaacttgtgatcctcccagaatcccacagattcctcgtctttcctgagatggacrgcaggaagcgatgatgctcctggtcatctggtagttttatcactgaccacatttataagctacaataatgaggccaggtcaggctgacactgaaacctctgggagttggaccttctgaaatctctacacgtggcaagggataatgggctggttccttctataggactgtacccaaagagggaaggctgagtatgggccagatgtctgacctgggcagatacacatcccccttcccagtctgatccttttgttgtaaagtcagtattttttacagactatattacacagagtggcagcagagaagcagaccccttgcccacactgtgccaggctctgttgtgctatgtcctgggcatactgcccagcatttgccacaatagttctcttgacatggaatgagcatttcaatttaaaataaaaggctaccttttatgtgatcctgagaagctgtagaagaatctgaaagggaaaaaaggcagaaaatgatgacatccagatgaaaatatttagtcttatctataagtcagtaaaatgtaaagggtttccttagaaacatcaatgtacttagtgcaaactgagaagagtctgcactgaaggtgctgagtcaatattttctatggttctgtggcaggttagagaaggccacaaattcttagacatgcctcctgtcacaaggtggggtctaggtaacctcccttgaacctgggtgggttctgtgactgctctgaccaacagaatatggtggcagtggctctgcaccttaagagactggtggcttccacctcccatctctgggaacactggctcgctcatggagccctaacccaccttacaagaagtctgagtgtggccaggtgcagtggttcacgcctgtattcctagcactttgggaggctgaggcaggtggatcacctgagaccagcctggccaacatggtgaaaccctgtctctactaaa

SEQ ID NO: 708532 - DNA, 1275 bp, Homo sapiens
gaaaagcatttctatggattcctctagccattaattacatagaaaatgccacagctgccctcagatttccaggtgcacgttattaaacgtcattcaaaggaaatgtttggccaactagatcctgatgtgagaaacagcatcctaaagagctatgtatgttactgtctaatgcatgtacttaggcattaaataatattaaatgaccatattaccttcttggggcaatagttaatataaacatttaggatgctcagtttgtacttttcagtatttgtgctggaaacttttgcattcacaactttgaaaactggctcgtgttttcatgggaagtgtcagtttaaagttggcctactaattaatgggggaatttcaatatggcagtgcctatgacagcaaatgaaaagcattctttataaacatcgtcttcctccacacattcacaggttagtatctgacacccatttttaatttctagagcaccatttgtacttctctgtggttttgcctgcaagtcttcgatgatgcagtccacccttccataaaaacgtactccaattttcctagattctactttcattgttttgtgaatcaagttagaaggtacataacttagcctgatgagatggcattcataaggttaggatagcagagttgcctaactaatcttcctgttgcaatgaaataaaagratgatatctaagttgaccaaccttgtaaaaggtaattttacaagaggcctccaaaaataacggactaggactggccagagaagaaaataaacccctcatcctcaatccagaacccagagtttgtcatcactagtcgaaaagcttgtttgttttatacctaagtgagaccttgagttatccaatgtgcttccatcacagaatggcccaccagggtagaaggattctgagtgtattccctgatgctgttgccatgtgcctatggaatacctatgctccatatttagccctctttctgtgtagtagcagagacgtggatggctgctgaaactaagggcccagtctttggccttaggacagaccactgggtttctcccactgcctaaaaccttagtagcattagcatcagacatggacccaataaacaaactacctagttgataagcgccgcatttttcatgatgttttactgtggcctatccacacactctttcctattccatgaaaggaagaaaaagataatttgagttgtcctataaattaaaatttttcctttgtgattattttggaccagcgccataacattcag

SEQ ID NO: 708533 - DNA, 1052 bp, Homo sapiens
  misc_feature 875: n = A,T,C or G
tccttactcttcatttctctggccctgtttactttgaccacccakccccttgtcaccatgcctgtagagctttgcagaagacaagtcaggggagctggtgtattagtccattttcacactgctgataaagacatacctgagactgggcagtgtacaaaagaaagaggtttaatggacagttccatgtggctggggaggcctcacaatcctggcagaagggaaagacacatctcacatggtggcagacaagataacttgtgtagggaaactccactttataaaaccagcagatctcgtgagacctattcactatcatgggaatagcatgggaaagaactgcctccatgattcagttgcctcccaccgaggccctctcacaacacgggggaactgtgggagctacaattcaagatgagatttgatggccaggcgcaatggctcacacctgtagtcccagcactttgggaggccgaggtgggtggatcacttgaggtcaggagtttgagaccagcctttccaacataacatggtgaaaccccatctctactaaaaatacaaaacaaattagctgggcatggtggcaggtacctgcctgtaatcccagctacttgggaggctgaggcaggagaatcacttgaacctgggaggtggaggttgcagtgagctgagatggccccattgcattccagcctgggcgaaactccgtctcaaaaaaaaaaaaaaaagatgagatttgagtggagacagagcgaaactccatctcaaaaaaaaaaaaaagagatttgagtagggacacaaccaaaccatatcagctggtaatgcagtgcacagaaacaggaaaaagcccaggggccaatgctacccaggcacctctnctaagggataatgccccatttactaatgggggaagatggcctggctggctcccgagagcctgtcgcttgttggtgcgagggctctgaactctgctgtctggactagtctcagccctgtcacatgcaaactgcgtgccccaggacagctacatgtctgccatatgcctgagttttccc

SEQ ID NO: 708534 - DNA, 1052 bp, Homo sapiens
  misc_feature 875: n = A,T,C or G
tccttactcttcatttctctggccctgtttactttgaccacccatccccttgtcaccatgcctgtagagctttgcagaagacaagtcaggggagctggtgtattagtccattttcacactgctgataaagacatacctgagactgggcagtgtacaaaagaaagaggtttaatggacagttccatgtggctggggaggcctcacaatcctggcagaagggaaagrcacatctcacatggtggcagacaagataacttgtgtagggaaactccactttataaaaccagcagatctcgtgagacctattcactatcatgggaatagcatgggaaagaactgcctccatgattcagttgcctcccaccgaggccctctcacaacacgggggaactgtgggagctacaattcaagatgagatttgatggccaggcgcaatggctcacacctgtagtcccagcactttgggaggccgaggtgggtggatcacttgaggtcaggagtttgagaccagcctttccaacataacatggtgaaaccccatctctactaaaaatacaaaacaaattagctgggcatggtggcaggtacctgcctgtaatcccagctacttgggaggctgaggcaggagaatcacttgaacctgggaggtggaggttgcagtgagctgagatggccccattgcattccagcctgggcgaaactccgtctcaaaaaaaaaaaaaaaagatgagatttgagtggagacagagcgaaactccatctcaaaaaaaaaaaaaagagatttgagtagggacacaaccaaaccatatcagctggtaatgcagtgcacagaaacaggaaaaagcccaggggccaatgctacccaggcacctctnctaagggataatgccccatttactaatgggggaagatggcctggctggctcccgagagcctgtcgcttgttggtgcgagggctctgaactctgctgtctggactagtctcagccctgtcacatgcaaactgcgtgccccaggacagctacatgtctgccatatgcctgagttttccc

SEQ ID NO: 708535 - DNA, 1132 bp, Homo sapiens
  misc_feature 147: n = A,T,C or G
attttcagatgtatatgtccgaaatggtcagtatacgattatatatacgctgttaaattatccattgaaatcacattgtgtaccttctcactacattttttaacctttatgttataaagcagatacagaatattatactagcgtggnttaacgtggataataatttgtggggggaacattctggtaagtagcaaccagatcaagaaataagattttgctggtccctgttctgtgtcctgtctcaattccaggctcctcccttccctcagaaagaactgaaagtcaacttcaaactctttgtggtctgtattacttttaaatcttgatcaatgttgtgtgtatatatatatatatatatatatattttttttttgagatggagtctcgctgtgtcacccaggctggagtgcagtggcgcagtctcagctcactgcagcctccacctcctgtgttcaagcagtcctcctgcctcaggcaccagactagcaggtgagctgcttgttttggtgcaggttgtaggctctgtatttggaagatttaggtatggcaaatcagggtggcccagcccaccctgacttctagtcaaccagctacaaattctatgcttcccatgacccccttgggttcaataatctgctagaatgactcacagaactcaggaaartgctacacttacaattacagttttactacagcaaatggctgccaattggaaccaaagggagagtcccaaatacaaagctttcttgtcccatctccagggagttgagacctgtcacttcctagcctattagtgaaggggtggccttcccctccacacctgtgggtgtttctcatcgggtgggacgagagactgagaaaagaaagagacacagagacaaagtatagagaaagaaaagtgggcccaggggaccgccgctcagaatacggagaacccgcgccaggacccgcgccccaggcaccggtctctgagttccctcagtatttattgatcattatttctcggagagggggatgtggcaggacaatagggtaatagtgggagagggtcagcaggaaaacatgtgatctaatgtctctgtgtcataaacaaggttaagaaaaaggtgctgtgtgctttgatgtgcacata

SEQ ID NO: 708536 - DNA, 1093 bp, Homo sapiens
gaaaataaatgtataaactcaacgctcaaaaagttgtgtgatctcagtttcttcatttcaaatattgtattaaaatattttcatatacaaacatattatttaccatttatctcctaaatttgatacgttaaactctccaattttagtctttttttttctttttttttttttttttattttgagacgaaatctcgctcttgttctccaggctggagtgcaatggtgcaatctcagctcastgcaaactctgcctcccaggttcaagggattctcctgcctcagcctcctgagtagctgggattacaggcgcctgcaacctcacctggctaatttttgtattttcagtagagacggggttttcaccatgttggccaggctggtatcgaactcctgatccacccactttggcctcccaaagtgctgggattacaggcatgagccaccgtgcccggtctccaattgtagtctttaaagacttacttgtaatatacttcccagctgaataacagggagagtttaaaccaaattcctaccagtaaatatttttctaatataataaaatggcatagcatttcttaactaaaatataaacagatcctatttgagcacaaaaggggagagcatatcattcagtatattgattagatattgcagagattttagtaaaattgaagtttattaacaatatatacaaaatgtcaacttgaaatacatttaaatgagatgtactttcacttagataaaaatgatgtttcttgcaccccaaacagcatttactctgttgtagtggttattgatttcatcatcggtgctggtcagttacattatgactatagctgagttatggcaactaataaaataaccataattgagaaacaatgagctttccagatactcagtgagatgcttcctcttggcaaaacagacaatattttccgggtttggctgcactattctttgtgtttaggtattgactttctgataatcctaacttggccttgcttactaacaaggaaaagtatcatttgccattttaatgtaatggggttgggggaagaagagaaaactactattaaaagcagacctcatcaga

SEQ ID NO: 708537 - DNA, 1093 bp, Homo sapiens
gaaaataaatgtataaactcaacgctcaaaaagttgtgtgatctcagtttcttcatttcaaatattgtattaaaatattttcatatacaaacatattatttaccatttatctcctaaatttgatacgttaaactctccaattttagtctttttttttctttttttttttttttttattttgagacgaaatctcgctcttgttctccaggctggagtgcaatggtgcaatctcagctcactgcaaactctgcctcccaggttcaagggattctcctgcctcagcctcctgagtagctgggattacaggcgcctgcaacctcacctggctaatttttgtattttcagtagagacggggttttcaccatgttggccaggctggtatcgaactcctgatccacccactttggcctcccaaagtgctgggattacaggcatgagccaccgtgcccggtctccaattgtagtctttaaagacttacttgtaatatacttcccagctgaataacagggagagtttaaaccaaattcctaccagtaaatatttktctaatataataaaatggcatagcatttcttaactaaaatataaacagatcctatttgagcacaaaaggggagagcatatcattcagtatattgattagatattgcagagattttagtaaaattgaagtttattaacaatatatacaaaatgtcaacttgaaatacatttaaatgagatgtactttcacttagataaaaatgatgtttcttgcaccccaaacagcatttactctgttgtagtggttattgatttcatcatcggtgctggtcagttacattatgactatagctgagttatggcaactaataaaataaccataattgagaaacaatgagctttccagatactcagtgagatgcttcctcttggcaaaacagacaatattttccgggtttggctgcactattctttgtgtttaggtattgactttctgataatcctaacttggccttgcttactaacaaggaaaagtatcatttgccattttaatgtaatggggttgggggaagaagagaaaactactattaaaagcagacctcatcaga

SEQ ID NO: 708538 - DNA, 603 bp, Homo sapiens
ggttaaaaaggaacaggcttgagtcagggagactagttaaaagcycttgtaccaagcaatgttgtctgttggcagaaagcatggccttagggctgataataagcagtacttatggaagactggctcgtttcatgctacacaccccgctatgctctgcataaatcagcccattaaatcttcaccatgaccctaggttataggtactactattatcacccatactttgcacatgaggacatgaaaaccgtaccatggttcagaaggtggcgtcagctgaagcaatccctgtgaacatttaggcaactctacccggagcctgtgttctttactagtcaactctgttgtctctttagggaaggacaaaagttgacagctccaagagatttaaaaccacttagactctgctggacttaatgcttgcatggattctcccagaatgaaagaggcaaaaatgaaaaagaatgttgatgtttctggcttaggtgtatgtgtgtgtcatggttctaaccactcaaagaagaaaaacatcagaacaaatagatttagataaaggaaataaatatgaaaagctctgcttgcaaaatgtagatttccaggtgccag

SEQ ID NO: 708539 - DNA, 514 bp, Homo sapiens
attttaaaattgggaggtaaatgttctccatctttattcttctttttcaagattgtttggctattgttagttttataaatttccatatgaattttagaacagcttgtcaagttctgcaaaagaaaggcagcctggattttaacagaggccatgttaaatctgtagatcaatttggggagtattactatcttaataatatgaagtcttccaatccatgaacatgaatgtatttcctttatttatgtctttatattctttcaacaaggttttatagttttcaatatacacctcaattaaaaaatgaatgtctttctttaaaaaaatgaacaggagtagttatttttagaatgagaatgttctaataactgaaaatactaaggtttatatgattggactgatatgtcattaagcaagattcctctctgagagaatggagtggtggtgtttaacagagtgcagctaatggttgttaatgggaaaataaagcccttcaatgttgwtgctctgaagagtt

SEQ ID NO: 708540 - DNA, 642 bp, Homo sapiens
tcctcacacgacaatattccaaggcaggaaggaaagggtaaatcctcttcatggaactctattttcaacagaatggaaaacctttygccaaattccccaacagactttacatctcattggccagaatggggccccatatccccactccccactgctccaacccaatccctctctaaggggactgggattctcatggtgggtttagactcatcatgatttttcctgtggaactgcttccatcttccctcagtcaacctattccagaacagaattgggagtttgttaggaagggaaagcaggggactggctgttggtgagccaccacactgtcaccacaggcaccaaggacaaacaccgcctacttccacctcgtagccctgcccaaggcaagttctaagaccgcattcaccagtctttctgagttgaaaccagtcacgcacgtgattgcggtgacaggaacgaagctgagttctccagtgtgaggaggtttgttcttgcctcctgtgccctgacgtgccgaacaagctgaatgaaaagtgggaaacaggcccggtgctactccaggacatgagatccggagctgcagggcggggctccagcagtgccccctcactgggcaacactgccagcctggctttgctt

SEQ ID NO: 708541 - DNA, 642 bp, Homo sapiens
tcctcacacgacaatattccaaggcaggaaggaaagggtaaatcctcttcatggaactctattttcaacagaatggaaaaccttttgccaaattccccaacagactttacatctcattggccagaatggggccccatatccccactccccactgctccaacccaatccctctctaaggggactgggattctcatggtgggtttagactcatcatgatttttcctgtggaactgcttccatcttccctcagtcaacctattccagaacagaattgggagtttgttaggaagggaaagcaggggactggctgttggtgagccaccacactgtcaccacaggcaccaaggacaaacaccgcctacktccacctcgtagccctgcccaaggcaagttctaagaccgcattcaccagtctttctgagttgaaaccagtcacgcacgtgattgcggtgacaggaacgaagctgagttctccagtgtgaggaggtttgttcttgcctcctgtgccctgacgtgccgaacaagctgaatgaaaagtgggaaacaggcccggtgctactccaggacatgagatccggagctgcagggcggggctccagcagtgccccctcactgggcaacactgccagcctggctttgctt

SEQ ID NO: 708542 - DNA, 1064 bp, Homo sapiens
gggtgaactgcaaagctttggctgagacctgggatttgagataccacaaaccctgctgaacacagtgtctgttcagcaaactaaccagcattccctacagcctagggcagacaatagtatagaagtctggaaaaaaacaaaaacagaatttgagaaccttggaccactcctgtccctgtagctcagtcatcaaagcagaagtctggctttgctctattaagattggaaatgtacactaccaaacactcagtccactgttgagccccagtgctggaagggaggaaggcctttcttctgtgttaattgcgtagaggctacaggggttagcctggactaaaggcatccttgtcttttgagctattcacctcagtagaaaaggatctaagggaagatcactgtagtttagttctgttgacctgtgcacctaccccttggaaatgtctgctggtatttctaattccacaggtcatcagatgcctgcttgataatatataaacaataaaaacaactttcacttcttcctattgtaatcgtgtgccatggatctgatctgtaccatgaccctacataaggctggatggcacctcaggctgagggccccaatgtatgtgtggctgtgggtgtgggtgggagtgtgtctgctgagtaaggaacacgattttcaagattctaaagctcaattcaagtgacacattaatgataaactcagatctgatcaagagtccggatttctaacagtccttgctttggggggtgtgctgacaacttagctcaggtgccttacatcttttytaatcacagtgttgcatatgagcctgccctcactccctctgcagaatccctttgcacctgagaccctactgaagtggctggtagaaaaaggggcctgagtggaggattatcagtatcacgatttgcaggattcccttctgggcttcattctggaaacttttgttagggctgcttttcttaagtgcccacatttgatggagggtggaaataatttgaatgtatttgatttataagttttttttttttttttgggttaaaagatggttgtagca

SEQ ID NO: 708543 - DNA, 1226 bp, Homo sapiens
tttttgttgcttttgttgttgttgctgttttttgtgagacggagtctcgctctgtcacccaggctggagtgcagtggcatgatctcagctcaccacaacctccgcctcctgggttcaaaaaattctcctgtctcagtctcctgagtagctgggattacaggtgcacgccactacgcctggctaattttcgtatttttattagagtcggagtttcatcacattgatgactatcacctcaagtaatccacccaccttgacctcccaaagtgctgggattacaggtgtgagccactgcgtccagccaatctgtttattctaaatcaaatacaaatacatgcacacacatataatcagtaaaaagttattttcattgaaaacatgtgatttacaaagggatgacttgttcagacacaaatttttgtcatcagataaagtggcaatgctaaatggatcagccagctgtaaagttcccatagttgatacattccttagaactataatattggaaaaaggcaatgaatactgtcttggcctgcctcagttctttgcctttttttcacccttttctgttccctctgctgtcttgatccatcatcttgccctttttggatcctgtccttttaggacatattacagtctggcttatcttaaaactaattgtgttatgtgggtgtggagtaggggcagggaagtagccttccctttgtgagctccatgaggttagaagctgtgtcttactcatatcttccatttccaagaccttacacggaaccaggcacagagtaagtgttcagtgaatatttaytgagtaaaattatcttgggtttgtaatagtaataataagtatttagaattttaaggagagtcttcctactcctgtctctggttaggcaacagcattataggaatgtaagtatttcttaatttactaaaagtttaatattccgaaagctttatttttaattttcaaaatatttaatctagcacaaaattactaagacaacattggaagcatggtaacgccattgtggataaatgcaatgctttcaacataactttctaacttcatttgtggttaaacatgtataaggaaaagccatttgcattaaaaaaaactgtctacgtatttaaatatggcatttgtctgtgaggacacctatcattagcatggctgatatcctggtaataattctatgtacctgggccaagtctatacaattagaaaa

SEQ ID NO: 708544 - DNA, 857 bp, Homo sapiens
agatgcccctgtcttactaatttctgtgagttctttacacacgctggatgatgaacactggtctgttatgtgtaagcagaccaactactggatagtactttgtacacatatgccatggatgtatagcctgtgttcactcgccagccctcattgttctgatgggtcactgtcataaggggggcagccgacacattcctggggagaccttcttgtgcaaatatgcaaaaaggtctccagtctaggagagagggacttgccaggtggaggaacatgcctggttccagcttcaytaggagtagctaaatggctctccaaagggtggagccaacaaaccttccctttagcatgggcctagcgctcccttgcccactgccagctttgttactcttagatccttaatctctgttaatctgatgactataaagcaaaaggttactttaatttgcattttcctggcaactggggagaggctgcatcttttcaggtcattgtgtgtcttgtttcctcttctgataattgcgagtttgtatcatttgcctggttttcactaagttcgttatacagtaaacatgcatatgtaaacgtatatatctttactaaaacaacaggatactttgtggtaaacatatcaaacgtgattgataaggctgtcaaggagagaagatagtgggattggtaaatgacataccaggtctcaactctattcataaatgtttcacttctatttgtcttattgacttctgtgggctctttatatgaaatggataaccatcatctctctgttatgtttatagcaaatgtttcctcctgagtgtggctggtcttttgactttcagctttgtttgtggcaccttttg

SEQ ID NO: 708545 - DNA, 857 bp, Homo sapiens
agatgcccctgtcttactaatttctgtgagttctttacacacgctggatgatgaacactggtctgttatgtgtaagcagaccaactactggatagtactttgtacacatatgccatggatgtatagcctgtgttcactcgccagccctcattgttctgatgggtcactgtcataaggggggcagccgacacattcctggggagaccttcttgtgcaaatatgcaaaaaggtctccagtctaggagagagggacttgccaggtggaggaacatgcctggttccagcttcattaggagtagctaaatggctctccaaagggtggagccaacraaccttccctttagcatgggcctagcgctcccttgcccactgccagctttgttactcttagatccttaatctctgttaatctgatgactataaagcaaaaggttactttaatttgcattttcctggcaactggggagaggctgcatcttttcaggtcattgtgtgtcttgtttcctcttctgataattgcgagtttgtatcatttgcctggttttcactaagttcgttatacagtaaacatgcatatgtaaacgtatatatctttactaaaacaacaggatactttgtggtaaacatatcaaacgtgattgataaggctgtcaaggagagaagatagtgggattggtaaatgacataccaggtctcaactctattcataaatgtttcacttctatttgtcttattgacttctgtgggctctttatatgaaatggataaccatcatctctctgttatgtttatagcaaatgtttcctcctgagtgtggctggtcttttgactttcagctttgtttgtggcaccttttg

SEQ ID NO: 708546 - DNA, 857 bp, Homo sapiens
agatgcccctgtcttactaatttctgtgagttctttacacacgctggatgatgaacactggtctgttatgtgtaagcagaccaactactggatagtactttgtacacatatgccatggatgtatagcctgtgttcactcgccagccctcattgttctgatgggtcactgtcataaggggggcagccgacacattcctggggagaccttcttgtgcaaatatgcaaaaaggtctccagtctaggagagagggacttgccaggtggaggaacatgcctggttccagcttcattaggagtagctaaatggctctccaaagggtggagccaacaaaccttccctttagcatgggcctagcgctcccttgcccactgccagctttgttactcttagatccttaatctctgttaatctgatgactrtaaagcaaaaggttactttaatttgcattttcctggcaactggggagaggctgcatcttttcaggtcattgtgtgtcttgtttcctcttctgataattgcgagtttgtatcatttgcctggttttcactaagttcgttatacagtaaacatgcatatgtaaacgtatatatctttactaaaacaacaggatactttgtggtaaacatatcaaacgtgattgataaggctgtcaaggagagaagatagtgggattggtaaatgacataccaggtctcaactctattcataaatgtttcacttctatttgtcttattgacttctgtgggctctttatatgaaatggataaccatcatctctctgttatgtttatagcaaatgtttcctcctgagtgtggctggtcttttgactttcagctttgtttgtggcaccttttg

SEQ ID NO: 708547 - DNA, 857 bp, Homo sapiens
agatgcccctgtcttactaatttctgtgagttctttacacacgctggatgatgaacactggtctgttatgtgtaagcagaccaactactggatagtactttgtacacatatgccatggatgtatagcctgtgttcactcgccagccctcattgttctgatgggtcactgtcataaggggggcagccgacacattcctggggagaccttcttgtgcaaatatgcaaaaaggtctccagtctaggagagagggacttgccaggtggaggaacatgcctggttccagcttcattaggagtagctaaatggctctccaaagggtggagccaacaaaccttccctttagcatgggcctagcgctcccttgcccactgccagctttgttactcttagatccttaatctctgttaatctgatgactataaagcaaaaggttactttaatttgcattttcctggcaactggggagaggctgcatcttttcaggtcattgtgtgtcttgtttcctcttctgataattgcgagtttgtatcatttgcctggttttcactaagttcgttatacagtaaacatgcatatgtaaacgtatatatctttactaaaacaacaggatactttgtggtaaasatatcaaacgtgattgataaggctgtcaaggagagaagatagtgggattggtaaatgacataccaggtctcaactctattcataaatgtttcacttctatttgtcttattgacttctgtgggctctttatatgaaatggataaccatcatctctctgttatgtttatagcaaatgtttcctcctgagtgtggctggtcttttgactttcagctttgtttgtggcaccttttg

SEQ ID NO: 708548 - DNA, 857 bp, Homo sapiens
agatgcccctgtcttactaatttctgtgagttctttacacacgctggatgatgaacactggtctgttatgtgtaagcagaccaactactggatagtactttgtacacatatgccatggatgtatagcctgtgttcactcgccagccctcattgttctgatgggtcactgtcataaggggggcagccgacacattcctggggagaccttcttgtgcaaatatgcaaaaaggtctccagtctaggagagagggacttgccaggtggaggaacatgcctggttccagcttcattaggagtagctaaatggctctccaaagggtggagccaacaaaccttccctttagcatgggcctagcgctcccttgcccactgccagctttgttactcttagatccttaatctctgttaatctgatgactataaagcaaaaggttactttaatttgcattttcctggcaactggggagaggctgcatcttttcaggtcattgtgtgtcttgtttcctcttctgataattgcgagtttgtatcatttgcctggttttcactaagttcgttatacagtaaacatgcatatgtaaacgtatatatctttactaaaacaacaggatactttgtggtaaacatatcaaacgtgattgataaggctgtcaaggagagaagatagtgggattggtaaatgacataccaggtctcaactctattcataaatgtttcacttctatttgtcttattgacttctgtgggctctttatatgaaatggataaccatcatctctctgttatgtttatagcaaatrtttcctcctgagtgtggctggtcttttgactttcagctttgtttgtggcaccttttg

SEQ ID NO: 708549 - DNA, 636 bp, Homo sapiens
ggaaaatgtaaaaataaaaacccacaaataacaaaggaactatagctaatgatttaagagtaaggactcaaccaatgacttgggtttgaagcttacgtctaaaactggatagctatatgactttcagcaaattaggcagctatttccccakttctatagccccatagtttgtggtgaggttaaagagttaatatatatgcagacctcagaacaacacacatcacaaaattaaaacaatgtgtttgttactcaatatgcaaataaagtgtcaatgattgccactattcagcttaaatataactcaggtctttctagtaataaaagtacaaacagcacagatttttttacatttttcctttttaaaatttagttttctcatgtaagaatttttgtaagaattttaaagcatataaatgtatggtcttgtatacaattactatctattacctgtttggcattgttattatcatataattctcagaacacatatcaacttgcaattagcaaagattgttttatgtttctgtttttatttgttggcactttttttgctaatttataggattaatttttgatgttgcgattaggaaaatagtatttaaaaatgccaagaacatttcttctaaaaacacataa

SEQ ID NO: 708550 - DNA, 598 bp, Homo sapiens
ttggactatacaygcaccttcctaagtctatttggttaatacatttggccctccccacaaagagattatcccctcttggccaccccttgagtaataattagtatggaaaggacggtagcttatatgggatagataatgatcttgtggttgagtactgaaattgaaattatttttgaattttatgattaaatataggaaagtatgtataaacttacgtgaatatgccctgttacattctacaaattaaaagttgattagctttcttgtgatccccaaagtaaacataaaaatgtataagcctgaaatattatcaattagaaaatatttggagaaattgcttcttaaaatatggtagaatattttaagaagcattgtttaatacaagcaaaccatgagccttatatgaaaatatgaaggcatcagagcaggtgataatcatgagtaaaattataaatattttctctctaaatacacatttggagaagcacataggacttgataaagctcaaatgcaagaagtctaataactgagactcttagaaattgtatttccaatgagttatataggagaggtgactgtgtattcttaagaagttta

SEQ ID NO: 708551 - DNA, 636 bp, Homo sapiens
ggaatactacacagccatacgaaagaacaaaatcttgtcctttgcagcaacaaggttgcagctgcaggccactatcttaagtggaacagaaaaccaaataccacatattctcacttgtaagtgggagctaaaccttgggtatatatgggcataaagatgacagcaatagacactgggcactactagagagtgggtgggggggcaagggtttraaagctattggataccgtgctcattagcagcatgataggatcagtcataccccaaagctcagcatcatgctatatactcatgtaataagcttgcatatgtaccccctaaatctaaaataaaagttgaaattacaaaaaaataaaatacataaagcaaatatttttaaaaatgtataaaaataaggtttctgtgacatttgaaatagtggcaaataaatacatttagaattatgttttttgaaaaagaaatcagccttttccttttgtgcctgggctgtgttggacgcttacctgcagattatggctcatgtaactttggagccccacagcctgaggggttgagcccctttttatctacactgattgctgtttggagcctccagaaaaagtgagcaacctactccacaggtatcctttgggtttt

SEQ ID NO: 708552 - DNA, 644 bp, Homo sapiens
ttgctgtaaatacaatagtgaacaagacagaaaaaatcacattcctaacgagataaaattctaataggagacagctagtaaacaaactatcatgtaactcaagaccataaattgacacttgccaatgaagaactccctggggttacctaagtgaagcaaattctctgggttagaagccagatggccctcaatcgaagaataaagaggaggcaatgctggagtgaagtaaagtgaacatgcacaattgctgcaccttgtgtatttacagaaaggatataatatacaggttgctgggggatgctgacagcaggtgcaagagctatgctaagataggagtagatgcattaaaggggtccrtaggtactgtgatggttaattttatgtgttaacatgactgagccatggggtgcccagacatgtgattaaacattatttctggatgtgtctgtaagggtgtttctggaaagattaacagttgaactgatggactgagtaaagcacatggccctacccaatgtggataggcaacatcctaccccttgaaagcctaaatagaatacaaatgtggagaaagtttaaatccacactccctctatctgtttgagatgcaacatccatcttcttctttcacttttggttctcag

SEQ ID NO: 708553 - DNA, 1645 bp, Homo sapiens
aattttgtaaataattgaatagtccagactttagtcacattcttgttctctctcccaaccagttcttaatcagaggaaacaacatcttgagccagcttgaaaaattctgttcttatttgtttagaaaattgtacataaatctccaatgggctatctgttctatctctgacaaagtccttgtgtcccattataatagaggctctgcaagcatagcaaaatgtcaattttactgctaaagagcaagttcttaaaaagtgcatttcacaaagtataggaaaatagccaattaaaaaaacttttctcacagcaggacatccctttaagtaatctaatcataaagaatatcttgtatttctgcaaaaagttgcattatgactaatattaacttaagatgagagattttaccatttgctgccttgtagaagttattgactttgtatatttttaataaatgtctctattgcactcacaaactatgctcgcaagagaagctaccatctagctggtctctcaatgtccttgtctatttgtgaacacttccttgacctctataccattttgtacacatttctatttacctattgcgtgtaactatggctagattcttctgtttttcaaaagaccacttaataaatgccatttcactgggaaagctctctctgactccctttgggctaggtccagattcttttgttataaaagtgcacactggacactgattttttgtaaacattgaaataagatattttttgtatctgtatttatggatgtctgtttatgtatgcatagacaaacacataaattcaaggtatgcaaatgagtatatcttcagaaacttaccatgcttgtataccagcaaacatccagacctagaatcagaagatatcctgattctattttgccaggcgtcatctctgtcagccatcttgtgccccatttaagatttggacaagaagtcttagtgtccagttccatgtacctgcagacaagctctgctatgtactttagaaccagatttcctctgcctgcaatctaccttctgcccttcactagaaggcacatcttggcttttcctagtgagcccctttattgaattatggtaggcatccgcagagattctagagcccaggctgaggctgtgtgaacatgagctctgaagttaacaagacaatgacattaagctcttgtatttgagagatctggggattaaaatattcatgagagttttgtgagagttgtatgttacagactatgtaaagtgcccagcacaaaactggcactatttaaatattaatcttctccctttctgctactttattttcctgtgtgaggagtgttctctgttcttccacaattctcccaagtatttctgttctttttctataattttccattattttatagaggtggaaaatattttcttaagagggttgacactcaaatgcctcttattcattaaccatcctatatcacctgtctctagcgccatcccactccttgccaaatcacacatagaagttgatgacaaatttatttctatatattttgagtatcactgaaaagcatagtatggtgttgttttrtgaaagagtgaatgtatagacactgatctcttcttctttgaaattttttgatccagaattta

SEQ ID NO: 708554 - DNA, 990 bp, Homo sapiens
tctgtgtctgtctaggtctaatcaataacaataggtatttatgatttccatttgacaaatgtttatcaaaggccaggaaacactgctgaaaacgactaacttgatcctgctgttatggcattttaatcttggattaattattactacgtacccaaacttcattttactcaacacccatattcatttagtaaacaagctgaggggtgccaactttatggtaagcaccgtggtactgtttataaatacaaagtgaacaagacagaccaattagtacccttattgatatgtgaaattttggtaaacgaatgcaactgttttagtttgtacttgaattttattgtagctgctgcctagccacatgcttatgaatggcagagcactacttaaaaatagctgttcttaaaatcaatgactcattgccctgtgctagacatttaattttctcttttcttggaaaaagctttttctcaggagtattccccagccacccttcattcaaaaccttggaaaagacactgcactaactctatgatatccctgaaagccatgtgagcaagatcacatttgtgtataaagccccccagaaaacaaataatatgcagaaatatagacaagaattatttttgaccttctagttaatatatctgccatttattctgtgtcaatatgagccaagcatgattggtcaatttatatttattatttcaaattttcataaccttgctgcaaggtatatataattatctcagagatgttaagtgatgtgtcccatggagattgctcacactcttaaaagtagaatttgcatgtaggtacttgtcattcttccatgctctgctgcttctgtgtgtatgatggtgtattaagtttcggagcttatgagaagaaacactaatggaatcaggaagaatgcagtcatttatttaaatattctacaaattgataaaaacrtatgtttttaaaatgattttgaatacaacagagtctttc

SEQ ID NO: 708555 - DNA, 596 bp, Homo sapiens
tgcatcagttaggaatttcatacagctctaagtgacagaagcccccacccagtggcttcaacaatttgaggatttatttttctcttgcaacaaggaaggagttctggagggagacagcccagggctggcatggcgagtccctgagaccctgggtcctttgatctttccactccgcccatccctagcacagtttgccgccttctgtttacaatacggctgccccccctgtgacattacatctgtgttccaggcagagtgaattcacgaggaaaaggtgcataggagatgaatgtatttctctagtaagtagctttctcagaagctcaaccagtagctcacacttacatcccattggatactgttgtgtcccctggaaaccctgtctgcaagcggagctgaaatctagttgtttttgttttatttttatttatttaattttatctaagtacacggggtaggataaaagcttggctatgatggagagaatatctattgggtggttaactggtcatccttgtcacagctctgctyggcttcttttgcaaaccggtcacaccatgtgggaaggaaaatagccattgaggtagcttttggtg

SEQ ID NO: 708556 - DNA, 1363 bp, Homo sapiens
aaatagtcattttacttaagaatctcatatctatctcgtaaaacatgagattttactgtttctggttaatagaggtactgaaaagtgaatgagtggctggccagtaagagaaacagacagcaatggcatgtgtctcttctagcagcagataactttgcagcatggataacctaaaatcatcagcaatgcattcactgataagacctcacaattctcatgaattcatcccttaattctcatgaatttacaattcttactcttcatttgccatattaattatcggaccatagagtctttctttaacccttcattgtttactaattaagtcaattaactacattccattcattttaatgagtgtcattttggttactacacacacacacacacacataacaagaagccatataatagtaaaaattaatctttctttagactctctcctaacaattcacttcttttaaggcagtcagaacatcagcctctgtcttgtggggctgggtgtttcattaagtgagcacagtaattttgccctcgttaggagctttttaaaagctttcaggaaaatacaatttgaaataaataatgctgattaaacaccctttcatggaagaaataatagaaagagatcaagtgataaacgaaatgaatgttgcgctatcaaagcaaatggtgattaatggaaggccagttctttgcttgcactggcacctctgtaagctggtcagtaccatttataattgtgttttagtgttttgcagcccagtcatttatactaacggtaacattaaagtgataaattaggaagaagcaggttgtctaatcagcagataggcagtaatgcagctccagtcaaaaggagagtgattccttttcttttttgtgttaataatcaaggaatagaaggatggtttgatttgaagggaaatttgccaaatatgcaggcattcacatatttaaattattttaatatttccttttctttctttttaaagtaagtttgcattttactttaatcctctttcaaatgatgtaccttttcttttaatcacctaaaagagagaattgcagtatgccagtgctgtaaaaaggtcrtttcttgtaccttaactattagctgtttcaaaaaatttaatattaactgcagaccatcctgctgtaacttgttactctgcaaggaaatcatagccaccaatgcggtgctacctgttggactttgtatctcttaagcatattcttttaaaaaattttttactttaagttctgggatgcaagtgcagaatctgcagattagttacataggtatacatgtgccatggtggtctgctgcacctatcaacgtgtcatctaggttttaagcccc

SEQ ID NO: 708557 - DNA, 1233 bp, Homo sapiens
tatcagcccaagtctgctttggctgccatgacaaagtactacagactggtggcttaaacaacagaaatgtattttccggaaactagatgtttgaaatcaaggtgccagcagggttggttccttctgatgcctctctccttggctggtagatggctgtcttctccctgcatcttcacgttgtcctccttctgcctcttggtgtccaaatgtcctcttcttataaggacaatggtcatattggattagggcccaccctgatgatctcatttaaaattacctctttaaaggccttatcttcaaatatagccacatttgggataccagggactaatattccaacctacaaattttgtgaaaacataattgagcccatagcaaatgcttatctcattcctttctttatagtcttctctgattcttttttccttatctcttttcttcctatcttctctgcaccaaatttttcccaccttgctcagtgcgcacgcacacacacacacaaacacattcacactcatcctataagtcatttctctcttctgaataactatagccctaaatattattcttgtggtacttaccacttttatcttgtattatattatcttgtgttatactttaccttgtattataccaccttgtcttatattattatacatattatatgtgttatttcctcaactagagtgtaagttccttctgggaagtccctaatttttttctctcttacatggcttgacacaatgtcttgaacatagtaaatgctcaagaaatatctgatgagtgaatgaagatggtaggagataattaagaagcagtcacttgagtatgggatgagttaaatatattacagatacatttatttctcgcttgagtaacagttcctagagggcaagaaatcagaatcatggatgctttatgatgagactaataatgtacaccagaaaagctggctggtcccacagcagcgtagtccagtggtatggccaagagacattgagcaccattgctgagagcaccagttctggagctggactgcctgggtttgaccttgtctatgtgctataatttggatgtggtttgtccccagcaaaactcackttaaaatttaattgacaatgtagctgtgttgggaggtggtgcctttaagaggtgattaagtcttaggatagattaacgcctttcttgaaagactgggttagtcttgcaggaatggattagttcctccaagag

SEQ ID NO: 708558 - DNA, 1233 bp, Homo sapiens
tatcagcccaagtctgctttggctgccatgacaaagtactacagactggtggcttaaacaacagaaatgtattttccggaaactagatgtttgaaatcaaggtgccagcagggttggttccttctgatgcctctctccttggctggtagatggctgtcttctccctgcatcttcacgttgtcctccttctgcctcttggtgtccaaatgtcctcttcttataaggacaatggtcatattggattagggcccaccctgatgatctcatttaaaattacctctttaaaggccttatcttcaaatatagccacatttgggataccagggactaatattccaacctacaaattttgtgaaaacataattgagcccatagcaaatgcttatctcattcctttctttatagtcttctctgattcttttttccttatctcttttcttcctatcttctctgcaccaaatttttcccaccttgctcagtgcgcacgcacacacacacacaaacacattcacactcatcctataagtcatttctctcttctgaataactatagccctaaatattattcttgtggtacttaccacttttatcttgtattatattatcttgtgttatactttaccttgtattataccaccttgtcttatattattatacatattatatgtgttatttcctcaactagagtgtaagttccttctgggaagtccctaatttttttctctcttacatggcttgacacaatgtcttgaacatagtaaatgctcaagaaatatctgatgagtgaatgaagatggtaggagataattaagaagcagtcacttgagtatgggatgagttaaatatattacagatacatttatttctcgcttgagtaacagttcctagagggcaagaaatcagaatcatggatgctttatgatgagactaataatgtacaccagaaaagctggctggtcccacagcagcgtagtccagtggtatggccaagagacattgagcaccattgctgagagcaccagttctggagctggactgcctgggtttgaccttgtctatgtgctataatttggatgtggtttgtccccagcaaaactcacgttaaaatttaattgacaatgtagctgtgttgggaggyggtgcctttaagaggtgattaagtcttaggatagattaacgcctttcttgaaagactgggttagtcttgcaggaatggattagttcctccaagag

SEQ ID NO: 708559 - DNA, 1233 bp, Homo sapiens
tatcagcccaagtctgctttggctgccatgacaaagtactacagactggtggcttaaacaacagaaatgtattttccggaaactagatgtttgaaatcaaggtgccagcagggttggttccttctgatgcctctctccttggctggtagatggctgtcttctccctgcatcttcacgttgtcctccttctgcctcttggtgtccaaatgtcctcttcttataaggacaatggtcatattggattagggcccaccctgatgatctcatttaaaattacctctttaaaggccttatcttcaaatatagccacatttgggataccagggactaatattccaacctacaaattttgtgaaaacataattgagcccatagcaaatgcttatctcattcctttctttatagtcttctctgattcttttttccttatctcttttcttcctatcttctctgcaccaaatttttcccaccttgctcagtgcgcacgcacacacacacacaaacacattcacactcatcctataagtcatttctctcttctgaataactatagccctaaatattattcttgtggtacttaccacttttatcttgtattatattatcttgtgttatactttaccttgtattataccaccttgtcttatattattatacatattatatgtgttatttcctcaactagagtgtaagttccttctgggaagtccctaatttttttctctcttacatggcttgacacaatgtcttgaacatagtaaatgctcaagaaatatctgatgagtgaatgaagatggtaggagataattaagaagcagtcacttgagtatgggatgagttaaatatattacagatacatttatttctcgcttgagtaacagttcctagagggcaagaaatcagaatcatggatgctttatgatgagactaataatgtacaccagaaaagctggctggtcccacagcagcgtagtccagtggtatggccaagagacattgagcaccattgctgagagcaccagttctggagctggactgcctgggtttgaccttgtctatgtgctataatttggatgtggtttgtccccagcaaaactcacgttaaaatttaattgacaatgtagctgtgttgggaggtggtgcctttaagaggtgattaagtcttaggatagattaacgcctttcttgaaagactgggttagtcttgcaggaatggattagttccyccaagag

SEQ ID NO: 708560 - DNA, 612 bp, Homo sapiens
aacccaaaactataaaaaccctggaagacaacctaggcaataccattctggacatagaaatgggcaaagcactcatgacaaagatgccaaaagcaattgcaataaaagcaaaaattgacaaatgagatctaagtaaactaaagagcttctgcacaacaaaagaaactatcaacacagtaaacagacaacctacagaatgggagaagatatttgcaaactatgcatctgacaaaggtctaatatttagcatctataaggaacttacatttacatgaaaacaagcaaccgcattaaaaagtgggtaaaggacatgaacatacacttttctaaaggaaacatgtatgcagccacgaagcatatgaaaakaataaaatacctaggaattttaaataccttggaaggtaacctcacaaggctcaaatcaaggtgtcaattttttgcattttcatctggatgttgggatcatcaaaagttcaacatcactgatcattacagaatgcaaaccaaaaccacaatgagatactgtctcataccagtcagaatggctgttattaaaaagtcaaaaaataacagatgctggtgaggttatggagaaagaggaatgcttttaca

SEQ ID NO: 708561 - DNA, 612 bp, Homo sapiens
aacccaaaactataaaaaccctggaagacaacctaggcaataccattctggacatagaaatgggcaaagcactcatgacaaagatgccaaaagcaattgcaataaaagcaaaaattgacaaatgagatctaagtaaactaaagagcttctgcacaacaaaagaaactatcaacacagtaaacagacaacctacagaatgggagaagatatttgcaaactatgcatctgacaaaggtctaatatttagcatctataaggaacttacatttacatgaaaacaagcaaccgcattaaaaagtgggtaaaggacatgaacatacacttttctaaaggaaacatgtatgcagccacgaagcatatgaaaataataaaatacctaggaattttaaataccttggaaggtaacctcacaaggctcaaatcaaggtgtcaattttttgcattttcatctggatgttgggatcatcaaaagttcaacatcactgatcattacagaatgcaaaccaaaaccacaatgagatactgtctcataccagtcagaatggctgttattaaaaagtmaaaaaataacagatgctggtgaggttatggagaaagaggaatgcttttaca

SEQ ID NO: 708562 - DNA, 661 bp, Homo sapiens
catatggaggaagcccctgaggagatggccgccagcgcagcctgcagaggcaggggtcaggccggccaggcagaggccagggcaccccaggaaacagctgggcctgttggagctgggccctgggcctgccacctcctgtttgtcagcccctgcgggtgacggccaggtcccctgagccctaagagaatagggaaactgggtggggscagtcggaggaggaaggatgagccacatctaactttgggacaatgagaaagcgaaggccacaggaagaagcagaggaggacaggaaaggtgtgaaggaccatcactcatcagcgggacggctgtccaggtggctctccaggcggcgcatccttcccgttatctcagcgccgtgacgccaggaacacccctccctccgggccagccctatggcccccgccgctggaaacctcggagattggggagctcatttagtcctaacctccattgtgtctgggccggaaggtgaggcacagagagggccagggacttgcccaaggtcacagagcagacgtggctctcctcacaccccagcccatggcagggatgtgcacatcaacaccccgacctcagcccaccacccctgctcactgcagccccggcagaaccctgctcaggcaccagccacctatttcta

SEQ ID NO: 708563 - DNA, 1724 bp, Homo sapiens
tgcagtggtgtgatctcagctcaccgcaacctctgcctcccaggttcaagtgattctcctgcctcagcctcctgagtagctgggactacaggtgtgcgccacctcgcccagctaacttttgtattttagtagagatggggtttcaccatgtttcccaggctggtctcaaacttctgacctcaagtgatcacccacctcggcctcccaaagtgctgggattacaggtgtgagccaccatgcctggttgatttttacccatttttaaagttgtaagtgcttttgtatgcaatactttggagcaatctcaggagttgtttatgttgatttgctagaaagagatacagaatgccaggctagattcaaaactcctgaggatctcaagcaataataagtgcacttacagaaattaaaaagaaataccgctggaaactcaagggcttttctggtgatcacaaagatactggcagatttttgttgataggtaggccaaacttaatcagctagggaaaagaaagaggtactaaaagttaatcaccaaagccaaaaagattaaacttgtaaagactcaacaagcaagtaaacacattaaattttctgaatatgactgaaaacaaattatagttaacctcttaatacttcactgggtatttgagctgttcttagggatccacttttattttggtagtactgtataataaatgtttccctaaaacctacagttaatttaaaaaatatctttgttcctcaacttgtaatgacataagtacgttgcataccacaatttttcattgaacattttatttgttgaaattatcttatataagtcaacttcaggtgatttagaaaataaatgtgtttcgaacattttttaaaaatcaatagcttttttgtttgtttgtttgttttttgagacagagtcttactctgtcgtccaggctggagtgcagtggtgcaatctcagctcactggaacctccgcttctcgggttcatgcaattctcttgtctcagcctcccaaatagctgagattacaggcatgcaccaccacgcctggctaatttttgtattttttggtagagatggtgtttcagcatgttggccaggccggtcttgaactcctgacctcaggtgatccacccacctcggcatcccaaagtgctgggattacaggcatgagccaccacgcctggccccaattagtagcatttttatacacaaataatgacctagctgaaaaagaaataacaaacacaatcttatttgtgatatcatcaaaaataaaataaaataaaataaaataaaataaaatacttgggagaaataatcaaggagatgaaagatctgtacattgaaaastataaagcatcaataaaaaaactaaaaaagatataaacaaatggaaagatattctgtgctcatggatcagaagaattaatattgttaaaatgtccctattatccaaagcaatatacagacttgacacaattcttatcaaaatcccaatgacattcttcatggaaatagaaaaaaaaaattcctacaattcatacagaaccacaaaagaccccaaatagccaaaacaattctaagaaagaaatacaaatagaaatcttccatttattattcagggctggatttgtatctggtcctataggcacatttaggaaaagaaacttcttccggtaactccttaatgtgtgcttccaaactactttttgtgttaaa

SEQ ID NO: 708564 - DNA, 1333 bp, Homo sapiens
tatggccacaaaaatgaacttagcatgcatcatgctacctcttcctcatcaaaataaaaaggaatttgacaggtgccaacggttgcatctaacaggatgagatttaacagggataaatgtcaggccctgaacttgggtttaaaaattcaactgcgtgagcccagaatgatgaaggcaggactcagaaatggaagatgcaggaaagttcttggggtcttaagggatggtatgtttcaaggaggtggcagaaatgaaattggctcttcagctatacaaatatttacagtatagcacaatctcatgctattctcaaaataacctaggggagaagtactaccttatccccattttgcagaaaaagaaactgaggcacagagagatttaagtaacttacctaagatcttgtggttagcaagtggtacagccaggattaatctggacccagaccctgaaccctatgggatggaagcatggaatttagaacagatgggcaacagtcattctccactctgtgctgacgagaacccattttcaggagtcttccatttcatagaataaaagaagatcagcacttcatatcttcatttgaggcaaaatggagcctattcaaaagagagtgtttagggatactgaagaaaggaaacaccctcttttccttaaattcttcatcttcatcttcccaggtgatccagcctacaacatggggagtcatcctagattccaccckcaaattcattcccccacacccacccattgccagctccttgagtcccagcaagcttaacaccccctaaaatcctgaaagctttcctacacaatcctaagccccgccttctacctccaaaatacacctcgagttgacccacttctagccatccccatggccacttctccaatgtaaggcagcagcaagcctcgccttgatcactgcagaccccttctaactactctctccaatctctcatcaccacacctgagtgccagatgggctcatctagccaaatggaatcatgccactccactgcttaaagccctttcatcctttacattctacttagcatgtgatcccacatcttaaatctgcacccccgtccacctcttctctcatagcccctcagtccttggcactagccacatcagccttcctcccatttctgctacatgttatgcccctgcttgcccagggcacccacacatgctggtccctctacctggaatgttctttcccaccacccaaatcctatacctgctccttctcatccttcagatttgagctcaaaggtgatttccccatatagacctttcttagcccccaacaccccaagtaggtttg

SEQ ID NO: 708565 - DNA, 1172 bp, Homo sapiens
cacataaacgcttgcctgctttccctttgacttctgccatgagtaaacgctccctgaggcctcctcagccatgcttcctgtacaaccttcaaaatcataagccagttaaacttttttttttaattataaattacccagtctcaggcatttctttatagcaatgcaaaatcaaactaatacaataatagtttactacgtaatccatatttacttacgttcccattgttaactatggtttccaagatgatggaactagacaataaaatataaatttttaattttaaaattatgaatttctctgatgaaatattttcttctcttcagtatatagttgtcagagaaataatcacataattggcattatttcaaagatgtacaatggaacaagtgtgattgtaatatttaatgaggaaaaccaagtcaccatctaatttttgactctataaggaaagtcaatttttaaaaatgcaaattccaatatccgaaactgtatttatttttattttttgtgcttatttttccatattatatgctttaaagattttgttaactttctaactagagtattacttcttttagaataattctttctatgcaatattaaacctaaattaaaaagaataattcttgtttgaacacgttatattatttaaatatagatatattggttcttgcacttactggcttttgcttcattaatacatatcaaagtaacatgtaaaattcatatattattgtctcagcttaayaaattatagagcagaacacttttaatgacacaaatccattaatctatatccacatctgcagtattttttacctagtaacttctctgtattttcttacattttgaatatataaaaatccagagcatcgttttcacaaagtaaacattgcatctatatttttggatgctgcgtttcactcttaagtggtcaaaaatagtgttttattttaatcaagggaaataaaatctagatagacaaggtaaatatctaggtaaattaagacacagccataaacataaaacttaaggccaaactactaaaaaaattccagttagcaggtcttggatgtaaaaaatacaatttagatatgtgataaaatatgttcatcaaatgaaattaataaatgatcattttgttatgctaataatggcttatgaattatat

SEQ ID NO: 708566 - DNA, 1172 bp, Homo sapiens
cacataaacgcttgcctgctttccctttgacttctgccatgagtaaacgctccctgaggcctcctcagccatgcttcctgtacaaccttcaaaatcataagccagttaaacttttttttttaattataaattacccagtctcaggcatttctttatagcaatgcaaaatcaaactaatacaataatagtttactacgtaatccatatttacttacgttcccattgttaactatggtttccaagatgatggaactagacaataaaatataaatttttaattttaaaattatgaatttctctgatgaaatattttcttctcttcagtatatagttgtcagagaaataatcacataattggcattatttcaaagatgtacaatggaacaagtgtgattgtaatatttaatgaggaaaaccaagtcaccatctaatttttgactctataaggaaagtcaatttttaaaaatgcaaattccaatatccgaaactgtatttatttttattttttgtgcttatttttccatattatatgctttaaagattttgttaactttctaactagagtattacttcttttagaataattctttctatgcaatattaaacctaaattaaaaagaataattcttgtttgaacacgttatattatttaaatatagatatattggttcttgcacttactggcttttgcttcattaatacatatcaaagtaacatgtaaaattcatatattattgtctcagcttaataaattatagagcagaacacttttaatgacacaaatccattaatctatatccacatctgcagtattttttacctagtaacttctctgtattttcttacattttgaatatataaaaatccagagcatcgttttcacaaaktaaacattgcatctatatttttggatgctgcgtttcactcttaagtggtcaaaaatagtgttttattttaatcaagggaaataaaatctagatagacaaggtaaatatctaggtaaattaagacacagccataaacataaaacttaaggccaaactactaaaaaaattccagttagcaggtcttggatgtaaaaaatacaatttagatatgtgataaaatatgttcatcaaatgaaattaataaatgatcattttgttatgctaataatggcttatgaattatat

SEQ ID NO: 708567 - DNA, 1172 bp, Homo sapiens
cacataaacgcttgcctgctttccctttgacttctgccatgagtaaacgctccctgaggcctcctcagccatgcttcctgtacaaccttcaaaatcataagccagttaaacttttttttttaattataaattacccagtctcaggcatttctttatagcaatgcaaaatcaaactaatacaataatagtttactacgtaatccatatttacttacgttcccattgttaactatggtttccaagatgatggaactagacaataaaatataaatttttaattttaaaattatgaatttctctgatgaaatattttcttctcttcagtatatagttgtcagagaaataatcacataattggcattatttcaaagatgtacaatggaacaagtgtgattgtaatatttaatgaggaaaaccaagtcaccatctaatttttgactctataaggaaagtcaatttttaaaaatgcaaattccaatatccgaaactgtatttatttttattttttgtgcttatttttccatattatatgctttaaagattttgttaactttctaactagagtattacttcttttagaataattctttctatgcaatattaaacctaaattaaaaagaataattcttgtttgaacacgttatattatttaaatatagatatattggttcttgcacttactggcttttgcttcattaatacatatcaaagtaacatgtaaaattcatatattattgtctcagcttaataaattatagagcagaacacttttaatgacacaaatccattaatctatatccacatctgcagtattttttacctagtaacttctctgtattttcttacattttgaatatataaaaatccagagcatcgttttcacaaagtaaacattgcatctatatttttggatgctgcgtttcactcttaagtggtcaaaaatagtgttttattttaatcaaggraaataaaatctagatagacaaggtaaatatctaggtaaattaagacacagccataaacataaaacttaaggccaaactactaaaaaaattccagttagcaggtcttggatgtaaaaaatacaatttagatatgtgataaaatatgttcatcaaatgaaattaataaatgatcattttgttatgctaataatggcttatgaattatat

SEQ ID NO: 708568 - DNA, 1207 bp, Homo sapiens
tgatttcatgtgacttctttcaattttatacttaggcaaacattttttttttctgtgctccttgtcaaacgctcacccctgattgctactcttgagtattttcttaaaagttgtaggagcctctgtatagcatctaagaaaatattaaatgtacaagaaaattaaacacctagaagaagtcctcacctgatggataatggttggagtgggcaagtatcccaacctcttgtccttcagatgaacaatcataagaggcattttctttcaaaggttctggtaaaattgagtacccagtgacccatgtgagcaatctcactaatatactctgtattgccttcccccatctctgtctcacactctgttccctcactcttccttcatggtgtcatcttccaaataaactagctgtaattaaatccttgtcgtaggttctgctttcaggttaagccaaactaaatcctattgttgcaggacttttccttatgtcagctaaagatggggtccttgtccattccacggccacaaagatttaggtttgcagacggtttgaagggtaaggcagagttttattgggtgaaaaagaagaaaagggggaaacagggactctcacaaagccagagtccctgctagagcacttctcacccgccattcaaatctcaggttccacacaggaagggaaggagcctggctcctgccagctgcaaagggtgtcaacttctgtggctccgcccccgtgtgcaggctgcttggagtttctccagggaccctttcccatcttggtgtctcaacatacttttattcaagaaaaaaattccaattcaaaaaaaaaaaagtccagggattcaaatgagagggagaaagataaaagaaaatcaaatgagcctcagaaaaggaattcgatatggaaaatctgggacctagaactgtgtgtttagcctgagtatacaactaatatgaaggaaaacatccttttttagatatgcggcacttcaggatacgcacttttttataatctttctgaaatatggatgcattcagcaaaacatcaacaaaaattaattaaaaactgattwaaaaagagcatcagtgtgctctggtgatatttagggtctggttgcgattgcttacaactgtagagtaattgagatatcttagtagcagtacaagatacacatttgaagatctacttagaggaaattcaaagatc

SEQ ID NO: 708569 - DNA, 637 bp, Homo sapiens
tataatttgtattttatttttgtatatgaaagccatgtatgttaattttcacttsaaaaccagcaacttaattgtgtatttataaatgttgaagaactccgattttatgttttgtgatcacaattaaagaataatttcaataagatggatatcaaaacaaaatatgcccttactttttagtaatgtttaaaagtacatttgaagagttataaacgtgtttcagtttttttcgtcaaattttcagttggcttaatcatgatgttcaaacatagacataaaagtttattaaaaatggaataaatatggtctttgtaatagcttcttaaaaatttcagacttagcttcaatattttaaaatctatttaaaaatacacatattaaatagatcctattgtataaatacatacatgcttaatttgtacacaaaatcgatcttcctccatagaatgtaaactacaacaaagcagacttttttgttcggttgcttcctctgctgtaatatatttccaacttctagaatagtgcacggcacttactgagttcacaaagaatatttttgatatagactgtgatggttaattttatgtatcaaccaggttgtgtcacagggtgcccaggtactgggttaaaccttatt

SEQ ID NO: 708570 - DNA, 1198 bp, Homo sapiens
gatcccaatacaaaaaaaagtagggggaaatacttgggaagaacagaggtgacagaacaccaatgtgatagaaaaaaaggttagggcaaaaggaaaacaggtcctacaactggggaagggactgggaaaccactttctaactgagtcttttattgtctttcccacattgccctgagaggattattattcattctatcaaagtgggttggtgagaaaaactgcatcccagcccagcaccagcaccagcctgagttacatcagggagactctagctggggtgaaatgcttataagaagaagttcacagagtctggccaattactgagcatcctcttctcctcccttcctctcttgcctcacccatataagaatcggtcgcaacagaggaggacattctctgraaaactgaaattcttgggacagaggtgttaggtgggtagggagtcccaaaggacacggctatctagtggcagaaatgaagtaaacaaaataattgagaacttattacaacactagaagctttccacactgagatatactccgttcccactcccaaactcgcctagaggagaacaagctggaataaagtacatatgaccatcaaggtacagatgatctttcaaggtagttgataattctaaaggagtatgtgtttgcacagaaaaaagctaacatagcaggcctgaggctgctaccattagaaatgcctactgcaagcctaaactttcccttttgccataagaaaatgcaagggtgctctaaaaaaataaaataaaataaaatataaaattaaaaaaccatagagtaggtatcatacttaatctcaacttattgaaagcattcctcttcacattaggaacatgaaatggatgtctacagttaccattttcttttaagtgaaggtactagacagtagaatgagacaaaaaatgatttaggatccatagcgataaaaataaatgaatgaataaatgaggagaaaataacacttttcacttaaaagtagaaggaatgatggaaatgtaaagtgaccatttgataaactatcatagtaataattaatctattcaaaaaacatagatggatgctataactagtgagtgaaagtataatgggaaatgatatatttacctagtcttaaaatatcaccttactacaaaattattaattacaagaagtaagtttcaatggagaaaaac

SEQ ID NO: 708571 - DNA, 594 bp, Homo sapiens
acagaagcacagatgtccatattcctcccttgaaaactctrtcctgtaggcaagttgggttggagtagcaggtcgtttagttctagagttggttttttttccagtcacatagatttttacatctgattaccatatattgcttaaaatattacttaatccattacagataccttagaacttatttgtttttaaaggcctcaggagaagtggccacaggttactttttaccacagagtcatttacacatgaatcatatttacagagagttatcctatatcatctatttgaatttgtttctacacaaaacaagattccctccaggcacggagcttatgtataaatatcttgttcctttgcagcctcagactgtcagtattccccccaaccaccaccttttagtttcctttttttctctaagtgcattgcctttgcttacacatcatttgctatcttaattatttgacaaacaggagtatttccatcatctttcactcctactgagttttcttcactgtggtactttcagtgagtaccatcatattgtttctgcttaactgtttgagattctttcttaatatggtattggaaagtttt

SEQ ID NO: 708572 - DNA, 622 bp, Homo sapiens
aaatgcctgcttccccttcaccttccaccatgattgtaagtttcatgagtcctccccaaacatgtggaactgtaagttcatttaaaatttcttttgtttataaattacccatactccggtagttctttacagcagtgtgaaaaccaactcctacaccatccttgactcacgagtagagctgagagatagaccatgcctcaataacattgtttgagtctctgaatccagtctcacctgawgccagcttcacctcacatcttctgtggttcattaaccaataaactccctttttactcactgtccacatttcagcaggtattatgatacttacatttgactaacttttgacaaacagaaatgccttcctaataacaccctgaatccaggacattgtgtgtccaaaccaatcatcacttgccctgaagtaatacatacactggtgtccttgccaccagaatccttccagagaagcacaggttttatgcaaggggaagcatttaaactgagccacaaaaattgaagtgggaggttcaaaactaagagaataatatgagcaatggttaccaccaaatttcatcttctattgttttgtacacaaactctgaaaagcttatttgaatct

SEQ ID NO: 708573 - DNA, 2042 bp, Homo sapiens
cccccctccccccaaccttggctctagactgttactcccagctttaggaaattttactttttttttttttccttgagatggagtctcgctgtttcgcccaggctggagtgcggtggtgcaaacttggctcactgcaagcgccgcctcccgggttcatgccattctcctgcctcagcctcctgagtagctgggactacaggtgcccgccaccactcccggctactttttttgttcttttttttagtagagacagggtttcaccgtgttagccaggatggtctccatctcctgacctcgtgatccacccacctcggcctctcaaagtgctgggattacaggtgtgagccaccgtgcctggccgaaattttcacattgatgactattttaaaatcaaactattttgctggtttaaaaaattagccgggcatggtggtgcatgcctgtaatcccagctactcaggagtctgaggcagaagaatygcttgaacccaggagacggaggttgcctcccacaggtgggatccacgttgctgcactttctacctgactcacagatacaaatggctccgggagagagatgctggctgctgttgtgctggtaataccctaaggcaagaagtgtaatatgctgtcacttcctctttttcactcaccctcctcggactccatattgtatttgatatttgtttcccccttcaaggatgcccttaaaattcatttgtgtttgcattcacctagatacaaagactggtggtggtggtgtgtgtgtgtgcacacatgcacatgtatgttggaagaatgatgtggagtttgagcagattgttttcattactgtgggcatttctcaagcatgcccatgaactttacccctggatgatagtgccctggtatgagctgaagggtaaagttagaatcagcataattcaggcttcacagggcgggcttgggaagaaacaatgatcacaaatgaagagactgagcacaactaagaacactacccagtaattttagagctggtcaccaacactatagtgatgcataagaagcaggagacatggtccatgccctcacaaaccatctggtataattgctaagacacagcacacaacggaaataacatcaggtagcaggatcagcagacatattccatgtagctccacaggaaacattgggaggcagatggagattaggtaaaaggatgggcttttaattattagatctgttcaacagtggaagaggctgcctcgtggggtgctgagcttcctcccagtagaggtgttccaaggtgggatgcctctttatctgggatgctgcagtctaaatggagtttagactgcatggcctgctccctcttagagtctgagactttgcagctttatgccttttaactgacctcacattttgagaggtatgtaagccacacgtggtgacagcaaaggctcgaccaacaggttggaagtgcttactagactaagaattcatcctcgggctgtgcatcgggatctgtgtctgactaggaagaaagcctgctaaagacttcactgacttgactgcttcagggctgctctgggaaagtggtttcagacgtctctcttcataggcaggtgtcagccaaatgtgtggcaagtcacctcaccctgggaggcgcttttatgcctaaagcctggggaagcactagaactaaaacaccgcctgagggaatctgctgcaggtttggctctgcaaactttcccatccagctaatgaggaaggcctgattgaaaatggcagcgggaaattaaaaaacagaggaagcagctttaaacatagcaacctctcacctgcttcactaaggctaagctgggtcctaatatacctgtgaggaaaatgaggctcagagatatttgaagacacctgctttaaggttttctgaattgcactgtgggcttggtactagagttatgttccccaggcttggaaagagtcttcttaatggtctcaggggaccacggctctaatgaaagcaaaaatcaccttccagcccttcacaaatccagagtgaa

SEQ ID NO: 708574 - DNA, 636 bp, Homo sapiens
gtctcggtgaactatgaaaagaagtcaaaagagggcaaaatctgtaaaaagaatgtctctagagtttttatactcacctaactcactaaaggtacttccacccaatccttcctacagggtttgtggagttcctagtgaggtaggaactacctcttcctactaggaagaatattcggagtatggaataaccagggttcagagtttaatatctggtgtcattagaatgagttatggaagccagagaggaataatgctaaagttataccattgcttttctaactcaactctatgagttagaaactaagcctgtgcctgtaatgtcctcacagagagctgaatyctgcgtcactgaaaagagaagagaggccacgataataatgtggaaaataatgttaatagaaatcattacttttctcccagaggtaatggaaagaaagaatctacccctggttgcctctcttggtagcttcctccctttggagggtgtattagagttctaatattaaccatcacaggaatgatttctctggctgttgaggctgccaaagtgcaactgtcattggtctttatttctctcttggctaggactaacatgttaaaggctcaatgtgccacttggcctttctgcacttgata

SEQ ID NO: 708575 - DNA, 636 bp, Homo sapiens
gtctcggtgaactatgaaaagaagtcaaaagagggcaaaatctgtaaaaagaatgtctctagagtttttatactcacctaactcactaaaggtacttccacccaatccttcctacagggtttgtggagttcctagtgaggtaggaactacctcttcctactaggaagaatattcggagtatggaataaccagggttcagagtttaatatctggtgtcattagaatgagttatggaagccagagaggaataatgctaaagttataccattgcttttctaactcaactctatgagttagaaactaagcctgtgcctgtaatgtcctcacagagagctgaattctgcgtcactgaaaagagaagagaggccacgataataatgtggaaaataatgttaatagaaatcattacttttctcccagaggtaatggaaagaaagaatcyacccctggttgcctctcttggtagcttcctccctttggagggtgtattagagttctaatattaaccatcacaggaatgatttctctggctgttgaggctgccaaagtgcaactgtcattggtctttatttctctcttggctaggactaacatgttaaaggctcaatgtgccacttggcctttctgcacttgata

SEQ ID NO: 708576 - DNA, 778 bp, Homo sapiens
accagaaaactgcccctcatatataaaaaagcagctcattcatccccatggcacctcatgataaaaacagaatttataacttaaggtagaaatacagtagtaggaataaacttttaaaagtaaaaattatgtttccatttaactgacttatggaagaattatcaggggaaaaaaaagataacgaaaacaagayagagaaaatagccagaattgtttcaaaacattatagaacatttttaaagagatagccctgaagcatcaaaggctgtttaagattcagcaattaaataaacacaatttgtacaacactctgaattattattatctcggtaatgaggaacatttttcagagatttgttctgcattaatatactggaaaacagatggtcataataattttaagaacacatcaggagttaattttgacctcggcttgcttcatacatcacaaatcacagatccttaacatcggagtttgagtgcaaattctgtctttttatgttcttttcttttttaaaaaaatcataagctccaagatttccttcttgaaagaattcatcaatctctcatagtttggagacacagaaggaaattcggaagaattctaatcagtttgggtattaaataattgcaatgaatattgtaatctttgctaacttagtcattatcactgatttgcttttcttaataagccaaaacacaggtatcaaattatatagttcatagtatactggtatgttaacaacgtattagtgcagtttttatattttgggaggtt

SEQ ID NO: 708577 - DNA, 1509 bp, Homo sapiens
ctgtgtatgtcctccctggaatgcatgactcacaattcctttgctttgtctttctgactcactgtctaaagaggtaacctggccaggctattccatatgtgtgctgtgttatcacgttgccgggcacctcagagcaaaaagaaatggtctagtagagaaatggatcaataactaggggcaataaaatcagaaccttgtcccaaacttgaaggtacatgctcgacagatatattaatataaatcagtaaatatttaccgagtgcttactctgtgctagaaacgagacatacaaaaacaaattctgacattctgactccttttaaagagtccacaatattgtggacacatatgaacactctgaggtttaaaaaacaaactaacacaaatggaaggataatattattccaccagtaaccctttagaagttccttgggtgttggtgcattttgctgtcsctgtttgaagctaacctcctaggtctccagcccctgtgagggacacagtctgagtaaaacccacaacatctgctcaagagaagcttcaaagaagcacaatgcttggaatcatatcttctctaagaaaatgtagggtcaaaaactcaacccagacctcctgacttcattttttctacccatttgacaaggccacaaaagaaatctttaagcacctatctaagtaatatttcctctacacaacagtctatatggcatgaggctaatattcagacaaaaatcaagggaatacacatcatactactaatttattatttatggcattcttgcattgtgccaggaattgagccatgctgataaatattattagaacataatccctcatttcatagaccttcccttcatgtcaagagacaaagtccaccacagtaagagaaatgaccaaagtgtgcagaggattctatggtagcaggagaaggtactcaactcagacatgagtactggtactaaggtactgaggacagaaggctttcttagcaaagatggtgtgttaaactgagtctcaaagaagcaattagccagaggtaggagatgggacattctaggaattctagtatcagtggtgtagctgtttgcaatgatctgtctcccaaaccctcagatggtctcattatcattgtcttcactagaaaattaatgaacaattgctttgtgcagaagctgtagaaactgtactaggtattatagattcaacaatgttttctatccttctgtgacacacagcttaggagtgattagacagcatggatggatggatagatatagagacagacagatgatggcaatacccaacctgtactttacttttgtgtggcagtaccagttctaaggagcttcacagtgggcttcatttaccctcactgtcctgagatggaggtagggaagacattgcttaatccattttgaaaaagaatagattcctaggctaacgaatagtgcagatgaccagtgcacatgcctgattacttgaaaggaagtcaagggaggaaaaacatca

SEQ ID NO: 708578 - DNA, 799 bp, Homo sapiens
gcaacaactgatataacatatcaaggcatttttgtcttgctaaacagcagcagaggcagtaaacacagtgtcatcttaataatagtttagtagctttaggtgactggaatgcaagagacatagaggaaccttgaaaaatcaaggcagagagtatgggaaatggagctgggaaaggcaaatcaggccaggataggaaaggtcacatatttctcctttgcatttatctgtcatccacccatctttccttttattctaccaacaaatatatattgagcaattggcaccataataagccctgggaagaaaatagtgagcaaaacagacatagttcttgactttaggcaacatgcattctagtagagaaaaaatagacattaatcaataaaatcatatgagtatatatttataaatggcagcaagttctaggaagtaaaagtgtaggcatctatgaaggaatgtaatggggggctgatcaagttgggcatggaatgttcagggaaggccttcctggaggaaggaccatttcagctgagatgtaaaggaaaagaagttagttattaggcaaagaggaggtggacagggtcagatggaggaaagcattccagacggaacagcatgtacaaagatcctaaggtagagaaactaaagcagtgccaagataccctgaggatgaagatgagggtagaagtggtgagaaatgaagttagacaggggcacggttaggggacattgaaggycaagctaagcagtttaatctttatttcatgaacagctagaagccattaagggagtattatca

SEQ ID NO: 708579 - DNA, 600 bp, Homo sapiens
gaaattgttactagcattgacaggtttaataccgtagacttaaggtgactggcttacatgcctacaaccagggaaacattttcacctggtggcaacatcttgatttgcagtcatagacccaggagaaagaatccaacattttaagtctaattcagcaaaaccaggtctacaaatagtggcaaacataacttaagaaattatctttaaaatgatggcttttactacacttcgtgaatttctagaagtcccctgcccatgctatcatgggatattttaataataatcaaattgttatgtagatatgccaaataattctgttcaggcagacccatttaattcagcaggaatttgccgatatcctgttctatgcatagttcattagtggattattttaggagtttgaaaaaaaacatrcctcagcacctgtgctttaaaaatttatactattttaatgtcacaaatatatatgcagagttctgcttccactaatgatagagtagcttatattggattcagtttaccgaagactagaattataaatcaggacaaaatattaaaacaaaaaaaccaactatttaaagatacaagacagtggtcaaa

SEQ ID NO: 708580 - DNA, 600 bp, Homo sapiens
gaaattgttactagcattgacaggtttaataccgtagacttaaggtgactggcttacatgcctacaaccagggaaacattttcacctggtggcaacatcttgatttgcagtcatagacccaggagaaagaatccaacattttaagtctaattcagcaaaaccaggtctacaaatagtggcaaacataacttaagaaattatctttaaaatgatggcttttactacacttcgtgaatttctagaagtcccctgcccatgctatcatgggatattttaataataatcaaattgttatgtagatatgccaaataattctgttcaggcagacccatttaattcagcaggaatttgccgatatcctgttctatgcatagttcattagtggattattttaggagtttgaaaaaaaacatgmctcagcacctgtgctttaaaaatttatactattttaatgtcacaaatatatatgcagagttctgcttccactaatgatagagtagcttatattggattcagtttaccgaagactagaattataaatcaggacaaaatattaaaacaaaaaaaccaactatttaaagatacaagacagtggtcaaa

SEQ ID NO: 708581 - DNA, 600 bp, Homo sapiens
gaaattgttactagcattgacaggtttaataccgtagacttaaggtgactggcttacatgcctacaaccagggaaacattttcacctggtggcaacatcttgatttgcagtcatagacccaggagaaagaatccaacattttaagtctaattcagcaaaaccaggtctacaaatagtggcaaacataacttaagaaattatctttaaaatgatggcttttactacacttcgtgaatttctagaagtcccctgcccatgctatcatgggatattttaataataatcaaattgttatgtagatatgccaaataattctgttcaggcagacccatttaattcagcaggaatttgccgatatcctgttctatgcatagttcattagtggattattttaggagtttgaaaaaaaacatgcmtcagcacctgtgctttaaaaatttatactattttaatgtcacaaatatatatgcagagttctgcttccactaatgatagagtagcttatattggattcagtttaccgaagactagaattataaatcaggacaaaatattaaaacaaaaaaaccaactatttaaagatacaagacagtggtcaaa

SEQ ID NO: 708582 - DNA, 600 bp, Homo sapiens
gaaattgttactagcattgacaggtttaataccgtagacttaaggtgactggcttacatgcctacaaccagggaaacattttcacctggtggcaacatcttgatttgcagtcatagacccaggagaaagaatccaacattttaagtctaattcagcaaaaccaggtctacaaatagtggcaaacataacttaagaaattatctttaaaatgatggcttttactacacttcgtgaatttctagaagtcccctgcccatgctatcatgggatattttaataataatcaaattgttatgtagatatgccaaataattctgttcaggcagacccatttaattcagcaggaatttgccgatatcctgttctatgcatagttcattagtggattattttaggagtttgaaaaaaaacatgccwcagcacctgtgctttaaaaatttatactattttaatgtcacaaatatatatgcagagttctgcttccactaatgatagagtagcttatattggattcagtttaccgaagactagaattataaatcaggacaaaatattaaaacaaaaaaaccaactatttaaagatacaagacagtggtcaaa

SEQ ID NO: 708583 - DNA, 600 bp, Homo sapiens
gaaattgttactagcattgacaggtttaataccgtagacttaaggtgactggcttacatgcctacaaccagggaaacattttcacctggtggcaacatcttgatttgcagtcatagacccaggagaaagaatccaacattttaagtctaattcagcaaaaccaggtctacaaatagtggcaaacataacttaagaaattatctttaaaatgatggcttttactacacttcgtgaatttctagaagtcccctgcccatgctatcatgggatattttaataataatcaaattgttatgtagatatgccaaataattctgttcaggcagacccatttaattcagcaggaatttgccgatatcctgttctatgcatagttcattagtggattattttaggagtttgaaaaaaaacatgcctmagcacctgtgctttaaaaatttatactattttaatgtcacaaatatatatgcagagttctgcttccactaatgatagagtagcttatattggattcagtttaccgaagactagaattataaatcaggacaaaatattaaaacaaaaaaaccaactatttaaagatacaagacagtggtcaaa

SEQ ID NO: 708584 - DNA, 600 bp, Homo sapiens
gaaattgttactagcattgacaggtttaataccgtagacttaaggtgactggcttacatgcctacaaccagggaaacattttcacctggtggcaacatcttgatttgcagtcatagacccaggagaaagaatccaacattttaagtctaattcagcaaaaccaggtctacaaatagtggcaaacataacttaagaaattatctttaaaatgatggcttttactacacttcgtgaatttctagaagtcccctgcccatgctatcatgggatattttaataataatcaaattgttatgtagatatgccaaataattctgttcaggcagacccatttaattcagcaggaatttgccgatatcctgttctatgcatagttcattagtggattattttaggagtttgaaaaaaaacatgcctcarcacctgtgctttaaaaatttatactattttaatgtcacaaatatatatgcagagttctgcttccactaatgatagagtagcttatattggattcagtttaccgaagactagaattataaatcaggacaaaatattaaaacaaaaaaaccaactatttaaagatacaagacagtggtcaaa

SEQ ID NO: 708585 - DNA, 675 bp, Homo sapiens
aaaattcagtgccattccagcagattttttcttaaagaaaaatggagaagcttaatataaactttataaagaaaggacctatagccaaaacaatcttggaaaagattgcaaagcttaacaatacttaatttcaagacaccataaagccacaataatcaagacagtggggtactggcataagaagagacacatagataaatgacataaatagatcatccagattcacagataaacagtaaattttgacaagggcacacaggtaattaaatgagtaggcaaggtaattaartgagtagtcaaaattaaatgattttgacaagggcacacaggtaattaaatgagtaggcaaagatttcttggaacacacaaaaagcaccaaccataaaaaaaattgataaactaggcttcgtcaaaatgaaaaacttgttctttgaaagacataattaagaaaatgaaaaggccgctaaagactaagaatagtcacaacacacatatctgaaaaagagtgtatccagaatatataaacaattcttactattcaataataaaacaaaacaatctaattttttaataaacaaaaatatttgtacagatagttcacgaaatatgtgaatggccaataagcacatgaaaagaagttcaacatctttaatcagaaaaatgcaaatcaaaacc

SEQ ID NO: 708586 - DNA, 616 bp, Homo sapiens
aaaaaacaaataaataaataaaataaaataaaggccttatgagagaataaatttcaatttgtagggatagattcaaattcatgcctgtccatctttaaaacctggacactttgtctacaccatctgtgtaactggctgcaagaacccactgttcctacggagtggctaatacagaagtaaaactctttggcttaaattgttatcctggtgtatttatgggagagccttttggcttttgtgactgctacatccaactctattttatctgagaatggctgagatggttcaggccaaactcatggtataattggtaatagatacccagaactttctctgtaagtttcctttgcgatttttttcttttgatgtagtttggggttaacaatagtgtatacttgtggattagtaattggataattaarcatgtaagtgtttcattttaacaagttcatctctcttgattcatcgattcagtttctagaaatctctcccaaggcatacatgcagacaaaggcttataaagaaagttatttatgataaggacaaacttagaaatgattgaaataccttatttacatagaagaatgagatatatataatacgcacatttagaacc

SEQ ID NO: 708587 - DNA, 617 bp, Homo sapiens
tgaatagaagaataatctcacactccttagctggttagcagcgcacagagaaaaacaatccctacacagtggagataaacacataaagtgattactgtgaacatccaaactttaggcaccaggactgctatctagcgagggctattctctgcttccaggatggcgccttgttactgcgtcttyaataggagcggaaccctgtgtcctcacatgatggaaggcagaagcaagtcaatcaaaccctgcataaagcctcttttatgagggccttaattgcactggtgaagaaggagacctcatggcctaatgacctcttaaaggccccacctcttaatcctcacactttggccattacgtttcaacacccaaagtttggaggggacacattcaaagcatagcactccccatgcttctagaaaaaggatagggcatcaccaaagcagttgagaagcaaaaataggtgcctttacttgtacctacagacacaaaagtaggactgtttttacctgtattacattaggtatgcatttggctatgttttcgtagataccatgtctctcgtctaaagtctactttgactgatattgatatatcagacaagctttttcaagattcat

SEQ ID NO: 708588 - DNA, 617 bp, Homo sapiens
tgaatagaagaataatctcacactccttagctggttagcagcgcacagagaaaaacaatccctacacagtggagataaacacataaagtgattactgtgaacatccaaactttaggcaccaggactgctatctagcgagggctattctctgcttccaggatggcgccttgttactgcgtcttcaataggagcggaaccctgtgtcctcacatgatggaaggcagaagcaagtcaatcaaaccctgcataaagcctcttttatgagggccttaattgcactggtgaagaaggagacctcatggcctaatgacctcttaaaggccccacctcttaatcctcacactttggccattacgtttcaacacccaaagtttggaggggacacattcaaagcatagcactccccatgcttctagaaaaaggatagggmatcaccaaagcagttgagaagcaaaaataggtgcctttacttgtacctacagacacaaaagtaggactgtttttacctgtattacattaggtatgcatttggctatgttttcgtagataccatgtctctcgtctaaagtctactttgactgatattgatatatcagacaagctttttcaagattcat

SEQ ID NO: 708589 - DNA, 674 bp, Homo sapiens
  misc_feature 586, 601: n = A,T,C or G
acaacccagtaggtagtgttttttaaactctaataaagtcatattaaactacagtaactacctgtagaggcatttcacttgtttgcccctcagtgccaagttgttttctaatttcaccaccttcctgagcatctgcatcataattccagccacctgtggatatttctaactagcttttttgccagaatctcaatttygacataaaaaggaaaagcggccatcattttctgaaaataaacctgctcatcctcctgtaatctgtgtctttatcacgggcagagccactgttctttttatgtgactataaaagaaagtgtgatctctgcctcttctttttccgggtatcagtgctgaaattttggggtattatcttggtggcttctctgaaatcttctccctcattttaattcctggcatccttttctaataaggagttcagtttttcactgagaatatgtctaaaatctctttccactctgtgtcatcattggttactaaatgtccaataaacattcaaattcttctggacacttgctatgtaatggtattggacaaatattgaattacacagagatgttactgtctntatggagctcaattnctagtgaaaagaacagacaagcaatgatctttcacttagctaattatcaataggcaaagaataaaactgacaa

SEQ ID NO: 708590 - DNA, 655 bp, Homo sapiens
aataataakaagaagaagaagaagaagaagaagaagaagaaaatggctgagaattttccagagttatggtaaaacaccaatattttttctagaacctgccccccttccaatctaagtaagataataagaaatgtacactttggcccaccatagccaagctgcagaatatcaatggacaaaagatttttttacaaagcagccagggagaaaagccagatcatccactaaggaatggtggtgaggctgatgggtgcttctcatcaggaacagaggaaactgctgcactggggaataatatcttcagtgtgctcagagaaaatttgtccacttacaataatttatcttgcaaaactccagtttaagaatgtgaataaaatgaagacttttacagacaaagcacaactggaaaagcttatcacagaaagaccattgccaaagaaaattctggaagatgactttaggctgaaggaaaattattccaagtgaaaagtatgatatacaggaagaaatagtgaggcaagatgcaggtaaatccaaattaaaactgcttaagcaataaaaatgaagtctagttggtgtaggaaaagaggctgaagaaattaaactattacaaaacattagcaggtaatatgggagagatttgatcagagttaca

SEQ ID NO: 708591 - DNA, 655 bp, Homo sapiens
aataataagaakaagaagaagaagaagaagaagaagaagaaaatggctgagaattttccagagttatggtaaaacaccaatattttttctagaacctgccccccttccaatctaagtaagataataagaaatgtacactttggcccaccatagccaagctgcagaatatcaatggacaaaagatttttttacaaagcagccagggagaaaagccagatcatccactaaggaatggtggtgaggctgatgggtgcttctcatcaggaacagaggaaactgctgcactggggaataatatcttcagtgtgctcagagaaaatttgtccacttacaataatttatcttgcaaaactccagtttaagaatgtgaataaaatgaagacttttacagacaaagcacaactggaaaagcttatcacagaaagaccattgccaaagaaaattctggaagatgactttaggctgaaggaaaattattccaagtgaaaagtatgatatacaggaagaaatagtgaggcaagatgcaggtaaatccaaattaaaactgcttaagcaataaaaatgaagtctagttggtgtaggaaaagaggctgaagaaattaaactattacaaaacattagcaggtaatatgggagagatttgatcagagttaca

SEQ ID NO: 708592 - DNA, 655 bp, Homo sapiens
aataataagaagaakaagaagaagaagaagaagaagaagaaaatggctgagaattttccagagttatggtaaaacaccaatattttttctagaacctgccccccttccaatctaagtaagataataagaaatgtacactttggcccaccatagccaagctgcagaatatcaatggacaaaagatttttttacaaagcagccagggagaaaagccagatcatccactaaggaatggtggtgaggctgatgggtgcttctcatcaggaacagaggaaactgctgcactggggaataatatcttcagtgtgctcagagaaaatttgtccacttacaataatttatcttgcaaaactccagtttaagaatgtgaataaaatgaagacttttacagacaaagcacaactggaaaagcttatcacagaaagaccattgccaaagaaaattctggaagatgactttaggctgaaggaaaattattccaagtgaaaagtatgatatacaggaagaaatagtgaggcaagatgcaggtaaatccaaattaaaactgcttaagcaataaaaatgaagtctagttggtgtaggaaaagaggctgaagaaattaaactattacaaaacattagcaggtaatatgggagagatttgatcagagttaca

SEQ ID NO: 708593 - DNA, 655 bp, Homo sapiens
aataataagaagaagaakaagaagaagaagaagaagaagaaaatggctgagaattttccagagttatggtaaaacaccaatattttttctagaacctgccccccttccaatctaagtaagataataagaaatgtacactttggcccaccatagccaagctgcagaatatcaatggacaaaagatttttttacaaagcagccagggagaaaagccagatcatccactaaggaatggtggtgaggctgatgggtgcttctcatcaggaacagaggaaactgctgcactggggaataatatcttcagtgtgctcagagaaaatttgtccacttacaataatttatcttgcaaaactccagtttaagaatgtgaataaaatgaagacttttacagacaaagcacaactggaaaagcttatcacagaaagaccattgccaaagaaaattctggaagatgactttaggctgaaggaaaattattccaagtgaaaagtatgatatacaggaagaaatagtgaggcaagatgcaggtaaatccaaattaaaactgcttaagcaataaaaatgaagtctagttggtgtaggaaaagaggctgaagaaattaaactattacaaaacattagcaggtaatatgggagagatttgatcagagttaca

SEQ ID NO: 708594 - DNA, 655 bp, Homo sapiens
aataataagaagaagaagaakaagaagaagaagaagaagaaaatggctgagaattttccagagttatggtaaaacaccaatattttttctagaacctgccccccttccaatctaagtaagataataagaaatgtacactttggcccaccatagccaagctgcagaatatcaatggacaaaagatttttttacaaagcagccagggagaaaagccagatcatccactaaggaatggtggtgaggctgatgggtgcttctcatcaggaacagaggaaactgctgcactggggaataatatcttcagtgtgctcagagaaaatttgtccacttacaataatttatcttgcaaaactccagtttaagaatgtgaataaaatgaagacttttacagacaaagcacaactggaaaagcttatcacagaaagaccattgccaaagaaaattctggaagatgactttaggctgaaggaaaattattccaagtgaaaagtatgatatacaggaagaaatagtgaggcaagatgcaggtaaatccaaattaaaactgcttaagcaataaaaatgaagtctagttggtgtaggaaaagaggctgaagaaattaaactattacaaaacattagcaggtaatatgggagagatttgatcagagttaca

SEQ ID NO: 708595 - DNA, 655 bp, Homo sapiens
aataataagaagaagaagaagaagaagaagaagaagaagaaaatggctgagaattttccagagttatggyaaaacaccaatattttttctagaacctgccccccttccaatctaagtaagataataagaaatgtacactttggcccaccatagccaagctgcagaatatcaatggacaaaagatttttttacaaagcagccagggagaaaagccagatcatccactaaggaatggtggtgaggctgatgggtgcttctcatcaggaacagaggaaactgctgcactggggaataatatcttcagtgtgctcagagaaaatttgtccacttacaataatttatcttgcaaaactccagtttaagaatgtgaataaaatgaagacttttacagacaaagcacaactggaaaagcttatcacagaaagaccattgccaaagaaaattctggaagatgactttaggctgaaggaaaattattccaagtgaaaagtatgatatacaggaagaaatagtgaggcaagatgcaggtaaatccaaattaaaactgcttaagcaataaaaatgaagtctagttggtgtaggaaaagaggctgaagaaattaaactattacaaaacattagcaggtaatatgggagagatttgatcagagttaca

SEQ ID NO: 708596 - DNA, 2084 bp, Homo sapiens
ggaaagaaaggactttcaaaaaattcttcagaatcatccttagtatgcatgcaataaacacctattaatttctaatttaatggataatgggtggaataaaattaacaatttatttgaaacaaggatgcaaggcttaaaagttccttaagtgtttagattcaaaattattttgtgcctggttaagaaatgtcatatgtattacatataagtgtagatacatagctatctttagagatatgaagacagataaatagatatacctgtcactcaaacagaaggggcaggaaggacattggtgtgtggcacagaatcttagtgctatagggctttttgagagactataatgagggcttggggagtaatgagggacccagagaggaccttctttttgtctctgatctttgtttttctctggcatttctcctattcttctctctccagagtgattttctgcatctgtaaaaatgcaggagatggcctcctttaagctgccgagttcacttgtcctctagcacccaaccagccccattagcctaactaccttcattccartttccaggagagaaaatgtaattggtccagcttgggtcaaggtgcaccccgatccattcaattataaccagtctagtggggagtgaggagggggtcaagtgttcaaacatgtcttagggctcaatcctacgacggtggggtatgattttcagagaaaggagattaaattgttgaggacagacaaccccaaagatgtattacttgtatgttaataatgaattccagtgaaaaccttaaggacatgtttagagatcttttctggttccattttcttttccttgctagaccagtttggtaggttttaagcatggttgttgaccaattgattaatcagaggtatgacccatgagaaaataaaagaaacctgtgagaaagtttgataatggtatgatttggctctctggaccttaaggatgtaatttgtccttgaaaacaagttaaggtatatttgtcttgcagagcttttgtagcaaatcaacacaaactaggtggcttaaaacaacagaaatgtattctctcacagatctggagggcagagatctgcaatcaaggttttagcaggacctggcgctccctcagaggtttccaggagagaatccttccttgcttcttccagcttctggaggctcccaatgttccttggctcatggctgccccactcccatctgtgcttctgtcctcacatggccttcttctctccgtcagcctctcctctttgggtctttgataaggacgcttgtctttggatttagggtttacctatataattgaggatgatctcatgtccacattcttaattatatttgcaaagatcctttctccaaataaagttagattcagggtttggggatgtggacatatctttgggaggcctccattcaacctgctacataaggtgaaaatggactgaccagtggggccttcttgcagtttgttcttgccgtgcccatatctcgctcagggcagggcagctgcactggtgtaactgaaatttggaacccttttcctggggcaggcctggatggtggagaggacacagttggctcagcttagagcagcagggacatgtaggctggtcacaggccccaggctggtcctttctggctgtacacatcctccacattttcatcagtgtgtcttacggatattttcccccctgtatttgctatgtcctgaatacaagattgagaagcgttggttaggaagccacttcattttattctccctcttctttatagtctatttgatctttccttgaattcatttttgaaatgtcttctagttgcaattgttagttgttgactgaataagacacccttaaattttccttccagtggtttcttttagtctgctatagagaagagctatagtgccaatgggtgggagttctcaggaaggaaagtctggtttgatgtcataaagaagattttaatcactagggctggccaacgatgaagcaggctgccacataaagccctgagcactccattgcaagtgggaaaatagatgcggcagatcatccaccaggggta

SEQ ID NO: 708597 - DNA, 2084 bp, Homo sapiens
ggaaagaaaggactttcaaaaaattcttcagaatcatccttagtatgcatgcaataaacacctattaatttctaatttaatggataatgggtggaataaaattaacaatttatttgaaacaaggatgcaaggcttaaaagttccttaagtgtttagattcaaaattattttgtgcctggttaagaaatgtcatatgtattacatataagtgtagatacatagctatctttagagatatgaagacagataaatagatatacctgtcactcaaacagaaggggcaggaaggacattggtgtgtggcacagaatcttagtgctatagggctttttgagagactataatgagggcttggggagtaatgagggacccagagaggaccttctttttgtctctgatctttgtttttctctggcatttctcctattcttctctctccagagtgattttctgcatctgtaaaaatgcaggagatggcctcctttaagctgccgagttcacttgtcctctagcacccaaccagccccattagcctaactaccttcattccaatttccaggagagaaaatgtaattggtccagcttgggtcaaggtgcaccccgatccattcaattataaccagtctagtggggagtgaggagggggtcaagtgttcaaacatgtcttagggctcaatcctacgacggtggggtatgattttcagagaaaggagattaaattgttgaggacagacaaccccaaagatgtattacttgtatgttaataatgaattccagtgaaaaccttaaggacatgtttagagakcttttctggttccattttcttttccttgctagaccagtttggtaggttttaagcatggttgttgaccaattgattaatcagaggtatgacccatgagaaaataaaagaaacctgtgagaaagtttgataatggtatgatttggctctctggaccttaaggatgtaatttgtccttgaaaacaagttaaggtatatttgtcttgcagagcttttgtagcaaatcaacacaaactaggtggcttaaaacaacagaaatgtattctctcacagatctggagggcagagatctgcaatcaaggttttagcaggacctggcgctccctcagaggtttccaggagagaatccttccttgcttcttccagcttctggaggctcccaatgttccttggctcatggctgccccactcccatctgtgcttctgtcctcacatggccttcttctctccgtcagcctctcctctttgggtctttgataaggacgcttgtctttggatttagggtttacctatataattgaggatgatctcatgtccacattcttaattatatttgcaaagatcctttctccaaataaagttagattcagggtttggggatgtggacatatctttgggaggcctccattcaacctgctacataaggtgaaaatggactgaccagtggggccttcttgcagtttgttcttgccgtgcccatatctcgctcagggcagggcagctgcactggtgtaactgaaatttggaacccttttcctggggcaggcctggatggtggagaggacacagttggctcagcttagagcagcagggacatgtaggctggtcacaggccccaggctggtcctttctggctgtacacatcctccacattttcatcagtgtgtcttacggatattttcccccctgtatttgctatgtcctgaatacaagattgagaagcgttggttaggaagccacttcattttattctccctcttctttatagtctatttgatctttccttgaattcatttttgaaatgtcttctagttgcaattgttagttgttgactgaataagacacccttaaattttccttccagtggtttcttttagtctgctatagagaagagctatagtgccaatgggtgggagttctcaggaaggaaagtctggtttgatgtcataaagaagattttaatcactagggctggccaacgatgaagcaggctgccacataaagccctgagcactccattgcaagtgggaaaatagatgcggcagatcatccaccaggggta

SEQ ID NO: 708598 - DNA, 2084 bp, Homo sapiens
ggaaagaaaggactttcaaaaaattcttcagaatcatccttagtatgcatgcaataaacacctattaatttctaatttaatggataatgggtggaataaaattaacaatttatttgaaacaaggatgcaaggcttaaaagttccttaagtgtttagattcaaaattattttgtgcctggttaagaaatgtcatatgtattacatataagtgtagatacatagctatctttagagatatgaagacagataaatagatatacctgtcactcaaacagaaggggcaggaaggacattggtgtgtggcacagaatcttagtgctatagggctttttgagagactataatgagggcttggggagtaatgagggacccagagaggaccttctttttgtctctgatctttgtttttctctggcatttctcctattcttctctctccagagtgattttctgcatctgtaaaaatgcaggagatggcctcctttaagctgccgagttcacttgtcctctagcacccaaccagccccattagcctaactaccttcattccaatttccaggagagaaaatgtaattggtccagcttgggtcaaggtgcaccccgatccattcaattataaccagtctagtggggagtgaggagggggtcaagtgttcaaacatgtcttagggctcaatcctacgacggtggggtatgattttcagagaaaggagattaaattgttgaggacagacaaccccaaagatgtattacttgtatgttaataatgaattccagtgaaaaccttaaggacatgtttagagatcttttctggttccattttcttttccttgctagaccagtttggtaggttttaagcatggttgttgaccarttgattaatcagaggtatgacccatgagaaaataaaagaaacctgtgagaaagtttgataatggtatgatttggctctctggaccttaaggatgtaatttgtccttgaaaacaagttaaggtatatttgtcttgcagagcttttgtagcaaatcaacacaaactaggtggcttaaaacaacagaaatgtattctctcacagatctggagggcagagatctgcaatcaaggttttagcaggacctggcgctccctcagaggtttccaggagagaatccttccttgcttcttccagcttctggaggctcccaatgttccttggctcatggctgccccactcccatctgtgcttctgtcctcacatggccttcttctctccgtcagcctctcctctttgggtctttgataaggacgcttgtctttggatttagggtttacctatataattgaggatgatctcatgtccacattcttaattatatttgcaaagatcctttctccaaataaagttagattcagggtttggggatgtggacatatctttgggaggcctccattcaacctgctacataaggtgaaaatggactgaccagtggggccttcttgcagtttgttcttgccgtgcccatatctcgctcagggcagggcagctgcactggtgtaactgaaatttggaacccttttcctggggcaggcctggatggtggagaggacacagttggctcagcttagagcagcagggacatgtaggctggtcacaggccccaggctggtcctttctggctgtacacatcctccacattttcatcagtgtgtcttacggatattttcccccctgtatttgctatgtcctgaatacaagattgagaagcgttggttaggaagccacttcattttattctccctcttctttatagtctatttgatctttccttgaattcatttttgaaatgtcttctagttgcaattgttagttgttgactgaataagacacccttaaattttccttccagtggtttcttttagtctgctatagagaagagctatagtgccaatgggtgggagttctcaggaaggaaagtctggtttgatgtcataaagaagattttaatcactagggctggccaacgatgaagcaggctgccacataaagccctgagcactccattgcaagtgggaaaatagatgcggcagatcatccaccaggggta

SEQ ID NO: 708599 - DNA, 463 bp, Homo sapiens
tttaaaggtaattttattcaagaattttattttacaagtgaagaatgaagtccagagaagttaagcaaattgttcaagatcataccagttagtggcaagtggagaagtaagactcctatgttctgtctccaggcaatgttcttgccaccacaggacactgtctattgcccagaaactactagcccattatcyttaggcaaaaacaaacaaataaataaataaactgaaaaaccttacccttgaaacgtaaactcttcaattctacttccttttgcctttctgtccagtattaaagtatttatgtctttactagctgactgaaatccttgcaatctccaaaactgggataatatcttaataactgctttatggcataacctaatgcaatgctttgcatagagtaagtactctaaaatgttaattaagttgaattgtggtgccaaaagaaggtttaggctgaggg

SEQ ID NO: 708600 - DNA, 857 bp, Homo sapiens
caaaattaatactattttgattttgttcaacaattcttgcttaacctgatgtatcttacaaacaggttgtgttccagtttcttaaggatagttgaatattatattaatattattgtttgtttaaaatagcaaaaatacttaatctctacccccatccccccacggctggattgttgacttcttctttgattggtggtttaatacagaatgagagactgggaattgaaagaatgaaaacttaacactttcagtccacaatgctttgagtccccaggtgaagtttgatttcggtagttcttaaaattcctaagatccacatagacagtgtagcacattgtctaatagtacagaatccagagccatatggcttgggttcaaattccatttccaacatttactaactgtgggaccttgggcaggttgcttaaagtctctgtatgctcacctatgaaatgggaataaaaacagcaccaatttcataggactgataagcataagtaaattaatatgaataagacacctaaaagttggcctgacaaaataagagctgtatttggtaccttctgttattatctaaacagactcaaatatttagatctttgtaaaatcctgagcagctcatatattcattcagcatttgttctctgagcctgtgttatatgaygggtggtattctagattcaagcactacatccatgaacagaactacaattcctgcttcaattatttcgtcatatcaatatcctgtaactgtagcctcctcaaaattccaactgatcaaaaatattgtctatttcaagatttttgcttttcaattttagtaacaaatatctagttacagaaactcatttatttac

SEQ ID NO: 708601 - DNA, 828 bp, Homo sapiens
ttatcttcctggttgtttttaagactttcccttcttcctaggcactgtgcattttactgcaatgattttagctattgattttctttatatttactctttgcaatttgttgaactttctgaatctaattgatgtatttcttaaaatgtgggagattcttagtgtatgtcttctcaatattgctttctcctaatctttttaattttttttgcaacaccaattagacatatattagcttctctyagtgtatcacaaacaccattttcccctttcagccttccatgttcattaatatttcttttatattttctacgtcttgatctctgtatgctgcattttgggtaatttattcagatctatcttcaaattaaataattaactcttcagctaggagatattaatttttataagaatattgattttcattactgcattttttatttctggaagttctatttaattattatccaaatctgcctagtcacatttttcatcatattttcaatgtacaatttctattctgtatctatgagtcaagtattttcagcctttgtaggcctatttttcacttatagtggtttgttttctcatatatattttgattttacttatatgatcattaaaacattacctatggatattcttgtggttggttttcaatggcaatccactagagagggttagtgtttgctcctgccagtagttgaaagaactaactcaggaacaactaatatttggtttgaggtgttttgtaacaaacagagaatatgaattagaatccaagcccataggaagacttacttgtagatatgaacccctgaggaaaacaa

SEQ ID NO: 708602 - DNA, 828 bp, Homo sapiens
ttatcttcctggttgtttttaagactttcccttcttcctaggcactgtgcattttactgcaatgattttagctattgattttctttatatttactctttgcaatttgttgaactttctgaatctaattgatgtatttcttaaaatgtgggagattcttagtgtatgtcttctcaatattgctttctcctaatctttttaattttttttgcaacaccaattagacatatattagcttctctcagtgtatcacaaacaccattttcccctttcagccttccatgttcattaatatttcttttatattttctacgtcttgatctctgtatgctgcattttgggtaatttattcagatctatcttcaaattaaataattaactcttcagctaggagatattaatttttataagaatattgattttcattactgcattttttatttctggaagttctatttaattattatccaaatctgcctagtcacatttttcatcatattttcaatgtacaatttctattctgtatctatgagtcaagtattttcagcctttgtaggcctatttttcacttatagtggtttgttttctcatatatattttgattttacttatatgatcattaaaacattacctatggayattcttgtggttggttttcaatggcaatccactagagagggttagtgtttgctcctgccagtagttgaaagaactaactcaggaacaactaatatttggtttgaggtgttttgtaacaaacagagaatatgaattagaatccaagcccataggaagacttacttgtagatatgaacccctgaggaaaacaa

SEQ ID NO: 708603 - DNA, 1100 bp, Homo sapiens
agagacaataatcctggcttattatgtatccagaagctatgggaacatttgtttcccttctgagcctgttttatctataaatttcaatatattagctaagaaagcttatatctgagacctggagggaagtgcccttttaaaagctattgcattctgatcctcgtatttctttccagagacaaggttaggggtggaaaatgcactcatggtagaaaagaaaggcttttcaagtcatcctgttataccaggagtgggaaaatcaaggcagaggctgataaatgaatctcagggtcaaaccagatmcagaaaaaacagagtctaagtcctgagctgttgagaccttagacaaagcttgccccatatgagaaacttgtagtatttttctggctctaacaggaaccagcacagggactcccaagattgaggacaccaagctgctgcggtgtcctaatttaccacactgagaagagtttgaaatttttccctctgtgtgtgtgtgtgcacgcgtgtgtgtgtttgtgactgttaggtacactagcccccaaggcaggtagtaggtcatattgcttattccatcccagtaccacacgcttctgggcatacagtaaatgttgaatcaaggcaaggatgtgcacgtttaagcctctgtaattgtgtttgcttatcttaaggcattctttctttattcattttaacccttaaaaagtttcttcttctttctacaaaaacaaaacaaaccagaaagacaaaacaaaaaccaaaattggtgacctcatgccttatagttgttcctgtcttctgagtggcatttgctgtctgaagatattttcatctattactgcatttttttttctcctcttaggtttagatcagagcttatttttcaataagacgtgttcagaaaagctatcttcctttaccaaattgcacacttcacaaaagacagagatgagatttgaaccttgggctgtctgactttaaagccccatgtccgctccactacccaggctgtctctgtgcacatgctgaggccacagtcctttagtctccaagtgcttggccacccctctagaataaggaggtgatgcctggcttctcaa

SEQ ID NO: 708604 - DNA, 1529 bp, Homo sapiens
attttcttggctaaaaaatactaataataagtccaaaatcttagcatgagcttaatgtgatcatcaaagccttatattatctggacctgcctacctctccagcctcacctatctctctcctcacatcctgagcctgccagttacactgaattttctttctccatgaacatatcatgttcactttgggccttcacccattctgttccctctgtctggaacattcttagctggtctcttctcttagccaattgctacccatcatttagatctcaacctaagcatccctatccaatcatgccaatctaggctatgtttctctttgtgttatggtcccatagcaccctgaattactctgtcacaacatttctcacacatctatttacttaacatttaccctcaaggtaaatcttcctgtgaatgtgggaaggtgcactgaaatgtcttttgcagttgttgcttcggtcagaagtcaaaaagggattgaacttcattttggctgctcccactttggtctagatttttttaaagcttcaaaattttttaatttggcaagaagttctttgaaactaatgagaacaaagatacaatgtaccataatctctgggacacagctaaggccatgttaagagggaagtttatagcactaaatgcccatatcaatgttcaatccatgcctaaccgaaaggataatgaagttcaggttgtacgagtaygaggacactataaaggtcagcaaattggtacagtagtccaggtttacaggaagaaatatgtcatctacattgaatgggtgcagcaggaaaaggccaatggcacaactgtccatgtaggcattcaccccagcaaggcggttatcactaggctaaaactggacaaagaccgcaaaaagatccctgaacagaaagccaaatctcaccaggcaggaaaggaaaagggcaaatacaaggaagaaaaaattgaggagatgcaggaataaagtaatcttatatacaagttttgattaaaatttgaaatgaagaaaaaatatatatactcatggtggccattgagttttaggcacactggtgaccgtcattgctacagctgctcactttctctggtaaaccagaaagacctcagacactgggttcctcactcacatccacggggatgcagccctgccagtgctcaggcagagttctcaggagcggggacaccttactgttaacttgtgtgtcgtcttctaaagtgatctcattaactgctgctgtgaccatgttagtcaaaagtcacagagaagactggagatggtgcacgtgtttgcaagtggatcgggggaaccagccccaatatttcaacgtacgttattttctattttccctaagtgtcagccagtcttacaaataaagggatagagtacaaaagagagaaattttaaagctgggtgtccgggggagacatcacatgtcggcaggttccatgatgccccctgagctgtaaaaccagcacgtttttattagtgattttcaaaggggaggaagtgtacaaat

SEQ ID NO: 708605 - DNA, 1990 bp, Homo sapiens
aaaggcttatcggatggatgtactacatttggagatgaagaatgctgaacaggcttccctaaggccctgatggttcagttaagatgtttgagaactgagaaccagaagcagcagagaccaacgccacccagggagcctccacaggtctgagacatctgggttctcgtactctccttcaaaactcaggagctgcccaccaggggtgatcctaagctgaacccctgatagaaaggggcaaaggtgctagtgctgggcttagaaacccctgccacacactggtgccactttcttagtctgttggggacaaccacataactcagtctggccttaatcataaattttgtgaccatgtgaaagccaaccattttttgaaggacaatttggtaataaataacagatatttttaaacccaaagcctttgatccagaaatttaattcctaggaatctgatgtccagaaacactcataaatgtgtacaaagatatttttatggatttcagtttagcattgtttataatagggaaagaataaaaatatcctaaatgtctatctataggggattaatttaattatactatatctatattttgcatttcttaagaagactaggtatatatatatatatatgtactgatgtggaatggggttcataacatattgttcaaaaaaataaaaagaaaaaagtaagtatttcatcatcttgtttttaagtttattttttaactttaaatggatgtatgtgtacatatatattggggtgtatgtgtatatatatatatatatatatacacacacacatatatatacatattcacagatgtaaatttgtatatgcatagaaaaagtgtgaagaaaaaaactcacacctaataataagcaatggtttcctctggggaactggatggtatttttgctatgttacttctgtattataatttttaaataatttgtactacctttgcaattttaaaaatcaacaaaaatacttcttaagggagttgaaactatgttgcatgtattttgttatccaatcaggatcgcattacaattaaactaattatatcrctttaaagtgtaagaaaacagtgttcggtactctttggtctctcccactctacaataaatatagggaaatgggaacatcacatcactattataccactaactgttcaaggggatctaaatgtcatatcaggcagggcagtagtcaagtttgtacaagttgccattttaattacacaattttaagaaaaaaatatataaaattatgaatataaaatcaggtataaggctaaatatttagaaaaagaaatcacaaaaaaataagttcaagaacgctaacaagccagacatagcagctcatgcctctaagcccagctactcaggaggctgagcccaggtattgaggctgcaatgagctatgatggcgctgctgcactccagcctgggaaacagtgtgagaccctgtcacagggaaaaaaaaaaaagacagaaaaaagaatgcatcattcttaggtgagaagtcacttggaaaaaagaaaaaaacacaagaatgctaacaaacacaacaatgatataatccagaaaaataacaaattttattaacgttgctatttttagaatacatttctataatactattttcttacactttttggctagatgctcttttaacaagaattttgtaatatcattttctacagaagcaacattatttagtgtttcctctagcacaatttatggaaatatgttttttattattgactgtctcaaaaggttttttgcttcaaatttcattattgttaatgacatgcaaaatgtttaggatcattgtcctataatgaggggaaattctatcaagtgtctttcatatatcaactgtaaaatttcagggcacttcaagtttcttgtagagtgagtaatcttaaacgatcattcattaagatcattcattaactgatttgtcatcagtgtcctcattgtagtagca

SEQ ID NO: 708606 - DNA, 984 bp, Homo sapiens
gggctgctgggtgacagaactggattttctttctagtctttagatagacagagagtcattttggcaagggcttttggagcttwtccataccctcatcttctctcctcttacaggaataggagacagtttcacttccctgtccctttgcaggtagctggggccaggtgactacatctggccaaggggtcattagtagaagtaacgtgtgttattttgaggttgactcattgaattgccagtgtgagaccctccagcattcttttggcctgttgtgtcagcctctgaggctgcatattttagatgttgcatctagaggttggtggaggcaccaagaatctggattgcagagagctgctacatggaagagttgctccaaggtctcctaggcccacagcaaactttgagttagcctttgttctgttaagctcttactattttggtggtgttcctgcgtagcttggctttttttctgattaattcagtcatctaatacagtagcttcttatcatcagaatgaaactggggaatagtttaaacatagagaatgttggacacccacttgccttgttctgatataggcctcaggtagagccaggggacttattgatatgttttatatggaggaagtactgattctaccagtctgtcttagccaggattacaataacagggcatgtgagttgaattgtgctggcctgccctgggtacatcatatgttacttaaaaaacccattttaataatgccagttgttgtctctgggatcctaagacattctttgagaaaacagtatattttaggaatgtcagcaaaaccaagcttcaataaagcacttttgttttatgtagccttcacatagaggaacttgatgcagggatggaagtatttttaattaagagaggagctacatgatttatagtgtgatgggtctgatctacacagttcatttataacttaggtaaatatataccatttattttctacaa

SEQ ID NO: 708607 - DNA, 984 bp, Homo sapiens
gggctgctgggtgacagaactggattttctttctagtctttagatagacagagagtcattttggcaagggcttttggagcttttccataccctcatcttctctcctcttacaggaataggagacagtttcacttccctgtccctttgcaggtagctggggccaggtgactacatctggccaaggggtcattagtagaagtaacgtgtgttattttgaggttgactcattgaattgccagtgtgagaccctccagcattcttttggcctgttgtgtcagcctctgaggctgcatattttagatgttgcatytagaggttggtggaggcaccaagaatctggattgcagagagctgctacatggaagagttgctccaaggtctcctaggcccacagcaaactttgagttagcctttgttctgttaagctcttactattttggtggtgttcctgcgtagcttggctttttttctgattaattcagtcatctaatacagtagcttcttatcatcagaatgaaactggggaatagtttaaacatagagaatgttggacacccacttgccttgttctgatataggcctcaggtagagccaggggacttattgatatgttttatatggaggaagtactgattctaccagtctgtcttagccaggattacaataacagggcatgtgagttgaattgtgctggcctgccctgggtacatcatatgttacttaaaaaacccattttaataatgccagttgttgtctctgggatcctaagacattctttgagaaaacagtatattttaggaatgtcagcaaaaccaagcttcaataaagcacttttgttttatgtagccttcacatagaggaacttgatgcagggatggaagtatttttaattaagagaggagctacatgatttatagtgtgatgggtctgatctacacagttcatttataacttaggtaaatatataccatttattttctacaa

SEQ ID NO: 708608 - DNA, 984 bp, Homo sapiens
gggctgctgggtgacagaactggattttctttctagtctttagatagacagagagtcattttggcaagggcttttggagcttttccataccctcatcttctctcctcttacaggaataggagacagtttcacttccctgtccctttgcaggtagctggggccaggtgactacatctggccaaggggtcattagtagaagtaacgtgtgttattttgaggttgactcattgaattgccagtgtgagaccctccagcattcttttggcctgttgtgtcagcctctgaggctgcatattttagatgttgcatctagaggttggtggaggcaccaagaatctggattgcagagagctgctacatggaagagttgctccaaggtctcctaggcccacagcaaactttgagttagcctttgttctgttaagctsttactattttggtggtgttcctgcgtagcttggctttttttctgattaattcagtcatctaatacagtagcttcttatcatcagaatgaaactggggaatagtttaaacatagagaatgttggacacccacttgccttgttctgatataggcctcaggtagagccaggggacttattgatatgttttatatggaggaagtactgattctaccagtctgtcttagccaggattacaataacagggcatgtgagttgaattgtgctggcctgccctgggtacatcatatgttacttaaaaaacccattttaataatgccagttgttgtctctgggatcctaagacattctttgagaaaacagtatattttaggaatgtcagcaaaaccaagcttcaataaagcacttttgttttatgtagccttcacatagaggaacttgatgcagggatggaagtatttttaattaagagaggagctacatgatttatagtgtgatgggtctgatctacacagttcatttataacttaggtaaatatataccatttattttctacaa

SEQ ID NO: 708609 - DNA, 565 bp, Homo sapiens
gtactgtattagtttgttttcacactactgataaagacatacctgagattgggcaatttacaaaagaaagaagtttaatggactcacagctccccatggctgaggaggcctcacaatcatggtggaaggtaaaaggcatgcctcacatggtggcagacaagaggagagagtgagaatcaagtgaaaggggtttcccttataaaacgatcagatctcatgagacttttattcactaccacgagaacagtatgggggaaactgcccccataattcaattatctcccacttggtccctcccacaacatgagggaattatgggagctataattcaagatgagatttgggtggggacacagcaaaaccatattaggtacttagattattgatcttctttgtccttttctacatatttcaagctctgctttyttctaagttctgctttacctgcattccatgaattggaaaatcactgccttagactcactcccaagttacaccttaggccagtgattctcaactaggagtgattttgtccccttcccctgccaggaacatttggcaatat

SEQ ID NO: 708610 - DNA, 565 bp, Homo sapiens
gtactgtattagtttgttttcacactactgataaagacatacctgagattgggcaatttacaaaagaaagaagtttaatggactcacagctccccatggctgaggaggcctcacaatcatggtggaaggtaaaaggcatgcctcacatggtggcagacaagaggagagagtgagaatcaagtgaaaggggtttcccttataaaacgatcagatctcatgagacttttattcactaccacgagaacagtatgggggaaactgcccccataattcaattatctcccacttggtccctcccacaacatgagggaattatgggagctataattcaagatgagatttgggtggggacacagcaaaaccatattaggtacttagattattgatcttctttgtccttttctacatatttcaagctctgctttcttytaagttctgctttacctgcattccatgaattggaaaatcactgccttagactcactcccaagttacaccttaggccagtgattctcaactaggagtgattttgtccccttcccctgccaggaacatttggcaatat

SEQ ID NO: 708611 - DNA, 565 bp, Homo sapiens
gtactgtattagtttgttttcacactactgataaagacatacctgagattgggcaatttacaaaagaaagaagtttaatggactcacagctccccatggctgaggaggcctcacaatcatggtggaaggtaaaaggcatgcctcacatggtggcagacaagaggagagagtgagaatcaagtgaaaggggtttcccttataaaacgatcagatctcatgagacttttattcactaccacgagaacagtatgggggaaactgcccccataattcaattatctcccacttggtccctcccacaacatgagggaattatgggagctataattcaagatgagatttgggtggggacacagcaaaaccatattaggtacttagattattgatcttctttgtccttttctacatatttcaagctctgctttcttctaagttctgctttacctgcattccatgaattggaaaatcactgccttagactcactcccaagttacaccttaggccagtgattytcaactaggagtgattttgtccccttcccctgccaggaacatttggcaatat

SEQ ID NO: 708612 - DNA, 597 bp, Homo sapiens
tgccttctgaaatagatattacatagcaggaattttagtctgttgttccctgatgttcctcagcatctaaaaacatgcctggcacacagtaggtgcccccaaaatattttgcccaagtatgaataaatggatcagcaaatgattgaataaatttcattcggcaaaagcaaattcatagcttagtttttaacaaaaaaaaattattggcttatggcttattaacatgttattaaycaaatcatatataaagaagtattataatttcaaataaaaaatatatatagtcgtgatgtcctactggcttaaagcttccatttttactcaacaattcaaaagcatgaaaagcaacaaaaatgttatgatcttggaggcagattccaggttgcctttagacaagactatctgttgtttattaccatatttcaagcctagcagagacaggctcacagtggaactcaaaatatatgtgtgacctgaataaacactaaatatggcttttattttctagcgaaatatcattatttattgtgcttttctgtgttgactataccctcagggatattccccatccaaccaagtacatacataaaacattta

SEQ ID NO: 708613 - DNA, 603 bp, Homo sapiens
caataaacctttcttctcatatatccaaaggtgtctttgcctaacataacctaattattgcacataaaatcacaagtttcacatcatctcctcaacctgagacaactccaagtcacatccagctgttgcctccaggtgcatcaacgttgatgtgtattcaggggtcaaccaaaggcttagaaaaatttcatatacttggtgtctccctctctgccctttgctctccagagttttctcctcactttctagtgaatatgagtgtcctgaactctgttccctggtttctcaaaccacaaagactgtgggtttttatctgggttttagttgccctgtgcagcaccagctatagcctgacattaggctaagagccatttcaaaatgagaaactgactctgtgccatttccttcttccaactgttggcttctcttcagaagctgcctgattttatttactctccaaagtactcaggtcattattttattttattattattttttgagatggagtctcgctctgtcgcccaggctagagtatagtggcrtgatctcggctcactgcaacctccacctcccaggttcaagcaattctcctgcctcagcctc

SEQ ID NO: 708614 - DNA, 655 bp, Homo sapiens
ttcactctttaccgccagacctcctcctatagtatttcctgcccagaagattagcattgccaaaacgttcgtcataacccaaaccagaaaactgagagcccccctgggctgtccctccagcaccatcatccatattcactcggccagcaaaacatgttgctagtacctctaattcctcttgggtattccctttcaaaaacctgtggattgcctgcaggccttggtacctcttgtgctgattactgcaatggactccagtcatctccagtccagtccacgttttcacagtgttgtttttctttttcctaacagtttattaagaattttttcttccccttaacatccctttgtagttcaccatcacttaaaagataaaatttaaactagcccatctagtttccttttcartccagcaaagtcctttgcaacctaaccatttggggtttcctggaaacaacgtggctatttcctgcctgtgccctttgctgggaaaatgcctttcctccctcatttctagtccacttggtcaatcttttaccaatatttccagtccacttggtaaatctcttccaaaatgcttttacacttggtagtgataaatacaccagtaaaggaaaatgcatcagaaaggacttgcatttaaaaaaaaaaaaaa

SEQ ID NO: 708615 - DNA, 573 bp, Homo sapiens
ttcagtattggtccctatgaactgggcaatcacatcgtgcttaaaacaggtctgttgtctaagaaattaggattctaatattcttactttgttgcagaccaaaaaaaacttctttgggttgttgtttatttttatttatgtttttagtagatgccaggtaaggaaggaaaatagctgtgatccttgtggtgaaactctgcatcttggctgtaatggtggttacatgaaygtacacatctgataaaatcacatagaatgaatcatacacacacacagacatacacaaaattgcatgtaaaacggacgagatctgaacacagtcaatagtttgtgtcaatgtcaatttcctgcttgtgacgttatactctagttatgcaaagtactaccactggggaaagctgagtaaaggatgcatctttctgtattatttcttacgacctgcaggtaaagctacaattatcacaaaataataagtttaaaaagattaaactattaaatacaatttaaagtatctgtgcagttctttttgtctttagaatacacttcactaagcctatatagtcaaaaaataca

SEQ ID NO: 708616 - DNA, 573 bp, Homo sapiens
ttcagtattggtccctatgaactgggcaatcacatcgtgcttaaaacaggtctgttgtctaagaaattaggattctaatattcttactttgttgcagaccaaaaaaaacttctttgggttgttgtttatttttatttatgtttttagtagatgccaggtaaggaaggaaaatagctgtgatccttgtggtgaaactctgcatcttggctgtaatggtggttacatgaacgtacacatctgataaaatcacatagaatgaatcatacacacacacagacatacacaaaattgcatgtaaaacggacgagatctgaacacagtcaatagtttgtgtcaatgtcaatttcctgcttgtgacgttatactctagttatgcaaagtaytaccactggggaaagctgagtaaaggatgcatctttctgtattatttcttacgacctgcaggtaaagctacaattatcacaaaataataagtttaaaaagattaaactattaaatacaatttaaagtatctgtgcagttctttttgtctttagaatacacttcactaagcctatatagtcaaaaaataca

SEQ ID NO: 708617 - DNA, 573 bp, Homo sapiens
ttcagtattggtccctatgaactgggcaatcacatcgtgcttaaaacaggtctgttgtctaagaaattaggattctaatattcttactttgttgcagaccaaaaaaaacttctttgggttgttgtttatttttatttatgtttttagtagatgccaggtaaggaaggaaaatagctgtgatccttgtggtgaaactctgcatcttggctgtaatggtggttacatgaacgtacacatctgataaaatcacatagaatgaatcatacacacacacagacatacacaaaattgcatgtaaaacggacgagatctgaacacagtcaatagtttgtgtcaatgtcaatttcctgcttgtgacgttatactctagttatgcaaagtactaccactggggaaagctgagtaaaggatgcatctttctgtattatttcttacgacctgcaggtraagctacaattatcacaaaataataagtttaaaaagattaaactattaaatacaatttaaagtatctgtgcagttctttttgtctttagaatacacttcactaagcctatatagtcaaaaaataca

SEQ ID NO: 708618 - DNA, 1500 bp, Homo sapiens
  misc_feature 244: n = A,T,C or G
tgttaaggatgggaatgtgtctttatccacttttgtatcctcatagttcttaaatatctagtaggcaagcagtaacagtttgcttattaaataaatctcaccaccaccatcttctctaacttggtttgcatgcaatcatcttttcctctctcctctccatctctccatctgtctgtctctccatctgtttctctctctctctctcacacacacacacacacacacacacacacacacacacatntggcctctctgttagagctcactgcttagattctatcttaaatctgtgaaggactagatctgatagtccataataccttaattgtcatcgtaacccaaaatctaactgatggcagggagtgacagcagctttctcatctgtaaaatggggataataaaagtgcctggaatgacactggaaaggagtaaagccaagtgatcagataggctgcttcattctcctaccccaaacatgcagaaaacttagctgcagtatgcaatgcaagtgtcctcaacacccaacacttacagcagccaccgcaaccaagagaagggaatcctgtgtgacacaggcatggagtttgtcttgttctttcaactccttcaacttttaagaactgttcaaatttttcttagagacctgactcctctattcacaacaatatgttccttactagagaagcataatattaacacaacaacactactaataagtgtaacagctcacatttatcagcacaattggtgttagccaggcatgcaacaaaagacttcacctacaccaacccaattaactatcacaaacctatgaggaaggcattagtattacctatgtcatagatgactatcctgaaactcaaagaagttaaataatgtctacatggccacagaactacaaatgtcaaatttgggacctgaactcaggtctgttgactccaaggcctgggcagtattcatctttaacttgttcatccttatccccagcattaagtacagtccctgacactggtcaaagctttaagcctcaaatctaggcaccaacaattgcttagaagcaagcagtctaagagcacagaccatgaaacagaaaaagagycatggcttcaagtcccagactggtcacttattagttctgcaaccttaggcatatttgtcaacctctcggagcctcagctttctcatctgtaaaacagcgataataaaagtgccttcaataggacacttagtatcttgagtaatgcacagttaagactacttacaggtccacaatttcttaaccataaatctaaagcctgaaaagctctgaaatcagaccttgttcttaaaactggttgtattaatttctattggtactataacaagttcccacaaactcagtggcttaaaacaacaaaaattttttatcccgcagttctgtaggtcagaagtcaaatgtgggtccctggactaaaatcaaggtgtctacaggctgtgttcctttctggagactctagagag

SEQ ID NO: 708619 - DNA, 648 bp, Homo sapiens
aggcccctcagcaagaaggattggagctaggactagggctgatgtgtttccggaaggaggccctgccctctgcattccactgggtcacatgtggtgtgagagtttaagattctccttggaacctttggcacattctgtatacaaacaattgcagagaggagttgaataaggctccctttggaaggaagcatagtgatattctatctggtagaatctgccacatcttaccttaatattcccactttaagcaccagcctgggacacctggtgccatttcccaaagggtcactgtgtaggcaaagtaaagagatgccccaagaaagtgatttgaggaattccaaatcctttgtgaactaaaatatctactcctgtcctaccataaggaccgaayctcttacccattacaactatgtgtcttcaagagtacccatgattggactggggtagtggtgtgtgctgagggatggctgcttgcctggaagatgatgagtgtgctgctctttatggtggtgagagacagaactagctggatttcctaggccgactaagaatccctaagcctaactgggaaggtgaccacttccacctttaaacacggggcttgcaacttagctcacatccgaccagtcagatagtaaagagagctca

SEQ ID NO: 708620 - DNA, 1304 bp, Homo sapiens
tgattctatgtgattctctaagatagctgttagatgacattgtgaatatattatgttttcttttttttttctcagctcacttttaccaaatacattttattttgttgtatttattttataaggatgtttactgcacaaatagattttaatctaggttttccctttgcttccttcttccttctccctttttatctttctttccttcttgtttcttttcctccttttgtattttctttctttcccatcctttcttcgtcctttcttcctcctatttatccatgcatccatccatccatcccactttgtcattctatagtagcagaatagttgaaatttccagaaattgtaaacatccttctaacaagaattggtctccaggtgttagcattctcatagctgagttcagaaattggcatgagttagcttactagtgcaagcatctcttgttgagggcaatttgtaactttatttgaaaaggattttcattttctaagcaaaattcaaaagcactgcttgctccccaccacagagaatttctaaagctttcagaaagcatttcacctgaataaaatatgaggctatatgataaataggtggaccttgaaaacttgaacactgagatgcttatctaatcctgaactatgcttcagtggaataacttgattaacttccaaggtttgacactgtttccggttaagccagaatgtctcctaggaacaactacttagctgttatattggtgctctccttcaaaaaatcaaaacagtgcagatgatagaaagtaatttttaaaattttgtaatgtacacttgtgggtgtacatttagatatacgcatgcaggattaacctgagatatgaggacatgatgagcaggctaataatttggtatctccttaagcaatattctttaaatkgttgttccacattgatttagtggtaaagaggaggacctagttttctattcgtaagaattgtatttttctactgtgcagccataaaaaggaaggagataattcctttgcagggacatagatggagctggaggccattatctttagcaaaggaatgcaggaacagaaaaccaaatattgcacattgtgagtgataaatgatgagaacacatggtcacatagaggggaacaacacacaatttggcctttaagagcgtgaagggtgggaggaggggaggatttggaaaaacaactaatgggtactcggcttaacacctgggtgatgaaataatctgtacaacaacccccatgacacaagtttacctatgcaacaaacctgcatttctacccct

SEQ ID NO: 708621 - DNA, 416 bp, Homo sapiens
gaatgtagaataaattgaacaaacgtgtggagagctagaatcagaaattcatgataataacacttactccttttatgtgtctaaaagctctgatagaggaagataatggatgtactatagaacatgtaaactttaaactatacaaagttctatagggaatatcaaacaatggcctttggtgataaaaaagagcaagcaaaacgagatatatgaatggataaccaataatatattagtacaattttatttgccaggatgggctaaagtaggttttgagagacacaataagtttgcaaagtctctaaaaagatacataaaaatttaaaaatatgcaaaagagatactgaagttcttaaaaaagaaacaaraagaaacatatagtaccccaagtatagtgatcatcatttgttgaagca

SEQ ID NO: 708622 - DNA, 1116 bp, Homo sapiens
gtagagacggggtttcaccatcttggccaggctgatcttgaactcctgacctcgtgatccacccgcctcagcctcccaaagtgctgggattacaggcgtgagccaccacatccggccgggttgatagttgagacttccccaggatgcccgtgaaaattaaatgagataatatatgtgaaaggcgttttgtaaactgtgaaatctccataagccttcattgtttctggctttgttgatgagcgtccccacacatacgtgaatgcggtcgccctgaacgtttccccacaaatccagaatttgacagcagggatcccaggggcacttggctgtcctgtgccgccctttgcaatccgggctgaggggttttctgggccaagttaacagcggatggtgcctcacagcagaggcctgaaagcacctgctgcgtgggccataaacacagtgtgctcagacacgcagagacactggttcttacccactcccaagggtgggataacgctgcaccttgcacttgtgggatgaggaatgaggctcttctgctgggcagggcctgggcaagggrgaagcttttatagaggaacccgcatggccccggagtcctcccctcttagcccctggcctgagtccccagccagcaacccagggtagctgttctgaagcagaggggctttgttccattgtgtttggaagcccagaagccaccttgtggcttagggtgacatagggacctacacacagaggagtgaacttagggttctagggactatggccgggtcaccggtggccaggggcagagatgagcacctgtccatgtaagccatatgccacccccacagggcctggcaaggtgcagagggtgcaggtctcggccatgtacccctttgcccctttctgagaggggcagatgcccagcccagtgacccagagcctcaccccaggaagcgggtccatgcagcaaatcagccaggcactggcatggtggcccccaggcctccaccgcctcaccagtccctgttcaatctgctgataacgcctttcctcccttgcaggtctgtgcagacttttgcagacaaatcaaaacaagaagctctgaagaatgacctggtggaggctttg

SEQ ID NO: 708623 - DNA, 659 bp, Homo sapiens
tggcatgatctcagctcactgcaagctctgcctcccaggttcatgtcattctcctgcttcagccttcagagtagctgggactacgggtgcccgccactatgcccagctaatttttttttwatattttttaatagagacggggtttcaccatgttagccaggatggtcttgatctcctgacctcgtaatccacctgcctcggccccaatagtctttctttacagaaatggaaaagagattttctattcagccagtgcaacccttttatatgtaaagaccacaaacttacatgaacatggatgatatagtttggctctgtgtccccacccaaatctcatgtcaaactgtaatccccatgtgttggaggaggggcctgatgggaggtgactgaatcatgggggcggatgttccacttgctgtgttcattatagtcagttctcacgagatttggttgtttgaaactgcgtagcacctcccccttggctctctctctctcctgctctgacatgttaagacgtgctctcttcccctttgcctttggccatgactgtaagtttcctgaggcctcccagccatgcttcctatacagcctgcagaactgtgagtcaattaaacctctttttttcataaattatccagtctcaggtagttctttatagc

SEQ ID NO: 708624 - DNA, 1604 bp, Homo sapiens
accagttccccatattgaatgttgtaattgctcccgagtttctattacagcatacagtgctgcagtgaacattcaagcagttcatcttgtccacatcattaattatttttcctaagaaaattttagaagtaacattgtcaggtcagagtctgcacatatatttctttctctttttaaataatttaatgtctgggatttttttctctaatattttaatatttttaaattacggaaagaatacaattcaaacaattcagagatgtatacgttccaaatgaggtgtcttccctctccttcttaatcccctctctgaggtcagcaatttaatagtttggggataatccttaatgatatggattataaacaaaagagtctcttattgccttcaaaagttgtatgttctaacttcaccataaacaaaaggggaaaaataacttatattgatcagtctgattttgacataggctgttaagctgttcttcatgaagattctgtgaaagctgtaaggttccataaaaatgtcaggcttgttattactgtagctcacactctaataggcttttcacctgcagatgagaagtgactgagcctccactagaacagggctggtggctctttccaggtcagtgcctttttggtgttaactctccagctgtctgcagtttctatggatccatcaaccatccttctgacattccttttagtgcaacactaaaatggcctgagcctctgcaggtgtgtttgtgtagggggtcttcaaaacatttccagttatgttcttacttgcctcgtttgatttctgcctcttgcccacacatctggccttctactttttaggtcctgatttacaacttctcaaggaaaggttcttcaaaggaaggggtaatgaattgtgacatttttagattcctggacctctcagtgattagaatatcaaaaatgctccataaatgttgtctgtatgaatgatagtaattgggtcagaacaagatttcatggcccttcgtcaagtaagctgaagctaagagaggtggcagggcatcctcccaatatccctctgctctgccgctttctaactgggtgaccttgggcagatgtccttgaatttctctgaaccttagcttcccataaggtaggggaaatcaaattctcttttctgagtggttacgaagtttagatagacaaatggatgggaaggagctctgtgaactgcaaattactatacaaayaagattttttttttcccaatgtaggtgattctgctcctttgggtttatggtaaagttagcacatgtaattttggaggtaataaaggattctcgttaaaaaatcctttctttatcaagggctcatcccttgactggtttatggttaggaaaatattccttgagaatatttagcatgtgatggaagtttcttttcaatgaggattcacactgcaggtatggttataattgtgaatgccaacagtcatcatagtaataacaatgataacatcaacagcttttcgtttgagtatttactatgtgccaagtattgagataagcattttatataaatgttctcattaaattctcatgactaccctataaaatagacagcgt

SEQ ID NO: 708625 - DNA, 1604 bp, Homo sapiens
accagttccccatattgaatgttgtaattgctcccgagtttctattacagcatacagtgctgcagtgaacattcaagcagttcatcttgtccacatcattaattatttttcctaagaaaattttagaagtaacattgtcaggtcagagtctgcacatatatttctttctctttttaaataatttaatgtctgggatttttttctctaatattttaatatttttaaattacggaaagaatacaattcaaacaattcagagatgtatacgttccaaatgaggtgtcttccctctccttcttaatcccctctctgaggtcagcaatttaatagtttggggataatccttaatgatatggattataaacaaaagagtctcttattgccttcaaaagttgtatgttctaacttcaccataaacaaaaggggaaaaataacttatattgatcagtctgattttgacataggctgttaagctgttcttcatgaagattctgtgaaagctgtaaggttccataaaaatgtcaggcttgttattactgtagctcacactctaataggcttttcacctgcagatgagaagtgactgagcctccactagaacagggctggtggctctttccaggtcagtgcctttttggtgttaactctccagctgtctgcagtttctatggatccatcaaccatccttctgacattccttttagtgcaacactaaaatggcctgagcctctgcaggtgtgtttgtgtagggggtcttcaaaacatttccagttatgttcttacttgcctcgtttgatttctgcctcttgcccacacatctggccttctactttttaggtcctgatttacaacttctcaaggaaaggttcttcaaaggaaggggtaatgaattgtgacatttttagattcctggacctctcagtgattagaatatcaaaaatgctccataaatgttgtctgtatgaatgatagtaattgggtcagaacaagatttcatggcccttcgtcaagtaagctgaagctaagagaggtggcagggcatcctcccaatatccctctgctctgccgctttctaactgggtgaccttgggcagatgtccttgaatttctctgaaccttagcttcccataaggtaggggaaatcaaattctcttttctgagtggttacgaagtttagatagacaaatggatgggaaggagctctgtgaactgcaaattactatacaaacaagattttttttttcccaatgtaggtgattctgctcctttgggtttatggtaaagttagcacatgtaattttggaggtaataaaggattctcgttaaaaaatcctttctttatcaagggctcatcccttgactggtttatggttaggaaaatattccttgagaatatttagcatgtgatggaagtttcttttcaatgaggattcacactgcaggtatggttataattgtgaatgccaacagtcatcatagtaataayaatgataacatcaacagcttttcgtttgagtatttactatgtgccaagtattgagataagcattttatataaatgttctcattaaattctcatgactaccctataaaatagacagcgt

SEQ ID NO: 708626 - DNA, 3509 bp, Homo sapiens
ctccgcctcctgggttcacgctattctcctgactcagccttccgagtagctgggactacaagcgcccgccaccacgcccagctaattttttgtatttttagtagagacagtgtttcaccgtgttagccaggatggtctcaatctcctgacctcgtgatctgcccgtctcgggctcccaaagtgctgggattacaggtgtgagccactgcgcctgacctaaatttcaaagttctatgtgaagccctattttacatgctggtagctagttcaatttttttttttttaacaattcccaaaccaaacaaaacatatttgtagactctccacctggttttgacctgtgcataatgtcagtacccaggccatctagttaaatgtgacaaggtccaggagctgggtccaccataaagacaatcctacctggatcatggcccccgcttcagcccagaaatgtttcaaatgtgagctcggytccaagaggcaagttccaaaatccatcatccaaagtcatgctggtctttaagtgacagtcatatcattgaggtgacacacctccagagcacctgcccacattgtcctggcagtggtatagaccatgcatgttaacctgtgtggttcttttttggccaaatgccgttattctttcattcagtcctggttgattgattgcaaagagactcactcaggttagctcaaaaaagagacagagagaaccaggagcagcttttgaggttggactttcctcctgggactgcctgtttctctcttcccatctactccattctctctccactgaccagtttcttcactcttgattgattgatttattcttcagttactttgtaatatcacttagctagttggttatggcatgccgtggcccagctcacctgcatggtacctttcaccatcagctccactgccagctggcctggccactcattttctaatttcaaacttctgagggagaaatctggctggcccggctaatcatattgtctttggctgtgtgcccagctattgacaagtatggggattgtctttccttggaatgggtaccaactctttggtccagtcagctatggcacagccatgccatccaaagacatggcacaaaacacgacagcttagccagcagaagctgtggatgggggagactcccttaggaggacatgtgggcaggtcagatagacattgacgtttctggtacagccacacctacatgcccttacatggactatagaaaggtagcaatagcctggtaacatcaactctcatgaccctcgtgctgacaagtctccagggacatgtggagtaagcatacagaagtgtcttttaccactctgttccaaattgtcttcttagatcgtgttccagttcacacctttccatctgggcatcactgagtcatcatggaccttcctaattcccgagcacaacatcacagtccctttcctgctggtaggcaaaactaccgaacctctcatctctctgaacaggtcacacctcaacttcagctctctcctcattggtaaggctgtcctgatggtatgtatttagagttggcatgatctgggcaaggtcatcaagagctctgggagcagccttgcataagaaacctctcctggtcccttccagaagcatatcagagggtcttaatcagtttttaaaaagccacaaaatatttactgctcaatctaatttccaccaagtatcttttaaacctacaattaatagcttaaggaaatttaggagccttgttaaagatcctacttggcagattcctttaaggcatgggctgactgtttatttctagagcctcaagttggcccatccttcctgcatttgcccccagattatggggggtatctgtatgcttcttggtctgtgccacagtggtcagatttctctctcatcctttcgtgcatttatttggttcaacaaatatcactgagtctgtagaatgccctcggtacttttctatgggctgggattacgctaatggataaagcccaaagtccgtaccttcctgatgcttacattctagaaataagaaacaggctaccaaaagaaacataaggaaactatacaccatgtcagatggtaataagtgctttagagaagaggacagcagggtagggagaataaggaaggccaggaggcagtgggaaggtgaaacgaagtaattgtcatgtcccttataaccccatgtatctttcccatggttgtgacatctctgctgtgtgtataaaatacaactaaagccagagtatgttttaataatatgttagatttgtatttgtaaaataatattcttatagtaaatccaccaatgtggtgttgcataagaaaaagtttaatctctccacgttcatcctgtctcatctttctctttccactccaaaggaaagcagtgttaactgctggatgtgtattttaccgatacatataattaggtgggagggggaattatggcatttattaagattttgaacaaataagcaatgtagcataagaataacaacagtgagacagagtttaatccaggaattcaacagtggtacgtttgaatataatcattacatcaatagattaaagaagaacaaccatgtgatcatgttaatatacactgaaaaggcattgccaaaatttagcagacattcccaacaaaaactctaatagcaaaatggacattgatggaaaaaaaggttaaccaaaatcaagaggcagatatgatcctgcaataaatgactaaaactgcttcaattaaaatgaggaattaggtaagggtgttcattatcacccttattattgaacacttgcttagagactttagcaaatatgacaaaacaagaaaattaaataatttgcataaatattggggaaaaagggataaagtcatcttgttttgcttttactgatgattttgtacacataaaaccacaagagactctagagaaaaagcaaaacaaactactagactcaacagaataatgtggtaaggtgggcagatgcaagacaaatgtgcaaaaatagtgtcttcttttttagcactagcacctagaaacagaaaaccaaagaaaacatccacttggtactggcaaaacctataaaatagctaaggataaatgtaataagacatgcacaaaaaagacttacatgaagaaaactatcaaatctgattaaaatcccccaaacaagatctgatcatttgttagttctcctacaattaaatgcaaatttaatcaagttccaattagaatcccaactagggttgccagataaaatacaggatgcataaattttaatttcaaatagcaattaataattctgagtaagtccaaatattgctcgggacatatttataccaaaaaattatttgctaaatctgtcaaccaaatcccaaaagaattggaaggggagagaactggataaaatgattctaaagtttatgtgggaaaatgaatggtctaatagccaagaggaaagcgtaagatgatagtgagaga

SEQ ID NO: 708627 - DNA, 3509 bp, Homo sapiens
ctccgcctcctgggttcacgctattctcctgactcagccttccgagtagctgggactacaagcgcccgccaccacgcccagctaattttttgtatttttagtagagacagtgtttcaccgtgttagccaggatggtctcaatctcctgacctcgtgatctgcccgtctcgggctcccaaagtgctgggattacaggtgtgagccactgcgcctgacctaaatttcaaagttctatgtgaagccctattttacatgctggtagctagttcaatttttttttttttaacaattcccaaaccaaacaaaacatatttgtagactctccacctggttttgacctgtgcataatgtcagtacccaggccatctagttaaatgtgacaaggtccaggagctgggtccaccataaagacaatcctacctggatcatggcccccgcttcagcccagaaatgtttcaaatgtgagctcggttccaagaggcaagttccaaaatccatcatccaaagtcatgctggtctttaagtgacagtcatatcattgaggtgacacacctccagagcacctgcccacattgtcctggcagtggtatagaccatgcatgttaacctgtgtggttcttttttggccaaatgccgttattctttcattcagtcctggttgattgattgcaaagagactcactcaggttagctcaaaaaagagacagagagaaccaggagcagcttttgaggttggactttcctcctgggactgcctgtttctctcttcccatctactccattctctctccactgaccagtttcttcactcttgattgattgatttattcttcagttactttgtaatatcacttagctagttggttatggcatgccgtggcccagctcacctgcatggtacctttcaccatcagctccactgccagctggcctggccactcattttctaatttcaaacttctgagggagaaatctggctggcccggctaatcatattgtctttggctgtgtgcccagctattgacaagtatggggattgtctttccttggaatgggtaccaactctttggtccagtcagctatggcacagccatgccatccaaagacatggcacaaaacacgacagcttagccagcagaagctgtggatgggggagactcccttaggaggacatgtgggcaggtcagatagacattgacgtttctggtacagccacacctacatgcccttacatggactatagaaaggtagcaatagcctggtaacatcaactctcatgaccctcgtgctgacaagtctccagggacatgtggagtaagcatacagaagtgtcttttaccactctgttccaaattgtcttcttagatcgtgttccagttcacacctttccatctgggcatcactgagtcatcatggaccttcctaattcccgagcacaacatcacagtccctttcctgctggtaggcaaaactaccgaacctctcatctctctgaacargtcacacctcaacttcagctctctcctcattggtaaggctgtcctgatggtatgtatttagagttggcatgatctgggcaaggtcatcaagagctctgggagcagccttgcataagaaacctctcctggtcccttccagaagcatatcagagggtcttaatcagtttttaaaaagccacaaaatatttactgctcaatctaatttccaccaagtatcttttaaacctacaattaatagcttaaggaaatttaggagccttgttaaagatcctacttggcagattcctttaaggcatgggctgactgtttatttctagagcctcaagttggcccatccttcctgcatttgcccccagattatggggggtatctgtatgcttcttggtctgtgccacagtggtcagatttctctctcatcctttcgtgcatttatttggttcaacaaatatcactgagtctgtagaatgccctcggtacttttctatgggctgggattacgctaatggataaagcccaaagtccgtaccttcctgatgcttacattctagaaataagaaacaggctaccaaaagaaacataaggaaactatacaccatgtcagatggtaataagtgctttagagaagaggacagcagggtagggagaataaggaaggccaggaggcagtgggaaggtgaaacgaagtaattgtcatgtcccttataaccccatgtatctttcccatggttgtgacatctctgctgtgtgtataaaatacaactaaagccagagtatgttttaataatatgttagatttgtatttgtaaaataatattcttatagtaaatccaccaatgtggtgttgcataagaaaaagtttaatctctccacgttcatcctgtctcatctttctctttccactccaaaggaaagcagtgttaactgctggatgtgtattttaccgatacatataattaggtgggagggggaattatggcatttattaagattttgaacaaataagcaatgtagcataagaataacaacagtgagacagagtttaatccaggaattcaacagtggtacgtttgaatataatcattacatcaatagattaaagaagaacaaccatgtgatcatgttaatatacactgaaaaggcattgccaaaatttagcagacattcccaacaaaaactctaatagcaaaatggacattgatggaaaaaaaggttaaccaaaatcaagaggcagatatgatcctgcaataaatgactaaaactgcttcaattaaaatgaggaattaggtaagggtgttcattatcacccttattattgaacacttgcttagagactttagcaaatatgacaaaacaagaaaattaaataatttgcataaatattggggaaaaagggataaagtcatcttgttttgcttttactgatgattttgtacacataaaaccacaagagactctagagaaaaagcaaaacaaactactagactcaacagaataatgtggtaaggtgggcagatgcaagacaaatgtgcaaaaatagtgtcttcttttttagcactagcacctagaaacagaaaaccaaagaaaacatccacttggtactggcaaaacctataaaatagctaaggataaatgtaataagacatgcacaaaaaagacttacatgaagaaaactatcaaatctgattaaaatcccccaaacaagatctgatcatttgttagttctcctacaattaaatgcaaatttaatcaagttccaattagaatcccaactagggttgccagataaaatacaggatgcataaattttaatttcaaatagcaattaataattctgagtaagtccaaatattgctcgggacatatttataccaaaaaattatttgctaaatctgtcaaccaaatcccaaaagaattggaaggggagagaactggataaaatgattctaaagtttatgtgggaaaatgaatggtctaatagccaagaggaaagcgtaagatgatagtgagaga

SEQ ID NO: 708628 - DNA, 3509 bp, Homo sapiens
ctccgcctcctgggttcacgctattctcctgactcagccttccgagtagctgggactacaagcgcccgccaccacgcccagctaattttttgtatttttagtagagacagtgtttcaccgtgttagccaggatggtctcaatctcctgacctcgtgatctgcccgtctcgggctcccaaagtgctgggattacaggtgtgagccactgcgcctgacctaaatttcaaagttctatgtgaagccctattttacatgctggtagctagttcaatttttttttttttaacaattcccaaaccaaacaaaacatatttgtagactctccacctggttttgacctgtgcataatgtcagtacccaggccatctagttaaatgtgacaaggtccaggagctgggtccaccataaagacaatcctacctggatcatggcccccgcttcagcccagaaatgtttcaaatgtgagctcggttccaagaggcaagttccaaaatccatcatccaaagtcatgctggtctttaagtgacagtcatatcattgaggtgacacacctccagagcacctgcccacattgtcctggcagtggtatagaccatgcatgttaacctgtgtggttcttttttggccaaatgccgttattctttcattcagtcctggttgattgattgcaaagagactcactcaggttagctcaaaaaagagacagagagaaccaggagcagcttttgaggttggactttcctcctgggactgcctgtttctctcttcccatctactccattctctctccactgaccagtttcttcactcttgattgattgatttattcttcagttactttgtaatatcacttagctagttggttatggcatgccgtggcccagctcacctgcatggtacctttcaccatcagctccactgccagctggcctggccactcattttctaatttcaaacttctgagggagaaatctggctggcccggctaatcatattgtctttggctgtgtgcccagctattgacaagtatggggattgtctttccttggaatgggtaccaactctttggtccagtcagctatggcacagccatgccatccaaagacatggcacaaaacacgacagcttagccagcagaagctgtggatgggggagactcccttaggaggacatgtgggcaggtcagatagacattgacgtttctggtacagccacacctacatgcccttacatggactatagaaaggtagcaatagcctggtaacatcaactctcatgaccctcgtgctgacaagtctccagggacatgtggagtaagcatacagaagtgtcttttaccactctgttccaaattgtcttcttagatcgtgttccagttcacacctttccatctgggcatcactgagtcatcatggaccttcctaattcccgagcacaacatcacagtccctttcctgctggtaggcaaaactaccgaacctctcatctctctgaacaggtcacacctcaacttcagctctctcctcattggtaaggctgtcctgatggtatgtatttagagttggcatgatctgggcaaggtcatcaagagctctgggagcagccttgcataagaaacctctcctggtcccttccagaagcatatcagagggtcttaatcagtttttaaaaagccacaaaatatttactgctcaatctaatttccaccaagtatcttttaaacctacaattaatagcttaaggaaatttaggagccttgttaaagatcctacttggcagattcctttaaggcatgggctgactgtttatttctagagcctcaagttggcccatccttcctgcatttgcccccagattatggggggtatctgtatgcttcttggtctgtgccacagtggtcagatttctctctcatcctttcgtgcatttatttggttcaacaaatatcactgagtctgtagaatgccctcggtacttttctatgggctgggattacgctaatggataaagcccaaagtccgtaccttcctgatgcttacattctagaaataagaaacaggctaccaaaagaaacataaggaaactatacaccatgtcagatggtaataagtgctttagagaagaggacagcagggtagggagaataaggaaggccaggaggcagtgggaaggtgaaacgaagtaattgtcatgtcccttataaccccatgtatctttcccatggttgtgacatctctgctgtgtgtataaaatacaactaaagccagagtatgttttaataatatgttagatttgtatttgtaaaataatattcttatagtaaatccaccaatgtggtgttgcataagaaaaagtttaatctctccacrttcatcctgtctcatctttctctttccactccaaaggaaagcagtgttaactgctggatgtgtattttaccgatacatataattaggtgggagggggaattatggcatttattaagattttgaacaaataagcaatgtagcataagaataacaacagtgagacagagtttaatccaggaattcaacagtggtacgtttgaatataatcattacatcaatagattaaagaagaacaaccatgtgatcatgttaatatacactgaaaaggcattgccaaaatttagcagacattcccaacaaaaactctaatagcaaaatggacattgatggaaaaaaaggttaaccaaaatcaagaggcagatatgatcctgcaataaatgactaaaactgcttcaattaaaatgaggaattaggtaagggtgttcattatcacccttattattgaacacttgcttagagactttagcaaatatgacaaaacaagaaaattaaataatttgcataaatattggggaaaaagggataaagtcatcttgttttgcttttactgatgattttgtacacataaaaccacaagagactctagagaaaaagcaaaacaaactactagactcaacagaataatgtggtaaggtgggcagatgcaagacaaatgtgcaaaaatagtgtcttcttttttagcactagcacctagaaacagaaaaccaaagaaaacatccacttggtactggcaaaacctataaaatagctaaggataaatgtaataagacatgcacaaaaaagacttacatgaagaaaactatcaaatctgattaaaatcccccaaacaagatctgatcatttgttagttctcctacaattaaatgcaaatttaatcaagttccaattagaatcccaactagggttgccagataaaatacaggatgcataaattttaatttcaaatagcaattaataattctgagtaagtccaaatattgctcgggacatatttataccaaaaaattatttgctaaatctgtcaaccaaatcccaaaagaattggaaggggagagaactggataaaatgattctaaagtttatgtgggaaaatgaatggtctaatagccaagaggaaagcgtaagatgatagtgagaga

SEQ ID NO: 708629 - DNA, 3509 bp, Homo sapiens
ctccgcctcctgggttcacgctattctcctgactcagccttccgagtagctgggactacaagcgcccgccaccacgcccagctaattttttgtatttttagtagagacagtgtttcaccgtgttagccaggatggtctcaatctcctgacctcgtgatctgcccgtctcgggctcccaaagtgctgggattacaggtgtgagccactgcgcctgacctaaatttcaaagttctatgtgaagccctattttacatgctggtagctagttcaatttttttttttttaacaattcccaaaccaaacaaaacatatttgtagactctccacctggttttgacctgtgcataatgtcagtacccaggccatctagttaaatgtgacaaggtccaggagctgggtccaccataaagacaatcctacctggatcatggcccccgcttcagcccagaaatgtttcaaatgtgagctcggttccaagaggcaagttccaaaatccatcatccaaagtcatgctggtctttaagtgacagtcatatcattgaggtgacacacctccagagcacctgcccacattgtcctggcagtggtatagaccatgcatgttaacctgtgtggttcttttttggccaaatgccgttattctttcattcagtcctggttgattgattgcaaagagactcactcaggttagctcaaaaaagagacagagagaaccaggagcagcttttgaggttggactttcctcctgggactgcctgtttctctcttcccatctactccattctctctccactgaccagtttcttcactcttgattgattgatttattcttcagttactttgtaatatcacttagctagttggttatggcatgccgtggcccagctcacctgcatggtacctttcaccatcagctccactgccagctggcctggccactcattttctaatttcaaacttctgagggagaaatctggctggcccggctaatcatattgtctttggctgtgtgcccagctattgacaagtatggggattgtctttccttggaatgggtaccaactctttggtccagtcagctatggcacagccatgccatccaaagacatggcacaaaacacgacagcttagccagcagaagctgtggatgggggagactcccttaggaggacatgtgggcaggtcagatagacattgacgtttctggtacagccacacctacatgcccttacatggactatagaaaggtagcaatagcctggtaacatcaactctcatgaccctcgtgctgacaagtctccagggacatgtggagtaagcatacagaagtgtcttttaccactctgttccaaattgtcttcttagatcgtgttccagttcacacctttccatctgggcatcactgagtcatcatggaccttcctaattcccgagcacaacatcacagtccctttcctgctggtaggcaaaactaccgaacctctcatctctctgaacaggtcacacctcaacttcagctctctcctcattggtaaggctgtcctgatggtatgtatttagagttggcatgatctgggcaaggtcatcaagagctctgggagcagccttgcataagaaacctctcctggtcccttccagaagcatatcagagggtcttaatcagtttttaaaaagccacaaaatatttactgctcaatctaatttccaccaagtatcttttaaacctacaattaatagcttaaggaaatttaggagccttgttaaagatcctacttggcagattcctttaaggcatgggctgactgtttatttctagagcctcaagttggcccatccttcctgcatttgcccccagattatggggggtatctgtatgcttcttggtctgtgccacagtggtcagatttctctctcatcctttcgtgcatttatttggttcaacaaatatcactgagtctgtagaatgccctcggtacttttctatgggctgggattacgctaatggataaagcccaaagtccgtaccttcctgatgcttacattctagaaataagaaacaggctaccaaaagaaacataaggaaactatacaccatgtcagatggtaataagtgctttagagaagaggacagcagggtagggagaataaggaaggccaggaggcagtgggaaggtgaaacgaagtaattgtcatgtcccttataaccccatgtatctttcccatggttgtgacatctctgctgtgtgtataaaatacaactaaagccagagtatgttttaataatatgttagatttgtatttgtaaaataatattcttatagtaaatccaccaatgtggtgttgcataagaaaaagtttaatctctccacgttcatcctgtctcatctttctctttccactccaaaggaaagcagtgttaactgctggatgtgtattttaccgatacatataattaggtgggagggggaattatggcatttattaagattttgaacaaataagcaatgtagcataagaataacaacagtgagacagagtttaatccaggaattcaacagtggtacgtttgaatataatcattacatcaatagattaaagaagaacaaccatgtgatcatgttaatatacactgaaaaggcattgccaaaatttagcagacattcccaacaaaaactctaatagcaaaatggacattgatggaaaaaaaggttaaccaaaatcaagaggcagatatgatcctgcaataaatgactaaaactgcttcaattaaaatgaggaattaggtaagggtgttcattatcacccttattattgaacacttgcttagagactttagcaaatatgacaaaacaagaaaattaaataatttgcataaatattggggaaaaagggataaagtcatcttgttttgcttttactgatgattttgtacacataaaaccacaagagactctagagaaaaagcaaaacaaactactagactcaacagaataatgtggtaaggtgggcagatgcaagacaaatgtgcaaaaatagtgtcttcttttttagcactagcacctagaaacagaaaaccaaagaaaacatccacttggtactggcaaaacctataaaatagctaaggataaatgtaataagacatgcacaaaaaagacttacatgaagaaaactatcaaatctgattaaaatcccccaaacaagatctgatcatttgttagttctcctacaattaaatgcaaatttaatcaagttccaattagaatcccaactagggttgccagataaaatacaggatgcataaattttaatttcaaatagcaattaataattytgagtaagtccaaatattgctcgggacatatttataccaaaaaattatttgctaaatctgtcaaccaaatcccaaaagaattggaaggggagagaactggataaaatgattctaaagtttatgtgggaaaatgaatggtctaatagccaagaggaaagcgtaagatgatagtgagaga

SEQ ID NO: 708630 - DNA, 3509 bp, Homo sapiens
ctccgcctcctgggttcacgctattctcctgactcagccttccgagtagctgggactacaagcgcccgccaccacgcccagctaattttttgtatttttagtagagacagtgtttcaccgtgttagccaggatggtctcaatctcctgacctcgtgatctgcccgtctcgggctcccaaagtgctgggattacaggtgtgagccactgcgcctgacctaaatttcaaagttctatgtgaagccctattttacatgctggtagctagttcaatttttttttttttaacaattcccaaaccaaacaaaacatatttgtagactctccacctggttttgacctgtgcataatgtcagtacccaggccatctagttaaatgtgacaaggtccaggagctgggtccaccataaagacaatcctacctggatcatggcccccgcttcagcccagaaatgtttcaaatgtgagctcggttccaagaggcaagttccaaaatccatcatccaaagtcatgctggtctttaagtgacagtcatatcattgaggtgacacacctccagagcacctgcccacattgtcctggcagtggtatagaccatgcatgttaacctgtgtggttcttttttggccaaatgccgttattctttcattcagtcctggttgattgattgcaaagagactcactcaggttagctcaaaaaagagacagagagaaccaggagcagcttttgaggttggactttcctcctgggactgcctgtttctctcttcccatctactccattctctctccactgaccagtttcttcactcttgattgattgatttattcttcagttactttgtaatatcacttagctagttggttatggcatgccgtggcccagctcacctgcatggtacctttcaccatcagctccactgccagctggcctggccactcattttctaatttcaaacttctgagggagaaatctggctggcccggctaatcatattgtctttggctgtgtgcccagctattgacaagtatggggattgtctttccttggaatgggtaccaactctttggtccagtcagctatggcacagccatgccatccaaagacatggcacaaaacacgacagcttagccagcagaagctgtggatgggggagactcccttaggaggacatgtgggcaggtcagatagacattgacgtttctggtacagccacacctacatgcccttacatggactatagaaaggtagcaatagcctggtaacatcaactctcatgaccctcgtgctgacaagtctccagggacatgtggagtaagcatacagaagtgtcttttaccactctgttccaaattgtcttcttagatcgtgttccagttcacacctttccatctgggcatcactgagtcatcatggaccttcctaattcccgagcacaacatcacagtccctttcctgctggtaggcaaaactaccgaacctctcatctctctgaacaggtcacacctcaacttcagctctctcctcattggtaaggctgtcctgatggtatgtatttagagttggcatgatctgggcaaggtcatcaagagctctgggagcagccttgcataagaaacctctcctggtcccttccagaagcatatcagagggtcttaatcagtttttaaaaagccacaaaatatttactgctcaatctaatttccaccaagtatcttttaaacctacaattaatagcttaaggaaatttaggagccttgttaaagatcctacttggcagattcctttaaggcatgggctgactgtttatttctagagcctcaagttggcccatccttcctgcatttgcccccagattatggggggtatctgtatgcttcttggtctgtgccacagtggtcagatttctctctcatcctttcgtgcatttatttggttcaacaaatatcactgagtctgtagaatgccctcggtacttttctatgggctgggattacgctaatggataaagcccaaagtccgtaccttcctgatgcttacattctagaaataagaaacaggctaccaaaagaaacataaggaaactatacaccatgtcagatggtaataagtgctttagagaagaggacagcagggtagggagaataaggaaggccaggaggcagtgggaaggtgaaacgaagtaattgtcatgtcccttataaccccatgtatctttcccatggttgtgacatctctgctgtgtgtataaaatacaactaaagccagagtatgttttaataatatgttagatttgtatttgtaaaataatattcttatagtaaatccaccaatgtggtgttgcataagaaaaagtttaatctctccacgttcatcctgtctcatctttctctttccactccaaaggaaagcagtgttaactgctggatgtgtattttaccgatacatataattaggtgggagggggaattatggcatttattaagattttgaacaaataagcaatgtagcataagaataacaacagtgagacagagtttaatccaggaattcaacagtggtacgtttgaatataatcattacatcaatagattaaagaagaacaaccatgtgatcatgttaatatacactgaaaaggcattgccaaaatttagcagacattcccaacaaaaactctaatagcaaaatggacattgatggaaaaaaaggttaaccaaaatcaagaggcagatatgatcctgcaataaatgactaaaactgcttcaattaaaatgaggaattaggtaagggtgttcattatcacccttattattgaacacttgcttagagactttagcaaatatgacaaaacaagaaaattaaataatttgcataaatattggggaaaaagggataaagtcatcttgttttgcttttactgatgattttgtacacataaaaccacaagagactctagagaaaaagcaaaacaaactactagactcaacagaataatgtggtaaggtgggcagatgcaagacaaatgtgcaaaaatagtgtcttcttttttagcactagcacctagaaacagaaaaccaaagaaaacatccacttggtactggcaaaacctataaaatagctaaggataaatgtaataagacatgcacaaaaaagacttacatgaagaaaactatcaaatctgattaaaatcccccaaacaagatctgatcatttgttagttctcctacaattaaatgcaaatttaatcaagttccaattagaatcccaactagggttgccagataaaatacaggatgcataaattttaatttcaaatagcaattaataattctgagtawgtccaaatattgctcgggacatatttataccaaaaaattatttgctaaatctgtcaaccaaatcccaaaagaattggaaggggagagaactggataaaatgattctaaagtttatgtgggaaaatgaatggtctaatagccaagaggaaagcgtaagatgatagtgagaga

SEQ ID NO: 708631 - DNA, 636 bp, Homo sapiens
aaggagttagggaaagaaatctcaatatttcccaaggaaatattggtggtgttctagaagaagtggctatgttacaacagttgcatcttaggacatttattcacttccaggctttcatctcctctcagtgctgcaaggaatatcctgctctaagaacaccagtttgaaaaggactggccatagatgactttggaagaccaaagagttctgtattgacctcagttacgtccttaatactctccagcaaacatacaatatttccgtagtccattaactytcctactcccctgaaaactgtttcatgcctactcctcccttctcaaacctctaaatgcctctgtcatcctcactccaagctgattattttgcttcctagttcactgagaaaataacagcaatcaaaagaaactgcactcagcctccagcaccacctccttttctcctgcatgtgtgcccatctgctcaacttttcctcctagccatgcttctagtcaaaatcaaccccttagcttgctgctagatcttattttactcatctatgaaggacgctgttccagtgattttcttttatttcttctactttgcctgttttttctctatttgatcactctcaccaacattcaaacatcttgtttt

SEQ ID NO: 708632 - DNA, 636 bp, Homo sapiens
aaggagttagggaaagaaatctcaatatttcccaaggaaatattggtggtgttctagaagaagtggctatgttacaacagttgcatcttaggacatttattcacttccaggctttcatctcctctcagtgctgcaaggaatatcctgctctaagaacaccagtttgaaaaggactggccatagatgactttggaagaccaaagagttctgtattgacctcagttacgtccttaatactctccagcaaacatacaatatttccgtagtccattaactctcctactcccctgaaaactgtttcatgcctactcctcccttctcaaacctctaaatgccyctgtcatcctcactccaagctgattattttgcttcctagttcactgagaaaataacagcaatcaaaagaaactgcactcagcctccagcaccacctccttttctcctgcatgtgtgcccatctgctcaacttttcctcctagccatgcttctagtcaaaatcaaccccttagcttgctgctagatcttattttactcatctatgaaggacgctgttccagtgattttcttttatttcttctactttgcctgttttttctctatttgatcactctcaccaacattcaaacatcttgtttt

SEQ ID NO: 708633 - DNA, 1400 bp, Homo sapiens
cagatgaaggggcagtatagcagaaatttctagggaagaggtcttttgggtcattgagtcattgccctgaaaggggtggtaactcctgggtgttgccatggcagtgatatattgacatggcacactggtgggcatgtctgattggaaagctgtttccacccccaccctgttttagcgagtcctcaatctggtccagtgtctgagccccrcctcctacctcattctgactctaactgcctttaagatgtttctctttgtttttaaggtctcaacacctttaagatgtcgagtcttcattcagtaatttactatgatttgcctaggtgtggttttctttgtattttatcctacttggggtttatagtgattcttgaatatgtgggctgggaaccattagccactaactcttccagatttcttctccattctttctctcctctccatctaggattccaatcataaatgtgctaggcctttttgcaaacctttcacagtaatatatgtccgttgtgctttttctatgttctacatacttttgtcctctctttatactgaatattttcttctgacatacggtctagttcgctgtctttttttcagtgaggtctaacctgctattcaaacttcctttcagtttttcattttgttattgcattaaaaagccattaattcttttcttactatttctagttctctttaaaattctcacttctcaatagtgtcttaattccctcagcatattaaatatgttttaaagtccttgtcttatagtgccatacgtagatccccagcagtctggtctcccgtctgtcttttgctcttgctttatggtcacatggttttgtctctttagatgccaagtattttttttttattattatactttaagttttagggtacatgtgtacaatgtgcaggttagttacatatgtatacctgtgccgtgctggtgtgctgcacccattaactcgtcatttagcattaggtatatctcctaatgctatccctcccctctccccccaccccacaacagtccccagagtgtgaggttccccttcctgtgtccatgtgttctcattgttcaattcccacctatgagtgagaacatgcggtgtttggttttttgtccttgcaatagtttactgagaatgatgatttccaatttcatccatgtccctacaaaggacatgagctcatcattttttatggctgcctagtattccatggtgtatatgtgccacattttcttaatccagtctatcattgttggacatttgggttggttccaagtctttgctattgtgaatagtgccgcaataaacatacatgtgcatgtgtctttatagcagtatgatttatagtcctttgggtatatacccagtaatgggatggctgggtca

SEQ ID NO: 708634 - DNA, 445 bp, Homo sapiens
aatttaatttttatttttttgagatggagtctcactctgttgcccaggctggagtgcaatggcatgatcttggctcactgaaacctctgcctcctgggttcaagcaattctcctgcctcagcctcccaagtagctgggattacaggtgtgcaccaccatgcctggctaatttttgtatttttagtagagacaaggtttcaccttgttggccaggctggtcttgaactmctgacctcaggcgatccaccctcctcagcctcccaaagtgctgggattacaggcatgagccaccacgcccagccccaaagtgtcttttaacctcattcacatagtgccaccttcaactatgccaggaaaccaatgggggtggggggacctcagcctacctggtgcttgcggttctccaagttcatggtgcggggcctgtaggtgatctcatagggct

SEQ ID NO: 708635 - DNA, 445 bp, Homo sapiens
aatttaatttttatttttttgagatggagtctcactctgttgcccaggctggagtgcaatggcatgatcttggctcactgaaacctctgcctcctgggttcaagcaattctcctgcctcagcctcccaagtagctgggattacaggtgtgcaccaccatgcctggctaatttttgtatttttagtagagacaaggtttcaccttgttggccaggctggtcttgaactcctgacctcaggcgatccaccctcctcagcctcccaaagtgctgggattacaggcatgagccaccacgcccagccccaaagtgtcttttaacctcattcacatagtgccaccttcaactatgccaggaaaccaatgggggtggggggacctcagyctacctggtgcttgcggttctccaagttcatggtgcggggcctgtaggtgatctcatagggct

SEQ ID NO: 708636 - DNA, 922 bp, Homo sapiens
tcagctcactgcagccttgagctcccaggctcaagcaatcctcccacctctgcctccccagtagctgggactacaggtgtgtgcaaccacacctggctaatttttgtagagatggggtttcaccatgttgcccaggttggtctcgaactccgagctcaagcaatctgcccacctcagcctctcaaagtgytggattacaggcgtgagccactgtgccaagcctgttcacttattattttaaaccgtgctgagcctcagtgtcctcatctgcaaaatgggaaagcaacaaattcgtgaggactgaactgggtaacgcacctggagcctttagcacagtgccggatggaagtgattagcggttaagtgagaaggcggcacccctttggcagatattcatacggagtgttctctgtttctctgactctcatttggtctctgtcattctctctcctttcatcctccatcatggcctatctaaaacctttttcagagtgtttctgctttcctagcctgtgccatgacctctgatgatgtgcctctttttcccttgggccttctggtttgcttcgctctgttactattaactgagtctccctcagtgcccacagtgctcaactctgcagatctctccttaaggtactaaggaacagaaactgcctcctaacagtgaacaaggccaaatgaattcatgtcagaacagtaacattctctgagggtttgggagaaggaggtgaatgaggtcatctctaaaacagatgtgaaataaaaaattactcaagtgaggccgggcacggtggctcatgcctgtaatcccagcactttgggaggcccaggcaggcggatcatctgaggtcagcagttcgagaccagcctggctaacatggtgaaaccccgtttctactaaaaatacaaaaaattagcc

SEQ ID NO: 708637 - DNA, 922 bp, Homo sapiens
tcagctcactgcagccttgagctcccaggctcaagcaatcctcccacctctgcctccccagtagctgggactacaggtgtgtgcaaccacacctggctaatttttgtagagatggggtttcaccatgttgcccaggttggtctcgaactccgagctcaagcaatctgcccacctcagcctctcaaagtgttggattacaggcgtgagccactgtgccaagcctgttcacttattattttaaaccgtgctgagcctcagtgtcctcatctgcaaaatgggaaagcaacaaattcgtgaggactgaactgggtaacgcacctggagcctttagcacagtgccggatggaagtgattagcggttaagtgagaaggcggcacccctttggcagatattcatacggagtgttctctgtttctctgactctcatttggtctctgtcattctctctcctttcatcctccatcatggcctatctaaaacctttttcagagtgtttctgctttcctagcctgtgccatgacctctgatgatgtgcctctttttcccttgggccttctggtttgcttcgctcwgttactattaactgagtctccctcagtgcccacagtgctcaactctgcagatctctccttaaggtactaaggaacagaaactgcctcctaacagtgaacaaggccaaatgaattcatgtcagaacagtaacattctctgagggtttgggagaaggaggtgaatgaggtcatctctaaaacagatgtgaaataaaaaattactcaagtgaggccgggcacggtggctcatgcctgtaatcccagcactttgggaggcccaggcaggcggatcatctgaggtcagcagttcgagaccagcctggctaacatggtgaaaccccgtttctactaaaaatacaaaaaattagcc

SEQ ID NO: 708638 - DNA, 1705 bp, Homo sapiens
tttcctctctatgttggctttaaatctccctacatgctatgactccagatacctctctctgtctgccatctccttctagttccagacttcattctccaacttgatatatgagatacaaaagtggacaccagtcaggcctcgcagactatcggtcacccagacagaactcatttccccccgccccttgaacctcagatcagttccatgcactgtttccccattttagtagatggcccaagaccagccagtcagttcagctctcaactcaggaatctccctgcgcttcccttgtccccaagtcttgttattagcaagacctcccactgtatctgacttccagataatatctgaaacgtgctcacttcaccaccatgcctagcataaacctcctcatgaatctcttgacttaaactctactatttttctattgtggaggactcaacaatctatgttaagttttttaagtgttttaaaaatattataaaaatttacttctaaagtacttttctttttcctaaaaacattgtatgacacatcttaattccaaaaaggatgggaatttctagattgtaagaatggtctcccttgcagttgaaagaccctcctagtaccattgtctgattcaccctctcctgaagaaggcccagagccactggggactggcaagccaggttctgtgtccacctcactgtgcatagtgatgaccaactttctcaacattcagagaggttagaaaaccattttattttgaaacatttatacagtatttaaagtacttaatctgtacaacagttttagtgggaaaagttgactcattttggattaaagccagcaaaaactcactgcagctcttttatctctcataaattctacatagaaagtgacttttagtagatttgtgaccaactaaggtattataatggtggatataatggagggctgttttatttcctttagtgatggcctgttcttttttcctttctgtttctgtttttccatatcttgattccaagaagttctagctttacctgtccaagtcattcattagtttactcaagtcagtagtaagttgaaaataataattctcttctatcagagttgtagaacctgagataatatgtttttggaagggctgtgaaaatggtatataagtgatgaaatagtaaagtactctataccctttgtacttaaagtaatatacttaagtatattactttccagtccttacaataccacttagtacctggaaattcagttactgttctgactcatgaggttagaaacagtgtttgttgatttttgttcctcagtttagatttgaaaacacatgcattaatttttagcaggtatttactgcatctctgttgtgtgccaggtgctgcgtgtatttgccactgtcggggggcaagagaagtcccagcttatacctcatggaatctacagtctagcatgagggtgaaacgtggacttcgccttcctctatttgcatttccattaggaagagaaagcaagctttsaattgttcaaagaatgaagaatgaggcttcctagagattgtgtggtgaagatgatctttgagcagggccttgagaaatacttaggatttagcacgtttagcgcgtgcttttctcagtggtgcaagaagattaagccacattctggctttagagaggcatttctgagagagatgaaggacacttcgttc

SEQ ID NO: 708639 - DNA, 579 bp, Homo sapiens
ctttaaatccaagtccacaggcagcccaatcatgagtcagttctttacctgggagcaagctgggagagggaattcagagacagaagtagctcctgagaagggaaaggacagtcctcagtaaggggagagtacccactcacacctcctgcctctgctctctttggaatccctcaagtgatctctccactgtttttatctcccaaatgttttattttgtgttatgttcaagtcaagttctttggtacagggggtagaaggaagtgggctaaacctcacaaagtatagacatacacaaatacaaayaggctatgctcccagagtgggttatacgatgctcaccaatcaatctcaccaccaagaatgcactgaggaaatattcttttccctaggtagtggttgtgaggtcaacaaaaaataaatggcttcatttggagtgatgtttttctacttactggaacaaatatattctgcaagcttttctgcatttccacaggtttcttccttctgtatccaggccattttactcactggaaaaccacaaaagaatgtatttccttaacacggttatggaagcccttt

SEQ ID NO: 708640 - DNA, 612 bp, Homo sapiens
cacagtgatctttgttagttatttctaccttagttcccattctctatcacttagtttctgtttcttcacttaccagcactaactttttacagcygcagtttcaaggcaaatctctccttcttccctctgaggggcattcatttgtataaccattgccgcttccaattactccactgagtaagtgccacttaagattctcatcagcctgttgttaccattattccagtgcagtagcaaccatgaatgccagatttgaaaaacatatttgaaactaggaaaaacatagtggaaaaaattaaatgtgatacctactctttcagtaattccctcgtgtgtgtttttcaaatgaagagttgattaatgataatatgaaaaacactcctgaagccagcgtatcaattactgtctttaaattaatgagccctaggtacttttctttctgattgacatagccccttttaaaaatttccgtctctttaattgagcataaaactataattgttttttacagtctctttatggggtgtgccataatacactgacattctgtacaggagtttataccttgaaacaattatatgtttatatcctggataaaaaattaagttattg

SEQ ID NO: 708641 - DNA, 3270 bp, Homo sapiens
  misc_feature 1023, 1024, 1025, 1026, 1027, 1028, 1029, 1030, 1031, 1032,1033, 1034, 1035, 1036, 1037, 1038, 1039, 1040, 1041, 1042,1043, 1044, 1045, 1046, 1047, 1048, 1049, 1050, 1051, 1052,1053, 1054, 1055, 1056, 1057, 1058, 1059, 1060, 1061: n = A,T,C or G
  misc_feature 1062, 1063, 1064, 1065, 1066, 1067, 1068, 1069, 1070, 1071,1072, 1073, 1074, 1075, 1076, 1077, 1078, 1079, 1080, 1081,1082, 1083, 1084, 1085, 1086, 1087, 1088, 1089, 1090, 1091,1092, 1093, 1094, 1095, 1096, 1097, 1098, 1099, 1100: n = A,T,C or G
  misc_feature 1101, 1102, 1103, 1104, 1105, 1106, 1107, 1108, 1109, 1110,1111, 1112, 1113, 1114, 1115, 1116, 1117, 1118, 1119, 1120,1121, 1122: n = A,T,C or G
catgttcccatatttagtgggacccgtctcgtactgatgtgtccagatgtttcattttcaatttaaataacatgttcaagatgtactgtacatttcaacgtagctgggtggaaagttaaacatcagccacgcaacccctttggacaggttaattgtgcagagctcattggaataatgcaatttggcatgtgtgccttggatggagagaatgtgggaggctattgtccttggggtctcctctctccttttgtctccatttgcctcatgtttctgtcttagaacagaaccctcttgtttcctaggagtccttaccccaaatcacctattaagaaaaataggaacaggttataattcttgttattatggctttcctgagacggaaaagtgtttggctaatttccccactccttggaattctccttatttgaattcacttgaaggcgggagttaaagtatctttcagtaggtttttaaatatayatttaaattcactctatagttcttaacatttacaaaacagtgtcaattaaaagaaaaataatataaaatgctatgtttgagatagaatcacataataaactaggaactagtttaaaacgtctaataaataagccttcccaaactctatttggtacagaaataaagcatatagatgtggttaacattttaacctagaaacatttaaaaataccaagatgattttgggaataaaacttttatggtaggttttgttactgatattttagtaatttccttaactggcatcacctatcaccttagtggcctattcaattaatttttggaagtgggtggaatataaattatgcatgaatatataaacggatcaagtttttaactggaataaatgcttttggtgacaggttaaaagatctactttaaatcagcttataatatctatttttaaaagacttcaaaacttgaaattaaatgttttgcttttcacttcaatgacgatggtgtaattattcttgggattaagaagatattgtcattattaatttnnnnnnnnnnnnnnnnnnnnnnnnnnnnnnnnnnnnnnnnnnnnnnnnnnnnnnnnnnnnnnnnnnnnnnnnnnnnnnnnnnnnnnnnnnnnnnnnnnnncagtaatgggatggctgggtcaaatggtatttctagttctagatccctgaggaatcaccacactgacttccacaatggttgaactagtttacagtcccaccaacagtgtaaaagtgttcctatttctccacatcctctccagcacctgctattcacaatagcaaagacttggaaccaacccaagtgtccaacaatgatagactggattaagaaaatgtggcacatatacaccatggaatactatgcagccataaaaaatgatgagttcatgtcctttgtagggacatggatgaagctggaaaccatcattctcagccaactatctcaaggaacaaaaaacaaacaccgcatgttctcattcataggtgggaatcgaacaatgagaacacatggacacaggaaggggaacatcacacactggggcctgttgtggggtggggggaggggggagggacagcattaggaaatatacctaatgttaaatgacgagttaatgggtgcagcacaccaacatggcacatgtatacatatgtaacaaacctgcacgttgtgcacatgtaccctagaacttaaagtataattaaaaaaaagaggctcctatccctataggtatttacaatttggtagaaatctaaaagaagacagaacaagaaaagtgcacaaatgagctctaaaatcaatgccatgtggattcaaaaagaggcaagattatgggtagaagagaataaggaagactttctggagcataagttcaacagtgaacatggaaacaaagcatatgtctcatttatacagcttcagcttggtccattgcaaatacactgtaaataaggcataggcatctttactaaagatactgagaaatattcaacttattgtaattcctatgaagatggctagctgaacatttcaaatcgtctcttctatatatgagcttcgatgctgacccataataagtaacaactcatgttagatgtcaatcaattttagcattctttcttatttccagttatcagcaaatggtactcatacaatatagaagaggtgagctattataatatattcctattacccgatactatgtatgtactgatggaagtaattatttaatgactagaactgcttcatttcctttcatatgcttcactagaagtataggaaatatctcctcagaatagaactcagattataggaccttagaaatcatatggtcatatggatcaaataactttttgatgcattagctataaaaataatgcattatgctagtactgtgagtcaagatttattaataatgccacttgggaaggtacttgaagtcacaggatcaactgtatctgcttgttttgttagtctggattagttgattctcacgtttctgaaagccgatataattaagctgctctcagcaagtctaggataagccaaagatatatttcatagaagcccaaagaaagagggcaggaatataaagtcatgagacttatttctacaaataccactcaaaagcccctgaaagtgactcatatttaacttccaaaattcagtgtgttcactcaataagcatttgagaactcactgggtacatagtaaacaataatatcagaaaagaggaaaatcaattcaaatccatatggatataattaaattcctagtattcatttttttaattcaatttcttgggtaccaactatagaccatgtgctcttctagctgtggactggagtgggaggggtgggcaggagtaattatgataataaacaaaactagcatgctctcttccttcctcaagcttacagtccagctatgctacagacagcagaggacacaaggtaaatatgacagaatcctttcaaaagagtttgcaatctactggaaaggtagtagatacataatgacaaggtagaacatgctttctcttcttaaccagaattatcatcaaaatcacttggaaggctttttcaaaattcatatgcctaggtttcattccacacccaaatgaatgaaaatggctggcagtggagcctgagaatgcacattttgaaacactgtgttcagatgattctggcgtggaccactggttaggagctccgcgtttagaaggtgtttgaatttctcacctcagttttgctctgacttcattataat

SEQ ID NO: 708642 - DNA, 3270 bp, Homo sapiens
  misc_feature 1023, 1024, 1025, 1026, 1027, 1028, 1029, 1030, 1031, 1032,1033, 1034, 1035, 1036, 1037, 1038, 1039, 1040, 1041, 1042,1043, 1044, 1045, 1046, 1047, 1048, 1049, 1050, 1051, 1052,1053, 1054, 1055, 1056, 1057, 1058, 1059, 1060, 1061: n = A,T,C or G
  misc_feature 1062, 1063, 1064, 1065, 1066, 1067, 1068, 1069, 1070, 1071,1072, 1073, 1074, 1075, 1076, 1077, 1078, 1079, 1080, 1081,1082, 1083, 1084, 1085, 1086, 1087, 1088, 1089, 1090, 1091,1092, 1093, 1094, 1095, 1096, 1097, 1098, 1099, 1100: n = A,T,C or G
  misc_feature 1101, 1102, 1103, 1104, 1105, 1106, 1107, 1108, 1109, 1110,1111, 1112, 1113, 1114, 1115, 1116, 1117, 1118, 1119, 1120,1121, 1122: n = A,T,C or G
catgttcccatatttagtgggacccgtctcgtactgatgtgtccagatgtttcattttcaatttaaataacatgttcaagatgtactgtacatttcaacgtagctgggtggaaagttaaacatcagccacgcaacccctttggacaggttaattgtgcagagctcattggaataatgcaatttggcatgtgtgccttggatggagagaatgtgggaggctattgtccttggggtctcctctctccttttgtctccatttgcctcatgtttctgtcttagaacagaaccctcttgtttcctaggagtccttaccccaaatcacctattaagaaaaataggaacaggttataattcttgttattatggctttcctgagacggaaaagtgtttggctaatttccccactccttggaattctccttatttgaattcacttgaaggcgggagttaaagtatctttcagtaggtttttaaatatacatttaaattcactctatagttcttaacatttacaaaacagtgtcaattaaaagaaaaataatataaaatgctatgtttgagatagaatcacataataaactaggaactagtttaaaacgtctaataaataagccttcccaaactctatttggtacagaaataaagcatatagatgtggttaacattttaacctagaaacatttaaaaataccaagatgattttgggaataaaacttttatggtaggttttgttactgatattttagtaatttccttaactggcatcacctatcaccttagtggcctattcaattaatttttggaagtgggtggaatataaattatgcatgaatatataaacggatcaagtttttaactggaataaatgcttttggtgacaggttaaaagatctactttaaatcagcttataatatctatttttaaaagacttcaaaacttgaaattaaatgttttgcttttcacttcaatgacgatggtgtaattattcttgggattaagaagatattgtcattattaatttnnnnnnnnnnnnnnnnnnnnnnnnnnnnnnnnnnnnnnnnnnnnnnnnnnnnnnnnnnnnnnnnnnnnnnnnnnnnnnnnnnnnnnnnnnnnnnnnnnnncagtaatgggatggctgggtcaaatggtatttctagttctagatccctgaggaatcaccacactgacttccacaatggttgaactagtttacagtcccaccaacagtgtaaaagtgttcctatttctccacatcctctccagcacctgctattcacaatagcaaagacttggaaccaacccaagtgtccaacaatgatagactggattaagaaaatgtggcacatatacaccatggaatactatgcagccataaaaaatgatgagttcatgtcctttgtagggacatggatgaagctggaaaccatcattctcagccaactatctcaaggaacaaaaaacaaacaccgcatgttctcattcataggtgggaatcgaacaatgagaacacatggacacaggaaggggaacatcacacactggggcctgttgtggggtggggggaggggggagggacagcattaggaaatatacctaatgttaaatgacgagttaatgggtgcagcacaccaacatggcacatgtatacatatgtaacaaacctgcacgttgtgcacatgtaccctagaacttaaagtataattaaaaaaaagaggctcctatccctataggtatttacaatttggtagaaatctaaaagaagacasaacaagaaaagtgcacaaatgagctctaaaatcaatgccatgtggattcaaaaagaggcaagattatgggtagaagagaataaggaagactttctggagcataagttcaacagtgaacatggaaacaaagcatatgtctcatttatacagcttcagcttggtccattgcaaatacactgtaaataaggcataggcatctttactaaagatactgagaaatattcaacttattgtaattcctatgaagatggctagctgaacatttcaaatcgtctcttctatatatgagcttcgatgctgacccataataagtaacaactcatgttagatgtcaatcaattttagcattctttcttatttccagttatcagcaaatggtactcatacaatatagaagaggtgagctattataatatattcctattacccgatactatgtatgtactgatggaagtaattatttaatgactagaactgcttcatttcctttcatatgcttcactagaagtataggaaatatctcctcagaatagaactcagattataggaccttagaaatcatatggtcatatggatcaaataactttttgatgcattagctataaaaataatgcattatgctagtactgtgagtcaagatttattaataatgccacttgggaaggtacttgaagtcacaggatcaactgtatctgcttgttttgttagtctggattagttgattctcacgtttctgaaagccgatataattaagctgctctcagcaagtctaggataagccaaagatatatttcatagaagcccaaagaaagagggcaggaatataaagtcatgagacttatttctacaaataccactcaaaagcccctgaaagtgactcatatttaacttccaaaattcagtgtgttcactcaataagcatttgagaactcactgggtacatagtaaacaataatatcagaaaagaggaaaatcaattcaaatccatatggatataattaaattcctagtattcatttttttaattcaatttcttgggtaccaactatagaccatgtgctcttctagctgtggactggagtgggaggggtgggcaggagtaattatgataataaacaaaactagcatgctctcttccttcctcaagcttacagtccagctatgctacagacagcagaggacacaaggtaaatatgacagaatcctttcaaaagagtttgcaatctactggaaaggtagtagatacataatgacaaggtagaacatgctttctcttcttaaccagaattatcatcaaaatcacttggaaggctttttcaaaattcatatgcctaggtttcattccacacccaaatgaatgaaaatggctggcagtggagcctgagaatgcacattttgaaacactgtgttcagatgattctggcgtggaccactggttaggagctccgcgtttagaaggtgtttgaatttctcacctcagttttgctctgacttcattataat

SEQ ID NO: 708643 - DNA, 1098 bp, Homo sapiens
tggaatcgtaacatgtctccaggatgggaaaggaggaagcagcagtcgcctacatctcccggaaaccctgccagggaccagatgtcgcacaggcttcccggcacgctttgtggaatcatccaatctgaagtcaggcctccccagggtgcaaatcctggcttctgccttggagaattattaactttgggtttttaaaggcagccgcttacattcagctctcaaaagcatcaaaggcatgaagcacatagggtgcagactgctatcatgccaggtcacatgatagacgagaaagcaatccctgaggtcagagttgctcccaccaggcccacaaaagaggttaataaagcataaggaagcctctcagagaggccaggtggtggaagttttgctgaacctagggtgtccaggaaatggatcatttggggttgtttatggattgatgtcgctctggtgagtgggtagtaagtaaatccacctcatatggctttttgtcaaccttgaagctcactagtataaacagaccaggccagatgtccaggtccccgggaatagtcaggggcatgacccttctgcccctgggctggctgccctattcgcttccagcacctcttgataacccccctcctttcccttgaccaatagttcccaaactggggtgcctagaccagcagcatcagcatcgcctgggagcttgtcagaatcgtgcattcccaggtcctccctacaaccactgaatgcaagtccctggggcacctatacctgcgtctaacaagctccccagccatcctggtgcatctgaatgtttgagaaccactgacctctaggctaactcctgactgggctccctgctcccacgggtttctycctccaagtcatgttttctacacacgcagaattgccatttcaaatcccctactgccatgtcacactctcccttatgtctggagacccctccattgccttttgaataaattctcaccattttcaaggctcttcactttttaaaaattgtggtaaaatacacataacatgaaatttaccatttcatttattctcaatatagaggtcagtggcataagcacactcacattgtggtac

SEQ ID NO: 708644 - DNA, 997 bp, Homo sapiens
  misc_feature 895, 896, 897, 898, 899, 900, 901, 902, 903, 904, 905, 906,907, 908, 909, 910, 911, 912, 913, 914, 915, 916, 917, 918,919, 920, 921, 922, 923, 924, 925, 926, 927, 928, 929, 930,931, 932, 933, 934, 935, 936, 937, 938, 939, 940, 941: n = A,T,C or G
  misc_feature 942, 943, 944, 945, 946, 947, 948, 949, 950, 951, 952, 953,954, 955, 956, 957, 958, 959, 960, 961, 962, 963, 964, 965,966, 967, 968, 969, 970, 971, 972, 973, 974, 975, 976, 977,978, 979, 980, 981, 982, 983, 984, 985, 986, 987, 988: n = A,T,C or G
  misc_feature 989, 990, 991, 992, 993, 994: n = A,T,C or G
tgattcccaggctttagggtttcacaggctattaaaatttgaaagaaaattatgacaaccaacatagatttgccatctttaagttttcaagataaaggaaccttaaaaagcaaacacctcctgtgagcatttactattagtgcaaaataaataacaaccttttttttttttttgagatggagtctcgctctgtcgcccaggctggagtgcagtggtgcgatctcggctcactgcaaccttcgcctcctgggttcaagctatcctcccaagtagttgggactacagtcrcccgccaccatgcccggctaatttttgtttttgtttgtttgttttttagtagaaacagggttttaccatgttggccaggctgatcttgaactcctggccttgtaatgcaccctcctcggcctcccaaagtgctgggagtacaggtgtgtgccaccgtgccgggtctaaaggacagtttaataccaaaaaagtagggtggacataatctagaaatatagcattcgaatgctgtatatatttatctgctgtccttgaatttcccacttttctgaggaaaatatttgaaaacaacattttcctttcactttcttcctaatagctaggttaagccacttgcatttaaacataataacaattttagtaacttttacttgtcttcctagcaagaacttgtatcttctggtctggagattaacagtgctattaattaaaaattgttgctttttaataaaaggtggaatgaaagagtaggatcatttgttccactatattggcccaaggacttaagagtctcagaggatttgcttaaaatcttctcagtctagaaattttgaaagatgaaataaacagttttgaggccgggcgcggtggctcacgcctgtaatcnnnnnnnnnnnnnnnnnnnnnnnnnnnnnnnnnnnnnnnnnnnnnnnnnnnnnnnnnnnnnnnnnnnnnnnnnnnnnnnnnnnnnnnnnnnnnnnnnnnnccc

SEQ ID NO: 708645 - DNA, 649 bp, Homo sapiens
cctagtatcctgttccttctttacactctatatgcctaggaacttttatacctttagctgtaagtagaaaagaagttggccccggttttggttaacaaagtttactttgggacaagttgtcaaacataattgtcagtggagccagcaaaagatccagcatgatcaacggtatcaataagcacctgagagcaagacttattccccgtaatttcaattaaggagaattatcttctcaaactgcgtaattatatccactttttaagcagatcattccaaaatgcttccttgattaaaactaattttgaccacatcttttgtcacatcttcctctccatcctgtctgtggtggagtgcatacagtattttaaatacatgataaatgttttaaaaccatgataaacataggaaaaaaagtttctcattttacacatcagtaagctgtaaacagtatctaattgttggaaagataaaatatgatcattatatgaaagctcttatcagcaaatatmtttctaggtggtcagcagctcataatttacatgattaccaaatttgcttcttgttctccaactcattaatcatggccttctaaaacaagaacctcagtgactctttaataaatgtttctcaatctttttaatccatgctt

SEQ ID NO: 708646 - DNA, 645 bp, Homo sapiens
cggcatcctgccagcaagctcccacctcacagatagaataccagaccaccacacatgagctgaagcggctgggatcctcctgctgcataaggcacaagttccctgtggctccaccccattctcccagtgcacaggcagrcccttattctgagtcactccacactggtttacttctcttactgcacatgtgttaagggatggaatttttcaccttgggcatgtttaggcaagccccctgtgcagaatgaccccgtgtggcatttggctgtctcctgcctctatcattcccctctctaaataagtacatctaactgccattagaacaaggataaggttataagggcaaataccaatcgtaactgattcctgctgacagggatgctgttttgtgaaaacagtagtcagatctccttcagaagcctatttaagggttcccagcaaaaggagccactgtctgagactccgttgcatgactgtttggagtttgatggtctgaaggcaagaagagataaattgggttattagaaaacatgtatcaaaaatcctaaagccttttactagtttgcatggagagagggaggccaaaagcctgactggtaaaaacaaacaaacaaacaacaacaacaacaacaacaacaacaacaa

SEQ ID NO: 708647 - DNA, 645 bp, Homo sapiens
cggcatcctgccagcaagctcccacctcacagatagaataccagaccaccacacatgagctgaagcggctgggatcctcctgctgcataaggcacaagttccctgtggctccaccccattctcccagtgcacaggcaggcccttattctgagtcactccacactggtttacttctcttactgcacatgtgttaagggatggaatttttcaccttgggcatgtttaggcaagccccctgtgcagaatgaccccgtgtggcatttggctgtctcctgcctctatcattcccctctctaaataagtacatctaactgccattagaacaaggataaggttataagggcaaataccaatcgtaactgattcctgctgacagggatgctgttttgtgaaaacagtagtcagatctccttcagaagcctatttaagggttcccagcaaaaggagccactgtctgagactccgttgcatgactgtttggagtttgatggtctgaaggcaagaagagataaattgggttattagaaaacatgtatcaaaaatcctaaagccttttactartttgcatggagagagggaggccaaaagcctgactggtaaaaacaaacaaacaaacaacaacaacaacaacaacaacaacaacaa

SEQ ID NO: 708648 - DNA, 1204 bp, Homo sapiens
acatcagcaaagggagacttcccttcccctagcagaagtcccagagtagagacaggcagggtgtcccatggcccagttgccctttgcagggctttaggctcccatccaggctccttgcaccagcagccagatcccagactcacttgaccactgctgcctccaagagctggaggcagaccaagaccaccaccatccacttcatgatgctggtccccaactggccacagaggaagagcagctctgagttctgcagtcgcagtggagtgaagacctgggcactctttcttcttttatacgcccaagattagtctaatcgctgcctccctgccctgggcagccatgacctcaacccagggtgtaccctgtgcwtcgtgtatcgtttctgtgtatttttccttcttgagggtggccgcaacagactttcatcttattgactttttggttcaagcatcggaggccaggaggtgcaagcgataagagagaaagttgccgtaagatggagtggtgaagattacgtcttgttcccaaaccagaggcataatgtgtgcatttagggacgagggccagaaaaaggtagaggcagagtgctgggatagataggatctatagccagggtttcgcaacctcagtgctgtcgacattttggaacaaatagttctttgttgtgggccccatcctgtgtactatagaatgtttaacagcattcctggcatctaccgactcgatgccaggagcagtccacccattgtgccaaccaaatatatctccaggcactgctaagtgtcttctggatgggcaaaatcattgagaactgcttgtctctaggttatgtacttgaagctttgactccactcctaactcctagcaccctcaaacccttaggggaggagataggggtgtcagggggtcaagaggtcagtagctagtagctaggatgctggttacaatgatggtgatggttagggtggtgctaatagcaatgttgggagttctggtgctggtggtggggctgggatgacaatggctgaagtcacagctatttgagcagcttcagaggctttcaaggtcaaacaggacatttggagaaatgcttgtcataattcagcaaatgctcaggacacactcacagagtaagccacaccagcttctggttgtgcctcttgtaccgacctagatcagaggcctggagcaggggcatatgaag

SEQ ID NO: 708649 - DNA, 1204 bp, Homo sapiens
acatcagcaaagggagacttcccttcccctagcagaagtcccagagtagagacaggcagggtgtcccatggcccagttgccctttgcagggctttaggctcccatccaggctccttgcaccagcagccagatcccagactcacttgaccactgctgcctccaagagctggaggcagaccaagaccaccaccatccacttcatgatgctggtccccaactggccacagaggaagagcagctctgagttctgcagtcgcagtggagtgaagacctgggcactctttcttcttttatacgcccaagattagtctaatcgctgcctccctgccctgggcagccatgacctcaacccagggtgtaccctgtgcttcgtgtatcgtttctgtgtatttttccttcttgagggtggccgcaacagactttcatcttattgactttttrgttcaagcatcggaggccaggaggtgcaagcgataagagagaaagttgccgtaagatggagtggtgaagattacgtcttgttcccaaaccagaggcataatgtgtgcatttagggacgagggccagaaaaaggtagaggcagagtgctgggatagataggatctatagccagggtttcgcaacctcagtgctgtcgacattttggaacaaatagttctttgttgtgggccccatcctgtgtactatagaatgtttaacagcattcctggcatctaccgactcgatgccaggagcagtccacccattgtgccaaccaaatatatctccaggcactgctaagtgtcttctggatgggcaaaatcattgagaactgcttgtctctaggttatgtacttgaagctttgactccactcctaactcctagcaccctcaaacccttaggggaggagataggggtgtcagggggtcaagaggtcagtagctagtagctaggatgctggttacaatgatggtgatggttagggtggtgctaatagcaatgttgggagttctggtgctggtggtggggctgggatgacaatggctgaagtcacagctatttgagcagcttcagaggctttcaaggtcaaacaggacatttggagaaatgcttgtcataattcagcaaatgctcaggacacactcacagagtaagccacaccagcttctggttgtgcctcttgtaccgacctagatcagaggcctggagcaggggcatatgaag

SEQ ID NO: 708650 - DNA, 613 bp, Homo sapiens
ctacttatcaattaaagagaatagattgatgatgtatttaacagcatcattgaatctcaaaaacatcagcaaataaggtaacaaaaaataatttatattctaaaattcctattacatggtgttcacaaatagtcaatctttggtaataaaagttagaatacagtttacctgcgtgtgtgtgtgtgtgtgtgtgtgtgtgtgtgtgtgtgtgtgtgtgtttgtgtgtatgtgtgaggggggatgtctgcctgcatctaatgatgtaaagccatatttatttaagtgcttttacatatgcaaacatttactaatctgtatatttgcgcattttattgcatgcaattttgttcaaaaatgttgtaacagtgaaaaataattcaaactggcattctaaatgcattggctcatgtaattggaaactaaaaaaaaaaaaawatctggcttttggcactgcttgtatcaggggctgtgtttaagccagtgctctattattcttctctatacctctgaactctgattgctctgattagtgtcattgtaataagccttctctgtaggataacaggataacgatcatagcattggatttacatcataaaaacttatttatcct

SEQ ID NO: 708651 - DNA, 600 bp, Homo sapiens
gggctgattatatcaattgactaacactaccattgtatacatgtaataaagcttcacaaattacaactttaaaaacctatgatgaaaacctgtccacatgaacattctgggtaaccttgtccattaaaaaaaatcttcatttaaacaataaaatcaaatctccatttttaaattatactttaagttttagggtacatgagcacaacgtgcaggttagttacatatgtatacatgtgccatgttggtgtgctgcacccattaactcatcatttaacatkaggtatatctcctaatgcgatccctcccccttccccctaccccatgacaagccccagtgtgtgatgttccccttcgtgtgtccacgtgttctcatttttcaattcccacctatgaatgagaacatgcggtgtttggttttctgtccttgcaatagtttgctgagaatgatggtttccagcttcatccatgtccctaaaaaggacatgaactcatccttttttatggctgcatagtaatccatggtgtatatgtaccacactttcttaatccagtctatcattattggacatttggcttagttccaagtctttgctattgtga

SEQ ID NO: 708652 - DNA, 804 bp, Homo sapiens
tggcaccttgatcttggacatccagcctccagaattgtgagcaatacatttccgttgtttatagattacccaaatctaaggcattttgttatagcagcctaaacatagagaacgctacagtcctcctgccagctccagctataatgaatatccactattctccaaatttcctgtaatcttccatttggcaagcttttacccagcttgagcaccctctcctttacaaggatttccttgacctcatcctcgccctccatcactacaagaagtaaagacttggcgctctctgcactgagacacaattctttttacatgtccacctgctttctggactgcccttcctagacaggaacgttcttttccccagccctgcatcctacatacctaatgaagtacctggcacatggtaggtacatcactattgcttatattaatgacytaaacaatctgccaataatctaagcttatttcccaccgctctaaacataaaccctggattctactggctccttcccaaacctgcataagaattccaaacttcttttgccccaacctgaaattctatctcacctcttgatttttatccatcttaaatgctacttcaaaaactctttcttgacctccttcttctttggacttcagtggcataggcctttatatcccctacaactcctactgtaatcatggacacataaaaggtgtgtaataaaaaatactctgtttaggctaggtgcagtggctcatgtctgtaatcccaacattttgggatgctgaagtgagaagattgtttgaggctaggggttt

SEQ ID NO: 708653 - DNA, 774 bp, Homo sapiens
tctttactaaataggagacaaacataggaaaggaaatgtatagtgacagtaaactagataagctaagtgacaagataaaaccatattcttcttcagtttttgggtatccacagaattatatgtgaattcttccaaaaagcccagagacagataaaatttatttctcctatgtagctaaggtcacttgaataattgaccctgggaacatctacacctgcatgcagaagcaccttgtgctaaacagaataatctgtgttcacataacacatacactagatgtgtggctttttaaaaagaaaaatgtctctgaactttttaatataatatttaaatataatttggttaatgaggcctactaatttaatataataatttaatataatttggttaatgmggcctcctatggtcaaaatttaatgcatccctcatctgcatagccctttaacacatacttgtgatagcatgttataggtctgaccaagcctgagcttgagatattgaccatcttagtagtgagtcttttttttttgagattgagttttgctcttttcacccacgctggagtgcaatgaacttaaactataccctagaacaaatggacttaactgatatttacagactattctacctaacaattcagaatatacatttttttcatcagcacatggaacattctccaagatagaccatttgatcggccacaaaacaaatctcaataaatttaagaaaatcaaaattatatcaagtactctctcagactacagtggaataaaa

SEQ ID NO: 708654 - DNA, 1449 bp, Homo sapiens
gccagcaccgcatccgggcccatcaaaacatgtacarctttaatcaattaggctctcagcctcctgaccgaccacacttcttagcttcccgttcttgatcccgcagggatgggagcatggcgcaccccaggtcagcgcccaggcctcctggaaggcccagcctttgtctggccttcaacagagtggggtgctggcttgccctcttccagcccttcccggctcccctcaacactgcaccagcagttcatcaccagttccccaagcctggctgtctttcttgatttcaggcttgccaagatggtctctatgtcctatgacttggttgaggggctgagtccctctgttaggcaccccagctttttgggcacccggggccctgcatgctgtgcattcttccccttcgtgagctcagcagaattgcccctggagggggctggagagccagcctgggtgggacccctttttctgactgctctcaagccagttggttgactgcctcagaggtgccaagctcatggtacacaagggctggatggttattcctatagcaaccctacaaagtaggtatccttatccccattttacagatgcaggagcagaggctcagcaaggaagtcacatggcaccagcagagccagggccaaaactcagaggactcatgggacagcttccatgcaggggcgaggctctctctatgtcccatcccgtgctgggtgccaggtgtaacaggacagccttgccttcaaggggtcacagctggggaggcgggtgcaaatgacaaaggcaagtgacaaaatccaagtgcatgcacagtgccatggggcccaggaagcagaggctccctggagacccttgtgactggctagaatctacaaaaatcctggaaggctgcctggaggaagtgtgaatctagtagcgctggcctcttgactatatcagcctcagctgggacctgcaggaggcataagtgagccccccatttgcctagcccctgctcccctcctgcacttcacagtctgccctccctggattcacacttcctccagacagtcctccaggatttttccagattccagccagttgcaagggtctccaaggaacccctcctctagggaagtgaaagggaagtgaaaggaaaatgaagggaggaagagaaaggaagggagggaaagagggaaagggaggggaaaggagaggacgaatttggttacacaaagcaactccattttctctgagcctaaatagtttagctcttgtgttctctgcctggaatccaccccacccccacccctccccacatccttcaagtgagttctaacccagaagccactgctctcccagggcagggcctcctcacccagccctgccctgggcctccttgcctgggatgagaatcattctcagcatcagatccattgcagctggggacatgtgagcttctctcagggc

SEQ ID NO: 708655 - DNA, 603 bp, Homo sapiens
tgtcagtgacacgcctgtcccagctgttgtccaggcaaggtgggccgcaggagtactacggagcatgcagacctctgaaccctgctccatgcacttagcctggcagagtctccgggatgcygccagacacactctggtgagcacgtcttgctgacaccgtaagaactcgtgcacacttagctcaagcactgggtttatgctccggcttttttaatgagtataagacactaacttgtgtgtgcaggggcaggagggctactctgtacttgactacaaacaatctcactcattcaaggataacatgtttatgctttgaattatacaggcttgttttttccacttcttatttttatttccctgtgtcttctgagcaatgaaataagcgatgatatgatatctctgagggcagggtctatgcttactcaccgtggcacacatcctctcactccacaaacatctactgtgcaccttcctggtgccaggccttgcactaggcactggggatgcagcaggaaacaaaagagacctggctgctgccttgatgcaatttacagcctagtgttgtggtccagagtctagacgctgaagctggactggcctgag

SEQ ID NO: 708656 - DNA, 603 bp, Homo sapiens
tgtcagtgacacgcctgtcccagctgttgtccaggcaaggtgggccgcaggagtactacggagcatgcagacctctgaaccctgctccatgcacttagcctggcagagtctccgggatgccgccagacacactctggtgagcacgtcttgctgacaccgtaagaactcgtgcacacttagctcaagcactgggtttatgctccggcttttttaatgagtataagacactaacttgtgtgtgcaggggcaggagggctactctgtacttgactacaaacaatctcactcattcaaggataacatgtttatkctttgaattatacaggcttgttttttccacttcttatttttatttccctgtgtcttctgagcaatgaaataagcgatgatatgatatctctgagggcagggtctatgcttactcaccgtggcacacatcctctcactccacaaacatctactgtgcaccttcctggtgccaggccttgcactaggcactggggatgcagcaggaaacaaaagagacctggctgctgccttgatgcaatttacagcctagtgttgtggtccagagtctagacgctgaagctggactggcctgag

SEQ ID NO: 708657 - DNA, 655 bp, Homo sapiens
ttgattaacctgttttttgttgttatggggtgtcagtcatgaccctttatgataaggaggaaagagatcatatcctctccacccctacaaccctatattaggtggtatctcaagggggaaaatacattctggatcatcatcatcatcaccaccatggtaataaattagtttgaaaactttgaagcatttcttcatactatttttaacctcaagtgtcaaaatgagacargtagaggggtattattatctccatcttacaaaagaagaaaattaatttcagagagcttaattgactaaacccagtatggtatcccagagtgaaattctagactatattcttatcatcagaaacatacagttgggataagctgaaggaacaattaagagtactcaagagaatatacacaaattaaatactaataagattaatacataaatacaataaaatactataatgcatcatactaataataaacgccaaacaggtaactgagaaaggattataccaatgttggctggattattaaagaagatttgatggaaatatttgtatttcaaatgggagttggatattggcaggtagagagaaagaaaacatttcagacagaagaggatgagaaagtactgaggtaggagtgccagcctggtatgggca

SEQ ID NO: 708658 - DNA, 1442 bp, Homo sapiens
ttctattagttgtggaattatgttgatacatccctttgcatcttcaaaaggtaatgaaaactaattaatcattttcctgctaatgcttgacttacctctcttcaytggtttcactagaaggcattaactaacctaaagaataatgaaattgctttagtcagagccacaaagaagactttctacctaaatactgtaatattattattgttgttattatgctatcaactgatattaaatccacaaatcaacaaatatatttaaaacctactgtgtgcaatgcatgataaaaggggccatgtaaagttataaggagatagagctttagttttagggaaattaaaaaatctattttatgatttcattaacatgaaagacatttttagaaactagtgatggctctggaaaggtacatggttagggacttaagatttgagagtaagatcaaactgagccaaagtcaatgttattctagtttgaagaaaaacaaatgcatcatttaaaaattcaattctaaatgtctataaagctcagagttgctggaaattgtatcacatagtgtgtacagagcatatttgggtggagcactatcagcatgcacagggaaatgaatgctgaaggatatggttttaaataactaatttgcatatgtttaagaatttgtttatggcatttctaaaaggaaaaataaaggtgactttggcctgcttgtcaaagtgatctggacagttgaagggctgccatgaaggaaatcttttattcactgcccatcaaaaatgggttacacatatgacagtatttttgggtaaattaaatattagaactgtcctttgggaagacactacccaaatttttgttgacaaccaaaagacctggccagaactctaaggcaaagatagtgaagtggaggaaattttgcactctatattgttagacctttcttgtccctactcttctccttcgtctcttgatctctactgattttagaatgaatctctacaaaaccagttatttcatcctaattttttctgacttggaaaaaaagatgaaaaactctttcatatagtgctagggaaagaagaacaatgattctcaggaatattttcgtcttaaagaattatcgaggtccattccaagatggctgaataggaacagctccggtctgcagcttccagagtgactgacacagaagatgggtgatttctgcatttccaactgaagtacctggttcatctcactgggaatggtcagaaagtgggtacagcacatggagggcaagcctaagcaaggtagggcatcacctcacccgggaagcacctcacccggggtcaggggatttccctttcctagccaaggggagccgtgacagactatactgggaagatcggctaatcgggacactgccacctaaacactatgcttttccaacggatttagcaaatgga

SEQ ID NO: 708659 - DNA, 626 bp, Homo sapiens
ttaagcttattagcaagcggtccatgttgaaaagaacagatgttatgcatgggctcaatagattttccctctccaagactgacctggmgactagtacagttgaatgttcaatttgccaatagctgtgtctgacctgatcctttaataagtaacaaaccctaggggatcagtcagccagctagtggaaggttaattatactagacttttttttttcataaatgagatagcaatttgtcctcgctggaatagatacttcatacaaattttgatttttttttctcagtttgctaatcttctgatagtaataccatctgcaggctttattcaattccatatgaagcatcatgatatcacactcaaaatttttatgacctaggaatttatttttcagcgaaataagtaactaatcttctaactttaatatgctttttatgctcattttattgctttcaatgctcaaattttattttctttctgcaaagcatctttgctatctcttcaagagatattttctggaatcaaatatgctatttagccaaataaatatagaaatatgataaaggcaacaagcatgttaaaacatgcattaagtttccttggctcattgaacatttgtccttataaa

SEQ ID NO: 708660 - DNA, 238 bp, Homo sapiens
gcacagataaattaatttacttgctcattcagagcaaagacactttgtagataataaaaaagatttaatttatttcattatttgagaaaatacccgacttgtaatctgtaagcaaaagtgccccgtggcttttagagagatctatgatagatctasctaataggaaatagtgtagtgaaattaaatttagaggataaattttaaagctagaatgtaagtcccctgagtgacttttgcc

SEQ ID NO: 708661 - DNA, 615 bp, Homo sapiens
tacattttcaggtataagtaggctcaaaatttaaggatcactaaccattcttgaaaaatttgcttaaatactctgatggacaaaaacagtgtcaaaaattaagaacttgaaattgcataaatggctgtttaaaatggctggctttttttttctcaaggaaatcatctgaaatatatggagaaaaacwtttgcagtttatcactgtagcattataaaatagagaaaaaaataaaagcaacttaatagtcaaacaatacatatatttgatttttatgtggtattaaaagatgttaaataacatggaaaaagaattgtaacaatgttaaattttaaaagttacatttaaaattatattttgaaatatacatagttatatttattctaagataattatttcaaccatgcacaaaaagaactgaggcaaactaaggtgatattttaacaatttcttctgatgatagaattatagctctttttctcattctttatatttgttcagaatagtatattcgcttatatttgtacagaattgttctgtaatgaatcaaaatattactattataaacagataaaaaattatagatatttaaaaaattgatagaaaatatgcagcaa

SEQ ID NO: 708662 - DNA, 840 bp, Homo sapiens
agaaacaagtaactaatygagccaagcaataggtgaaaccaaagattcttctataagcgggcaaagtactgactactaagtactacactaaaacaataagaaactacctaattgattcaggaaaagcttcagattagaaaccatattttaaagagtaactttcaattctctattaaagattataacaacaaaaaaagggaaaaaaaatcaaagctaaagacagtagctgccagaaagatgttaagtcacctggctgatagtactggctttgggagggcgacccttagcacctaagtgaaaagaaggctaggaagaatcagtgctacaaaagccatgttctacaacccagctcatccttctgccatggactttgtcagaagacaatatgagaacatttccgattagtattacatcttacaaaaatggttaaattttactctttcactgtgctagtctctaaatgtcatgttatgaatatggtttaataaaaagcaactagtcaagacaagagagtgctaagtacactttacaataccttattaaattgaaaaatcaatttctgtcacaaagtttagataaaagcaaaaaataaaacaatgtttatggcaagtttctttttaaattcccttactctattttcatcctttccaaaatgaatcacaataaagaatctttgtctcttctgaaaataatatttgtttttaatcaaactcaaaagttctacagataacctcttcaaattcttaatttctagtatttaaagtctgtttaacctgcaaaaatcttgctattttataacaaatgttgcttttaagcaaagccatttaagaaagccattta

SEQ ID NO: 708663 - DNA, 637 bp, Homo sapiens
tattatctatcttgaggccaggcttctggaatatttttaaatctagaaacagaaaaaaacatatatacsgatgttctgggggtaaagagcagctcctgaatatgtaagcaaaaccaaacacaacagaaaagagaataccactctgggtttatacctaactcctcagactgaacaactcacaatggagaagttaagagcactgcaatcagctgacaggatctatacaaggtcagttttttctttggaaagcagagaagcatgggagaagcaatcggagtacagagaaaacaaaactgcagagggagcaaatcaaaggcagcagagaagttgaggttgtgagccacagacacagacagtccagatctacagtctgcaccttagcagttactaaaggcgtaggcaggagctacaatagtaaagagacagatatcaccaatgccccagtattgtacaagcaactacaatagtctccacaatgtttatacatgaaaaatattactgaatttttaaaaatgtatttataagtggcattcctcaagacagccttcagtcttttttttttttttttttttttttttttgagacagtttcactctgttgcccaggcagtatgcaggtacaagcatggctcactgca

SEQ ID NO: 708664 - DNA, 1647 bp, Homo sapiens
  misc_feature 2, 3, 4, 5, 6, 7, 8, 9, 10, 11, 12, 13, 14, 15, 16, 17, 18,19, 20, 21, 22, 23, 24, 25, 26, 27, 28, 29, 30, 31, 32,33, 34, 35, 36, 37, 38, 39, 40, 41, 42, 43, 44, 45, 46,47, 48, 49, 50, 51, 52, 53, 54, 55, 56, 57, 58, 59, 60,61: n = A,T,C or G
  misc_feature 62, 63, 64, 65, 66, 67, 68, 69, 70, 71, 72, 73, 74, 75, 76,77, 78, 79, 80, 81, 82, 83, 84, 85, 86, 87, 88, 89, 90,91, 92, 93, 94, 95, 96, 97, 98, 99, 100, 101: n = A,T,C or G
annnnnnnnnnnnnnnnnnnnnnnnnnnnnnnnnnnnnnnnnnnnnnnnnnnnnnnnnnnnnnnnnnnnnnnnnnnnnnnnnnnnnnnnnnnnnnnnnnnnactgaatcaaggtttttcttttctagaatatgttaatatcactatcttctaggacaaaatatcagtaaaaaattcatgatgatttacctgactgagcatatgtggaatttttaaggctggattttaactctttcgagaactcaccttcctattttgtacgctttctgcctctctgctccaacaaacactgtttggggcaagtttaacctcaatagatataaccttgttgttgggccagtccgtctaccgacaggacgtaacttgtaagaaggagaggcactggtgtgcgagaaagattgcagctggcagctgagagacaggtctgccacttcccttccctttgctttgctaccaaatctttgcgtgcctcagaagtaggccatgtaactcaggagtgccaggagctgtgactgataccaggctctttgtaaggaagaggagaaaatgcaggatgcagaataattgaaggggaggtggtgctccccaaaggaggaacaaagaaagaatggtctgaagacttcaaatgtttggcaaccttattttttttacccaaggccagcatttgtatgaayatgggtgcgtgtgtgaatttgtatacaggaaggaactagcattgtgaaataaccccaaacacgactggtcagtctgcctccctttgaaaaacaacaataaagaaaaaaactactttgaataatcttataacaggaaataacacaatggaaactggagaattttgatgtggaaaaatctaagcacctggaacaatagatgctaagtaattaaaatactgtgcatatataattgaagttgaaaataaacaaagggaattttaggcacccagtttagtttactaggcagcaagtaaggtaatgaaagtatgagtcacccatttgctaggttttcaaacatatcacagatttttagcactctcatcttcaagtataattgtaacccttattctctttggattgcaactttcttcagatcgtagtagtaaagaattgacaaaggattgattgcacacatttcagaaaaatacgtactggtaattttaaaaatctattaataataaagatgaatgggttattgcagaattaaaaaggcttatgtatcatattttactttagtcagattagagtaagttgctcctactattatgaagtagagatgtcatgtatgtgactagttattagacagccatcagattattgtgataaatacatacctacatgtaacctagatcattacaggaagaagttactgaagtaataacacaccgcagaaacaataccatgatgataagtgttaaggaatgaagttctttccctatgaattctaactaattcattattttcacagtctatctcatttcaagacctgtatttcccttttagacataggacacctgggttgtctgatcataaactctttctccagtggcctttggccttttaagtagatctgttttgttttggcaaagaaaaaagaaaggaggaagtgaggaggagggacttgaagatgtgctactgctggaaacaaattttga

SEQ ID NO: 708665 - DNA, 1263 bp, Homo sapiens
ttaaaaaaaaaattgaaacatctataggtcacattgattatttcccattaaaaatgaaaagggttctattaaatccaataagggggaaatgaatattccttcaatttaggtttgttccttttatggaataaagtaataacgcgttagataagtgtcactgctttttagccattcatacattaccatttggaattctttagtatttacaacccaaagttggttctctaatctatttctcatctttgtgtgataattttacaaaatgtcctcttcatttttgaagacaaagaaacgtgaaacgtccacgatcaaatgatttccccctgtgttgtattagacaaacccgaagcaaagcctccggagggcgctggagaagccgcagctgcagacaccgcgacagtctcaagacacttaagctggaagcgaatgtggcatttcaaagaggcacgaaatgcaaccggctaggaaggagggattccgccgcacggctgcggcgtccgcgggacagagacgcctaaccggaagagctagcaggaacgccggacgccgctgggaggtgtccggaagcgcggcggaacggcggactacatttcccataagcccgcggggcagggcgaggggcgggcgtcggggacattaccggacaggccttgtccggcaataccaaggtaaatgccggcgccgcggctcagagggaagagtaacttacgatctgcgcctagatttttcctagtaaccctcctaacccatccccctaactgacaaaaacgactcttccatccgggagactttgggatttccgggctacaggactccaccccccacaacctagtcagtcccaccaccaacgttcggcctggggcacttcccaaatgcctaaggacgcagggggttgcgctagtaagttgaaggcccagggcaccccctttctagggttgacgacccgtaaagactcctcattggccccgccctctacgcccagtatcctatttttattttttttttaattattggtttcttaaatagagccagggtatcgccatgttgccaggctcgtcttgaactcctggcctcaagcaatcctccccactcgacctctcaaagtatcgagattacaggcgtgagccactgtgcycggccgtccccatgcccagtctcctattaaatcccgctggaggtgcctggctccctggggctgggtggaaagggtagtgtaggggaagttgccctccgtcccagcccagtttaggagccggcgacctc

SEQ ID NO: 708666 - DNA, 628 bp, Homo sapiens
tttttttgagacggagtcttgctctattgcccaggctggagtgcagtggtgcaatctcagctcactgcaagctatgcctcccgggttcaagcattctcctgcctcagcctcccaagtagctgggactacaggcacccaccactatgccaggccarttttttttttttttttgtatttttagtagagatgggttttcaccgtgttagccaggatggtctcgatctcctgaccttgtgatccacccgccttgtcctccaaagtgctgggattacaggtgtgagccaccgcgcccggccaaagctaagcagatttttaagtgctcagcctctccactaattgagtaaatgtgggattgattggggccacctcacacctgtccacttgggaagcacgtccaaaggaatgcccacatgacagaactagggccagggtggcagtggggacatggtacagccagtgtccttgctgggaatataaattggcaccacctttctgaaacatcgtttagatgtgtggatccagggccacgtaacagagcttctgaaccagaaattcagaatcctgcttctaatgacccatcacaaagaaatgatgagagatgtgctgtctggtttacacagattttcat

SEQ ID NO: 708667 - DNA, 628 bp, Homo sapiens
tttttttgagacggagtcttgctctattgcccaggctggagtgcagtggtgcaatctcagctcactgcaagctatgcctcccgggttcaagcattctcctgcctcagcctcccaagtagctgggactacaggcacccaccactatgccaggccagttttttttttttttttgtatttttagtagagatgggttttcaccgtgttagccaggatggtctcgatctcctgaccttgtgatccacccgccttgtcctccaaagtgctgggattacaggtgtgagccaccgcgcccggccaaagctaagcagatttttaagtgctcagcctctccactaattgagtaaatgtgggattgattggggccacctcacacctgtccacttgggamgcacgtccaaaggaatgcccacatgacagaactagggccagggtggcagtggggacatggtacagccagtgtccttgctgggaatataaattggcaccacctttctgaaacatcgtttagatgtgtggatccagggccacgtaacagagcttctgaaccagaaattcagaatcctgcttctaatgacccatcacaaagaaatgatgagagatgtgctgtctggtttacacagattttcat

SEQ ID NO: 708668 - DNA, 641 bp, Homo sapiens
caaaaattccagaatcaacttatgtcttaaaaaaaagaaatacttgttytcctcacaatggtacttattatttacatttttgaaggactttatggttcatggggcatgccaatcatatcacatctagttgtatagtttctctcaaattttatgatttatgtccaagtagatttgtccataaccttactgtagttcagcaatgtgtctgtctccattgagaattgatttgtacaaaggtctttggcttcctgctgtcagtaaagagaacatataagctccaggaatgattaaggtaaaggctgaagtaagtttttcactttagaaaaatatcaaaacacttcgagattgtgctttcttaaatctcgctatatggactataaaattcaattatcactaacctttcaaccttaaaaattttccaagttagttgaggttaagttggaacttctgactctcaagacactatcatggtcttacctctccatgaatatgcttcctgatcttttattactttctgtttactcagatacaaaactttatattaagaaaccaaacttccattaagtttgcctttatttaatttcattttgagcgcaataaacagccttcaggatagagcatatagacttctgttcttattg

SEQ ID NO: 708669 - DNA, 641 bp, Homo sapiens
caaaaattccagaatcaacttatgtcttaaaaaaaagaaatacttgttttcmtcacaatggtacttattatttacatttttgaaggactttatggttcatggggcatgccaatcatatcacatctagttgtatagtttctctcaaattttatgatttatgtccaagtagatttgtccataaccttactgtagttcagcaatgtgtctgtctccattgagaattgatttgtacaaaggtctttggcttcctgctgtcagtaaagagaacatataagctccaggaatgattaaggtaaaggctgaagtaagtttttcactttagaaaaatatcaaaacacttcgagattgtgctttcttaaatctcgctatatggactataaaattcaattatcactaacctttcaaccttaaaaattttccaagttagttgaggttaagttggaacttctgactctcaagacactatcatggtcttacctctccatgaatatgcttcctgatcttttattactttctgtttactcagatacaaaactttatattaagaaaccaaacttccattaagtttgcctttatttaatttcattttgagcgcaataaacagccttcaggatagagcatatagacttctgttcttattg

SEQ ID NO: 708670 - DNA, 3632 bp, Homo sapiens
aaagccaacaccaacatggccaagagcaagctaatggcaactccaaatcccaccaacatgcaccccacctaggagcacacttacttcatcgctcgggacccctatgacctgatgggggctgctctgatgcctgcatgcccagaggcctgggcccttatcctttgtacaccacagagctgacmccagccatcacccatgctgcgttcacctacccagctgccactaccgttgccgccgccctccatgccaggtgcgctggttcccttcctctgacaccacccagcaaggatggaagtatcgtcagttctgttagttcttcagtctggtcaccggggagttggttctgggaatctgtggtggtgccgggacaggcgccctgagctcccaccgcccccgcccccgggcggcctgtgcagagctgccgctgccccccagaaattgtgaatcctaagcctgacacagtggactccttcctgtttccccttcctcctcttcctcagcccttttctgcacactcaagcctttctccaacgcctcccaggaggatttggggaccttctcgctgaggcgctcagatccagctcggaggatcacttggaccctgcaaggcctgacctcccacccaactttgcttcggtagctcccgctcgaggaaacgaggcgtttaattttgcatgtttcctggcacgaatgaagacgcttacgcttgtgtatatgtgagtgtacagtttgttttcacgctgtcaccatagcaacaggtcctggcccccggtggttcatcctgcctggcctctctctgctcgcctcgcccctgcacccaccacgcttcagggaggcccgagcccccagccccgtggccccacacgcttccagactcagcgcctgcctccacccaacagatagatggcatttgccttttcctttcaaattgggcttctctgctcctatctcctcggatgcgccaacagtcataggaatgccctctctgccgtactgttcacctctccacagtcactctgcctgccgctgctcctcattctttccaaaccttgaatcaaccaaaacgtgaaaagtatttttgtactctgtaacaaaatatttatgcatcgcataaaaaaggcaaccattattgtgatatgttacttacagtgaaagtgtgagggctagaagttcataattcatttttgtttttgttttcgttttttttgaatggagtctcattctgttgcccagctggagtgcaatggtgtgatctcggctcacgccaacctctgcctcccgggttcaagctattctcctgcctcagcctccagagtagctgggactacaggtgcgcaccaccacgcctggctatttttagtagagatggggtttcaccatgttggccagactgatctcgatctcctgacctcaggtgatctgcgtgccttagcctcccacagtgctgggattacaggcatgagtcactgcgcccaacctcacaattcatttttattttaggaatttaaataaagtatgtgatgattctatttcattatgctatggggaacacatattaaaatggctactattaatggtggtgataactaatttattacatcccgtaatgaattataatttactttccaagggttccttctttctgctgctggttgtatttaaattactcaccccctgccaccctctgctatcatttctcaaaaccttaaatatcatcctagatttagagttaccattttagacatgtgctagtccaaagacaattcctttaatccaactagagtttagagtaactgcttgggccctgatgcagtagcacaatttcatttcactaagtccttggctagggacttttcttcctgttccatgttagatgctgctaagtaaccaagagacaaactaggtcctcaaggcatgaataaggaacccagaaaaatactctggataatgtattttttactctagatgtttttcctttcaaatagtttttattttcactttgcttttctctcattataatagtaatacatgtgcattgtagaaaccttgaaaatttgaattttaaattaaatcacaaagaaagaaaaaaaattcacctgtggttttaacactctaagacaaatcctatcaagttttggtatattcccttccaatctcttcctgtacatcaattgatgtttaatgtcaaagtcgatttctcagcatagatggaaacttaaacatctctggttgccttgggaaggaagttggttctgatggcccagaagctcccattcagcctcatcttataatggcctttccatcccattctccagccacaccaaattccaactgctttcctaggtgctgttcaagcatcatcatcattggacattctcccaaggggtatcgtctacacaccctcatccatcctcgttgcttttcttatttgtttggctggtaattttaggtgctgaatttgtggtgggcagattataatatgcatggggcactttctatagcaagggacactcacaatgtggagagtcatcaggaataattagagctactaccattttaatttcagcttacaggtaaattttgtggctctttgaaaaccatagctttattttgtagtctagcaatttcttttattttgagaggtcctaagcacagaggatgaagtgtgcagggtggcgtgatggagtttagagcctcaggcttagctctggaatgacaagcctttcaagagtctaccacctctgaaggaagactgatgcagtccttcctttactatgtatgcctatgtcttctcagttattacactgtattatatttcattgtatacaagcccctttccttgttagacagtgagctccatgagggcaggaccgtgccttgtcattcatgggattttggccttattattttctgttgtactatggttaatttttttgttttgtttttgtgatcattcgtgactaggtatacttcaaaatcctactgtgaaaaaaacccaaaatttccacataatgtttactttttataaacattttaaatagaatcttcccctattagcccatgaaaatatttaagaggcaaaagaagtttaaagtaaaagaatgagtaacttttatagtagaacttgggaaatatttgttgaataaatatagtatgctgcgtgtttatttttaggtggaaatgcaatctgtaagcccactttaaattcttggatctatatatttataattagtaaataatagaagaatgttcacattggtacaaaaggaagagggatctctctctctctctcactgtatcatccatattaatataaaaaagaaggcaatccagacttagtttttctcttcaggaacaatgtaacactaatggaaatctaaatactttacagcaagatagcattacttcacatgtcacttttggatatttcacacctatcaccttttccaaactgacatttatcccaatactttatattgctggtactgtagcaacaaattgtaaaatctcaatcatgtgaccattgtttactcaattctgaatcttaggagatttggagtaatagcttacaagtgagttttttaaaattaagagttagaaaaatcatctcactgagttcccatagaaataaa

SEQ ID NO: 708671 - DNA, 3632 bp, Homo sapiens
aaagccaacaccaacatggccaagagcaagctaatggcaactccaaatcccaccaacatgcaccccacctaggagcacacttacttcatcgctcgggacccctatgacctgatgggggctgctctgatgcctgcatgcccagaggcctgggcccttatcctttgtacaccacagagctgaccccagccatcacccatgctgcgttcacctacccagctgccactaccgttgccgccgccctccatgccaggtgcgctggttcccttcctctgacaccacccagcaaggatggaagtatcgtcagttctgttagttcttcagtctggtcaccggggagttggttctgggaatctgtggtggtgccgggacaggcgccctgagctcccaccgcccccgcccccgggcggcctgtgcagagctgccgctgccccccagaaattgtgaatcctaagcctgacacagtggactccttcctgtttccccttcctcctcttcctcagcccttttctgcacactcaagcctttctccaacgcctcccaggaggatttggggaccttctcgctgaggcgctcagatccagctcggaggatcacttggaccctgcaaggcctgacctcccacccaactttgcttcggtagctcccgctcgaggaaacgaggcgtttaattttgcatgtttcctggcacgaatgaagacgcttacgcttgtgtatatgtgagtgtacagtttgttttcacgctgtcaccatagcaacaggtcctggcccccggtggttcatcctgcctggcctctctctgctcgcctcgcccctgcacccaccacgcttcagggaggcccgagcccccagcyccgtggccccacacgcttccagactcagcgcctgcctccacccaacagatagatggcatttgccttttcctttcaaattgggcttctctgctcctatctcctcggatgcgccaacagtcataggaatgccctctctgccgtactgttcacctctccacagtcactctgcctgccgctgctcctcattctttccaaaccttgaatcaaccaaaacgtgaaaagtatttttgtactctgtaacaaaatatttatgcatcgcataaaaaaggcaaccattattgtgatatgttacttacagtgaaagtgtgagggctagaagttcataattcatttttgtttttgttttcgttttttttgaatggagtctcattctgttgcccagctggagtgcaatggtgtgatctcggctcacgccaacctctgcctcccgggttcaagctattctcctgcctcagcctccagagtagctgggactacaggtgcgcaccaccacgcctggctatttttagtagagatggggtttcaccatgttggccagactgatctcgatctcctgacctcaggtgatctgcgtgccttagcctcccacagtgctgggattacaggcatgagtcactgcgcccaacctcacaattcatttttattttaggaatttaaataaagtatgtgatgattctatttcattatgctatggggaacacatattaaaatggctactattaatggtggtgataactaatttattacatcccgtaatgaattataatttactttccaagggttccttctttctgctgctggttgtatttaaattactcaccccctgccaccctctgctatcatttctcaaaaccttaaatatcatcctagatttagagttaccattttagacatgtgctagtccaaagacaattcctttaatccaactagagtttagagtaactgcttgggccctgatgcagtagcacaatttcatttcactaagtccttggctagggacttttcttcctgttccatgttagatgctgctaagtaaccaagagacaaactaggtcctcaaggcatgaataaggaacccagaaaaatactctggataatgtattttttactctagatgtttttcctttcaaatagtttttattttcactttgcttttctctcattataatagtaatacatgtgcattgtagaaaccttgaaaatttgaattttaaattaaatcacaaagaaagaaaaaaaattcacctgtggttttaacactctaagacaaatcctatcaagttttggtatattcccttccaatctcttcctgtacatcaattgatgtttaatgtcaaagtcgatttctcagcatagatggaaacttaaacatctctggttgccttgggaaggaagttggttctgatggcccagaagctcccattcagcctcatcttataatggcctttccatcccattctccagccacaccaaattccaactgctttcctaggtgctgttcaagcatcatcatcattggacattctcccaaggggtatcgtctacacaccctcatccatcctcgttgcttttcttatttgtttggctggtaattttaggtgctgaatttgtggtgggcagattataatatgcatggggcactttctatagcaagggacactcacaatgtggagagtcatcaggaataattagagctactaccattttaatttcagcttacaggtaaattttgtggctctttgaaaaccatagctttattttgtagtctagcaatttcttttattttgagaggtcctaagcacagaggatgaagtgtgcagggtggcgtgatggagtttagagcctcaggcttagctctggaatgacaagcctttcaagagtctaccacctctgaaggaagactgatgcagtccttcctttactatgtatgcctatgtcttctcagttattacactgtattatatttcattgtatacaagcccctttccttgttagacagtgagctccatgagggcaggaccgtgccttgtcattcatgggattttggccttattattttctgttgtactatggttaatttttttgttttgtttttgtgatcattcgtgactaggtatacttcaaaatcctactgtgaaaaaaacccaaaatttccacataatgtttactttttataaacattttaaatagaatcttcccctattagcccatgaaaatatttaagaggcaaaagaagtttaaagtaaaagaatgagtaacttttatagtagaacttgggaaatatttgttgaataaatatagtatgctgcgtgtttatttttaggtggaaatgcaatctgtaagcccactttaaattcttggatctatatatttataattagtaaataatagaagaatgttcacattggtacaaaaggaagagggatctctctctctctctcactgtatcatccatattaatataaaaaagaaggcaatccagacttagtttttctcttcaggaacaatgtaacactaatggaaatctaaatactttacagcaagatagcattacttcacatgtcacttttggatatttcacacctatcaccttttccaaactgacatttatcccaatactttatattgctggtactgtagcaacaaattgtaaaatctcaatcatgtgaccattgtttactcaattctgaatcttaggagatttggagtaatagcttacaagtgagttttttaaaattaagagttagaaaaatcatctcactgagttcccatagaaataaa

SEQ ID NO: 708672 - DNA, 425 bp, Homo sapiens
ttgaacaacgtgattcagagacatacttatgattaattgaattactatgttgctaagttctttttctgcaggtaaatatcctggaataaccactttccctttcctattcatccatatgcctattgaattgtgaaatatttgtttcttaatacaaaattctgctgtgttcaacacaaagagttataaaacgtgggtgggatttgaaaagccaggtcatattagagagattacacgagtcttggcttgtcrtgtgtatttgccactttaaggacatttagtttattgatgcaattggattttttaattatttttatgacttgctccaatctgtattctgtacagaattgtatatcaaagaaaaggccttgtaggttatttcaaaatgggttgagttctgaaaatgggaaacctaaagtttttgcagt

SEQ ID NO: 708673 - DNA, 560 bp, Homo sapiens
gattcccaaactgggtcctgagcagggccccagggctcagcattcgctgcctggcataaagagggcaccgccagcccatcgtgttggacagggccagaataattgccacggagccttgcacgcccatgtccctcctcgtcgcctccaatgccagaggagccgagcacgtggggaagtggagggtgggcgtgtacgaggcggccgtccccactwgcctgctgagtcactgcgtagtgcactggggcagggaggagagcttggaatcaggtaggaaagagaatcgtttaaccaaatagggctgggttttattaggcaaaagggaccgcagtgttacagaatctgggcaagatgtcactgagggtctcattatctggataaaggcaatgaccagaacaaaataaaaccatttcatgctgtatcccagtgacacaggctgggcctcagtgagttgaggctcctcgataaaccattcataaatgtacggaaggaaatcatgtgaacacgtaggtaaacggaacgactgctcagacagggctcactagacgctgtcccctccctga

SEQ ID NO: 708674 - DNA, 560 bp, Homo sapiens
gattcccaaactgggtcctgagcagggccccagggctcagcattcgctgcctggcataaagagggcaccgccagcccatcgtgttggacagggccagaataattgccacggagccttgcacgcccatgtccctcctcgtcgcctccaatgccagaggagccgagcacgtggggaagtggagggtgggcgtgtacgaggcggccgtccccacttgcctgctgagtcactgcrtagtgcactggggcagggaggagagcttggaatcaggtaggaaagagaatcgtttaaccaaatagggctgggttttattaggcaaaagggaccgcagtgttacagaatctgggcaagatgtcactgagggtctcattatctggataaaggcaatgaccagaacaaaataaaaccatttcatgctgtatcccagtgacacaggctgggcctcagtgagttgaggctcctcgataaaccattcataaatgtacggaaggaaatcatgtgaacacgtaggtaaacggaacgactgctcagacagggctcactagacgctgtcccctccctga

SEQ ID NO: 708675 - DNA, 560 bp, Homo sapiens
gattcccaaactgggtcctgagcagggccccagggctcagcattcgctgcctggcataaagagggcaccgccagcccatcgtgttggacagggccagaataattgccacggagccttgcacgcccatgtccctcctcgtcgcctccaatgccagaggagccgagcacgtggggaagtggagggtgggcgtgtacgaggcggccgtccccacttgcctgctgagtcactgcgtagtgcactggggcagggaggagagcttggaatcaggtaggaaagagaatcgtttaaccaaatagggctgggttttattaggcaaaagggaccgcagtgttacagaatctgggcaagatgtcactgagggtctcattatctggataaaggcaatgaccagaacaaaataaaaccatttcatgctgtatcccagtgacacaggctgggcctcagtgagttgargctcctcgataaaccattcataaatgtacggaaggaaatcatgtgaacacgtaggtaaacggaacgactgctcagacagggctcactagacgctgtcccctccctga

SEQ ID NO: 708676 - DNA, 1281 bp, Homo sapiens
gcatattaaaatacaaggaaagtctatgtgacacaacgggccaaacattaaggaagatcacactgagtgttgctaaacgtgggagccaaactgtttttacattttgattatgtgtccatagataacatgcacccatggaagtagatattaagaaagcaggaaactcaggctagggtacttcccatatgaagtgggcaagtactagacattgggaggtcattgtgttttagaatcactgcacagcaagctgagaaaaaagaaggagaaatagaaggaaggcaaggagagaaggaaggaaaagaggaaggattaaatcagcaacagaacaaaccatgcctaggtgcctcatgcaactactgtttctgccaaaagaatagaaaatgatgagtgctttattttcaataacccatctaacaataatctctgttgtttagccactgggatgatttacacgggaattagcagaaaccctccccatccatgttatctgctgtggatttgcaaaaggaacttaatataaatattctaaaatgagaatgctgtaagaaacataacctatgcacacccaaacctaccatcgaacatagagaaatataaaaaagaattattctcccccgatttcagagtatgcctagtttggtatgaggagggagagttatctatgggtttgtactgttctgctttgttttttttttttgttttgttctgttctgtttttgttttgtgtttcaggagatagcatctgttgagagacttttaaaaattgaaagaatagctaccccaggtttagcagagacacataaaaagctgtctttcctgaatcacaaacagcagtagaaaaaaaaaacaggagaaagtaactaaaaggtcatttcacactcacagcattctgagtttggggttttcctttttcctttggccactacactgcattccatttgtatgttgttttcttgatttagtcaagaaaagcaagcaaatcaaacacaattacttgccygagttcccctagcttagcatcatgagaatctgcagttgtttttaatgcatttgggatgctccttcaggctatcaacaaactctctcctatgtttatgaatttatttactactttggtgttcctactctcttcactcttccagatgggtttcaatggcatctctccaccttccctaccgtatgtaaaagagcacacctgatgttcaccctctgttgttgctctgcattagcacaagaacaaaatgagcaggggcattttataacataagaaacaaaaatact

SEQ ID NO: 708677 - DNA, 1281 bp, Homo sapiens
gcatattaaaatacaaggaaagtctatgtgacacaacgggccaaacattaaggaagatcacactgagtgttgctaaacgtgggagccaaactgtttttacattttgattatgtgtccatagataacatgcacccatggaagtagatattaagaaagcaggaaactcaggctagggtacttcccatatgaagtgggcaagtactagacattgggaggtcattgtgttttagaatcactgcacagcaagctgagaaaaaagaaggagaaatagaaggaaggcaaggagagaaggaaggaaaagaggaaggattaaatcagcaacagaacaaaccatgcctaggtgcctcatgcaactactgtttctgccaaaagaatagaaaatgatgagtgctttattttcaataacccatctaacaataatctctgttgtttagccactgggatgatttacacgggaattagcagaaaccctccccatccatgttatctgctgtggatttgcaaaaggaacttaatataaatattctaaaatgagaatgctgtaagaaacataacctatgcacacccaaacctaccatcgaacatagagaaatataaaaaagaattattctcccccgatttcagagtatgcctagtttggtatgaggagggagagttatctatgggtttgtactgttctgctttgttttttttttttgttttgttctgttctgtttttgttttgtgtttcaggagatagcatctgttgagagacttttaaaaattgaaagaatagctaccccaggtttagcagagacacataaaaagctgtctttcctgaatcacaaacagcagtagaaaaaaaaaacaggagaaagtaactaaaaggtcatttcacactcacagcattctgagtttggggttttcctttttcctttggccactacactgcattccatttgtatgttgttttcttgatttagtcaagaaaagcaagcaaatcaaacacaattacttgcccgagttcccctagcttagcatcatgagaatctgcagttgtttttaatgcatttgggatgctccttcaggctatcaacaaactctctcctatgtttatgaatttatttactactttggtgttcctactctcttcactcttccagatgggtttcaatggcatctctccaccttccctaccktatgtaaaagagcacacctgatgttcaccctctgttgttgctctgcattagcacaagaacaaaatgagcaggggcattttataacataagaaacaaaaatact

SEQ ID NO: 708678 - DNA, 1499 bp, Homo sapiens
ctttataagcaagacagcaccttactacaatggtttcatgtagagaaaatacataatcaaatgaccagtttctatgttctcattcgagggcctgcaaacttctttgtgtgaagggcgacataataaatactttaagctctgtgggtcataatgccacagttgcaactatgtgactctgccaacctatcatgaaagcagctgaagacaaggtgttaacaaatggtgtggctgcattccatcaaaagctacttatagaatttatttacagaaatagagggcaggatatgactggcaggccttcatgttatgaccccttttctggacactgcacatgaattatctcgtttaattttcacagcatctgtgaggtatatacattattattccttatttttaaatgagtatattgaggaatataatgtttaagtatattattcaactataccactatactacttcaactactacaatcaagtagggttatgatttgaaaccatattgtcgtgtccagtttactattataattatttcccttttggtcaagcgtctggattagctaatattaatggaagtccattttattttatctttctctgtgattctcatcaagaatctcctaacttgagattccaaatatctgttccacascagctaaaatgtccacactccggataacagttaagacaaaagggaagaggaagagaaaaggaaaatattacttgctttaatggaattgcctacccgttacatgcagcacttccatttcttcacatgaccacatctgagagagctgggaatagtctttattccaggcatctacatgtcagatgtaagtcacaaattctataactgtgaaagaagggaagaattgaagtaggcgacctgacagactctcatcagacccatgctttatctgcttaatgcactgcgagtgaaaacggaagtgttagctgaaatttgccgagctgctacaagaaatgcattctatgtgagcttaccataggccctgtcatttagtcatcaatactctctgataaaaaaaagagtcttaggtagattaattaatactcccaacttcacatagatggaaaacagcaagttcaagaacaatccagctatgtctgatttctaagttcatataattttcattagattagtaatttttcaacagttagaattgtttaagctaatgtgagagtctgacagaagttaaagtctgtaaaaatcaaacttatatgaacaaaatttatcttaaaccatctgagggcaaagaccctatggaaccaaaatggaacatttattatagagattcttaatgaattatgaaagataaaggtcatctgttccctgggtcttgatcaaatttaagatgacagaaaaatgttagtacatatttttattagaagtagagaggattaaaataaagtcaacaaacaataaaggtgagaaaacatgtcccagggcagtgcataaaagccacctagggatctcattaaagt

SEQ ID NO: 708679 - DNA, 2492 bp, Homo sapiens
ctacagacttgattcagatttccccaattttttacgagtgctctcttctgtacargattcgtttgcatctggcctccttttatttttactaactctgtcctcagaaaaagagatacaggtggtcatctatataaattatctgaatcgtggtgatacatgcaaacaaagacattttggcaccctttaatacatcctgaaactaaccaagagccagttataaatccaatgttaaaataattattggccaggcgcggtggctcacacctgtaatcccagcactttgggaggccgaggtgggcggatcatgaggtcaggagatcgagaccatcctggctaacacggtgaaaccccacctctactaaaaatacaaaaaatcatccgggtatggtgtcacatgcctgtaatcccagctacttgggaggctgtggcaggagaatcacctgaacccaggaggcagagattgcagtgagccgaggtcatgccactgcactccagcctgggcaacagagcgagactccatctcaaaaaataaaaaaagtatttatattttgctagagttagggatctcaaccttagttacactttggaattacctgggacactttataaaataccaatgcctgggacctacccccagaaattccaattgaatcagcttgggtgtgacctcagcttctcagctgattctagcttgcaggcaaatttgaaaacccctgttctagacagcgggcatgttgcagtatttcctgtgctctctccctccagagcaaagaagaaaagctgattctacttcagcgttgaatgttggggtctagcaacgactcatcccaggggcctgtaaagttacagaccatctcccttctagcttccattcctaacagtaggagaacaagcttggaagttcaggtttaatgtttccaggtgtacaaatagggtaactgagattttcatttatcaaacactggcatccatcccttagagaaactcatttttacatttttttttgaaatatttctattgctgttttaagactcaaatttcatttttttcttaattgtgggctgagtgcagtggctcatgcctataatttcagcaatttgggagtccaaagtgggaggatcccttgaagccaggaggagttcaagacgagcctgggcaatagcaagacccccatctctaccacaaaacaaaaaaaaaaaaattgtggctcacacctgtaataccaacactttgggaggctgaggtgggcagataacttgaggtcaggagttccagatcaccctggcaacatggcaaaaccccgtctccactaaaaatacagaaattaaatgggtgtggtagtacatgcttgtaattccagctacttaggaggctgacacacgagcattgcttgaacccaggaggtggaggttgcagtgagccaagatcacgccacgcactccagcctgggtgacagagttagaatctgtctcaaaaaaaaaaaaaattaaaaattagccaggcatggtggtgcacagttgtagtcccaactactgaggaggctgaggcaggaggatcacttgagcccaggagttcaagactgcagtgagctattattgcaccactgcactccagccctggtgacagagtgagacctcgtctcaacaacaaaactaattaaaatcaagaagtagcttgtgagccagggggtggggtgggaatggaagatcccgttatcagaagctatagcctataactaaccaacttttaagctattcagcagaaacagtcaaacacacccaagttgaattaatgattgtcataatctatttaaattttaatttgaatctcctgtcataaattttaagaattgcttgttaaatgctgtaaataagtatcttttgtgattgattttttgggggtttttttttaagaaaaaaaaagccttttaaaagtgtttagaaatatgaggaagaaagaaaagaaacttggttagccattactccaaatttaaaagacaagtatagttagaatttattttcacataccaattaataatatgggctgggcttgagactcacacctgtaatcccaacacgttgggaggctgaggcgggagacttgcttgagcccaagtattgaaggctgcagcaagctatgattgcgccactgctctcctgcctgggcaacagagcaagaccccatctcttaaagaaaaaaaaaagaaagaaaagaaaacgagtagcttttaacctctgatttcatcacaccgcctttgagatttgaagttatattccctttccttcataaaagtttacatacaaaataaatttttgcttacattttacaacactcacagacaccctgcggccaggatgttagtttaagaacctagacagtaaacaattaaggatcttttctttcagcagactgtatcctaattaattgaattgcctgattggtgctgtctggggagtctgatttacccaaactattaaggttaaaatggcctg

SEQ ID NO: 708680 - DNA, 2492 bp, Homo sapiens
ctacagacttgattcagatttccccaattttttacgagtgctctcttctgtacaagattcgtttgcatctggcctccttttatttttactaactctgtcctcagaaaaagagatacaggtggtcatctatataaattatctgaatcgtggtgatacatgcaaacaaagacattttggcascctttaatacatcctgaaactaaccaagagccagttataaatccaatgttaaaataattattggccaggcgcggtggctcacacctgtaatcccagcactttgggaggccgaggtgggcggatcatgaggtcaggagatcgagaccatcctggctaacacggtgaaaccccacctctactaaaaatacaaaaaatcatccgggtatggtgtcacatgcctgtaatcccagctacttgggaggctgtggcaggagaatcacctgaacccaggaggcagagattgcagtgagccgaggtcatgccactgcactccagcctgggcaacagagcgagactccatctcaaaaaataaaaaaagtatttatattttgctagagttagggatctcaaccttagttacactttggaattacctgggacactttataaaataccaatgcctgggacctacccccagaaattccaattgaatcagcttgggtgtgacctcagcttctcagctgattctagcttgcaggcaaatttgaaaacccctgttctagacagcgggcatgttgcagtatttcctgtgctctctccctccagagcaaagaagaaaagctgattctacttcagcgttgaatgttggggtctagcaacgactcatcccaggggcctgtaaagttacagaccatctcccttctagcttccattcctaacagtaggagaacaagcttggaagttcaggtttaatgtttccaggtgtacaaatagggtaactgagattttcatttatcaaacactggcatccatcccttagagaaactcatttttacatttttttttgaaatatttctattgctgttttaagactcaaatttcatttttttcttaattgtgggctgagtgcagtggctcatgcctataatttcagcaatttgggagtccaaagtgggaggatcccttgaagccaggaggagttcaagacgagcctgggcaatagcaagacccccatctctaccacaaaacaaaaaaaaaaaaattgtggctcacacctgtaataccaacactttgggaggctgaggtgggcagataacttgaggtcaggagttccagatcaccctggcaacatggcaaaaccccgtctccactaaaaatacagaaattaaatgggtgtggtagtacatgcttgtaattccagctacttaggaggctgacacacgagcattgcttgaacccaggaggtggaggttgcagtgagccaagatcacgccacgcactccagcctgggtgacagagttagaatctgtctcaaaaaaaaaaaaaattaaaaattagccaggcatggtggtgcacagttgtagtcccaactactgaggaggctgaggcaggaggatcacttgagcccaggagttcaagactgcagtgagctattattgcaccactgcactccagccctggtgacagagtgagacctcgtctcaacaacaaaactaattaaaatcaagaagtagcttgtgagccagggggtggggtgggaatggaagatcccgttatcagaagctatagcctataactaaccaacttttaagctattcagcagaaacagtcaaacacacccaagttgaattaatgattgtcataatctatttaaattttaatttgaatctcctgtcataaattttaagaattgcttgttaaatgctgtaaataagtatcttttgtgattgattttttgggggtttttttttaagaaaaaaaaagccttttaaaagtgtttagaaatatgaggaagaaagaaaagaaacttggttagccattactccaaatttaaaagacaagtatagttagaatttattttcacataccaattaataatatgggctgggcttgagactcacacctgtaatcccaacacgttgggaggctgaggcgggagacttgcttgagcccaagtattgaaggctgcagcaagctatgattgcgccactgctctcctgcctgggcaacagagcaagaccccatctcttaaagaaaaaaaaaagaaagaaaagaaaacgagtagcttttaacctctgatttcatcacaccgcctttgagatttgaagttatattccctttccttcataaaagtttacatacaaaataaatttttgcttacattttacaacactcacagacaccctgcggccaggatgttagtttaagaacctagacagtaaacaattaaggatcttttctttcagcagactgtatcctaattaattgaattgcctgattggtgctgtctggggagtctgatttacccaaactattaaggttaaaatggcctg

SEQ ID NO: 708681 - DNA, 2492 bp, Homo sapiens
ctacagacttgattcagatttccccaattttttacgagtgctctcttctgtacaagattcgtttgcatctggcctccttttatttttactaactctgtcctcagaaaaagagatacaggtggtcatctatataaattatctgaatcgtggtgatacatgcaaacaaagacattttggcaccctttaatacatcctgaaactaaccaagagccagttataaatccaatgttaaaataattattggccaggcgcggtggctcacacctgtaatcccagcactttgggaggccgaggtgggcggatcatgaggtcaggagatcgagaccatcctggctaacacggtgaaaccccacctctactaaaaatacaaaaaatcatccgggtatggtgtcacatgcctgtaatcccagctacttgggaggctgtggcaggagaatcacctgaacccaggaggcagagattgcagtgagcygaggtcatgccactgcactccagcctgggcaacagagcgagactccatctcaaaaaataaaaaaagtatttatattttgctagagttagggatctcaaccttagttacactttggaattacctgggacactttataaaataccaatgcctgggacctacccccagaaattccaattgaatcagcttgggtgtgacctcagcttctcagctgattctagcttgcaggcaaatttgaaaacccctgttctagacagcgggcatgttgcagtatttcctgtgctctctccctccagagcaaagaagaaaagctgattctacttcagcgttgaatgttggggtctagcaacgactcatcccaggggcctgtaaagttacagaccatctcccttctagcttccattcctaacagtaggagaacaagcttggaagttcaggtttaatgtttccaggtgtacaaatagggtaactgagattttcatttatcaaacactggcatccatcccttagagaaactcatttttacatttttttttgaaatatttctattgctgttttaagactcaaatttcatttttttcttaattgtgggctgagtgcagtggctcatgcctataatttcagcaatttgggagtccaaagtgggaggatcccttgaagccaggaggagttcaagacgagcctgggcaatagcaagacccccatctctaccacaaaacaaaaaaaaaaaaattgtggctcacacctgtaataccaacactttgggaggctgaggtgggcagataacttgaggtcaggagttccagatcaccctggcaacatggcaaaaccccgtctccactaaaaatacagaaattaaatgggtgtggtagtacatgcttgtaattccagctacttaggaggctgacacacgagcattgcttgaacccaggaggtggaggttgcagtgagccaagatcacgccacgcactccagcctgggtgacagagttagaatctgtctcaaaaaaaaaaaaaattaaaaattagccaggcatggtggtgcacagttgtagtcccaactactgaggaggctgaggcaggaggatcacttgagcccaggagttcaagactgcagtgagctattattgcaccactgcactccagccctggtgacagagtgagacctcgtctcaacaacaaaactaattaaaatcaagaagtagcttgtgagccagggggtggggtgggaatggaagatcccgttatcagaagctatagcctataactaaccaacttttaagctattcagcagaaacagtcaaacacacccaagttgaattaatgattgtcataatctatttaaattttaatttgaatctcctgtcataaattttaagaattgcttgttaaatgctgtaaataagtatcttttgtgattgattttttgggggtttttttttaagaaaaaaaaagccttttaaaagtgtttagaaatatgaggaagaaagaaaagaaacttggttagccattactccaaatttaaaagacaagtatagttagaatttattttcacataccaattaataatatgggctgggcttgagactcacacctgtaatcccaacacgttgggaggctgaggcgggagacttgcttgagcccaagtattgaaggctgcagcaagctatgattgcgccactgctctcctgcctgggcaacagagcaagaccccatctcttaaagaaaaaaaaaagaaagaaaagaaaacgagtagcttttaacctctgatttcatcacaccgcctttgagatttgaagttatattccctttccttcataaaagtttacatacaaaataaatttttgcttacattttacaacactcacagacaccctgcggccaggatgttagtttaagaacctagacagtaaacaattaaggatcttttctttcagcagactgtatcctaattaattgaattgcctgattggtgctgtctggggagtctgatttacccaaactattaaggttaaaatggcctg

SEQ ID NO: 708682 - DNA, 616 bp, Homo sapiens
gctcagacttagaaatgtgcctgtctaggttttcagagcaacccctttcatcactatctgtgaggaggattcgaactgaaagaagccagaaacagcagtagcagcgtctccactgggatgctccattcataggggagccagagccgcatccattcatggtggggtcagggagtccttttggggcattggttctcgtttctcagcaagctgcacttcccggggggctggcatggctgcatcgttcagaatgaggatgtctattaagaagccgtcgccagagctattattagcacagccatccyttggaaatttcgcagaatacgcctgaatgtacgaacagttactctgctaacagggtactggagaaaaaggcaccaagtcgctcgttacgcacaggcagcccacgcagctttctcggtgcagcaccgggaatcttttctgaattcaacgtgcaccaacatttgagcagctgcctccaatatagaagcactgcatttagccaattttaaatgagcacgtactaaagggggttcccttctgttctcctccccttccgagcgtccgttttctctgcatcaaacttgctgcagccatttggaacgtaaaaagcagtcca

SEQ ID NO: 708683 - DNA, 616 bp, Homo sapiens
gctcagacttagaaatgtgcctgtctaggttttcagagcaacccctttcatcactatctgtgaggaggattcgaactgaaagaagccagaaacagcagtagcagcgtctccactgggatgctccattcataggggagccagagccgcatccattcatggtggggtcagggagtccttttggggcattggttctcgtttctcagcaagctgcacttcccggggggctggcatggctgcatcgttcagaatgaggatgtctattaagaagccgtcgccagagctattattagcacagccatcccttggaaatttcgcagaatacgcctgaatgtacgaacagttactctgctaacagggtactggagaaaaaggcaccaagtcgctcgttacrcacaggcagcccacgcagctttctcggtgcagcaccgggaatcttttctgaattcaacgtgcaccaacatttgagcagctgcctccaatatagaagcactgcatttagccaattttaaatgagcacgtactaaagggggttcccttctgttctcctccccttccgagcgtccgttttctctgcatcaaacttgctgcagccatttggaacgtaaaaagcagtcca

SEQ ID NO: 708684 - DNA, 552 bp, Homo sapiens
cttttctttgctatctggaaataagactttctgtttttgcacaataccacagatccttttaaaatgatgtaaaacaattcattcgtaccttttctaggggcttggtcagcaaaatgccagccatatgtcttgcagactgttctaatgacaagagtctgggctggcctcagacctgctccagtgtagccttgagggcccgtagctcagttatctctgtctgatgacttcaacttgggcttgcctttcagaagggaggcttcttttgttcacagasctcagcccccattgcaggttcgccctggctgctctcccaggcagtacacagggaggggcccatcattgcagagacatctatggagatgtcaagacagtgcctgcgatgaaagggagcgctcattagtgcctttaatgaggcttccccagtttcatttgtggctgaatcagaaactttctgaatcatttaccctgtggcagagcagttttcagacatgagaaaggatagggtccctccatcacaaagaaacctccatgaaaacttgacaccattaaggg

SEQ ID NO: 708685 - DNA, 1053 bp, Homo sapiens
tacaaatatgctaaattaaattcatgtttaaacaaaataaacattggcagcaacagaaaggctgatgcatgaatcaaagactggaacttaaggacattgttggagagcaagaatacagcccccacctcatttcagaagaaatgaatgttcaaattaacatcagctgtgatgaccaactgttttggaaagcaggccagatggtgttcatctttgctctctggtgtgttttaagaggatattattggacttctcagagactactcagtagcaacaattacaaaacatccctgtagctaggtcattccaattatcttctagcaaacatgcaagatactttgaagatttttcactagcccacaatttgtctttgcaatttgtccagaagagttcatatttacatccattaattttacttgagtggcatgctttcaattttgcaaagacatcctttcacatttgagtagctgatcatgcaggggacagagcatagttaacctgccatttgaacaggttagcctggtgatcacatatgtccacaggcaatttagctacatggccgatgacacaattaagacggattagtaaagaaaactgggttgcaaggcaagtagcatttctaaagtttcctaagagaccggtgcaaagaggaaaatcacatgttcatgatgttaactggccaaatttgattaatcatttttagcattaaagcaaaaaagaaaagtccatggtaaatacctcagcccaacatctattacctccccscaccgtttttttgtaagtttaaaaacaaacccaatccaatgaaaattaggagtcctttgcccaatgcttcatcttccatacacaaatcattcttattatggatttttcgtgctacagattttctaaacattggagtcttagagatgctaagtgactaaaattagacatggtttttgactgataatttaacaagtatgctttaagaatgtattaaagtggtcttcaaattatttgagtttaatgcctgctttccgaatcctggaatttggggtagcatatacaaaaggatta

SEQ ID NO: 708686 - DNA, 650 bp, Homo sapiens
atcaaatccttttaatgggctttcaacttgctcgggaggagatctattccaagcataaacacagccttccagagatagtctttttatgttgctcttaaatgtctaataggtattccacatcagctgcgaacttgtgaacccagaagrgatttagaggttttcataagttcagtgcagtatagaacacacacacatatacattaaaagcaaccatagccattgtactatcattgccgtaaaacccactgtctggtatctttatgtgctaaaataaaaaattatttttaaatttacagtgtaaaaatacctacaaaatggatttcagtgactctataaaatcaatagctatccaccttaacataaaaatgtttaggaactgaatggtatgttgttttgtacagttgaatttttcagttagatatgcattttattaccttcatttaagaattctacacaataaacttattcctcaatagcatgaattcttcataatgttgctttttttaaaggcattccaatcttgaaagtgctagctgaaatcctttgttagcccttggaggctagtaatttcacaacttcccaatgaagtatttcaattctcatacttaaattctaatatttaaatctctatttatgtagcagatatgatc

SEQ ID NO: 708687 - DNA, 650 bp, Homo sapiens
atcaaatccttttaatgggctttcaacttgctcgggaggagatctattccaagcataaacacagccttccagagatagtctttttatgttgctcttaaatgtctaataggtattccacatcagctgcgaacttgtgaacccagaagagatttagaggttttcataagttcagtgcagtatagaacacacacacatatacattaaaagcaaccatagccattgtactatcattgccgtaaaacccactgtctggtatctttatgtgctaaaataaaaaattatttttaaatttacagtgtaaaaatacctacaaaatggatttcagtgactctataaaatcaatagctatccaycttaacataaaaatgtttaggaactgaatggtatgttgttttgtacagttgaatttttcagttagatatgcattttattaccttcatttaagaattctacacaataaacttattcctcaatagcatgaattcttcataatgttgctttttttaaaggcattccaatcttgaaagtgctagctgaaatcctttgttagcccttggaggctagtaatttcacaacttcccaatgaagtatttcaattctcatacttaaattctaatatttaaatctctatttatgtagcagatatgatc

SEQ ID NO: 708688 - DNA, 650 bp, Homo sapiens
atcaaatccttttaatgggctttcaacttgctcgggaggagatctattccaagcataaacacagccttccagagatagtctttttatgttgctcttaaatgtctaataggtattccacatcagctgcgaacttgtgaacccagaagagatttagaggttttcataagttcagtgcagtatagaacacacacacatatacattaaaagcaaccatagccattgtactatcattgccgtaaaacccactgtctggtatctttatgtgctaaaataaaaaattatttttaaatttacagtgtaaaaatacctacaaaatggatttcagtgactctataaaatcaatagctatccaccttaacataaaaatgtttaggaactgaatggtatgttgttttgtacagttgaatttttcagttagatatgcattttattaccttcatttaagaattctacacaataaacttattcctcaatagcatgaattcttcataatgttgctttttttaarggcattccaatcttgaaagtgctagctgaaatcctttgttagcccttggaggctagtaatttcacaacttcccaatgaagtatttcaattctcatacttaaattctaatatttaaatctctatttatgtagcagatatgatc

SEQ ID NO: 708689 - DNA, 650 bp, Homo sapiens
atcaaatccttttaatgggctttcaacttgctcgggaggagatctattccaagcataaacacagccttccagagatagtctttttatgttgctcttaaatgtctaataggtattccacatcagctgcgaacttgtgaacccagaagagatttagaggttttcataagttcagtgcagtatagaacacacacacatatacattaaaagcaaccatagccattgtactatcattgccgtaaaacccactgtctggtatctttatgtgctaaaataaaaaattatttttaaatttacagtgtaaaaatacctacaaaatggatttcagtgactctataaaatcaatagctatccaccttaacataaaaatgtttaggaactgaatggtatgttgttttgtacagttgaatttttcagttagatatgcattttattaccttcatttaagaattctacacaataaacttattcctcaatagcatgaattcttcataatgttgctttttttaaaggcattccaatcttgaaagtgctagctgaaatmctttgttagcccttggaggctagtaatttcacaacttcccaatgaagtatttcaattctcatacttaaattctaatatttaaatctctatttatgtagcagatatgatc

SEQ ID NO: 708690 - DNA, 1032 bp, Homo sapiens
tttttctccactgtgccctagttcctacagttttaccaatggaacagtctattttgaatgcttcttatgaatgttcaggcaactggaccccaactgaataccagagcttccccytcctgcattaaccagtgccccgacattggtcagcagattaggttatacccaatccagctctttctagagtttaattactaggagctggggtccaatcaaccctgtgatttctgtttcctgcctgggaagaaatcctggggagaggggacttggaacttagtacttaatctatttccctccacacttctgaaactattttttcactaggctagatcagatctccctgtcactctggcccctacgtcactgtccctcttacctccatgtatccctagagctaattcctgctataccttagttcaaagttgatcagatttttggtcctcccctcaagcttcattgtctaaccaatttccctaaaacccaggaattctcccaagtgtttctgccatgaatgcaacttttccatgggcccaagcatgctctacagcttggtggtttaaactaatactttcctagaaacttaatagggtaagagctacctatttccagcttgtcctgccaagtaaaaggagaggcagcttaccaggctgatatctgctgggtggatatctgctgggtgggtctcttccttaccagaagtttctttgtctatgccaaggtaccagtagtgatagaaaaagtggggatatcagttctaaattccaccttgtatcttgggacctattttattgccaggctcattttctgtgatttgggccttatttacttcttagcatccctgtttttgagggtcttttggaatggcttagaattaacttgtcttatgtttgacaactgccctgtctctgtattcacttctaaaatcttacccacatttattattcctggaattagagaaagtcctcataccaattctgatctaaatggtctatgccgttgcttggatagggtctctgatatggcatttttgtttga

SEQ ID NO: 708691 - DNA, 595 bp, Homo sapiens
tccttcagccccagacagggcaggggtggcactgtccttcagccccagacagggcaggggtggcactgtccttcagccccagacagggcaggggtggcactgtccttcagccccagacagggaaggggtggcactgtmcttcagccccagacagggcaggggtggcactgtacttcagccccagacagggcaggggtggcactgtccttcagccccagacagggcaggggtggcactgtacttcagccccagacagggcaggggtgggaccgtacttcagccccagtatgatcccatgacagttggtttgcggacgctggacacaacgcaaacattgaaggatgtggccaaatgcagcggggttggggggatagggaatacctcgggcacagaccagtgtccctgggcccaggacaaggccagaggcacccagtgagccccaggcctctcactctcagcctgcccttcagaaacactttcatgaaaaatacagtgcatcctattggtcattttcacttatcttggggtggaaacatctgtcaaaggtgaaaggacagaagagtgggacttctttttccaactatgtctagaaaaa

SEQ ID NO: 708692 - DNA, 595 bp, Homo sapiens
tccttcagccccagacagggcaggggtggcactgtccttcagccccagacagggcaggggtggcactgtccttcagccccagacagggcaggggtggcactgtccttcagccccagacagggaaggggtggcactgtccttcagccccagacagggcaggggtggcactgtacttcagccccagacagggcaggggtggcactgtccttcagccccagacagggcaggggtggcactgtmcttcagccccagacagggcaggggtgggaccgtacttcagccccagtatgatcccatgacagttggtttgcggacgctggacacaacgcaaacattgaaggatgtggccaaatgcagcggggttggggggatagggaatacctcgggcacagaccagtgtccctgggcccaggacaaggccagaggcacccagtgagccccaggcctctcactctcagcctgcccttcagaaacactttcatgaaaaatacagtgcatcctattggtcattttcacttatcttggggtggaaacatctgtcaaaggtgaaaggacagaagagtgggacttctttttccaactatgtctagaaaaa

SEQ ID NO: 708693 - DNA, 657 bp, Homo sapiens
ctccaaaaaaaaaaaaaattagctggatgtggtggtgggtgcctgtagtcccagctactcggcaggctgaggcatgagaatcacttgaacccagggggtggaggttgcagagagccgagatcgccccactgcactccagcctgggtgacagagcaagacttcwtctcaaaaaaaaaaaaaaaaaaaacctttgaggtaagggaaaccgatgcccctccttgttgagagattgaagccacattcataagccaaggttagaattatggtaggggattggactttgctaaagaataagcagagttcactaatgacctgccattgcttagcgtgttttcctgtaagttgttgacttccccagagtcaaataactgggggttgcaagatttataacttccccaactactcctatagataacatcactattgtgaaacctgaaaactggtctttgaaatatttttcagatttcaaattttggcagaccaagagatgccaccttgtcctgataccctcaccccaaccttggcccccacctcctgaggactgactcagctgtgtgaaaacagttttagatgcctctgtgatttcatccccagtcactcaattgttcccattccccagccccctgcccaccaaagtactcttaaaaatccaggcct

SEQ ID NO: 708694 - DNA, 1154 bp, Homo sapiens
gagataaaggtaaataagacttgcccttgccttcatgagctcctgatctctgttcatcacagtgtgcaagctggatggtctttaaatcaaaacacatattatccttattgcgcgaagacgacagcctgtataatgaataggcaagatagctctcctctctgacttcgataggagtccctcattacacacccccgggccggggtgggagaataaggtagtgtggttccctagaagagacacatttgtcttcaccactgaagcctcagttttctcatttcaaaagtagagatgatagtatacatcctacccctcgtggtggtttgtgagaattaagtaagatagcacatagagcacacagcaagtgttctctaaatactgttattcttaaccttcttggcttgtcgttcgagtcccgcacagtctggctgttgtccttgcttcgcctcttgcaactcagtttgtccaaaaggtctgccttacctccgaaagtctctaaagggccagctcaggttcaccacccaagctatgtaacccaaataggacaggttgctcaaacttctggtattgagcagatccacctccctgccctgtgctgaaggcctgggacggggacgggaattgctgctcctttttggatctccaatgcttggcccttggaagaaacacaaatatttgaagaaatcaaagatggaacctgagtgccttaggagatcccggtcaggaaaaagtgtaatagttaggaaagtccaaaaattcttctagagggagttacagtcaagttttgcaaggggagtgagctgttcatgggcccagggtggcagaggacacacatgcaaaggcacattgtcccggtatggtgaagtgtggcactcacagctgtctgagggacagcaggtcgtccagttgactccaagcttgataacgcgtgtaggggccgtgaggccggcgcaggaggcctgggtcttttcatgtgggttagtcccttaraagtaaacaggctgcctcagttggcttctcccctctggtcagttgtagcactctgaggcactcagtctggcaggaagagggcagcccccaggtgccagtctcaggacattgctttatagctgtgcctcagtttccttatttctgaaataatttataaaataagttat

SEQ ID NO: 708695 - DNA, 2082 bp, Homo sapiens
cagtaacttcaaaatgatttactctttaccggggtagtaccattagtgactccaagtaatcctctgatacttttcttgttaaagaaattaagtatacataacatttacacccattttatccctgttgggggcagtccacgacccccaggaatatgcatgctgggtaaaaaaggtgcactgtaaatattggaaaaagaatgctacctgatttgatgcattgaaatattgacttgtagctaattgtttgcaaatggttttatttgtatatgttcagtttcctgcctcctcatcaaccagatattaaaggttagggtcattcattcatttgtgcattcagcaaacatttattaagcctctattatgtgccaagcatttgcttggtgcagggaatacagaggtaaatgacacaggccctgatcgccctgatctaggagtgcccaaagactgatgggggagatacttgaaggacagtgaggttgatgaggatgatgttcaaggattttcacaggatgtcgcagtacacaggggtcgaatatataacaatacagagagggctccctagcctgtagggatgtgtgggtactagaacttagctaagggaggagaggaagaaaatatttcaggcaaaggcaactaaatgtgtagggcaatgacttcctagcaccctcagggtgccaagggataaagtggccaggggccatgccctcagcacaccccctacaggccactcccaataaatctacatccatttaaaaatactaggcctaatatgctggctggctggatgccccttgttagtgtatgtgcagcaccctgcctttcccacagcatttatcccactgcctgtggctgccagcatccttgtcagtgtcccccattggactattagctcatgatgtagggatgattctgtcttgcccaatattgtaataccagtgcccagcacagtgtgccgttccagtaagtgctcaataaaacatgtgttcaatgaatgaatgaatgaatgaaaataaataaataaataaataaataaataaataaatggaggtaaaagcaacaagttcaaggactcccaagtcacttagcacctggattcatttatattccttttatgttcttttaatattatctaatgtgtagactctggatatagccagtgtccaatatacaattttaatgaattatgatccatcgactgggaacaccagacccatggcctaggccttaactaagagctgggagacctctcatcttccctctcctgccaacagggtccatatgacaatcattacttgtgggatgaacctatgaggttaataattatattcttctcaacatgacaaactgccattgtcttttatgtttagctttcaaaataaaacttagaggaattaagaacaatattatacaatcatggataacatcaatgcagtaattaaagggtaggttaaaaattctctacttcaatattttctacccattccaagcagctaactaatagatattttaatgaagtaaatatattatttattagtttgtaacattcagactatagggttgataataccacagtctagagaagtgcaaccttaaggcagagatgatgaaagattccataattgttaaatcctaggacttccatttactttttgtaaatccctgggcaagttacttattctctctgagcatttcttcatttgtaaaatggaaacagtaatacctcacctacttaccttaaccagagctattctggagatcagatgacacaatgaaagtcaagacattttatgaaccacaaagtgctatactagtatgaagaattattattagttatttgctggatcatattcttacaaaaaagaaatgtgaatagtaatacaggattcaaaattgctagatttctagagacacggcgtggtagataaagtgcccttctgcaacccttcttytaccaacccagacctaaagactaaagagatgggaaaattgatagccttctagaaacttcgcttagccatctgcagcagtaaaccaagacagtgtaactatttgactgaaggcttggaaacactcaaaactctg

SEQ ID NO: 708696 - DNA, 594 bp, Homo sapiens
ttagataaaaataaaatttagaggtagttgtagatttttcataatgtaagtaactccaagagataacgccagcactttgggaggccaaggcaggaggatctcttgaggctaggagttcragaccagcctgggcaacacagtgagaccccatctctacaaaaaattagccaagtgtgatggtgtgcacttgtagttccagctatttgggaggctgaggtgggaggatctcttgagccctggagtttgaggttgacagtgagctatgactgcacctctgcactccagcctgggtgacagagcaagaccctgtctctgttcaaacaaacggacaaacaaagactgatactgtaatttggctaggcttcgaccaagccatcattcagaaaacagttttctggaactaaaagtcgccatgctcgtagttggcttgagtgatcacagcaaaatatacataaataaaaataattcacattccccacaagagatattctccatgaagaagccaccgaattaagcaggacgaaggattttcatttgagaaccttgataaacacagatagggagggacattttctagttctgctttcacagtgc

SEQ ID NO: 708697 - DNA, 594 bp, Homo sapiens
ttagataaaaataaaatttagaggtagttgtagatttttcataatgtaagtaactccaagagataacgccagcactttgggaggccaaggcaggaggatctcttgaggctaggagttcgagaccagcctgggcaacacagtgagaccccatctctacaaaaaattagccaagtgtgatggtgtgcacttgtagttccagctatttgggaggctgaggtgggaggatctcttgagccctggagtttgaggttgacagtgagctatgactgcacctctgcactccagcctgggtgacagagcaagaccctgtctctgttcaaacaaacggacaaacaaagactgatactgtaatttggctaggcttcgaccaagccatcattcagaaaacagttttctgraactaaaagtcgccatgctcgtagttggcttgagtgatcacagcaaaatatacataaataaaaataattcacattccccacaagagatattctccatgaagaagccaccgaattaagcaggacgaaggattttcatttgagaaccttgataaacacagatagggagggacattttctagttctgctttcacagtgc

SEQ ID NO: 708698 - DNA, 951 bp, Homo sapiens
ctttcacagcagcctgcaagctctgcaatctgcatagagaggggcatttgtcatcattagctgagctgtgacagctggcacccagggtgtcccagaatcaagaagtggcagagacactcttggtttaggttgccattaagtatagtaggtttcttgaggatcaagtatattttacgaaaagctttgcgatgtaactaacagtagtgaacatatttgaattttccataacatggataatacaacgatagcacataattagcaggttgcctctagacaacaagatgccagattatagtatgaataaacatctactgcctgccacttagagaggtagaattgttttcagtaccctaacagctccagcagagtggttttttcagggctgggtgattaattaagtatattgaaggaaataggttaaagatggagaggacagttctcagatatattttaaatttggttgtaaataatacataacttcccaagaattagctaaactgtacacatccaatatagcacccatcttttttcataatatgaatatgaaaattaaagtaattcatatagatgcagtcttccaattggctgaagtgtacgtaattggtaatatgtatttaaaaatattccttggcaaaagttcaaaatcaaaatcttcttaccaaatgggtgctactatgagtctgaaacagttgtggtaagtatatctagaaaagaagttttaaaactttaaaatgttataaatatgtcttttagatcttaatgtaaaactatttatcaaaagaaagtttaaattatacaggttgatcagacttttgaaaatttagaatactaccacccctctaaagtcatcaatgcttggaaacataatcamtaacaggggttttatattattatgtaaactagttttccacaaataaaactaatttttgtgttaatgtaaaatctatgcaa

SEQ ID NO: 708699 - DNA, 622 bp, Homo sapiens
ttagaattatgctccaagctattgaacagtttgatagttcgctttctgatttttatatttttgcatcttatagatcttgcacatttcccatagaagtgcacactaaagttgctcttgtaaatygctaactattcataatatttttgttactatctgaagtgagtttatccagttttgcttgctgaggttcttttgagtcagccctgattaaacacacacacatacacaccactcacacacacgctccccttcccttttttatacaactctgatatatgtctcttaggttattttcttggggccattctgttattctcccaaattttaaagaattccaatgataataaagcagaaggtcatgtctagctttataactatttgtatttttcaatgaaattgatatgtaccttgaaaaaatgttaacatgtctggaaatgactactcctcgtgttctttatgttgcagttgggttgcatatgagaagcctggatttaccggtcatcagtatttgctagaagaaggagaatacagggactggaaagcctggggaggttacaatggagagcttcagtctttacgacctatattaggtgtaagtaaaggacaagctattggctaatac

SEQ ID NO: 708700 - DNA, 695 bp, Homo sapiens
ggctggtctcgaacgcctgacctcaggtgatccacctgcctcggcctcccaaagtgctgggattacaggagtgagccaccgtacctggccagaaaaatttattttatatggagaccaaatctactacctcagctcccatctgtgtggcaggtgacctgtgtttttttcaaatttccttcccagctccccagtccctatcaagacttagcttttctatggcttactctttttttgttttttgttttttgtttttctgagatggagtcttgctctgttgcccaggctggagtgcagtggcatggcctcggctcactgcaacctcctcctcccaggttcaagcaattctcccgcctcagcctcccaagtagccgggattacatgtgtgcaccaccatgcctggctagttttttgtatttttagtagagatggggtttcaccatgttggccaggctggtctcgaactcctggcctcaggtgatccacctgcytcggcctcccaaagtgctaggattacaggcatgagccactgcgtctggtctgaaacatatagtttaaatgtgtgaatttcataatatgtgaatatataagtatttatttacatatatatattttatatatatataacatatatattatatataagtatttacttacatgtaagtatggtatgtaagtaaaactgttaaaaacattaa

SEQ ID NO: 708701 - DNA, 695 bp, Homo sapiens
ggctggtctcgaacgcctgacctcaggtgatccacctgcctcggcctcccaaagtgctgggattacaggagtgagccaccgtacctggccagaaaaatttattttatatggagaccaaatctactacctcagctcccatctgtgtggcaggtgacctgtgtttttttcaaatttccttcccagctccccagtccctatcaagacttagcttttctatggcttactctttttttgttttttgttttttgtttttctgagatggagtcttgctctgttgcccaggctggagtgcagtggcatggcctcggctcactgcaacctcctcctcccaggttcaagcaattctcccgcctcagcctcccaagtagccgggattacatgtgtgcaccaccatgcctggctagttttttgtatttttagtagagatggggtttcaccatgttggccaggctggtctcgaactcctggcctcaggtgatccacctgcctcggcctcccaaaktgctaggattacaggcatgagccactgcgtctggtctgaaacatatagtttaaatgtgtgaatttcataatatgtgaatatataagtatttatttacatatatatattttatatatatataacatatatattatatataagtatttacttacatgtaagtatggtatgtaagtaaaactgttaaaaacattaa

SEQ ID NO: 708702 - DNA, 1738 bp, Homo sapiens
  misc_feature 824, 825, 826, 827, 828, 829, 830, 831, 832, 833, 834, 835,836, 837, 838, 839, 840, 841, 842, 843, 844, 845, 846, 847,848, 849, 850, 851, 852, 853, 854, 855, 856, 857, 858, 859,860, 861, 862, 863, 864, 865, 866, 867, 868, 869, 870: n = A,T,C or G
  misc_feature 871, 872, 873, 874, 875, 876, 877, 878, 879, 880, 881, 882,883, 884, 885, 886, 887, 888, 889, 890, 891, 892, 893, 894,895, 896, 897, 898, 899, 900, 901, 902, 903, 904, 905, 906,907, 908, 909, 910, 911, 912, 913, 914, 915, 916, 917: n = A,T,C or G
  misc_feature 918, 919, 920, 921, 922, 923: n = A,T,C or G
cgttgcttaaatttgctccagattgagacacaaaccaaaggcggcaagaaaccctgaaggggaggtttaatgatgagcaacacatataaaaccatccgcacgctttcatctgccaaaggctccaaaccagccatgtaaatgagcccatgtgcccagacccggacagaggctggcaatgggcctggaagaaacaggacctccctggcttctctctcctgggggtctgtgtttgggttgcatggggcactgtgccattagagacacaggggcttatctacctcatggagcagctgtagttagagggagtagctggtagtagagcagaaaagcagcctggtgtcttggaagctgagccagaggtcaggagaagtgggtcactgctctctggatggagtgattgatccaaccagagccaaccaatacagttgtgcaggttacctggagcctgggcccagtgggtgctgacatccagctcatctcctactcaccacgccttgctccttgctgtagagctgcacccactatgaggagggagaacctttttctgacttgaacaagggagtcacatggccttgcttggaggctgacagtgtgcgtatggcgtgagtgggagggatggggctgcattcttctttttcttagaacacagaggtgttgtttgggcaagtggtagcctagaactgaaccagtagatactggggatgcaaacctgaacaagactctcattcaaagagctcacagtaccttgaggaagcagacagatatacagagtattctaacacgtggggacaaggtgtacagagacatctctatagggtacccannnnnnnnnnnnnnnnnnnnnnnnnnnnnnnnnnnnnnnnnnnnnnnnnnnnnnnnnnnnnnnnnnnnnnnnnnnnnnnnnnnnnnnnnnnnnnnnnnnncatacggttttatttatattgtttagtggctaaggaaggttaaatgaaatctgttcaatttattttttgtatttgcatagtaacgtaattatcaattctccttcagtatgcatgcaatgcattgattcataattaattgattcccctttccacaatatcatcttccagtgctttcagaggatagaaatgtccactaatgcttaargtgttctacttttttttccttcattttacggttacttccccatcagcatttcacctttttctagcacttttatccaaatcatagattttctatcactgtcaatatttgtattagtctgttctcacactgctaataaagacatacccgagactggtaatttataaaggaaagaggtttaatgaacccacagttacacgtagctggggaggcctgacaattatgggggaaggtgaaggggaagcaagacacgtcttacatggtagcaagcaagagagcttgtgcaggggacaagctctcatgagacttattcactatcatgaataaaacaatcagatctcgtgagacttatacactatcatgagaacagcagaggaaagatccacccccatgattcagttgcctcccactgtgtccctttcacaacacatgggaattatgggagctacaattcaagatgagatttgggtgaggacacagccaaaccatatcattctgcccctggcccctcccaaatctcatgtcctcacattccaaaatgaatcatgccttcccaaagtcttaactcattcagcattaactcagaagtctacagttcaatgtctcatctggg

SEQ ID NO: 708703 - DNA, 654 bp, Homo sapiens
  misc_feature 143, 144, 145, 146, 147, 148, 149, 150, 151, 152, 153, 154,155, 156, 157, 158, 159, 160, 161, 162, 163, 164, 165, 166,167, 168, 169, 170, 171, 172, 173, 174, 175, 176, 177, 178,179, 180, 181, 182, 183, 184, 185, 186, 187, 188, 189: n = A,T,C or G
  misc_feature 190, 191, 192, 193, 194, 195, 196, 197, 198, 199, 200, 201,202, 203, 204, 205, 206, 207, 208, 209, 210, 211, 212, 213,214, 215, 216, 217, 218, 219, 220, 221, 222, 223, 224, 225,226, 227, 228, 229, 230, 231, 232, 233, 234, 235, 236: n = A,T,C or G
  misc_feature 237, 238, 239, 240, 241, 242: n = A,T,C or G
tgcattttatctgttttgtgttaggtatgaaattagtttaggctaagattcaggagaaaaaaatagaataatgtttacacattgttaaacattagtattcatactaaatgggattttatgtgcaggtaactaaagcctaccannnnnnnnnnnnnnnnnnnnnnnnnnnnnnnnnnnnnnnnnnnnnnnnnnnnnnnnnnnnnnnnnnnnnnnnnnnnnnnnnnnnnnnnnnnnnnnnnnnntcctgggttcaagcaattctctgcctcagcctactgagtagctgggattacaggcacccgccaccacacccagctaatttttgtatttttagtagagacacggtttcaccatcttggccaggctggtcttgaactcctgacctcgtgatccacccgcctcggcctcccaaagtgctgggattacaggcatgagcccctacgcccggctgtcttttaaaaaatatacattcatctatcttatactacatgtctcaytatatttatcataattgcagttttacattgtatgtgtggttattagtgtcccctatgatgctgacaacttaataaagtaagatgaaaagcaatgtggtataattacagcaacaagtgcagacttcaaatattgtcagagcatgcatctttgattttg

SEQ ID NO: 708704 - DNA, 3090 bp, Homo sapiens
atcttgttaagatgcaggctgataaaataggcttggggccatgccaacattccgcctctctagctagctcccaggtgatgatgctgatgatgttggtccacagaccacacgttgagtatggagatttcataacagcacatgcccagtggcttatccaatataacaaaaagcatcagtccctggcatgagttcctgatgaggacagactaaggacctcatataggagcacgtgggaaagtttaagaatttggaaagaagcattgaaaagtcacaattctacctactctagaataactcctgtggtaagctgaaggcactggagagtgaggggttgagcaggtggaatttcttcaaccattattgagaaatagccttgtgcaaggcttgacaaagtatggtctgtgggccaaatacagcctactatctgcttttaaaaataaagttttggcccggcaaggtggttcacacctgtaatcccagcactttgggaggccgatgcgggcggatcacctgaggtcaggagtttgagactagcctgagcaacctggtgaaaccccatttctactaaaatacaaagattagccatgtgcctgtaatctcagctactctggaggctgaggcaggagaattgcttgggcctggcaggtggaagttgcagtgagccaagatcgcaccactgcactccagcctgggtgatagagctagactccatcccaaaaataaatacatacatacatacatacataaagttttaggccaggtgcagtggctcatgcctgttatcccagcagcttgggaggccaagacaggaggattgcttgaggccaggagtccaagaccagcctgggcaacatagcaagaccttatctctacaaacaataaaattagttgggaatggtggcacgtgcctgtggtcccagctacttgggaggctgaggtgggagaatcacttgaacctgggagatagaggctgcagtgagccatgattgcaccattgcgctctagcccgggcaacagagtgagaccccgtctcaaaaaacaaaaaaaaaaccccaaaataaagtgttattggggcacagccaggcctatttgtttacagattgtttatcactgtttttctactacaacagcagaagcatgcagtcacaacagagacccccacagcccacgtgtctggccttttacagaaaaagttgcataggggcttgcttgggttttgtaggcagcaaggttgattttttttctcaacttagtgtaccagatgtgtcatcttgagaagtaacccagttccctcaactgtaaaatgggatcatgataataatatcaaaatacccactttatagtgtttacaaaattcaacaatgcttatacatccttatcacaggattcccaaaattcgagctgtaactttagttataatgatgacagagggccccagagtcatcatcatgcacctttctttgcatttaaatctgttttggagagatgatgttaaaaatatttaacaacagaatgtcggggcactgtccaacagagaggctgccgtattgtggcagggtctcagaggccctgctgagccaagtgttaccacttctttggctatatagttgttaaatattttaaagattatttttggcccaatttatattaaccccagtcaggaaaggggaccctgtaagcggtccaggaagagggttcaaattttttctactgaaattataatcaccataatcccaacacgctgtcttccacaagaacggttagatcggggatgggtcatttggctgatctgataaagggattctgggtacagggagttgaagtcactgggtgacgactctctgtaactcagtggtttgatgtgcccatggggccagggacctatttctggattcactgacgtattcgactgttactactgagtacctacgtacaaggcactttggagggaaaacttatctcaaagggcttcccaccttccacgggggtcaccaatagttgtccccagaagtttcttgtttgacctgcacagtattttttttaatttagaaaaatattttaaaatctggagatttcatttaaaacttcaggtttttaacctctttggagaaataaaaccaaagacctcagaatcttttttgacactgggcccacattcctcccacctggccacattctgctgggacagcccctgccctatttagacaragaatgagctctctgagtcaccaccgccgtcacccacccttcctgatgtcacacagccaagctccctcaattatgtcacagacacacagggatgtagtggcgagggagggctctggggtggatgggtgacacttcttactatgtgcccttgggcaagttactgaatccccctgtgcctgagtttcttcccctgaaaaatggacataattaagagtccttatcgtatatgtttgttgtaaagatttaaaagggtaataagaacaaagtgcttagaacagtccttggcacacagtaaatgctgaataaacaggcctccttctcctatattctcctgtaagattctaggagatgagggcaatttggaacagcctgtcttgctaggtcatttgcctcaaccatgaaatgtaaactgagtatttggaaaacaccttcgatggtgccagttcagagaagggtccttggggtttctcccatagtctctgccccatcctgttcatgggccccaaatacaaacagcatttgtatacgaatagcactcagaggggaggaagcaaggcagacagaagcaggtccttctcttctcttggcagaattgccaaggagtctcccggaggccacatgcaacgcactacggagaaagaaccctgggctcatggtaacgagcccactcccctggagtcagacaccaccagcaaactgacttgggggaaaacatccaggaaaaaagcctagatgaccagtgttacacatcaactaatctgtgattcatacatattcagaaggaaagtgagtgaaaaaccggcgtttcaggcagctttacattttcaaattaagttaataaaataagatttccaatgtaatgacaaattaattcttcttttc

SEQ ID NO: 708705 - DNA, 1671 bp, Homo sapiens
attttgcctactacttaatttgatttttgcaaaatccctgagtggtagatatgcttatgtccatttcacaagcaagcaaaatagctaggaaatatcatatactttccaaaatatgataaaaactcatctaagatttaaatctgggtcagcctgaacccagatcccatgttttttgtttgtttgtttttttatgacatcatgtgatttgcttttgtgaaatgattaaccatccagctatcttaagtcctatgaatttctacatcttttgctttacaagaagaaggaaaaggaggaggagggagaaaagaaggacaaggaagataagaggatcaagaggatgaagaggagagataaagagaaggagagagaggtatgtgtttgtattagaatccatatcatgtgcaacaaagtaatgtgaatatcatcttattttacattaataagcaattaacatcaattacattttgattcagatgtttttgaatctttgatttagggttgaagatcattggtaaattacaccaattcattcatttaaaaattttccctatggagtaatgtttatggtgatatataactaaatgaatatagattatatttgagacatcaaaggacaccagtgtgtgctgcattagtggagattttattcattggaaaaagacataagccaactcaggctttcagcaaacatttgaaaagactggcacaaagatttggaggcaacggcttaaaacaggacttagaaccaaaacaggtgtgcagatatagccagcggttgaatttctggcagtgagaaacgaggtaaggatttaggtgcaggaactaggttgaaggtcaatgagtgaaccacagcaaaaatgataactgaatcactgggtagcaggattaaagctccttatattctccctcacaaaaggaatgaagagatttatagaatgacgaagacttggcaaaccttgagggctccaaagtatgttggataactgatccaagatcaacaaactgggctgttccttacagaagtgattatattctccatttgcctatggcccaaaccaattgcaatgtttattttgggttaacatagattatagcataagactctattatggaaaacacaaagattatatcactgcaatcaataatttttcttttacctgacttctacaaaatttgtgaatttctacacaattttgaacacctttctctagatctctaatttattttctggatatgttgaaccccttgcctaaatgcaactgaggcaaacttttttttccttttactcagatataccaaagaagcaaatgcattgtgaactcttccccttttttactgagtttcattttctttgtctttctttttctttttcttttttttaagaccttgtagcagtttaatcatatgcctttggaagttctccagcacacttgtaaaaggaaatgacaagcatctagaataatttatccctttagaagagaaaaacgctatttctttagttccatcaactaagctttgactccacaaatttaggcattgtcaatagagagaaatttcatcatctcctcctaacctctctaccataaactatattttctcttttatacctgatagaaaattatctgactttatgtatatcagtgattatatatatatatatatatatwtata

SEQ ID NO: 708706 - DNA, 570 bp, Homo sapiens
taatgcttacaaatgaatagaccaataaaatggagtagwatgttcacagatagctgtatcctaaattaataaagagaaaatggattatgctacattaagacatcattttttacatataagcttagcaaaaaatccaagctatatagcacattctgtaagactatgggaaaaacagtccctcaaattttgctggtaggtatttaggtgactacgacatttgtgaaacgccattggcaattttttttttttttttttttttggcttggagagatgtgtttttttctgatatttgacaaagattgtgtttttggtttggtcgtcatcttcataaatttacataatatttctcacattctactacattggatattaatttcttagtttgctactatgcacaacaatatagtgtttcttattctctgtcctcatcatttcctttgtaacccaatatcattcattatttgtactttttaagtatttaccctgtgtcatagcttctctttgaccctccagatgtgttcttcatcctgtcctactctgatctctgcccaggaggccgacctgtgtgga

SEQ ID NO: 708707 - DNA, 1372 bp, Homo sapiens
ttgtttttattgcttagtttttgctatgtcgtcaaaaaccttgtatatttctcattggacatgaattaataatgctttacctgcaacacaaagaactattaaagtgataaaaagacaatgagtgtatttcagctctccaataaaaaacaaaaacccactcctcctcgccactagactattaaatgctgaagaaatccacaggctctctgcaaagaaggtcacatatgagtctgttaaataaataagttaattaaaccttgacattctaaaacaattctgaaaagttctaattaatttttaaacaatattgaaataatgatttcatatctcacattcatttaaagtagtgtaacccaatcaatcccacacacagtatgccacaataagctgctgattttctaatkgttagaaacacagttcattggtctgaatagtaatcatgatagcttgcggggaggggaaccactgagggtttatagaagtgatcagaatctttaatgactttattgactccctaagtatttgctttgtttcttccttgataatatattgaggcccagaaactaatatattcaagtgcattgttttttaaagccggtgtttacttcaagtattggattggctcttttgactggagagatttttccagttcaataaaacggtttggattttttttcccatggaattctcaattatgtctccatcctcccctcacataactgtacaggtgtatgataaaaccagttcttaatcactggtaaagattcatcgctttattgtagtgtccattgctgctgctgtttattctgttgttggtatgttttaatgctggatgtttaaatgaaattgtgtgcttgggcaaagttacaagagaggtggtggggaatagtagagagtgagctgaatctggttggagcccagaggcctgagctcaaggccagtgatctttctaaaatgtattgctgcccttgagactatcttgcttatctacagcagagtttctaaccacctgggtgagatttcctgatgtgctggttaaaaaggcagacccaaggagctccattccaacctattgagtcagattctctggggatggtgtccacatacttgcattttaaacaagattcaggccttcatattaaagtctgaggacctgacctatatgataaagtctaagtttcttggcacatcaatgacagcccttccagagctgttatctctcatctctcaccattcccactaacagtgatcagtaaggaaacatatgcatttttctccacatcatactgtttcaggatcagcaaatgctattgtacatgattgtcttagtccatttgcgcttctataacaaaataccacagactgggtagtt

SEQ ID NO: 708708 - DNA, 645 bp, Homo sapiens
atctcatttttccttaaactcaggggctatggacagtccattcacacccctagagtctcaccagaaaaggacagaaggcagaattcaaatctgctgagaatggatggttaacatgaaacgtgggggatgactcatggcaggaggaggttcagtgaagcccgattgtctctgacagttgaggacaaagtggctgcagatgcttcagaggctgcccccagagcacattgcagcctgtgcagttattattcctaaggccgatgccacaatgatgtcacataaccaccmggcagatggctcgtattattatatgcattgaaaccagagtgaacccttcccatgtttgggatgggtgtggtgagtgggaggaacacctgttaggaggtaggatctgggtttgattctattttttccccctctcttactggtactttctggttggtagctctgagcctcagtttccttatctgcaaaagggagatgtacctcaaaagttgtttagaagggtagagtagaattagataagataatgtaagcaaatgcttggtgtttctgaatgacctctggaatatgtggacagcatattgttattcaatgataattaagaataagttgaagtacagtgatgccaccttgtacttatcattt

SEQ ID NO: 708709 - DNA, 645 bp, Homo sapiens
atctcatttttccttaaactcaggggctatggacagtccattcacacccctagagtctcaccagaaaaggacagaaggcagaattcaaatctgctgagaatggatggttaacatgaaacgtgggggatgactcatggcaggaggaggttcagtgaagcccgattgtctctgacagttgaggacaaagtggctgcagatgcttcagaggctgcccccagagcacattgcagcctgtgcagttattattcctaaggccgatgccacaatgatgtcacataaccacccggcagatggctcgtattattatatgcattgaaaccagagtgaacccttcccatgtttgggatgggtgtggtgagtgggaggaacacctgttaggaggtaggatctgggtttgattctattttttccccctctcttactggtactttctggttggtagctctgagcctcagtttccttatctgcaaaagggagatgtacctcaaaagttgtttagaagggtagagtagaattagataagataatgtaagcaaatgcttggtrtttctgaatgacctctggaatatgtggacagcatattgttattcaatgataattaagaataagttgaagtacagtgatgccaccttgtacttatcattt

SEQ ID NO: 708710 - DNA, 395 bp, Homo sapiens
cctagagaactagaaaggatctgagtagctttaaaaagggtggaaacaaagtactggataggggtctgcctttttatacacagtatagcaaacagcatcagacaaagttacatgaagttttcttcactttttttgctctgatggatagaggatgtgagactcattttactgtttcccagacctgtcccacttaatggatctgttgtgtttcttcttataatggcaggcacctcagatgtccaggttaatttatgttgaggagttaggattcttcagggatttattattattattattattatttatttatttatttatttatttwtttattttttgagatggaggcttgctctgtcgcctaggctggagtgcagtggcgcaatctcagctcactg

SEQ ID NO: 708711 - DNA, 1209 bp, Homo sapiens
tctgttattctctgttattagtacataratggaaatactttttttcccatattggcatgtatctacaaatattaaaggaggagaaaaggtaatatacttttaggtttaccacatatggtgtgtattcaaataacacgtgaccagcttatcaaaattgtacataatacttgaactaacttattaatttgattttcattattatgtccaaaagcttgggatgctagatactactttgcatctgtaactaactatgatcctcatttcttgtaatttcttgtgcttgtatattgcttgttcttaatagattttactttggaaacaagactttgttgagatcagtttggttttgttgttaatttacctgtttgacttcataatgtattttagttttgcagaagaacacttgtagattagaaggcttttcataaatcccctcacaggcgaagaggaaaacttcccgctattttatttccctcataggaagacatactggaaagaaaacgcttagcatcttagtatagaatagctattgtgaacagttcatgacttgatcttgatatggaaatctgtactgaccagtgattaagcttaaggattgtaaaaatcattaaagctgtggtcttttcgtgtggaggttgatagaaaatatttttgtcctaagtcttatttgctgactttttctgtcaatgaaggaggttgttgaacaaacaatctgtgggctatagcaagtagctttacagcagatcttaccatgaagttttactttgtgcttatttaagtgggtaccactttttctgtttagaataattaaaaaatgattttcacaggttccttggggtacgcttgctctagcacagcttgaaggccgctgttgcaaagtacattttatcatgctgaatcagcgttctatcacgtacctgtagaaagacctcagtacatgctttgcaccctcctttgcaccccctttcaatttcttattgcagatcattttgatgtaatatggaaaacagcattttaaaatgtccacgttaagaattggcccaccggtgccaactcacctctattttgttagttcatagttgaagattttgttttatcgttttcaaaaataaagtatatttttggaagaatgaatttaagaatgaagaaaagctatgaaaaatgctgcaaattaccatatatgtgtattttgatatgcagatgtagcaa

SEQ ID NO: 708712 - DNA, 1209 bp, Homo sapiens
tctgttattctctgttattagtacatagatggaaatactttttttcccatattggcatgtatctacaaatattaaaggaggagaaaaggtaatatacttttaggtttaccacatatggtgtgtattcaaataacacgtgaccagcttatcaaaattgtacataatacttgaactaacttattaatttgattttcattattatgtccaaaagcttgggatgctagatactactttgcatctgtaactaactatgatcctcatttcttgtaatttcttgtgcttgtatattgcttgttcttaatagattttactttggaaacaagactttgttgagatcagtttggttttgttgwtaatttacctgtttgacttcataatgtattttagttttgcagaagaacacttgtagattagaaggcttttcataaatcccctcacaggcgaagaggaaaacttcccgctattttatttccctcataggaagacatactggaaagaaaacgcttagcatcttagtatagaatagctattgtgaacagttcatgacttgatcttgatatggaaatctgtactgaccagtgattaagcttaaggattgtaaaaatcattaaagctgtggtcttttcgtgtggaggttgatagaaaatatttttgtcctaagtcttatttgctgactttttctgtcaatgaaggaggttgttgaacaaacaatctgtgggctatagcaagtagctttacagcagatcttaccatgaagttttactttgtgcttatttaagtgggtaccactttttctgtttagaataattaaaaaatgattttcacaggttccttggggtacgcttgctctagcacagcttgaaggccgctgttgcaaagtacattttatcatgctgaatcagcgttctatcacgtacctgtagaaagacctcagtacatgctttgcaccctcctttgcaccccctttcaatttcttattgcagatcattttgatgtaatatggaaaacagcattttaaaatgtccacgttaagaattggcccaccggtgccaactcacctctattttgttagttcatagttgaagattttgttttatcgttttcaaaaataaagtatatttttggaagaatgaatttaagaatgaagaaaagctatgaaaaatgctgcaaattaccatatatgtgtattttgatatgcagatgtagcaa

SEQ ID NO: 708713 - DNA, 1209 bp, Homo sapiens
tctgttattctctgttattagtacatagatggaaatactttttttcccatattggcatgtatctacaaatattaaaggaggagaaaaggtaatatacttttaggtttaccacatatggtgtgtattcaaataacacgtgaccagcttatcaaaattgtacataatacttgaactaacttattaatttgattttcattattatgtccaaaagcttgggatgctagatactactttgcatctgtaactaactatgatcctcatttcttgtaatttcttgtgcttgtatattgcttgttcttaatagattttactttggaaacaagactttgttgagatcagtttggttttgttgttaatttacctgtttgacttcataatgtattttagtttygcagaagaacacttgtagattagaaggcttttcataaatcccctcacaggcgaagaggaaaacttcccgctattttatttccctcataggaagacatactggaaagaaaacgcttagcatcttagtatagaatagctattgtgaacagttcatgacttgatcttgatatggaaatctgtactgaccagtgattaagcttaaggattgtaaaaatcattaaagctgtggtcttttcgtgtggaggttgatagaaaatatttttgtcctaagtcttatttgctgactttttctgtcaatgaaggaggttgttgaacaaacaatctgtgggctatagcaagtagctttacagcagatcttaccatgaagttttactttgtgcttatttaagtgggtaccactttttctgtttagaataattaaaaaatgattttcacaggttccttggggtacgcttgctctagcacagcttgaaggccgctgttgcaaagtacattttatcatgctgaatcagcgttctatcacgtacctgtagaaagacctcagtacatgctttgcaccctcctttgcaccccctttcaatttcttattgcagatcattttgatgtaatatggaaaacagcattttaaaatgtccacgttaagaattggcccaccggtgccaactcacctctattttgttagttcatagttgaagattttgttttatcgttttcaaaaataaagtatatttttggaagaatgaatttaagaatgaagaaaagctatgaaaaatgctgcaaattaccatatatgtgtattttgatatgcagatgtagcaa

SEQ ID NO: 708714 - DNA, 1209 bp, Homo sapiens
tctgttattctctgttattagtacatagatggaaatactttttttcccatattggcatgtatctacaaatattaaaggaggagaaaaggtaatatacttttaggtttaccacatatggtgtgtattcaaataacacgtgaccagcttatcaaaattgtacataatacttgaactaacttattaatttgattttcattattatgtccaaaagcttgggatgctagatactactttgcatctgtaactaactatgatcctcatttcttgtaatttcttgtgcttgtatattgcttgttcttaatagattttactttggaaacaagactttgttgagatcagtttggttttgttgttaatttacctgtttgacttcataatgtattttagttttgcagaagaacacttgtagattagaaggcttttcataaatcccctcacaggcgaagaggaaaacttcccgctattttatttccctcataggaagacatactggaaagaaaacgcttagcatcttagtatagaatagctattgtgaacagttcatgacttgatcttgatatggaaatctgtactgaccagtgattaagcttaaggattgtaaaaatcattaaagctgtggtcttttcgtgtggaggttgatagaaaatatttttgtcctaagtcttatttgctgactttttctgtcaatgaaggaggttgttgaacaaacaatctgtgggctatagcaagtagctttacagcagatcttaccatgaagttttactttgtgcttatttaagtgggtaccactttttctgtttagaataattaaaaaatgattttcacaggttccttggggtacgcttgctctagcacagcttgaaggccgctgttgcaaagtacattttatcatgctgaatcagcsttctatcacgtacctgtagaaagacctcagtacatgctttgcaccctcctttgcaccccctttcaatttcttattgcagatcattttgatgtaatatggaaaacagcattttaaaatgtccacgttaagaattggcccaccggtgccaactcacctctattttgttagttcatagttgaagattttgttttatcgttttcaaaaataaagtatatttttggaagaatgaatttaagaatgaagaaaagctatgaaaaatgctgcaaattaccatatatgtgtattttgatatgcagatgtagcaa

SEQ ID NO: 708715 - DNA, 1340 bp, Homo sapiens
  misc_feature 466, 467, 468, 469, 470, 471, 472, 473, 474, 475, 476, 477,478, 479, 480, 481, 482, 483, 484, 485, 486, 487, 488, 489,490, 491, 492, 493, 494, 495, 496, 497, 498, 499, 500, 501,502, 503, 504, 505, 506, 507, 508, 509, 510, 511, 512: n = A,T,C or G
  misc_feature 513, 514, 515, 516, 517, 518, 519, 520, 521, 522, 523, 524,525, 526, 527, 528, 529, 530, 531, 532, 533, 534, 535, 536,537, 538, 539, 540, 541, 542, 543, 544, 545, 546, 547, 548,549, 550, 551, 552, 553, 554, 555, 556, 557, 558, 559: n = A,T,C or G
  misc_feature 560, 561, 562, 563, 564, 565: n = A,T,C or G
aagctcccttccccttccccccgcaccctccaactctgtgtgtctggaggaaccggggggagaccctaagcatggggatgcctgagggtttgcagtctggctgtgtgtccatcctacccagtgctcaggtcctccagtgttctggaccagtcagggggctcccaggtgcatctagtagcccctcccatgccagggcagggctttccttcatcggaggaggagctgggaagggcttgacagcgggccgggcagcccgttggtcttaaggccagagtccccaggttggccacgtttgccacataagagaataagggatgaaaaggaggaactggaggatctgtaggccgagtcaggagctagagggtctggggctggagcccggttaggggctggtccagtgggggtcccgccagcaacagccttatgggtcccggcattggccagaaactccttgtccaggcggcannnnnnnnnnnnnnnnnnnnnnnnnnnnnnnnnnnnnnnnnnnnnnnnnnnnnnnnnnnnnnnnnnnnnnnnnnnnnnnnnnnnnnnnnnnnnnnnnnnntaaattaaaatcttggaaaaaggaaattgcatttatactctgatatctaacccagacaccaccctatagtaagacctttacctcgacatctatttggacagataaaatctctcaaagttttaaaagttctgtttccctgatcatattctattgtgatttgactcaacattttttagttgtaagaattacatttaataaatcataaatctagacattgtactaagcacttctacatacatacattsatgaacttatttagttatcacaatccttaaaaaagacaggttaaaaatataagcaagctgcaggattttcctcagggcttctgactctacttctagttctccatcagatcacagttacctctgtggtataaatatatcaacacaaaaacagagaaacaaaaagacacaggcataaaatgtgtcttctgcctttgtcacctggattctccatgaaatagccagattgagaggatgtgaccttgtggggcttcagaaacagaaaagaagctttcccttttctgcactaagatattcttttccccactgccttttctccttattttttcatttggttcctgggatatcaaaaaagtgaaggtgctcattgaaatagaggaaccaaagtttgccacaacacaaggagccgagtgaaactgctgagtttctagtgtggaatcctggaaaatgagatgttcctcaaatttacattcaatcaccacagaagtttgtagctggaagatacacagtatagctgtccactctagccccat

SEQ ID NO: 708716 - DNA, 908 bp, Homo sapiens
aactcatttctgtaaactgctgggggccccactggaagactcaggagcccttttcaaggcttttcatcggtgctgccatggcttctctcgggagccttggagaaagttcccgtgccttagctgggcattcagggccatcacagtctggcctctccttttccctccatcccccaacaatgtctggcatacaactccacccatacaagactcctccattccttcatccatccacttattcattcaacaaccattgcatccctactacgagccaggaaatacactggagaacaagacagacttgcatggaccaggtgttctggcctctttgtctgtatgtccccattccctgtgtgggtcatgtctagagataagtatacactcctgctacaaggacaatcactcccaccagatgaaagcttcttgatcttcatgttgagctctgtgccctcagtgccaggcaccagacttagcacagagctggcaccagagaacagttgttgactgaaaacccctccaacaagtctactcttcagctggggagactcatttccttgttcccaactctttgctgggctctttcccccaaccagcattttctgtgaggctgggattctcccayttagtcagagatgatgggcaggggcctcacaagcaactgatacaccagtggctacaatcataaagtttgtaagtgatctgctttatagaaatttaaatagagggtatccagggttagatgtggcataacatcatctcatcagcctctgacagacgtttgcccaggagagaacatggtggtgggaatcgatcagcaccttgggcaccatgggagtatggcccaagctggaacagaaccaggaatgcatgtggggggtggggtggggtaaagcatcaaggctcatgacttc

SEQ ID NO: 708717 - DNA, 2201 bp, Homo sapiens
cccaaatggactaacaaaatttattcacagttcatatgtatgataaaaaaagctcttccaagctgatgaaaagtcaaaaatccatttgaaaaactgcaaattatgtgactagcacccaaatatacagatacataaagcaaatattgacagatccaaagggagaaattgagtgcaataccataatagtaggagacttcaattctccacttgtaataatagaatatccaggcagaagagcaatacagaaacagctgacttgatcgatgctatattctgaatggatccaacagacacatacagaacttcccacataatagcagaatacacattcttcccaaatgcccacaaaactttcctaggatcacattaggtcacaaatcaaatcttaactaattttaaaaagttgcaaatcagccgggcgcrgtggcttatgcctgtaatcccagcactttgggaggctgaggcaggtggatcacaaggtcaggagtttgagtccagcctggccaatatggtgaaaccccgtctctactaagaaaatgcaaaaattagctgggcatggtggcatgtgcctgtagtcccagctcctcaggaggcggaggcaggagaatcgcttgaacctgggaggcagaggttgcagtgagccaacattgtgccagtgcactccagcctggacaacagagtaagactccgtctcaaaaaaaaaaaaaaaaaggttgaaaatcataccgagtatcttttcctaccacaatggaagaaaattagaaaccaataatggtaagaaaacaggaaaattcacaaatagatggaaactaaataatacactcttgagctaccagtgggtcaaagagaaaatgaaaaggaaacttaaaaaatatctcaagataaacaaaactgtttaaatgaatgatgttgaatctcagctgcttgcctgacactggaactaaacttaataggtagtgtatgaagcagacttcactgcctgcccacttatctaagtgactgagtgactaactttatcaccaatcatttctgacctgatggtcaggatgacaggccgctgggttgtgtaacccatccagtcagagaagtcagggggtgttgtcagagcaagttgctgcctgtgctgctgcttcatgcctgggctcctctgcattccagatccatgcccgtccgctcgcttgagcacacttacagatgctaggatcaggtaaccagcaaataaatattgtgagatgcctccagccccttcctaacctaagaaccatcagtgacctgcagagagtccatgagccactgagtttgtgggtgtgcgcatgttgctgtggtgagagcttatggtttccatcagattcttgatgtcattgctaacttaaatgtcccaaaattgtcaaaaaaaacactacttaaaagagactcccccgcaaaaaatgctcatgaatatcataatctattcaaaatccatttcacagccactgcactgtattctgctgctctctggggtcaaatgagggggagaaagagcaggactctgagttcacccccgagctccacttggagctctgttgttcggggcggcctctgattcttgttattcccactcagtgtccagaaggggaggtgtgggctgaagtctttcagagaaaacccaggagagcctgacagcctgtcttgctgacggcctccttattccagctgactgtgacttctcccttcatgacagatactcttcattctcaagtcagggaaaaggaccctgataggacaccatcctgtcggagctaacagacgtgcacctttgagagtgatcgttgagaaggtaatttagatagatttctgtctctgaaaacgtccgttcatttgtgttgtagaattacactcgtgtgtgtttgtgctctgcatagcagtgtgtgcatcctatagtcttttcacagaagtgtatgtgtctgtaaaaacatagagtgtaatttctgagcacatagacactgagtaaactcagtgtatgatttaataacacttaatctttactaaatgaaacttgttactcatttttaaatgtaatactttttgtaagaagcaagtatgaatatgagaatcaacttgacctgtttcactggatagcaccaactcaggatgctcacacaggagccgtagaaggcatcctttactctttcttctcctaaccccccaaaacaaaaactgat

SEQ ID NO: 708718 - DNA, 909 bp, Homo sapiens
tatatatatwttttttaactacaatggtcccaagattccattctgaaatttatttttcttcgtgtgaatatgtataaatgatttacaaataagactaaaatatttgttaaaaaaaaaaaaaaaaaaaacagccaggcccggtggctcacgcctgtaatcccagcactttgggaggctgaggtgggcggatcatgaggtcaggagatccagaccagcctggccatcatagtgaaaccctgtctctactaaaaatacaaaaaaatagctgggtatggtgataggcgcctgtaatcccagctattccagaggctgagacagaagaatcacttgaacctgtgaggcggaggttgtagtgagccaaaattgcaccattgcactccagcccaggcgacactccaagactacatctcaaaaaaagaaaacataaaacaaatacatatatctatgaagactagaatgctagaatgagaaggaataggacaaatctctttttttgtgggatatattaaaagaatttgaggctgggcacagtggctcacgcctgtaatcccagcactttgagaggcggaggcgggcagatcacctgaggtcgggagttcgagaccagcctgatcaacaggaagaaaccccgtctctactaaaacatacaaaattagccaggtgtggtggcgcatgcctgtaatcccagctactcgggaggctgagacaggagaattgcttgaacctgggaagtggaggtcgtggtgagccaagattgcgccactgcactccagcttgggcaacaagagcaaaactccatctcaaaaaaaaaattttttttgaataatgcctttaagagttggtggtttgtaagtttctaaactgaaaaccaaacataaatccttgaattcagaaatgcagtgtgtcaaa

SEQ ID NO: 708719 - DNA, 909 bp, Homo sapiens
tatatatatttwttttaactacaatggtcccaagattccattctgaaatttatttttcttcgtgtgaatatgtataaatgatttacaaataagactaaaatatttgttaaaaaaaaaaaaaaaaaaaacagccaggcccggtggctcacgcctgtaatcccagcactttgggaggctgaggtgggcggatcatgaggtcaggagatccagaccagcctggccatcatagtgaaaccctgtctctactaaaaatacaaaaaaatagctgggtatggtgataggcgcctgtaatcccagctattccagaggctgagacagaagaatcacttgaacctgtgaggcggaggttgtagtgagccaaaattgcaccattgcactccagcccaggcgacactccaagactacatctcaaaaaaagaaaacataaaacaaatacatatatctatgaagactagaatgctagaatgagaaggaataggacaaatctctttttttgtgggatatattaaaagaatttgaggctgggcacagtggctcacgcctgtaatcccagcactttgagaggcggaggcgggcagatcacctgaggtcgggagttcgagaccagcctgatcaacaggaagaaaccccgtctctactaaaacatacaaaattagccaggtgtggtggcgcatgcctgtaatcccagctactcgggaggctgagacaggagaattgcttgaacctgggaagtggaggtcgtggtgagccaagattgcgccactgcactccagcttgggcaacaagagcaaaactccatctcaaaaaaaaaattttttttgaataatgcctttaagagttggtggtttgtaagtttctaaactgaaaaccaaacataaatccttgaattcagaaatgcagtgtgtcaaa

SEQ ID NO: 708720 - DNA, 909 bp, Homo sapiens
tatatatattttttttaacwacaatggtcccaagattccattctgaaatttatttttcttcgtgtgaatatgtataaatgatttacaaataagactaaaatatttgttaaaaaaaaaaaaaaaaaaaacagccaggcccggtggctcacgcctgtaatcccagcactttgggaggctgaggtgggcggatcatgaggtcaggagatccagaccagcctggccatcatagtgaaaccctgtctctactaaaaatacaaaaaaatagctgggtatggtgataggcgcctgtaatcccagctattccagaggctgagacagaagaatcacttgaacctgtgaggcggaggttgtagtgagccaaaattgcaccattgcactccagcccaggcgacactccaagactacatctcaaaaaaagaaaacataaaacaaatacatatatctatgaagactagaatgctagaatgagaaggaataggacaaatctctttttttgtgggatatattaaaagaatttgaggctgggcacagtggctcacgcctgtaatcccagcactttgagaggcggaggcgggcagatcacctgaggtcgggagttcgagaccagcctgatcaacaggaagaaaccccgtctctactaaaacatacaaaattagccaggtgtggtggcgcatgcctgtaatcccagctactcgggaggctgagacaggagaattgcttgaacctgggaagtggaggtcgtggtgagccaagattgcgccactgcactccagcttgggcaacaagagcaaaactccatctcaaaaaaaaaattttttttgaataatgcctttaagagttggtggtttgtaagtttctaaactgaaaaccaaacataaatccttgaattcagaaatgcagtgtgtcaaa

SEQ ID NO: 708721 - DNA, 1162 bp, Homo sapiens
cgtacaatttgatgtttgaatgaattgtccaaagactagcttctggttccatttatttcaaatcgtgtttgttctcatgacctatatacttctggtaccagacataacatgtctggccctgctgcatcttttttccaccagcgaattggaattctagtggtagatgtattcctggaagccatttctgtaccagcttggctagcagtagcttaactatacaaataaattactgtaaaaaacacaaatcccaaagtaggtgtaatcccaactcaactgccccttcaccaaacctcaaaattgttctcagctcttccagcactacttagcaccaggggaaatgggatgcagagatggtcatagtggaaagaaagtgtcttcactagttgctatttaaatatcttactcatgaaaattttacaaaaaaaatccatgaccacatgaacactttgtgaggatctatccaaaggtcgttaaaatggaaataagtgtcctgagatttaaccttcatcataactctgcttctttatcttttttcgttgccctattagattgttatttgccattaacctgcatgatgtcctgtctttaccgcttactatctatatgatttgagtcaagtctgttaaccttgctgagtttctgtttgaaaaatctgtaatatgggggtaaaatgagaatgccgtatttgttcctggggcttttgggagaacggtgtgaggtaatgtaaggttctcagaagtcaacagatagtctccatgaccatggtggatttggtgctgacacagcgatggaggttatcctccatatgctcattggttatgacatggggacaaggaattgaactgacattggatttctcttagactcataagcaaatttttagcaatgcttatgaggtgctttgaggtctggccctgcctacttcttttagtcttgcctcatctctcaacacccctaccccattctccaatacaaccctttccattgtaactgccaagacatgtggaatttctccaccatgcaacctttctctggcgtctgagtcttttcacatgctggtygttctgtctggaagactcgtatcccaatactcctccctttgctgacagtcctgcaggatgcagctcagctgacacttcttccaggaagttgtgtctgacgc

SEQ ID NO: 708722 - DNA, 1180 bp, Homo sapiens
agcgtttctatgagaaaatgtgtttcaagcatagaatttcgggatggccaaagatcttaaaagccctctagagctaactcctagctgatgtgggaaaacttttaacagtatccctgaaaggcgattcttgagttttggtcaagcaccttttgtgacaggaagtttattttgtctcatgatgtatgtactcagtaaaaatttgatgtataaacatatggatagagtgtggcaatatctttattacatctaactctactagagaattcatccttatatctaattgataactgcctccctgtaattcctactttcattccctttaaaatagttttaaaaattataagctgttttacaaacaacaggaatatacaaagaataattaaacacttgtccatgtgttgaatatctaaatgttagaaaacattatttttagtttattttcctcaggtgaaaaaacaaaagttaccattacagatacagttgcaaccttcttagtatcctgcccagatcccagtcttctgactgtcttcctatacttaactattaagtagtttccccaaaatgacccaatgagaaaaaaggagagccgggatttgaacgttggtcttcatggttcaaagctattgctcttttcacagttccacgctacccaccctagataaatatgtataatagtgatcatatttattgtctatgtgtaaattgatgtaaagtgtcaagggttacttaaagcactactcttctgtttttctatttgccatattaacttatttttaaaatatttttattttcaaggaaggtaaaggtaagaattatccacagatatcaaattagtacagttaaaattgtggaagtttgattatatttgaaaagaatgtgtccattaagaagattaatcattttttgttagtgaagctttatttttaggagaaagatyggtaaacaattaatatgttttcaagtacatacattatatgagctagctggggggtctgaatatgatgaagcaaatgtcaagctgggttttttaaaggcagacttgacagttggttgtgttaatggggcatgacaggcaacagctgggtggtaatcctcctcctactgttggcattgattgagtctttatttacgttgtatttctagtctggactagaacgttattccaggggtggaatgaaga

SEQ ID NO: 708723 - DNA, 1180 bp, Homo sapiens
agcgtttctatgagaaaatgtgtttcaagcatagaatttcgggatggccaaagatcttaaaagccctctagagctaactcctagctgatgtgggaaaacttttaacagtatccctgaaaggcgattcttgagttttggtcaagcaccttttgtgacaggaagtttattttgtctcatgatgtatgtactcagtaaaaatttgatgtataaacatatggatagagtgtggcaatatctttattacatctaactctactagagaattcatccttatatctaattgataactgcctccctgtaattcctactttcattccctttaaaatagttttaaaaattataagctgttttacaaacaacaggaatatacaaagaataattaaacacttgtccatgtgttgaatatctaaatgttagaaaacattatttttagtttattttcctcaggtgaaaaaacaaaagttaccattacagatacagttgcaaccttcttagtatcctgcccagatcccagtcttctgactgtcttcctatacttaactattaagtagtttccccaaaatgacccaatgagaaaaaaggagagccgggatttgaacgttggtcttcatggttcaaagctattgctcttttcacagttccacgctacccaccctagataaatatgtataatagtgatcatatttattgtctatgtgtaaattgatgtaaagtgtcaagggttacttaaagcactactcttctgtttttctatttgccatattaacttatttttaaaatatttttattttcaaggaaggtaaaggtaagaattatccacagatatcaaattagtacagttaaaattgtggaagtttgattatatttgaaaagaatgtgtccattaagaagattaatcattttttgttagtgaagctttatttttaggagaaagattggtaaacaattaatatgttttcaagtacrtacattatatgagctagctggggggtctgaatatgatgaagcaaatgtcaagctgggttttttaaaggcagacttgacagttggttgtgttaatggggcatgacaggcaacagctgggtggtaatcctcctcctactgttggcattgattgagtctttatttacgttgtatttctagtctggactagaacgttattccaggggtggaatgaaga

SEQ ID NO: 708724 - DNA, 619 bp, Homo sapiens
caagacagctgccttgtgaattatctcattgatcacacttctgttcttttaagaacccctccctggcctactggtggtatggtttgtgagcctggtcttcacacmattttgtgtgtactgactctactatcccccagcagctgtggctggtttttgttggtaatgcaccggctttcccatgtaagactctcttggcatttctagtgagcactttgggagtagttattcacatacctactatgtgctctgtggaagaacaggtgtgtggtgatactgtttgaaaagtctctgctttctattccaaattcaaacagactaagtctctatggtttttaaaagctacttagctcattctttgggctttgaagccacacgatcctggtaggaactgaaaaacagaaatgaattctttcttaacctgacatctgggttactcccagcattgtgccattgttgggcctaaatagttaggaaaggggttagaaatgtggcataaagcagtgctctggcttcccgcacagcccatgaccacgtggactgtgcaatatctcctgaacctacttcatgattttccaccatcgcatgctgctttctcttttagaaatgtgctccttctttg

SEQ ID NO: 708725 - DNA, 1005 bp, Homo sapiens
caaggtcactgtttatctgtgattgctcttgcaggaaagttctcaagaaacttgagtcaacacttgcttgtgttggtcatgactctttgggttacaagtggcagaagaccaatacagacttaagcataaaaacgaatttaacgacttcaggcatagctgtatccagctgctccaatgatgatgtcagacactgatatctcttagcttgtttttctctgagttgtttcactgtcaggctctggggatgcagtaaccagtaaacagagtaccctgggggtacattgaacaagacaaaaaaaaaaatgcgtggtcctcatggagcttgtaattaggttcctacaactggtagtaaaggaagaccaccaggctttctgggattacttcttattagcttaacaactctaacatgaggaaaaactagccccagtaaaaatgtactttatcggttctgctttgttacatgttacccccaagctgaacaaagtggcagagaggagcagtacctcattgagcctgaccccaggtcaccaacccctctgggatccaggagaccgagattgggcaggggtgggtcctcaagtgaaaattgatgcgatatggccagatatcacagatatcacttattttatttatttatttatttttgagacagagtttcactcttgttgcccaggctggagtgcaatggcgtgatctctgctcaccacaatttctgcctcgcaggttcaagcgattcttctgcctcagcctcctgaatagctgggattacaggcatctgccaccatgcccagctaattttgtctttttagtagacatgggatttctccatgttggtcaggctggtctygaactcctgacctcaggtgatccgcctgccttggcctcccaaagtactgggattacaggcatgagccattgcactcagcccagatatcactttaaaaagggaaaataacagacacaatgtctggcataaacctagactggaaaaaggcaaagctgtat

SEQ ID NO: 708726 - DNA, 957 bp, Homo sapiens
actcctatgtacccagggattaagtgttaagtgaaccagtttttaaatcccttccggaaggagagaattctaaatgttttttaaaaagtgggtaggcttggtagtcagggaacaatttgatttaacaaacatttattaattgcccccttacattaagcagcatctattaaaacataatgagttttattttttagttataaagatacttgtacagcactataaaatttagaaaggagaatgagaaagccataatgcaaccatccaaggataattgctattaacattgtgctatacttcaatctaaaatttttccctacatttttttaaacctraattttaaacctctttatatataactcttttttttaaagagatggggtcttgctttgttgcccaggctggtctcaaactcctgacctcaaccaatcctctcctcttggcctcccaaagagctggaattacaggcatgaaccaccgtaccaagcccttcataatatataatttttttcacctgacattttaacaaaattatttctcatattacaaaaaaatctttctaaaccaaatttttaattttgagtatgaatatacagacttttaaggctttgccatcagttgtcaaattaacctacaggaaggttcaatcagtttacaaacccaccaataaaatataaaaatttccacttctacacatctccaacaaactagatattaagaatcatttaggccgggagtggtggctcacgcctgtaatcccagcactttgggaggccaaggcgggcggatcacctgaggttgggagttcaagaccagcataacatggagaaactctgtctctactaaacatacaaaattagctgggcgtggtggcacatgactctaatcccagctactcgggaggctgaggcaggagaatcgcttgatcccaggaggtggaggttgccgtgagctgagatc

SEQ ID NO: 708727 - DNA, 1432 bp, Homo sapiens
accaagggtcatttcttatctttccttatgcaagcagttggttttgcaggaccagccatggttccctggagacccggcccaacttctggtacaaagtagagaactggacaaacatgttttgctgggccctgcagctttcactgagagacacacagttttggggatggggcttggccactgtcaatcacttaaggcccgtagatgttgcctcagtgtggtggcatctgccaccaaggccagatctagggatctagttgctaactcagcagcagccttctgtttttctacaagcctatagaaatgttttggtttcttttcctcctcctccttctccagaaytggctttattaacagcaagaattcaagcagtctccctggtctctcatgcagttcaatccccgacagcctttcctgtaaatgccacctgctgtcacatgctccatccgggcctttgttgtcaggctcacttctttctacatcttcctccattgacttcagcagctccttcatgcatgccacagttttttctgaagtctttggatgcattttcataatgacaacatcaaagttcctgcttctctctgtgttaccaaatactttgttggagttgttgatctgacttgggactttgtaacattcactgaggcagacatgtattttagccatagttcaaatcctcctctctgggagctggccttgcacctctggaaaagaaccacatgttttgatcacagtggcttccaccaagagctggggaccactgacaaatggctggcccttcccccccaattctaaaggcctctgccagagctccagaagccgggcggagcctgccaacaaccattatcagcctgtccgagtagaccctatcttcttatttgaaaaaaaaccccactttctttagaaaagttagatatgtgaagatgctggtctacagggtccttttgaaaacatctaacatcttctatgggacgtttccacagttcaccacctgaaacacttggaccacacatgtttgcacatcctggactttctgtctgatacatctaggactgaacaatgggttctcccagaagttccagagggaattcctacaattctcgcttcaagatggcgctccagctgcatcacctgcaggcctgggctaggatatgtcttgactctccttatgacactgtcttggtggctcacttgggtgagtgtggggccaatccaagggaagttgcggggaagctcaaaaaggtaactcagtttttcttgggagaagagagattctgagcagattggaacgtaccatcaacagtgccttcttcctcctgagctgatatctgaatgagtccctattcacaggaagaccctggcccaccttgatgtcccactcaactgtaatccattggtcctttttgggcaatgactgagtcctctcctgacc

SEQ ID NO: 708728 - DNA, 1432 bp, Homo sapiens
accaagggtcatttcttatctttccttatgcaagcagttggttttgcaggaccagccatggttccctggagacccggcccaacttctggtacaaagtagagaactggacaaacatgttttgctgggccctgcagctttcactgagagacacacagttttggggatggggcttggccactgtcaatcacttaaggcccgtagatgttgcctcagtgtggtggcatctgccaccaaggccagatctagggatctagttgctaactcagcagcagccttctgtttttctacaagcctatagaaatgttttggtttcttttcctcctcctccttctccagaattggctttattaacagcaagaattcaagcagtctccctggtctctcatgcagttcaatccccgacagcctttcctgtaaatgccacctgctgtcacatgctccatccgggcctttgttgtcaggctcacttctttctacatcttcctccattgacttcagcagctccttcatgcatgccacagttttttctgaagtctttggatgcattttcwtaatgacaacatcaaagttcctgcttctctctgtgttaccaaatactttgttggagttgttgatctgacttgggactttgtaacattcactgaggcagacatgtattttagccatagttcaaatcctcctctctgggagctggccttgcacctctggaaaagaaccacatgttttgatcacagtggcttccaccaagagctggggaccactgacaaatggctggcccttcccccccaattctaaaggcctctgccagagctccagaagccgggcggagcctgccaacaaccattatcagcctgtccgagtagaccctatcttcttatttgaaaaaaaaccccactttctttagaaaagttagatatgtgaagatgctggtctacagggtccttttgaaaacatctaacatcttctatgggacgtttccacagttcaccacctgaaacacttggaccacacatgtttgcacatcctggactttctgtctgatacatctaggactgaacaatgggttctcccagaagttccagagggaattcctacaattctcgcttcaagatggcgctccagctgcatcacctgcaggcctgggctaggatatgtcttgactctccttatgacactgtcttggtggctcacttgggtgagtgtggggccaatccaagggaagttgcggggaagctcaaaaaggtaactcagtttttcttgggagaagagagattctgagcagattggaacgtaccatcaacagtgccttcttcctcctgagctgatatctgaatgagtccctattcacaggaagaccctggcccaccttgatgtcccactcaactgtaatccattggtcctttttgggcaatgactgagtcctctcctgacc

SEQ ID NO: 708729 - DNA, 1928 bp, Homo sapiens
gatttttatattttcagaaatgaaagcaggaagatggctcagagtaatttagtttgagctgcttaaaatttatgtgcctatgaattacctaaggatcttgtaaaaatgtaatttttgattcagtagtttggaggtggggatgacatacctcatttgtaataaactctaacatgatgatgatggtgctggtctgtgaaccagcctttgaatagcataactctgcttcacttctctcattctgaatttgagaaaattgagatctaaagtgattaaatagttatctaagactacagataaatgctgacaagccatgtaatatttcttagcagaggtcatggccctaagttatgggttatcaggaggcaactggaagttacaaataatggagaagagaattatttgttgatgatccacatgtcacccatttttcttcactctcatccttaaagacagataatcttacagttaaattggaaatgagaaatttaaggcctagcaaaaacaagtgactaactggaataggtacatgaagaagggcttgaatccagggattaggggattaaaaatttttgtcttctatactatgccagcttgtccaatccactgttggcagattgcatgaggtccatgatggctttaaatgtgacccaataccatatagtagtcacttaatcctcagcataccactagaaataatcactatttgtcatctctgtccagtggagtatacagatggatatatatatatacatatatatatggaataaagttcacataggtttatgactaatctacaaaacaaaaatgtatagacaggaaagacagctattagaaattttwaaaaaaatctaaaatagtaaaaccctttagtatcaagaaaattttatgcacaaacatcttcaaaaatgaacaaacattatcacatgttcttcttgtaaaatggactggaacatttcatgatgaagttcttccagttaaatggctagctggaagagaatgctacatttcctttttgtccttagtcataaattatatatcttaaataattacataataatgacatattaacagtgctgctatgtataattttgcatttatcttctgattcatttaataattgtgaaatgtatttttttgttttcttctctttgctattaaaagaaaaaaataaagtatccaaaattctcaactgtattccgtgaactctaaaaagatatttcccatatcttatatgggaaatataagataactaaggttcaatgtattttttagattcacaaaagagtgcaaagaacatacagttcaattgtgggatagaattcaattaaaaaatactaagtaaattttgttcttattttttgcaggatggctaaaaaagatgaatgccataaaatgtcaggttgtacaaagacttagagctgctcaataaaaaaaaactcaaaaactaaaattgagcccagtggacccaatgacatatcagttagagatatgaccactccatagattgaaggctgtcaaccagcattagttgcatgatcatgttaaaagagcaaggaggaaaggggctatattgttttaaatcaatatgaaacaaattaatctaccagtcacaagtaaataaaacaccaggtcatgaatatgatcacacaaaaaagaaaaatactcctgtattttcctaaagtatgtcaaaccaacacttcacagtatcaactgacagtatcatcaaaaaaattagtgaaagctgctagtttcatgaaaatgcaatcagcagattgaataaataaatataattttatttgtgtaactttatctcaagccacactgtcagtaacttttcattagttttttaaaacctattttacttttcattaatcaaaaagaatacagaaataaatgtaattattggcaataactgtgttttatgaaat

SEQ ID NO: 708730 - DNA, 1928 bp, Homo sapiens
gatttttatattttcagaaatgaaagcaggaagatggctcagagtaatttagtttgagctgcttaaaatttatgtgcctatgaattacctaaggatcttgtaaaaatgtaatttttgattcagtagtttggaggtggggatgacatacctcatttgtaataaactctaacatgatgatgatggtgctggtctgtgaaccagcctttgaatagcataactctgcttcacttctctcattctgaatttgagaaaattgagatctaaagtgattaaatagttatctaagactacagataaatgctgacaagccatgtaatatttcttagcagaggtcatggccctaagttatgggttatcaggaggcaactggaagttacaaataatggagaagagaattatttgttgatgatccacatgtcacccatttttcttcactctcatccttaaagacagataatcttacagttaaattggaaatgagaaatttaaggcctagcaaaaacaagtgactaactggaataggtacatgaagaagggcttgaatccagggattaggggattaaaaatttttgtcttctatactatgccagcttgtccaatccactgttggcagattgcatgaggtccatgatggctttaaatgtgacccaataccatatagtagtcacttaatcctcagcataccactagaaataatcactatttgtcatctctgtccagtggagtatacagatggatatatatatatacatatatatatggaataaagttcacataggtttatgactaatctacaaaacaaaaatgtatagacaggaaagacagctattagaaattttaaaaaaaatctaaaatagtaaaaccctttagtatcaagaaaattttatgcacaaacatcttcaaaaatgaacaaacattatcacatgttcttcttgtaaaatggactggaacatttcatgatgaagttcttccagttaaatggctagctggaagagaatgctacatttcctttttgtccttagtcataaattatatatcttaaataattacataataatgacatattaacagtgctgctatgtataattttgcatttatcttctgattcatttaataattgtgaaatgtatttttttgttttcttctctttgctattaaaagaaaaaaataaagtatccaaaattctcaactgtattccgtgaactctaaaaagatatttcccatatcttatatgggaaatataagataactaaggttcaatgtattttttagattcacaaaagagtgcaaagaacatacagttcaattgtgggatagaattcaattaaaaaatactaagtaaattttgttcttattttttgcaggatggctaaaaaagatgaatgccataaaatgtcaggttgtacaaagacttagagctgctcaataaaaaaaaactcaaaaactaaaattgagcccagtggacccaatgacatatcagttagagatatgaccactccatagattgaaggctgtcaaccagcattagttgcatgatcatgttaaaagagcaaggaggaaaggggctatattgttttaaatcaatatgaaacaaattaatctaccagtcacaagtaaataaaacaccaggtcatgaatatgatcacacaaaaaagaaaaatactcctgtattttcctaaagtatgtcaaaccaacacttcacagtatcaactgacagtatcatcaaaaaaattagtgaaagctgctagtttcatgaaaatgcaatcagcagattgaataaataaatataattttatttgtgtaactttatctcaagccacactgtcwgtaacttttcattagttttttaaaacctattttacttttcattaatcaaaaagaatacagaaataaatgtaattattggcaataactgtgttttatgaaat

SEQ ID NO: 708731 - DNA, 383 bp, Homo sapiens
gctgatgaatgactcgtggctgaaattttaggaggaagggtttgtgcccaagaaacaagaaggctgacatgagggacaaaagaaaaagaaattaaaaagccttagggactgtaaaaawacccaaaaacaacaacaacaacgaaaaaaccaacaaagagtccttcccatctcaacagggcaatcacagcacatggcaagaataaatgacaaaattaacctaatcattgacaaaaggttaatttgtgctctgtatgctctgttttaataagcaggagaaataggaaatggattttagaaaggcactgataaaaacagttcaaataaaaagtttttgtgcaaaagcttgttatgtggaaaaaatcactgaatgtggaaaatgtcac

SEQ ID NO: 708732 - DNA, 383 bp, Homo sapiens
gctgatgaatgactcgtggctgaaattttaggaggaagggtttgtgcccaagaaacaagaaggctgacatgagggacaaaagaaaaagaaattaaaaagccttagggactgtaaaaaaacccaaaaacaacaacaacaacgaaaaaaccaacaaagagtccttcccatctcaacagggcaatcacagcacatggcaagaataaatgacaaaattaacctaatcattgasaaaaggttaatttgtgctctgtatgctctgttttaataagcaggagaaataggaaatggattttagaaaggcactgataaaaacagttcaaataaaaagtttttgtgcaaaagcttgttatgtggaaaaaatcactgaatgtggaaaatgtcac

SEQ ID NO: 708733 - DNA, 613 bp, Homo sapiens
tccccattgtctttaccatgtcttcactgaacaagcagcttctgggcacctacaaaagccagacattaagtctgtccacaattctgggccatggaaaacaagactgctctggatcaagagattccagatgccagaaggggccctgcactggaccgttttggataaaccatctacaaagtgtacttgggaacacctggggaaatgtaaatacagactacgtatcagatggtgttgagacatcawtactaaccttgtcatgtatgacagacattacagttttggctatgtcagaacatggcgttaattttggaaaggtcattttgaaggatttagctggcacctgcagggtggataagtctccacacagctgtgggtgtcccgttcctcacctgggaagggagagaagctgaatcagctaacctctaaagtcacttccagttgtaaaactcaaggattcctctgacacagtgtattgtcaaaaaaaaaaaaagacatgatttcgagcaaggaagcaccagggtcaagagagctggctgaacagaaaacgagagaaaggtgaaggtgagtggtgaggaattcagcagctggctacaggacaataagagaaaaaaaa

SEQ ID NO: 708734 - DNA, 599 bp, Homo sapiens
attttaccctacatataactggaattgtattgtattttttcagtgacttggttgtttctgctcatgcctgagatttatacattctgctggtagaactgtgcagtattcacatttcactgctttgcagtactccagtgtgtggatatatcacaattcttctaaaatccgttctttcatatttttatcttgaaaaaatttcaaaactagagaaaagttgaaagaattgcacaatgagcaccatatgcctttcaccaagtttcccaagtcagtaacrtgttggcgcatttgccttctctctcttcagtaattttcttctccctgaaccacgtgaaattctttgtagacatcattacatttcgcccctacatatttcagggatacattttctatgaatggggatattctcctacagaaacacaatgtcattattatacacaagaaaactaacttcaactcaataatattatctaataggcagtccatgttcaaattttttgagctgtctgaaaaatgcctttatatggctgtttttcaattccggagccactgaggactccctcattgaatgttgggtttgcctttctcaagtgagctctaaa

SEQ ID NO: 708735 - DNA, 643 bp, Homo sapiens
actcagaaatcaagaccttaaaatgaatgacatacaaacttgactaagacattacaacagagccccgtgactattatttcagatataggaaatgtgaactctagaattttggagacacaagggacctttgaggacaaggctaactccactgattcccagctgaggacattctcggatctgaccaggatcacatagcttcaaggcggagcagaggcaaggacggggtctccagacctccagatcagagccaccgtcctgagaactcagaggaggtgctggaagacactgttctctagaacgtcactattttcgtttgctcctgatttagacaaattatgggcaatcaytgtttcaggccttttgacacccggacaagggttggtggtgacaacagctttcctgtgggtcctcaatgcaactgtgggctttctctgacacacagagattccactcagtatttcttatgattatggagtggcgaatccaatctaccttttaatgaacatggcaagcttacatcattgttagtgtcctgatttctctatacagcattttcaacctttctggctctctcgataaagtagttacaatgcagcacttcgaattattgcaacaacctgttaatctggtggttgcaacatga

SEQ ID NO: 708736 - DNA, 632 bp, Homo sapiens
acaacatctgtatctctttagcaggccatgtgttcttcagacttccacaggctgtagcactccctatgcctatcatctgttttcaattataaatttatgttttttgacctgtccctgggatcatttgaacttgtgaccattggtctacacatacataatataatgtgattttaaagaaactgcagcttagaggctgtaaccagaaataggtttaaaaaccaaatatgcctgttgccctagttttattctccatgttctgacttggtctcatcattgactctacccccaactaatggagaattagcagctacctgcagctcctcttgtgaaagttaagtaagatgaagaacttmttgtcttgcttttccatatacgataaaatatgcggaaagataaaggaggctgttttctgtgacaggttccccaaatcgacttcaatgaaatgcatttactaaacaattataaaatatttagaaccagaagggaacctgacctaagcttcttattttgccattgaagtatctttaccccacagtggagaaagccattttccctcagagacatgatccgttggtagtagaattagcacagcggtcctgtcttccagtttggtcctctccctgcacatctta

SEQ ID NO: 708737 - DNA, 993 bp, Homo sapiens
gcaggcacaggcagtgcagatgttggtctctgtctcccactttctcccccttcctccgtctctctctcatggcagttttcacacagcatggggcatcttatacgtccactcttgcccttccttttctaacctcattccacggggatcccttcatgtctgtgtggacagcaaccttgttcccacagctgcatggcgctcctaggcggtcccagctggaattacccaaccccatgacggaccctttcattgcagcgatctgcacacgtgtgggtgtttccataggacattgtcaggcacggatggctggtccgaagcacgtgcatttcagttttgaggctcctgtcctcaggcagtgtggactcaggccctgggagtcatgtggatgccagtagcctgggcccacagagctgctgggatgtggggggcatatcaagttgaagatggcaactctgatctgacgcctctgtgctcagggcccctggaggaggggctactgccccttggcccttagacaacaggacagagaccagagggactgggcggcttgtcccaggctactgggctgtggtctctgaccccctggaggcctccccacgcctcacagaacacagtgcagacggtgggcggggagagctcgaggggaggcccagccctgcaggtgggactggctctccctccccagccacgagtatgccacagggggctttcaaaaccaggcagggccaagccttggccccactggaggtagagcaccttctgtggctcccgggtgcctttaggcccgtccaggagttggagcagaggagaagacccagactgtgcatagttccctgaggagggctagcctcaggtgccacagcctggttcggcctggcggccccaggasgcagcagcaaccttgggcttcctgcggggtgactaccttgccctccggccctgcccgttgactaactatgctctgtggttttgtttccagagaactcagattgcaca

SEQ ID NO: 708738 - DNA, 2476 bp, Homo sapiens
tggcaaagcacaacttgaactcaggactgtttgactcctgatgccatattcttggtaattggattattcaattcacccaatcctattgcctttctgaagaaaagtttattagttcatgtgaagagaaacaactatgagataaatctctccagtccctaccaaataaaatagaaagaaagctgacactctctacgatctgactttgtctttctagcctgtttcctactctgtctctctatagattctgtattcctaccagctactcacgctgtctattgtgtggccttcaataccctaccatatctctttgccatccattcttcacacatgaatgttccatccattcttcatacattggaattctcagtctttataactagccttagtgagtcttcttgggtgaaacactttttttagttcctgcagttgccaggaactgtctatttctcaatattcccccagcaaataatgtctacctttatttgccttattccatcccagttcactgtttacatgcctatcttcccctagacagtgaacaacttcctgcctccctctttccttccttcttctcttgttttcaatagattttatatttctgctgtgtcccaggctctatgttatagcctaggactatagaaataactaagacgtaaattctgccatcggataacttacagtgttcagtacaggaaagccattgaataagcattgaatgaataaatgaatgagcttgcagtctagtggggaaggcaggggtgtaaacaattgtaatgtcaaatctatgctggaaacatgagtagtgcctcacattatagacactcggtaaatactcatccatttatttactctctgtactgaaataggcctaggttcaaatcttgatcttacgtacttggtaattttgagcaagtcactttagctttctgatgctcagttatcaaagctgtgaagsaatcaatagttactgacctcataaggttctgtgaaaattaaatatgtagcaagtgtctacagtaagagctcaatgtatttcagtattctacattccccacttaacttaattccagaaagaatatacagcaatacattgttggatgaattaatgagtgaataaattaatgaataagtgaatgcatgaggcaaggtttgagtggagtaaaactgcagggcatgatgatacagacagaccctgcggggcaagagagcatcaactctctctagggggatcagagccactaaagccctggaaatcacccagttctgttacccctagcccctccccagaggccatgtccttgctcctccccttcacagggggcccaaacagcttgtttttctcctctttgtgtgttggggatatgtgattttactgtcagcatggtgtttctaatgaaaggcaaatggtgtccaatgtgacttggagaaaaacatacaaacaacaacaaaattatatgttctttcttcctgtagtgttcgcagggagaatatgtgacttgtttgctgtcaatacagcttataatgacacggtgcacagaagcactgccaaatgtgtgcggcattcattatacacatgtattaaatgtaatgcgatatgagtttggtggagagcagatgagagctgccctggggctgatgtagagttacagcacctcttcccaggggatgattactggggaaaggggaagtgggcagcagcatgggcgtgacgcagggtgtctagaattttcaggactgattctgggctagattgagagaaatgatcagctcaaagggtccttaaactttatttcaacaacaagaaatcatttaatgatcaattcttgtgctcctactaagtgccgggcttgtaataggttctgggaataagattcttcaccagctttcaggacgttcacagattagcaagagagacaaacagatggagagagaataacggtgcaccgtgattggtaaatgcaatgatctagaagcagaggttcatgtgaaactacagataagatacctaacccagcctaatgtcactttttccaaggtgccttccctaactcttcatatgtgaccaggtcactctgtaatatgctaatatgcttgcatggcaccctgagccttttcttcatggcattagtcatggtctaaagtgagttatgtgtatgataatttcatcaatatctgtttggcttctagactctaagcccaggaaaatagggacctcatttgttttgcttaccattatatatccagcacctagcacagtatctgatattttaatttgtggttgaatgaatgaatgaatactgtcatatgtgagcttaattttgaaggacatggaagaagtaacccaggtaaaatgggcaagaggaaaggtgggcaaaaggagggggaatgaagcatgttatattataaaggcatgtaagaaaatatagcataaaattgggggaaaaataagtaaaaaattttaaaagtggctcttgag

SEQ ID NO: 708739 - DNA, 595 bp, Homo sapiens
cagagagctccctctcagtgggactaagcaagtagtaattaggtaggaatgctttaagagggatcatcatgctgggaatagagtctaagtggttggactgggtaacctttgtaatcctttctattctgagaatcaagtaattctattaccttaagtcactgtgagtagagtaataagaagcaaaatcactaatcctcccagagaagctgcaaaatatgttctctttatttctttataatgtttcctgcaattatttttctttcaagaagaataacatctctctgaaatttaggagtccataacctatttccctcaactactaccagtgttttaatcttttgatgacccwctagaaccacagaattattattctgcattaagacttctgtataattctacccatgaattagaatgaggaacatgaaatttaattcaatagcataggaaatgttcgcctgtaatcccaggcaacattaagctaggttacttcacttaataatgagctctcttctttttacttcatgtgttcaaggaagtgcttaaatacctgaagtgcttaaacacataaagctatggccaccaatacattaaaata

SEQ ID NO: 708740 - DNA, 659 bp, Homo sapiens
actgtgcagctctattgacacgaagctcccgaaactgatctctagtgacagaaaatcattgctggctgcctgaggctagggtgggtggaaaggtgaggacagaaagtgtgggagattacaaaggggcaagaggaaatttkggggggatgaatatgatcactatcttgattgtgggtgcacacgtttgtcaaaactcatcagattgtacatgtaaatatgtacaatgtattgcatgtcaattaaatcttaataagcacttttttaaaaggtgttattcttgccttattattgaagagtcaaaatctgccaactggaaatgtgtgatgtattcactaagctgactttggaaagtcagattagatgtcacctttaggccgggtgcagtgactcctgcctgtaatcccagcactttaggaggctgaggcaggaggattgctttgtggccaggagtttcagaccagcctgggtaacaaagcaagacccagtctctactatatctatatctatctatatctatatctatatctatatctatatctatatctatatctatctatatatacacacacatatatattttaaaacatatatttaaaaacatatacatatgttttaaaacacatatacatatgtattttaatatatgtatatatacacat

SEQ ID NO: 708741 - DNA, 1075 bp, Homo sapiens
tcaaaaatctaggccgggcacggtgactcaygcctgtaatcccagcactctgggaggccaaggcgggtggatcacgaggtcaggagatcgagaccatcctggctaacacggtgaaaccccgtctctactaaacaaaatacaaaaaattagccaggcgtggtggcgggcgcctatagtcccagctactcaggaggctgaggcaggagaatggcctgaactcaggaggcagagcttgccgtgagcctagatcgagccactgcactccagcctgggcgacagagcgagactccatctcaaaaacaaaacgaaaaaaaatcaaaaatctaatttaaaagaattggctaggcatgcatggtggcacacacttgtagtctcagttactcaggaggctgaggcaggaggattgcttgagcccagaaggttgaggctgcagtgagctgtgattacaccactgcactccagtgtgggaggcaagaggggcagggagtgttctgaaggtgtaatgtagagacggaaagctagcctggaaacccacagctcaagctgcagaagacccgggtgccagcagctggtgaagaacactagggcgttggtcttcagtatcctgaggtttggtttccgaagtatgtcccctcaaagaaattcaagggcaaagaaaaggaactttaaaatgagcttttaaaagcagtaatgaacaagctaattaatgcataaattgagattaagataatagaaaggaatgaataaaaaaatagaaacagtttggcttaactgattggagtagagagtttatctaaataattgttctcttaaatgttaagttgaagtggctgctaatcatcttttctgttcttacaatctatcattgaaaacatcaaggccgggcggtggcttacgcctgtaatcccagcactttgggaggctgaggatcactcaacctcaggagttcaagaccagcctggccaacatggtgaaaccccatctctactaaaaatacaaaaattagcggggtgtggtggtgggagcctgtaatcccaggcacttgggaggctgagacaggagagtcacttgaacc

SEQ ID NO: 708742 - DNA, 1075 bp, Homo sapiens
tcaaaaatctaggccgggcacggtgactcacgcctgtaatcccagcactctgggaggccaaggcgggtggatcacgaggtcaggagatcgagaccatcctggctaacacggtgaaaccccgtctctactaaacaaaatacaaaaaattagccaggcgtggtggcgggcgcctatagtcccagctactcaggaggctgaggcaggagaatggcctgaactcaggaggcagagcttgccgtgagcctagatcgagccactgcactccagcctgggcgacagagcgagactccatctcaaaaacaaaacgaaaaaaaatcaaaaatctaatttaaaagaattggctaggcatgcatggtggcacacacttgtagtctcagttactcaggaggctgaggcaggaggattgcttgagcccagaaggttgaggctgcagtgagctgtgattacaccactgcactccagtgtgggaggcaagaggggcagggagtgttctgaaggtgtaatgtagagacggaaagctagcctggaaacccacagctcaagctgcagaagacccgggtgccagcagctggtgaagaacactagggcgttggtcttcagtatcctgaggtttggyttccgaagtatgtcccctcaaagaaattcaagggcaaagaaaaggaactttaaaatgagcttttaaaagcagtaatgaacaagctaattaatgcataaattgagattaagataatagaaaggaatgaataaaaaaatagaaacagtttggcttaactgattggagtagagagtttatctaaataattgttctcttaaatgttaagttgaagtggctgctaatcatcttttctgttcttacaatctatcattgaaaacatcaaggccgggcggtggcttacgcctgtaatcccagcactttgggaggctgaggatcactcaacctcaggagttcaagaccagcctggccaacatggtgaaaccccatctctactaaaaatacaaaaattagcggggtgtggtggtgggagcctgtaatcccaggcacttgggaggctgagacaggagagtcacttgaacc

SEQ ID NO: 708743 - DNA, 972 bp, Homo sapiens
gcggtggctcacgcctgtaatcccagcactttgggaggccgaggcgggtggatcacgaggtcaggagatcgagaccatcctggctaacaaggtgaaaccccgtctctactaaaaatacaaaaaaaaaattagccgggcgcggtggcgggcgcctgtagtcccagctactcgggaggctgaggcaggagaatggcgtgaacccgggaagcagagcttgcagtgagccgagattgcgccactgcagtccgcagtccggcctgggcgacagagcgagactccgtctcaaaaaaaaaaaaaaaaagaaaaacaatcccatggcccatctaacaagaattgcaaatgatgcctttctgttaagtcttcaagtagaaaattttaaaaaagaataaggaagaaagaagagcaaattagcaacaaagaaagtaccagataattcacagactaccacagtaatgtggaaggcagaaatattacttacagacacagatttctatatattttagtgaatagaatgtgctcaataaacatgtcaattctattatttcaacaaaacctattaagtatatcctcataagcatcacagaggttttcttaacgggtgattatttttggttcaaaagaagcagcctcaaaaatttctgtgctgtgaacattgtcaatacctcattcttagcacttaccatctctgtgcacaccagccagacttycaggaattgtgactgtttgctaagaagtttctctggtctctggagttcactttgcgaatatgtagggcaagacagacattctggagagttaacagcccccaggagtagcccttaaccaattactggtgagagttggtgaataaaaaccccacctgaccaagttacttgagtggagaaactgaaattttaagctggctctcaggattcccccgtgctattaagcttaaattgccatcgttgtaacttgcttcaaggtgcatgcttc

SEQ ID NO: 708744 - DNA, 972 bp, Homo sapiens
gcggtggctcacgcctgtaatcccagcactttgggaggccgaggcgggtggatcacgaggtcaggagatcgagaccatcctggctaacaaggtgaaaccccgtctctactaaaaatacaaaaaaaaaattagccgggcgcggtggcgggcgcctgtagtcccagctactcgggaggctgaggcaggagaatggcgtgaacccgggaagcagagcttgcagtgagccgagattgcgccactgcagtccgcagtccggcctgggcgacagagcgagactccgtctcaaaaaaaaaaaaaaaaagaaaaacaatcccatggcccatctaacaagaattgcaaatgatgcctttctgttaagtcttcaagtagaaaattttaaaaaagaataaggaagaaagaagagcaaattagcaacaaagaaagtaccagataattcacagactaccacagtaatgtggaaggcagaaatattacttacagacacagatttctatatattttagtgaatagaatgtgctcaataaacatgtcaattctattatttcaacaaaacctattaagtatatcctcataagcatcacagaggttttcttaacgggtgattatttttggttcaaaagaagcagcctcaaaaatttctgtgctgtgaacattgtcaatacctcattcttagcacttaccatctctgtgcacaccagccagacttccaggaattgtgactgtttgctaagaagtttctctggtctctggagttcactttgcgaatatgtagggcaagacagacattctggagagttaacagcccccaggagtagcccttaaccaattactggtgagagttggtgaataaaaaccccacctgaccaagttacttgagtggagaaactgaaattttaagctggctctcaggrttcccccgtgctattaagcttaaattgccatcgttgtaacttgcttcaaggtgcatgcttc

SEQ ID NO: 708745 - DNA, 1313 bp, Homo sapiens
tgaaggaaatgcagattagggatcaaattttatatttctacattagtgcattttaattgtctttgcctcctataaaagacaagtagtatgagtgcatgtgtattcatacatacatacaaatgtgaatgtttacatatgtagatttacacccatatatatcatatcttaataatgtaaaggtttaataattgaatccacctttcaaaactgatgttttttcttaaggaggaaaaagtgatttttagctgaatattcataattatactgagaaatgaataaagtagagcaatttccggtgaaagattacacataagcaaacaatattttgtaaccttgatggaaaaaaatattttttcgttgatttaagtaatgtcatgtaccagccatattatatctatttcctcatatagtatttcatttacataaaagagtgggttttattattagttaaaactatacatatatattataaatacatttttgcttgtatggggaatttcagaatagcatccttaacctattccattattttttcttctgagcatagcacttaccaccttctaccagatacttattgtatttattgtttttttttactctcttcccccaatagaatgtaaactcctcaaaggcataaagatttctctattttgttccctgataaaatccaagtattcagaaaacatatctggtacttaaaatttttttttcacttttttacttctcactttttaaaaaattttactctaagttctgggatacatgtgctgaacatgcaggtttgttacaaaatctgtatattgataactgcgttcattcagttctgatgttaatgttccctacattctcaacctaaagcacaactaaacatttgctttatgccgtcgtgaccaattgctcataaagaaccaaatcagatttttttcttattttttaattattttcttaatgataataagctgtatttttatattcccaaaactttgctattaaacacaaatcagatgtagaagccaaaatggtacccataagtataaatttcaaacttaaacaactttataagctttttaatggttgaaggaagacatgtctttttctcttttctcatcaagataaaaagatagggtttacataacctaagatatttatttttctcctcacacaaaatgatattcaattctgaatatttagcaaactttattgagaatttagttaatacctagktatacttacataaaagtttttcttaggtaattttgaaaatatcacacaaattttcatctaactgatattttaattttatctaactgaga

SEQ ID NO: 708746 - DNA, 607 bp, Homo sapiens
agagaaagagatgaaaaatattgacaaattcctaaatctaactccttccttccacgttgttaaaacaattaaatacatttttttcttaatccatttactgctaaatttctatcactttacatagaatgctaaataattattaaattcaatgtttgattaaytgaaatgcaagtatcacctttattcaaatgacaagcgagtgaataatgcacaagaatattatatccccaattccacatcccaacaatttagcatttaggaaagataaaacaattttgggaaaaaatagtcagcagaagagcttataacatagacattggattctttatttttagatccatatgaatactgaataagatgatcaggaatctagaaaactagaggagaaagtgtgtgtgtattgagggagagaagtaaataggtttttgatattggctcatattatataggttaggttagattgtgctgcaacaattatgtacacaaaaatatcaataattgtactctccaaatattaaagtttttgctcatatcttacataaattggccagtaccaaaattgggaatctgctttatcagtcagttaaaatacaagctacagatacat

SEQ ID NO: 708747 - DNA, 629 bp, Homo sapiens
ttggtacagaatttgtttgggatgatggaaaattctggaaatacatagtcatgatggttgtaaaccttgtgaatgtaactaaatgccactgaattttacacattttaaatcaatcctttctaaaaaccaaagagaaatggaatggtatatattacctatcaaatgctgtgctggatacattatagccattatctgaytaagcttcatgaaagtctgtgagtcattcaaggccaagtatctttctcaaagtctcacagctaggaacgggcagtaaattttttcactagacaatgggtacttttctacataagggtcaaggatcatctgccagggttatttaatacaaaggagattttcacattagaaagcagattattaatacaaccaataataatagtaacatgccttttgcatacattatctccttaatcctcacaaataggaaagaaagaacctaagacatcagagagccacttaggattaagaacgcaagctgcccccaatatgcatcctctgtccttaaagacctgagctatgaacatggaaaagattgaaaaacactgccttcaggtatgaataaacatacattagatctgagtaagaatgcatcacttagggggaagggaagc

SEQ ID NO: 708748 - DNA, 629 bp, Homo sapiens
ttggtacagaatttgtttgggatgatggaaaattctggaaatacatagtcatgatggttgtaaaccttgtgaatgtaactaaatgccactgaattttacacattttaaatcaatcctttctaaaaaccaaagagaaatggaatggtatatattacctatcaaatgctgtgctggatacattatagccattatctgattaagcttcatgaaagtctgtgagtcattcaaggccaagtatctttctcaaagtctcacagctaggaaygggcagtaaattttttcactagacaatgggtacttttctacataagggtcaaggatcatctgccagggttatttaatacaaaggagattttcacattagaaagcagattattaatacaaccaataataatagtaacatgccttttgcatacattatctccttaatcctcacaaataggaaagaaagaacctaagacatcagagagccacttaggattaagaacgcaagctgcccccaatatgcatcctctgtccttaaagacctgagctatgaacatggaaaagattgaaaaacactgccttcaggtatgaataaacatacattagatctgagtaagaatgcatcacttagggggaagggaagc

SEQ ID NO: 708749 - DNA, 629 bp, Homo sapiens
ttggtacagaatttgtttgggatgatggaaaattctggaaatacatagtcatgatggttgtaaaccttgtgaatgtaactaaatgccactgaattttacacattttaaatcaatcctttctaaaaaccaaagagaaatggaatggtatatattacctatcaaatgctgtgctggatacattatagccattatctgattaagcttcatgaaagtctgtgagtcattcaaggccaagtatctttctcaaagtctcacagctaggaacgggcagtaaattttttcactagacaatgggtacttttctacataagggtcaaggatcatctgccagggttatttaatacaaaggagattttcacattagaaagcagattattaatacaaccaataataatagtaacatgccttttgcatacattatctccttaatcctcacaaataggaaagaaagaacctaagacatcagagagccacttaggattaagaacgcaagctgcccccaatatgcatcctctgtccttaaagacctgagctaygaacatggaaaagattgaaaaacactgccttcaggtatgaataaacatacattagatctgagtaagaatgcatcacttagggggaagggaagc

SEQ ID NO: 708750 - DNA, 628 bp, Homo sapiens
ctacttaaaatacaaaaattagccgggtgtggtggcaggcacctgtaatcccagctacttgggaggctgaggcaggagaatwgcttgaaactgggaaggcagaggttgcagtgagccaagatcacgccatagcactccagcctaggggacaagagtgagactttgtctcaaaaaaaaaaaaaaaaaaaaaaaagacgttcagcctcacaagtaactccagaaataggaatgaaaaacaatatgattccttgagaaaaacaacagagggatatggttttcactcttaccagataaggtaactttaagcctgtaactcgctgggtatgcctcaagatgtaaatgattctgatttggggtttttttagtgatagtgaaataatattataccaacaaaagctgcaggtatttgggaatttagtaaaagcacggtagctagaatctattgaaatcataactcaaggcagttttgtgagacgacagtgctttctctttgccattggtcatttggagatttcatttggtgaaattgaagccaacaacagcattgaattttataggagaaaattatccagtccctgtgttgctcagactctcccgcactctactggcccatgcagccctgagcctg

SEQ ID NO: 708751 - DNA, 1778 bp, Homo sapiens
ccaatggtgagtggagcagaaatgattgtccctgccaaaccctgcacaaattatactttcaaaagcaaaacgaatgttgatcctggtttgagctcctaagttttggggtgattgcttacatggtaatagataaccagaacagcaactctgcagccacgagcaccacctaaattgtgccacaggagctctgcagccagggacccagggttgctctgaggcccttacagttcatcccatggttgccagaccccacagtcagtgctagaacttctgctgtgttgccactgttgtggccatgatgagaagaacaaagggtgaccaggcaatctcagagtgcgtgtgctggctgcaagcaggggctcagaggagggcacagctctgctattgaccagctgtgtgagcttgggcargtgtcctaaccactctgggactcaactacttctttctgaagtgggatcagtaggggtaccatatgcatggagtggttgtgagaattagacaaattaatagatacagatgatgagaacagtgctgggctaatgagtatgcattattctctacctcgggccccccatcacttcctatctagtacgtgatttccttctagcagctgttatcactacatgaccttatcgcatgtattgatgtgctctcttgtttttggtctgctctccttcctgttgggttgtaagctcgatgcaggaaggaagtatgttttcctgtcactgaatcttcagcacctagaagagtaggcgctgatatatcaggctagatgtgtcaagcacatatcacacgctcagtgaatgtttgctgagcaaatgaatgaagtggctgataatatcaccagagagctaagataggacctcaaataacgctaatacaaaatagacaccataaggcttgtgagagaggtgcacaaagctaacaggcttcaaggaaagggaaagaaatgaaaccaatggggaattctagaaaaggctttggagaagggatgccacaggggttgggcctcaaaggagagacaggacttcaagagatgaagatgtaacagaagatgggactgagagagaattagtaagagccaagaccaaagtagggaaggacaggacatgcttagggaagggccagtggtgcccttgggctggtctacagcaattgaggttacacagactggctaagaccattgtcacaaccttccagtgtgtcccccaaagggtaaaatattctccaggtcccaggtggattcagtgcaagcacctcctgttcagctccacctgggcctgactcttcccgtgctgggtgagctgagaatgatccatgcagccaggcttatggctgaaaggatcccagagattttcatccttttccttttgtaagaacacagacacagaggttgggctttcaattctaaattctaaagaagagaagatgccccatcttcaggaggccaccctgacaacgtctagcactgggacaaacaattgcagggagctccaggagacaggtggggaagaatgtgtgaacagaactgactgctattgaatttaagatggtattatgttggtgcaaaagtaactgtagtttttgccattacattttttttaaatgacaaaaactgcaattagttttgcaccaacctaatatttaattatttcctgcctaaaaatggggacataaatgaaatattcattgactgaatatattcatgttatataaatatatatatttatatatattatatatatgtgaatatatattatatatatgtgaatatatat

SEQ ID NO: 708752 - DNA, 1778 bp, Homo sapiens
ccaatggtgagtggagcagaaatgattgtccctgccaaaccctgcacaaattatactttcaaaagcaaaacgaatgttgatcctggtttgagctcctaagttttggggtgattgcttacatggtaatagataaccagaacagcaactctgcagccacgagcaccacctaaattgtgccacaggagctctgcagccagggacccagggttgctctgaggcccttacagttcatcccatggttgccagaccccacagtcagtgctagaacttctgctgtgttgccactgttgtggccatgatgagaagaacaaagggtgaccaggcaatctcagagtgcgtgtgctggctgcaagcaggggctcagaggagggcacagctctgctattgaccagctgtgtgagcttgggcaagtgtcctaaccactctgggactcaactacttctttctgaagtgggatcagtaggggtaccrtatgcatggagtggttgtgagaattagacaaattaatagatacagatgatgagaacagtgctgggctaatgagtatgcattattctctacctcgggccccccatcacttcctatctagtacgtgatttccttctagcagctgttatcactacatgaccttatcgcatgtattgatgtgctctcttgtttttggtctgctctccttcctgttgggttgtaagctcgatgcaggaaggaagtatgttttcctgtcactgaatcttcagcacctagaagagtaggcgctgatatatcaggctagatgtgtcaagcacatatcacacgctcagtgaatgtttgctgagcaaatgaatgaagtggctgataatatcaccagagagctaagataggacctcaaataacgctaatacaaaatagacaccataaggcttgtgagagaggtgcacaaagctaacaggcttcaaggaaagggaaagaaatgaaaccaatggggaattctagaaaaggctttggagaagggatgccacaggggttgggcctcaaaggagagacaggacttcaagagatgaagatgtaacagaagatgggactgagagagaattagtaagagccaagaccaaagtagggaaggacaggacatgcttagggaagggccagtggtgcccttgggctggtctacagcaattgaggttacacagactggctaagaccattgtcacaaccttccagtgtgtcccccaaagggtaaaatattctccaggtcccaggtggattcagtgcaagcacctcctgttcagctccacctgggcctgactcttcccgtgctgggtgagctgagaatgatccatgcagccaggcttatggctgaaaggatcccagagattttcatccttttccttttgtaagaacacagacacagaggttgggctttcaattctaaattctaaagaagagaagatgccccatcttcaggaggccaccctgacaacgtctagcactgggacaaacaattgcagggagctccaggagacaggtggggaagaatgtgtgaacagaactgactgctattgaatttaagatggtattatgttggtgcaaaagtaactgtagtttttgccattacattttttttaaatgacaaaaactgcaattagttttgcaccaacctaatatttaattatttcctgcctaaaaatggggacataaatgaaatattcattgactgaatatattcatgttatataaatatatatatttatatatattatatatatgtgaatatatattatatatatgtgaatatatat

SEQ ID NO: 708753 - DNA, 1778 bp, Homo sapiens
ccaatggtgagtggagcagaaatgattgtccctgccaaaccctgcacaaattatactttcaaaagcaaaacgaatgttgatcctggtttgagctcctaagttttggggtgattgcttacatggtaatagataaccagaacagcaactctgcagccacgagcaccacctaaattgtgccacaggagctctgcagccagggacccagggttgctctgaggcccttacagttcatcccatggttgccagaccccacagtcagtgctagaacttctgctgtgttgccactgttgtggccatgatgagaagaacaaagggtgaccaggcaatctcagagtgcgtgtgctggctgcaagcaggggctcagaggagggcacagctctgctattgaccagctgtgtgagcttgggcaagtgtcctaaccactctgggactcaactacttctttctgaagtgggatcagtaggggtaccatatgcatggagtggttgtgagaattagacaaattaatagatacagatgatgagaacagtgctgggctartgagtatgcattattctctacctcgggccccccatcacttcctatctagtacgtgatttccttctagcagctgttatcactacatgaccttatcgcatgtattgatgtgctctcttgtttttggtctgctctccttcctgttgggttgtaagctcgatgcaggaaggaagtatgttttcctgtcactgaatcttcagcacctagaagagtaggcgctgatatatcaggctagatgtgtcaagcacatatcacacgctcagtgaatgtttgctgagcaaatgaatgaagtggctgataatatcaccagagagctaagataggacctcaaataacgctaatacaaaatagacaccataaggcttgtgagagaggtgcacaaagctaacaggcttcaaggaaagggaaagaaatgaaaccaatggggaattctagaaaaggctttggagaagggatgccacaggggttgggcctcaaaggagagacaggacttcaagagatgaagatgtaacagaagatgggactgagagagaattagtaagagccaagaccaaagtagggaaggacaggacatgcttagggaagggccagtggtgcccttgggctggtctacagcaattgaggttacacagactggctaagaccattgtcacaaccttccagtgtgtcccccaaagggtaaaatattctccaggtcccaggtggattcagtgcaagcacctcctgttcagctccacctgggcctgactcttcccgtgctgggtgagctgagaatgatccatgcagccaggcttatggctgaaaggatcccagagattttcatccttttccttttgtaagaacacagacacagaggttgggctttcaattctaaattctaaagaagagaagatgccccatcttcaggaggccaccctgacaacgtctagcactgggacaaacaattgcagggagctccaggagacaggtggggaagaatgtgtgaacagaactgactgctattgaatttaagatggtattatgttggtgcaaaagtaactgtagtttttgccattacattttttttaaatgacaaaaactgcaattagttttgcaccaacctaatatttaattatttcctgcctaaaaatggggacataaatgaaatattcattgactgaatatattcatgttatataaatatatatatttatatatattatatatatgtgaatatatattatatatatgtgaatatatat

SEQ ID NO: 708754 - DNA, 1222 bp, Homo sapiens
agcacaaattcctaaaaaaaactgtgcagaaggccaggcatggtagctcacgcctgtaatcccagcactttgggaggccgaggtgggcagatcacgggtcaagagatccagaccatactggccaacatggtgaaaccccatctctactaaaaatacaaaaattagcctggcgtggtggcctgtgcctgtagtcccagctacttgtgaggctgaggcaggagaatcacttgaacccaggaggtggaggatgtagtgagccaagatcgtgccactgcaccccagcctggtaacagagcgagactccgtctcaaaaaacaacaacaaaaacaaaaactgtgcmgaaattgtttggaaacgtgttgtctgttatgaagtagaaagatcagaacaaattctgatctgacttggttctcaattcatatcacacacacacaagaaattctgatctgacttggttctcaattcatatcacacgcacactagaaattctgatgtgacttggttctcaattcatatcacacacacacacagatacacacagacaacacttttgtgctgaaccacggatatccaaagatgaatccaagaccacgacaggctcccatgtgttaaaaattggctgcagagaggagggaataggaggatctattcaacccatactatactttagattggcttattttagttcttcaaaaaaggcttttaggaaaagttagttttagagaccagaaaagatactcctcatttaattgctgattagtaacataattcatagcaacaaacaaacagaaaacaaaacaaaatagaaagtatcatctaagagttctctgagaaaaccaaactactacaagacttcagcagagtcttcgggaagtacctgaggggctggacaataggctcccattccccctgtgttagggccaccatctccctccagtaatcgcttatggtcctgtgctgggggcatgggggccacagtcttgccatcagtgaaacacagacactataaagaaaacaaaatagtccatttatgttaactgtcaaaaactaaaaaaaaaaatttagtgaggcaaactatatgtcccttaattcttctttgaggaaaagtttgtttttttttttgcagagaaatgaaccgaaacgtcaataacattaagctacatacatcaagaatcataatgtactcaacttctgaaggatttgtaatttttgagggaagtca

SEQ ID NO: 708755 - DNA, 585 bp, Homo sapiens
gagctgatgactttggagccttcttcatcccgtggttgatctgattaccaggaacttttcccaggactaggtatacaaacacagatcattcaattctctaacagatgaaggctgcggtcccctataagatgcagtccatcatatgatgccctcttaattacttttatgacatgcagcaatcatacttcattagaactcttctctttcttctccactaaactgtgagcctcctgaggacaggaactgtgctggtttccttgtacacagcatgatgccaggcacacagtagacatttgatacttgtggtatcaaatgtgtgtgtcatttgagaagaggcatcttcttataattttttttttwaaagagatggggcctctctctctttcccaggctggagtacagtggtgcaatcttggctcactgcagcctcgaacttctgatctctagcaatccttctgcctcagcctcccaaaatgctgggattgcaggcatgagccaccatgcccagccaccttcttataattatatgtgcacccccaacctcaagcacttgacagctgactgctgaaggaatgaatggatgaa

SEQ ID NO: 708756 - DNA, 657 bp, Homo sapiens
tctctcaaaaaaaacacaacagtccaggtgcggtggctcacgcctgtaatcccagcactttgggaggccgaagccagtggatcatgaggtcagttggagatgagcctggccaacayggtgaaatcctgtctctactaaaaatacaaaaaattagctgggcgtggtggcgcatgcctgtaatcccagctactcgggaagcggaggcaggagaatctctgggacccaggaggcagagggtgcactgagctgagatcgcatcactgcattccatcttgaaaaaaaaagagaacaaggtaatcactgaatccactgtcatatattcaataaaaactgggaagaaagtacttgttagggagtatatttagaagttccacctaactcttcaatataactgcaatcacattagttccacctctaccttatctttggagaacattgtcttcggatgttcatcctgtgttcgggactgccatgtcaggttggccaaagcactaaggcacatttccttcaagtctatcaaaaacaaaaaggaagaaacagttatctgtagtactacatctctactaccaagggaatactcgataagtggtccagaaaataacaattatagcagcaaaatggagtcatcatgtgacctgaaatgggcaattgcaatta

SEQ ID NO: 708757 - DNA, 1820 bp, Homo sapiens
gcagacatcatgcaaggggaactccaagtgcctcattgccctgggtcagatatcccaacgatgccaaagtgcactgtctgtgctgtcagcccacctgtggctgggcttgcaggggtgatgtgggctcaccctacaacaggcctggactagaacacagagtggtccatggccttctggggttctctgcgcttgagcactgacccatcacaggggacagtaaccaggttcacggtaaaggctggtggctctgttatggagattttggtggctttaccttcagcaaaagctgacatgctgcccactayacaaagttcaggtagaacccttccttccctaagttctcagagtaatggagttaacagactactagtttgggagccaactgggacttaggtcggcactgctcttagttaagggtccctgggccaatcactgaccttctctggccccacattcttctggtgtggaatgaggtattgaactaaaacaaatcttgaagatcccattcaacattctatgtatctaattaagctggtgtaaaccacttttcccactcccaggtttctctcttgggatctttgagcttctgaagtcaagtaagagtcttttcagttggacctacccataccaccatcattcaccaccaagacaaagggtccagtggggctgggtgcagtggcttacgcctggaggccgagactggagaattgcttgagcctaggagtttgagaccagcctgggcaacacagggagatcacatctctacaaaaaatttaaaaattagctaggtgtaatgctgcttgcctgtagtctcagctacttgggaggccgaggcaggagaatttcttgagcctaggaggttgaggctgcaatgacccgtgattgtgccactgcactccagcctggacaacagagtgagacggtctcaaaaaaaaaaaacaagaaaaaaatcttaaaaagggtccagtggcagcaggtaacttcctccagttgtcagcagatgcacaaggccatggcaacaatgattaccgactctatcttaggacagttccaggcttcctcgtgctcaacttggagttcctttgctgttcccctccccatcttgccttgtattgcctatgggacctagactaagaatatatatatatatatataaaatttttttttttgagacaactctgtcgcccaggctggagtgcagtggtgcaatctccactcactgcaacctctgccgtgcaggttcaagcaattctcctgcctcagcttcccaagtagctgggattacaggcgcctgccaccatgtctggctaattttgtagttttagtagagacggggtttcaccatcttggccaggctggtctcgaactcctgaccttgtgatccacccaccttggcctcccaaagtgctgggattataggcgtgaaccaccatgcccggccaagaatatttttgtctaaccaccttctgggggctcctttctctgacaggacaatggggacaaagtgatgagtaaagtggtcccagatgtgggcaaggtgttccggctggaggtcgtggtggaccagcccatggagaggctctatgaagagctcgtggagcgcatggaagcaatgggggagtggaaccccaatgtcaaggagatcaaggtgagcaaagtccaggtgcgggtggcaggggcccaggagagcccagtgtgaatgctgtatcaaagagaggacccctagctgtggggggtgcttagcccaacacaggctgagtcgtgattctggttccccatggcctggtaggtcctgcagaagatcggaaaagatacattca

SEQ ID NO: 708758 - DNA, 1976 bp, Homo sapiens
  misc_feature 27, 1677: n = A,T,C or G
gtggagataatggtgcccagttggganttgcttcacctcagacataataaagggaggctggggttggggagagggaggatgggtggtcagtgcttttggctggggatggaggaaacaggaggagcatggcacataggctggggagggatggcccagggtgctcaagagggaggtgctaaggagtcaccagatgccagatgcaccctaaatgatttgtagatagattggatgtaaggcatgaaatgcagccagtatggtgctcaggactttagcctgcgtagctagttgaatgatggtgcccttactcagactggaagaggtcaacaaagtgggcaaatctctagcaagactgatcaagataaataaagatgtgtcccggcacagtggctcatgcttgtaatcccaacactttgggaggccgaggtgggtgggtcacctgaggtcaggagttcgagaccagcctgaccaacatggagaaacaccatctccactaaaaatataaaattagccaggcatggcggtgaatgtctgtaatcccagctacttgggaggctgaggcaggagaatcgcttgaacctgggaggcagatgttgcagtgagccaagatcatgccattgcattctagcctgggcaacaagagcaaaactctgtctcagaaagaaaaaaaaaagataaataaagatgcaaaaatgtgcaatataaatttaaacaagccagaactataggtaccctagatatttttaaatgttaaaagaaatgtttaagcaattgagtcaatatcttagtaaacagaggcaaaatagaacatatttagaaaacaatatctaaattggcaaaatataaactaaaatctgacaaaattgatagctattttaaaactaaaataatttcaattatttcttccccctagcgtgtgtatatatatatatgtgtgtatgtgtgtgtgtgtgtgtgtgtgtgtgtgtgtgtgtgtatgggatatataactatatatatttctaggccttgattattttatatatgaatttcactatgtttaagagacagataattatataattttycaaaaaatggaaaagagagaaagcttcactatttattcctaaaggtgcagggaaggtacctgatactttcttccctccacatgatcttaaacacaaagtcatggcacctgtgaaactcctgcactcccctgcacaggtctttaccacctattgatgcaagaaagatttgggggtaatcctgactttctccagtgatgcactcaccttgtgagatggaaagaaaaagggaaggctgggtagtggaagggcagtgggtgggggtgtgaaacctggggcaggtatcaagaggagtgtggagagatgggatggacactttcctgatacattcttgtgctaaggacaaccaaatatgggtctgttctatctctagaaagcttgtctatatatggaagctcatatagtcatatatggaatatgaaagctcgtataaggaatattttttgctggaagcttcctgttggagattcctgatgaaaagacttatgatagtcttttattctcccacgttctctccttttcatcaggattctttgtggacacgcatggtctagagtctgtccctggtggtgcagggtgttccctcgcccttctgcctgggttaactgtatccccnacagccaaccctgtgattatgggacagtgcctttttccctggggctcccaagtctcttctgagctcaatccttgagatattaacttccttcagtctttgcaaaaagagtaactaacgttggccttgggctcctcaccatctggtttattttaaaaagctgagtggcaaatgagaaatttggaaggtctgagagtggccgaagcagtgaaggaaagtctctttgcactttaaaaggtaggatggcatctggcctggcagagacagtcatttacatctccactggtacatgactgaagtca

SEQ ID NO: 708759 - DNA, 586 bp, Homo sapiens
cctaacttaataggcagacaagattgtaaacctaacttaggagtatgcatctgtaacaatagctgagtcttggccaatgccggcaaccatacttcaaccactcattcactgctgagtgttcaaactgtattcaaataaggcaaaaactgagctgtaacctatccagctatttctgtaactcaattcctatttctgtatgtcactttcctttttttgtctataaatttgttctgaccacaaggcacccctggagtctgtctgaatctgctgtgattctgggggctgctcaattcgcaaatcgttcattgctcaattaaactgctttaaatttaatttggctcaaattttactttcatcatatacaatgttctttttcccttcagaaacagtatctctgctctctctctttctctctctctctctcactgtctctgtctcacacacacacacagagcaagaattgaaactttttaaatctaaattagccctatatttaataactgaaggtakccatgatttaactagattatttttctgagaccttggactctttacttttgagggactgaatttaaatctcaatatt

SEQ ID NO: 708760 - DNA, 586 bp, Homo sapiens
cctaacttaataggcagacaagattgtaaacctaacttaggagtatgcatctgtaacaatagctgagtcttggccaatgccggcaaccatacttcaaccactcattcactgctgagtgttcaaactgtattcaaataaggcaaaaactgagctgtaacctatccagctatttctgtaactcaattcctatttctgtatgtcactttcctttttttgtctataaatttgttctgaccacaaggcacccctggagtctgtctgaatctgctgtgattctgggggctgctcaattcgcaaatcgttcattgctcaattaaactgctttaaatttaatttggctcaaattttactttcatcatatacaatgttctttttcccttcagaaacagtatctctgctctctctctttctctctctctctctcactgtctctgtctcacacacacacacagagcaagaattgaaactttttaaatctaaattagccctatatttaataactgaaggtatccatgawttaactagattatttttctgagaccttggactctttacttttgagggactgaatttaaatctcaatatt

SEQ ID NO: 708761 - DNA, 606 bp, Homo sapiens
gctatcatgatgaccaaataaattaaaactctaaattacctgtgcaaagggaaaaatattacatttttaaggaggaagaacttcagcatcacattgaatgacagcaggaaaacataggaagacataagaaaacagctttgttgcaagagtttaataaatttattgtaattttgctttgtagaaatttgttttctatcactatttttagaataaggcatctgaaaaccgcatctgagcaggaccaacttccgccttctcaaatgctaatctttctctttcacagcatagttttattttatttttttggtcttcgtattttccatttctcaaaaaacattctagggtaatttcctagctttagcttccaatcctatttaaatttatatttcagttatcatatttttagttttcaagagatagttcttgttcttacaatattcctcttctacagcattctatatactsctgttgagtaggataccttctattatctccctggggctcccaactgtttgaaagtaatctgtttacagaaaacttgcatacttgtaccagcactgtctgtttcctcagtccctttggttctgctgctcaggttggtcctta

SEQ ID NO: 708762 - DNA, 664 bp, Homo sapiens
actgtgttagtcccctatggctgcaataatgaagtaccagaaactaggtggcttagaacaacagaaatcttatcccacagttctggaggccagagtctgagattgaggtgtcagcagggccacacttcctctgaaactggcaggggaaaatgtttccaggtggactggttaatcatctctgcttaaggaaaaggagacagaagcccccaggggtgtgatcttcctaaggtgacatagcargtcatttgcaaaatggggatggggtaacattaagtgaaaagagtaaaattatcaagtgaaaaaaagtatactgactgggcactgtggtttacgcctgtaatcccagcactttgggaagccgaggcagatggctcacttgagcccaggcattcgagaccagcctgggcaacatggcaagaccctgtctctacaaaaaatacaaaaattcaccgggcatggtgatgtgcacctgtagtcccagctactcgggagactgaggtgggaggaccacttgagcccaggaggtcaaggctgcagtgagccaaggttgtgccactgcactccagcctgggtaacagagcaagaccctgtctcaaagaaaaaaaaaaaagtctatcacttgtgcaaagggggcccattttgcttaaacaatggggagaagtta

SEQ ID NO: 708763 - DNA, 1347 bp, Homo sapiens
ggggcttgactctttataacctgcttactccaatgaacagatgccaatgagctgtctccgaagctctaactgactcccttttccagaagggcagtcatctcccaccctgaaccacagtctcagaaggcaggagtgaggagcagaaagagctcagattttgggattccactgccgccacaggtttggattctagctttgctacttcctggccacatgatcctggacagtttccttagaattgttcagtcaagttttttttttttttctttccaaagtagcgagaaacaccactgacatttgcgggctgttgaatcactgagcaggtgtgtagagtggctgacagcatgtggcacatggcaggtgcacactcagtggtcctgggtaggagtttattggtttttctacctcattaagaaattgctgcccaaggatttggggctttgggggtttaggcttggctttcctgtggctgaccatggcagctgtcttctctacgttgtggagagatcagacatgaatgagaatcaaagattgtttgtggcctttcctggtttctaggcttttgagtctgtgcagagatctgtcaggggttaagctgcctgggctcaagagattcaggtccttgttcttgtacaaaactagcatttagccccattctaaccatcggggtaggcaggaattgtttggtaacagatccaaactcaacgctcaaccatttctttttaaatgacccgaaaccacttatgaatgcataaaaccctgccccagaaaacagacagacctggacctgatactatgatgtaatttccaaaaacccagaatgatcacaattggcaaataattctgccaccaatcactgttagagagtctttccaacttcatgaccatgtgarggtagaattatggcaggcgacatttgaagatccacaagttaattggtttaaaactgataaatccatacagcaaattaagagttacatctgcaattaattcataatagtgagttcactgagaaggcttgttacttagatccagatggactttcttatgtccaaagaagcaaccaaaaacatctgctttgaaaacctcccaagcccaaaccatcctcagccttgttctttagaatgctttagaatgaccttgttaaaatgcagattgctcctgtaatcccagcactttgggaggccaaagcaggtggatcacttgatgtcaggagtttgacaccagcctggccaacatactgaaaccccgtctctactaaaaatacaaaaataagacaggcgtggtggcgggcacctgtattcccagctatttgggaggctgaggcaggagaatcacttgaaccca

SEQ ID NO: 708764 - DNA, 593 bp, Homo sapiens
atgagccccttgttgggcttttggactttgaaacagggtgaggaatgaagcagagagagggatgataaattgctttgcacaataaatgaagagggatttgggggttgcaagcgggcaagctgagagaggattcgggatgacatgggcagggaccagcccccaacccgctgcccatcactggccccaaaccttgagtgagcatctcccatagcaaggagctgtggatcctagttttccaggatagcctcatggtttgcacctgtggccccagagtaatcactttcactttcagaagtgtttgggtttggctataaattaygtcctaactatgtccaactgccttctgggaggtggtatgttagaaaaaccacagaaaagaggctgcattcacctgggctaagacaaggaggagcgaagagagtagcaggtggaggtagggttgagatggggcagatgcaggtggttagagcagagggagccaggtgagactgagagagagctagaagatgaggaatactcaggtaactagcatatggattacatttagagtattttaagatacaattcacatatattgaaacacaaaaatttta

SEQ ID NO: 708765 - DNA, 952 bp, Homo sapiens
cgacgtaatttattttctcatcttagtataacagcaagtgaggtaatcatgacaatgtataaatgtgggcctgcctggctaagcattcctattaggagtgactctactaatttcatatcagacagtttctctctcagaagctttaaattaccaacaaagtgtaattggttaaatgtctgggaggatgtaaatgtcaacaataactggtcattactttttctgaattttaggagaattccaaggaagctggtatgggggtgtgatcccaatttgtacagagcggaagcccaaggcaggccatgcctattggcctgaatcgtgctgatgctgattttagaaaagcaagcaatgcttcataagtactgagactgtgtttggaaccaccaacgttctaaaattaggatgtaatgacaaaccatgtgtgatgttttgctagtcaggatatattttgtgccaattacacaatttagttgccctggttttttttttttttttttttttttttttttttgagacggagtcttgctctgtcgcccaggctggagtgcagtggcgcgatcttggctcactgcaagctccacctcccgggttcacgccattctcctgcctcagcctcccgagtagctgggactacaggcgcccgccaccacgcccagctaattattatttttttttttttttgwatttttagtagagacagggtttcaccgtgttagccaagatggtctcgatctgctgacttcgtgatctgcccgtctcggcctcccaaagtgctgggattacaggcgtgagccaccgtgcccagccttttcaagagaacagaactacactcacatactgcatttgatttagaaagaaaaagaagaccatctcaaagaatacacaactatgcccctacaggtcatagaaagcattgtatgtgcacctgagaattaaagtccataataagacc

SEQ ID NO: 708766 - DNA, 1236 bp, Homo sapiens
tattagcagaaccagtcaaaacaagaatctggagcaagttggtaccatcagcacttacacagaatgcacaattagccattaagagcataaagcattagaataatagaaacacagtggctaaagctgtgagtatttcagacacttgacttggaatatatccagtagctgacacaaagtctcattctcaagttcaaagaaaactttcttctattattaaaaagaggtactaggcaaaatagtttctactaacctttgtagtcaatgtcctgggccccagaacaggagtgctgtgcagggttcttgattccctgtaaaggaaaccaactctggttacttgaaggcaaaatgcaatttatcaggaggatatagggtagatgacaggattcaggcaaagactagtcaaccaagcacagaaaagtggacaaaataaaagaaggccagaaccacagccaaaatcctaatagaagatcctacatagattcttactgtggcctcattattactagcaccactgccaaccctggacagggaattctagaatgccccctgcttctttgccccatggcccgagtcaaaatccaaggtaggaatacgccaggcttaccttattcaaatgtccattgccttgctgcaatgggagcagagcagctggaaactcaggcctccttaatgggaaccagggtcctgctgccacccatcttgagctttcccaaaatagggatggtcttcagagtctcaactaatgtcctttttggatttgactcctctttctcaaggaactgcaaaataaacacagctatcactattacacaaaaaaggaaataaactacaatactagatgaagtataagtctagggactatatacctactatatatgttctacagtmagtcttatggagaaataacacttcacttctgtatgcttttctagtccttctagaattgaaaccagtgaggggcaatttaaggtcaacatctgctcctcacatgccttccacagcaatatgatgtgagcactgcagttccattgagctgtggcaattggggtagtttaggaagacagtggagaacagcaagacagttagatcccagtgaaaggaggaagtgcccatgtttatcccaacaatgaagtgcatgttgagaagtgttgggaaccttcagcttcaactccacagcaacagagaagagacttaggactgaaggatccctaaccaacaatgagatagctgcagaca

SEQ ID NO: 708767 - DNA, 1126 bp, Homo sapiens
tgatcctcgcttacagaagtcaagggggaaagatgacgctttcaaagcccgaatctctttaccctggagccagaaccagcgtcgccgccgtcccctgcagctcagccggcaacgcgcgccgagcctcggggcgcagcttggagacgcgcttgctcgttctgggaaggggcacgggacgcacggttccccggccccagctgcacagctcagctcggggctctcacctatcctcgttcagagccacattcggctgcctcccctgaccacccgacacaaagagattcgccggtggaaagaatcgatttcaaaattcaagctcaccgctgctcaacaaggcgcgcacgtttctccccgtctggcttcacatgtcccaaacttccagtaacagaaatgaggaagcagcagccttccccggctgctggcggaggcagtgggtgtaacttgtgaagtttcgtgctatgatgaatctggtcacttgggtgtgttggagagggttggtcgctcctcccttcctcctcccaccatcacctccctcctctccgcctccctctccaatttaattcttccctctggcattcgccggctgtcactcagaatcccagcaccctccccaccacatccttgggggcaatgtatttcgaaaaggtcttaaccattttacggatgaacctggtcaccctgcacaaagcgtgagtgcttgtcaaataattttctacagcacgtggcaaaaaagcagcgcctcttaaaagatataaaaggccagcaatgttacataagcgccccccaccagcccttcaaggacagaaacgtgggtagttcattcagtggagacctaactcccaaacatctattgaaaaggagtgaagggcagaaaaacagaaaccaaactttcagttggctgccttttctttmatatgtactagaaagtatttccaatatacaacatatatttgaaaagaatataatgaacacccacgtgcccaccatgtagcataaaaaaattaaaattactcacatagtggaaactatctgtcaacctcttcctcgctgaaatacatccctctttccttccccctggaaagaaaactgccccaaatttgatttcccatgagcaatttttatatca

SEQ ID NO: 708768 - DNA, 594 bp, Homo sapiens
acagtgaaaccccatctctactaaaacacaaaaaatagctgggcatggtggcgggcgcctatagtcccagttacttgggaggctgaggcaggagaatggcgtgaacctgggaggcagagcctgcagtgagccragatcatgccactgcactccagcctgggcgacagagcaagacttctcaaaaaaaaaaagaaaaagaaaaagaaaaaaagaaaagaaaaagaaatctattatcgattagatttgataaatctattattgactagagagaccaatcaggaacaatgtctaaaattgtgtatgaaaagccattcactcatcaaatgctagtggctgctaagtgtctggcattctgctggatccgaggctccaaaagggaaaaagataagctccctgtactcagagagattacattctatggggggagagaacgacaacgaaccaataaaatactaaaatgtgattcatttcagaatggaagtaaataggctgctaggattgagaataatgaagaaggggtgttttcttcagaaaagaatgatcagggccaggcatggtggctcatgcctgtaattctagcactctgggagacgg

SEQ ID NO: 708769 - DNA, 610 bp, Homo sapiens
agagagggatgcccagcaggcaagatagggagctggcgggggctttcctttacagcaggaaaacagctgcactggagccgccatgatacccaggcgctgcttagagtccgagtgagttccagtctcgggcctgaccgtgcatttgaggtcactcgcacggaattggaggggaacacacagaggtgctgctcttgatgtggatgcagtgctcactcctgacttccaacctagaggtccccgagcctctctgaatcacagtcccctgctactgagaaggctcggtcccttcctactgggtctctctgttctacttcttcgtagtgtggagtgatctcccaattaacatgattcttattaagatggaggtcccattacaatatttataggaagagttaaaaacatggaaatgttcatgatacaatgttaagggaaaaaggcagaatataaaagggtgtctgtgacctgattcagatcccatggttaaaatatgaacacacaggttcatggaaactcactagaggcatctaggccgcggggctcaaggccttcctgctkctgagcgctcactctggggttttcacgggtcctggaccttcacacagagccactt

SEQ ID NO: 708770 - DNA, 595 bp, Homo sapiens
ggtcctagtgatgactcagaatggaatacattgcgcccatatatttttctataataaaactgcaacaccaaggttttgggaargttatcagtcccctaagagtacaaaagcccagcctggccaacatggtgaaaccccgtctctactaaaaaactacaaaattagctgggtgtggtggcatgagcctgttatccagctacttgggaggctgaggcgggagaattgcttgaaccctggaggtggaggttgcaatgagctgagatcacagcattgctttcctacctgggcaaaaagagtgaaactctgtcttaaaaaaaaaaaaaaaaaaaaaaaggtacaaaagaagcatgttcccagagaaagagttgtgattctctcagtcaggagagaaagataaagtgtgaagggaagaacaaattcctggagtttgatgtcaccttcctcctagagacatctgtatctttcccctcattaaaaagtgtgtccccacctaacgaccttcctttgtagtgtgcatactaattgactgaaaaatccctttctataatcttaagtagcaatatttcctagttcagtaggaaatttacttaatttt

SEQ ID NO: 708771 - DNA, 595 bp, Homo sapiens
ggtcctagtgatgactcagaatggaatacattgcgcccatatatttttctataataaaactgcaacaccaaggttttgggaagrttatcagtcccctaagagtacaaaagcccagcctggccaacatggtgaaaccccgtctctactaaaaaactacaaaattagctgggtgtggtggcatgagcctgttatccagctacttgggaggctgaggcgggagaattgcttgaaccctggaggtggaggttgcaatgagctgagatcacagcattgctttcctacctgggcaaaaagagtgaaactctgtcttaaaaaaaaaaaaaaaaaaaaaaaggtacaaaagaagcatgttcccagagaaagagttgtgattctctcagtcaggagagaaagataaagtgtgaagggaagaacaaattcctggagtttgatgtcaccttcctcctagagacatctgtatctttcccctcattaaaaagtgtgtccccacctaacgaccttcctttgtagtgtgcatactaattgactgaaaaatccctttctataatcttaagtagcaatatttcctagttcagtaggaaatttacttaatttt

SEQ ID NO: 708772 - DNA, 610 bp, Homo sapiens
gaaaaacaagcatgttgggagatattgttgtggccacctttggaaattacaatctactgtaagtaaaacaagaatcaatcaatataaatttaggcttgaatcacttctctttttttgaacgaaagataaaactgtaaagaaatatagagatacatggaaggatgatgttaaatcaatacaaaatgatcagtgagttaaaagttacaggttctaggaaacatggctggtgaatacaataataatttattaattttaatgtcagcttcaaatttttggttctttggaaaattgtttaggcccccaaatatataggtctatgtatgtatgtatgtatgtatgtatgtatgtatgtatgtatgcatgyatgtatgcatgcatgcatgtatgtatgtatgtatgtatgtatgtatgtatctatctatctatctatctatctatctatctatctatctatctatctatagctgcattgatgctgtaagtccagagcagttttgcaaaataggctgtgttgctagagagatgctattttccttggcctgtttttaagctgctatccaatagaacatattttttttcctggttgagaaaaaactggatatgatcaata

SEQ ID NO: 708773 - DNA, 610 bp, Homo sapiens
gaaaaacaagcatgttgggagatattgttgtggccacctttggaaattacaatctactgtaagtaaaacaagaatcaatcaatataaatttaggcttgaatcacttctctttttttgaacgaaagataaaactgtaaagaaatatagagatacatggaaggatgatgttaaatcaatacaaaatgatcagtgagttaaaagttacaggttctaggaaacatggctggtgaatacaataataatttattaattttaatgtcagcttcaaatttttggttctttggaaaattgtttaggcccccaaatatataggtctatgtatgtatgtatgtatgtatgtatgtatgtatgtatgtatgcatgcatgyatgcatgcatgcatgtatgtatgtatgtatgtatgtatgtatgtatctatctatctatctatctatctatctatctatctatctatctatctatagctgcattgatgctgtaagtccagagcagttttgcaaaataggctgtgttgctagagagatgctattttccttggcctgtttttaagctgctatccaatagaacatattttttttcctggttgagaaaaaactggatatgatcaata

SEQ ID NO: 708774 - DNA, 610 bp, Homo sapiens
gaaaaacaagcatgttgggagatattgttgtggccacctttggaaattacaatctactgtaagtaaaacaagaatcaatcaatataaatttaggcttgaatcacttctctttttttgaacgaaagataaaactgtaaagaaatatagagatacatggaaggatgatgttaaatcaatacaaaatgatcagtgagttaaaagttacaggttctaggaaacatggctggtgaatacaataataatttattaattttaatgtcagcttcaaatttttggttctttggaaaattgtttaggcccccaaatatataggtctatgtatgtatgtatgtatgtatgtatgtatgtatgtatgtatgcatgcatgtatgcatgyatgcatgtatgtatgtatgtatgtatgtatgtatgtatctatctatctatctatctatctatctatctatctatctatctatctatagctgcattgatgctgtaagtccagagcagttttgcaaaataggctgtgttgctagagagatgctattttccttggcctgtttttaagctgctatccaatagaacatattttttttcctggttgagaaaaaactggatatgatcaata

SEQ ID NO: 708775 - DNA, 610 bp, Homo sapiens
gaaaaacaagcatgttgggagatattgttgtggccacctttggaaattacaatctactgtaagtaaaacaagaatcaatcaatataaatttaggcttgaatcacttctctttttttgaacgaaagataaaactgtaaagaaatatagagatacatggaaggatgatgttaaatcaatacaaaatgatcagtgagttaaaagttacaggttctaggaaacatggctggtgaatacaataataatttattaattttaatgtcagcttcaaatttttggttctttggaaaattgtttaggcccccaaatatataggtctatgtatgtatgtatgtatgtatgtatgtatgtatgtatgtatgcatgcatgtatgcatgcatgcatgtatgtatgtatgtatgtatstatgtatgtatctatctatctatctatctatctatctatctatctatctatctatctatagctgcattgatgctgtaagtccagagcagttttgcaaaataggctgtgttgctagagagatgctattttccttggcctgtttttaagctgctatccaatagaacatattttttttcctggttgagaaaaaactggatatgatcaata

SEQ ID NO: 708776 - DNA, 610 bp, Homo sapiens
gaaaaacaagcatgttgggagatattgttgtggccacctttggaaattacaatctactgtaagtaaaacaagaatcaatcaatataaatttaggcttgaatcacttctctttttttgaacgaaagataaaactgtaaagaaatatagagatacatggaaggatgatgttaaatcaatacaaaatgatcagtgagttaaaagttacaggttctaggaaacatggctggtgaatacaataataatttattaattttaatgtcagcttcaaatttttggttctttggaaaattgtttaggcccccaaatatataggtctatgtatgtatgtatgtatgtatgtatgtatgtatgtatgtatgcatgcatgtatgcatgcatgcatgtatgtatgtatgtatgtatgtatstatgtatctatctatctatctatctatctatctatctatctatctatctatctatagctgcattgatgctgtaagtccagagcagttttgcaaaataggctgtgttgctagagagatgctattttccttggcctgtttttaagctgctatccaatagaacatattttttttcctggttgagaaaaaactggatatgatcaata

SEQ ID NO: 708777 - DNA, 610 bp, Homo sapiens
gaaaaacaagcatgttgggagatattgttgtggccacctttggaaattacaatctactgtaagtaaaacaagaatcaatcaatataaatttaggcttgaatcacttctctttttttgaacgaaagataaaactgtaaagaaatatagagatacatggaaggatgatgttaaatcaatacaaaatgatcagtgagttaaaagttacaggttctaggaaacatggctggtgaatacaataataatttattaattttaatgtcagcttcaaatttttggttctttggaaaattgtttaggcccccaaatatataggtctatgtatgtatgtatgtatgtatgtatgtatgtatgtatgtatgcatgcatgtatgcatgcatgcatgtatgtatgtatgtatgtatgtatgtatstatctatctatctatctatctatctatctatctatctatctatctatctatagctgcattgatgctgtaagtccagagcagttttgcaaaataggctgtgttgctagagagatgctattttccttggcctgtttttaagctgctatccaatagaacatattttttttcctggttgagaaaaaactggatatgatcaata

SEQ ID NO: 708778 - DNA, 1095 bp, Homo sapiens
gatggatgaaactcctgtggcagcagaatagagtggcatttgggaagaagaagaattggcactggtgggggtaaaagttataggacttcagccaccagatgtggaacctaaatgaggactgttcgtctgaggtcatttccaaggggatcctattcaacagggcttctgccagggagggaggttgcctttgaaagagaaaatctgagatttaccctcaggtacagaagctgagggattgctcatggtcaaccaatggagctctaaaagatgagcgggaagctgggtgaagaggaagcatgttttgagccaaggcaattgcatatgcaaaggctgagggatgagagagggcctctcatggtttatttgtagagctgaaagatgtttggtgtggttgcatgccatgtatgtgtggccggggataatgagggctccaggttggaggagtgacatgtggtgagtcaggagaggggtgagaagagtccagaccttctcaggtatatgataaagtttgacatttatcttaaggacaatgggaaacttttgaaaggtgtgatatgatcagtcctgtgtttcacagtttgttttggctgcagtgaggagagtggattgtggagtgggaagagtggaatgggagataccagtaagaarccacggctgtagtcagacaagaagttaggtggactggaccagggatgtgttcgtgggaaatcagaacagtggccagattcatgaaacatggcagagatgactgtcctgaggtagaagaagagctggtaaaaaagatagaaccacagacgatccccaggttcctttcttgaacaacagagtggaagatgtttctgttcaatgcgatggtgaacacgaggtcagagcaggtttgtggaaccaggtgttaaattcagtgatgagtgtactgcaggcaaggcatgctgtgtggcgcccatgtggttgttgacatgtaagacttctgctcaggaggaagatttgggccaaagctttacatttatgcctttggcatatggtccacttttgaagctatgtgagaggaaaagcttgcctgaaaagtgtgtgtgtggtgaacagaggagatagccc

SEQ ID NO: 708779 - DNA, 628 bp, Homo sapiens
caaagtgctgggattacaggcgtgagccacggcgctcagcccttaccacagtttctaaaaatcatctgtgagggagttgtaaaattattggcaccaaaaaagagatattgcacctaattgctgagcccaagcatggttttgacacatgagttccacaatgggaaatattactcccaaactctaggttcataaatagacctggcactggtgtcctcagaacagacaactttggatctgtcatgtccttttgttacgtttcctccccctttaatttgggggaatgcaattgaatatggcagactggtatttagattgcaagctgccgtcayatttcaattggtgtatgatctatttgggggccagtattgtgtgttctggggctcttctgttggaggctaatatggtttggctgtgcccgcacccaaatctcatctcgaagtgttgctctcataattcccgtgtgttgtgggagggacccagtgggagataattgaatcatgggggcggtttcccccatactgttctcatggtagtgaataagtctcacaagatctgttgtttttagaaggggtttcccctttcacttggctcccattttctctcttgctgccaccatgtaagaagtgcc

SEQ ID NO: 708780 - DNA, 628 bp, Homo sapiens
caaagtgctgggattacaggcgtgagccacggcgctcagcccttaccacagtttctaaaaatcatctgtgagggagttgtaaaattattggcaccaaaaaagagatattgcacctaattgctgagcccaagcatggttttgacacatgagttccacaatgggaaatattactcccaaactctaggttcataaatagacctggcactggtgtcctcagaacagacaactttggatctgtcatgtccttttgttacgtttcctccccctttaatttgggggaatgcaattgaatatggcagactggtatttagattgcaagctgccgtcatatttcaattggtgtatgatctatttgggggccagtattgtgtgttctggggctcttctgttggaggctaatatggtttggctgtgcccgcacccaaatctcatctcgaagtgttgctctcataattcccgygtgttgtgggagggacccagtgggagataattgaatcatgggggcggtttcccccatactgttctcatggtagtgaataagtctcacaagatctgttgtttttagaaggggtttcccctttcacttggctcccattttctctcttgctgccaccatgtaagaagtgcc

SEQ ID NO: 708781 - DNA, 628 bp, Homo sapiens
caaagtgctgggattacaggcgtgagccacggcgctcagcccttaccacagtttctaaaaatcatctgtgagggagttgtaaaattattggcaccaaaaaagagatattgcacctaattgctgagcccaagcatggttttgacacatgagttccacaatgggaaatattactcccaaactctaggttcataaatagacctggcactggtgtcctcagaacagacaactttggatctgtcatgtccttttgttacgtttcctccccctttaatttgggggaatgcaattgaatatggcagactggtatttagattgcaagctgccgtcatatttcaattggtgtatgatctatttgggggccagtattgtgtgttctggggctcttctgttggaggctaatatggtttggctgtgcccgcacccaaatctcatctcgaagtgttgctctcataattcccgtgtgttgtgggagggacccagtgggagataattgaatcatgggggcggtttcccccatactgttctcatggtagtgaataagtctcacaagatctgttgtttttagarggggtttcccctttcacttggctcccattttctctcttgctgccaccatgtaagaagtgcc

SEQ ID NO: 708782 - DNA, 669 bp, Homo sapiens
tttttttttttttagtagagacggggtttcaccatgtcggccaggctggtctcgaactcctgacctcaggtgatccacccgcctcagcttcccaaagtgctgagattacaggcatgagccactgtgcctggccatgcttggtttattttcaaattagcctcccctggaatttctaaaaaggcacataattagataagctaccatggtacaaggagtgtctggggggaagagagtgaaaaaaagggtttcaaatacatttcaaggctaaggctacaaaaattaaaataaaaatagttaaaaatgtattttgaagctgagctrctcagtcatattaacgcctaaagagtaagaaggacatacttcagaaaaacctatggctctgtccaggcagggacagttgatgtcgtcatactgacacttttactatggaaaactgacgggtttgagtcttgccttcaatacttgctagctgtgtgaccttgggtaagcgggttcatccctctgtgcttcactgcccccttcacaaagctgttacgatgaaatgctttgatctacataaagcgcttagcagggtggctcaacaagctgcagcagttagtatacagttggttctctgtatccatgggttctgcatctgtggattcaaacaaccaactgaacatatacaaa

SEQ ID NO: 708783 - DNA, 669 bp, Homo sapiens
tttttttttttttagtagagacggggtttcaccatgtcggccaggctggtctcgaactcctgacctcaggtgatccacccgcctcagcttcccaaagtgctgagattacaggcatgagccactgtgcctggccatgcttggtttattttcaaattagcctcccctggaatttctaaaaaggcacataattagataagctaccatggtacaaggagtgtctggggggaagagagtgaaaaaaagggtttcaaatacatttcaaggctaaggctacaaaaattaaaataaaaatagttaaaaatgtattttgaagctgagctgctcagtcatattaacgcctaaagagtaagaaggacatacttcagaaaaacctatggctctgtccaggcagggacagttgatgtcgtcayactgacacttttactatggaaaactgacgggtttgagtcttgccttcaatacttgctagctgtgtgaccttgggtaagcgggttcatccctctgtgcttcactgcccccttcacaaagctgttacgatgaaatgctttgatctacataaagcgcttagcagggtggctcaacaagctgcagcagttagtatacagttggttctctgtatccatgggttctgcatctgtggattcaaacaaccaactgaacatatacaaa

SEQ ID NO: 708784 - DNA, 616 bp, Homo sapiens
ttctgcgttaggccttgctcccttatctgtgcagctgcagcttgatttttcaggctgtttaaaagaattttagtgtggacctgccttaactgttttttgttttttgtttttttcctttctcctctctcagtgatagtcctgtaaatggtgactgtcctgatcattgtatccttcagcctgattttaacccatccttgtcaacatggtgataagttcctggaacctgaataactaggatggaaatgatattgcaggcttaagcaattgatgtaatttataattgtaatttataacaatgttaactataatttacaacactataatttaaacacttataacaatttaatgttaattatagtttataatgttaattataatttgtttyttctacacattcacccttccaattaagtaataactaatgtaataattttctaataaatacatataagttgatataattatgttataattaataacatggctctagacccttcgccctcttgggctcatatattttcttaataaattgactctagcttgttagtcttccacctaagttgcctgctccagatggtttttctttcctgtatcactgttgttgtatcttagggaa

SEQ ID NO: 708785 - DNA, 604 bp, Homo sapiens
tgttctyggggagatattagctagtggcaggtgagcttatgtttatgtgatggcacctgcgagtacatagaggttggatatgttagtaacatatttaaggcatactcaaaacttagggattccttgagtctataatttcataagcatggtttgttaaaattagcaccacaaaggtttaaggaataaaaacaactttctcaagttattttttacttataactcaatgtatacacacacataagcaaacacacaaagcaaacataatgtaatattaaaattaggctgggtatggcagctcacgcctgtaatcccagcactttgggaggccgaggtgggctgacatattcagcccaacagctctagaccagcctacgcaacatggcgaaaccatgtctctacaaaaaataaaaaaataatatccgggcatggtggtgggcacctgtggtcccagctacttgagaggctgaggtgggagaatcaccggagccctggatgggatgttgaggctgaagtgagctgtgacagcatcagtacactccagcctgtctcaagaaaaacaaagagattcaatacaatattttgaactggaatgttacaaactgaa

SEQ ID NO: 708786 - DNA, 644 bp, Homo sapiens
gtctctgagaagactccttcccgtcttcttctgagttctccaaactactccaacctctgcctgttacccagttccaatgtcrcttccacattttcggttatctttatggcagtaccccattcctggtgccaattagtcttttttcacactgctataaagatactactcaaaactgggtaatttataaaggaaggaagtttaattgactcacagttctgcatgactggggaggcctcaggaaacttaaaatcatggcagaaggtgaagaagcagcaagtactttcttcacaaggtggcaggaaagagagagagtgggggaaactgccacttataaaaccatcagatctcatgagaactcatccactatcataagaacagcatgggagaaactgcccccattccaatcacctcccaccaggtccctccctcaacatgtcgggattacaacttgagatgagatttgagtggggacacagagccatatcacccagtaacgaaaacatagataaaagagagaaagcaggatggttttgagggtgtacagatgatgtggcaggactgaggcagaacgctgtgtcgagttggggaggagaaacagaaggccagagtgtgttttggtgacagagccatgcagtacacctgca

SEQ ID NO: 708787 - DNA, 1148 bp, Homo sapiens
ttcaaaagtgtgttggaaggggatttgagaggctgtaaataattttccatgttagagacaggaatgtgggctcagtggcaggctttcttttgttttttgtcaatatgttgtggtgctgtttggatataacctaaatacaactgcagaaaggcttattctatcataacagacctttgtgggttttagaattgtgatggcttgtttcctaaagcattttgattgattcatgtattgctttgcttttcaaatattacaccaacaatttttatgcaagaatcctttatccttgccaagaatggcttttataattttacaaatgttttccctctatgtayataatatttgatgtaaattttaataatataacatggtagtgatattgttgggagctgactgaagatctacaatattgcctttattgaatttacttaaagggattagtgacacacccaggacattttatatgaagattaagttatgaccagagaaggtattttagctgattgacagaagcacagcagacaattcctagaaatacagagaaattggcacaccaaagatacatactgagagttggcacaaagtagatacttaaaaaaaattcctgaatgaatgaatgaatccaaggctactttggttctgctttggccacaagtgctgtgttaacaggagaaagcaagcatgtctaacttgtatgcagagataataatcaaaggaaaaaaaatccctaatatctgataaaatctgcttccttagttgaaaccttttgatactactggtgatattcttatcaacaggtaatcacagttctgttaataatagacagaggataaaagtgaaatctgagaactcaggcattagccctaaatatgttgtttactgtggtgaaatccagggctaaaactgcagacttttatgctcttgatttcttgtctataaaataggcacaatatttattgctaaggcaccagagacttctcaggggcctaaaataaaatgtataagagaaaactttctttcaaaaaataataataatattattaaaactgacctggagttgccagatgactggtggttgttagcttgtctgaaaaataaattatattaaaataattattacctattttaaactaattaccaggaattta

SEQ ID NO: 708788 - DNA, 1148 bp, Homo sapiens
ttcaaaagtgtgttggaaggggatttgagaggctgtaaataattttccatgttagagacaggaatgtgggctcagtggcaggctttcttttgttttttgtcaatatgttgtggtgctgtttggatataacctaaatacaactgcagaaaggcttattctatcataacagacctttgtgggttttagaattgtgatggcttgtttcctaaagcattttgattgattcatgtattgctttgcttttcaaatattacaccaacaatttttatgcaagaatcctttatccttgccaagaatggcttttataattttacaaatgttttccctctatgtacataatatttgatgtaaattttaataatataacatggtagtgatattgttgggagctgactgaagatctacaatattgcctttattgaatttacttaaagggattagtgacacacccaggacattttatatgaagattaagttatgaccagagaaggtattttagctgattgacagaagcacagcagacaattcctagaaatacagagaaattggcacaccaaagatacatactgagagttggcacaaagtagatacttaaaaaaaattcctgaatgaatgaatgaatccaaggctactttggttctgctttggccacaagtgctgtgttaacaggagaaagcaagcatgtctaacttgtatgcagagataataatcaaaggaaaaaaaatccctaatatctgataaaatctgcttccttagttgaaaccttttgatactactggtgatattcttatcaacaggtaatcacagttctgttaataatagacagaggataaaagtgaaatctgagaactcaggcattagccctaaatatgttgtttactgtggtgaaatccagggctaaaactgcagacttttatgctcttgatttcttgtctataaaataggcacaatatttattgctaaggcaccagagacttctcaggggcctaaaataaaatgtataagagaaaactttctttcaaaaaataataataatattattaaaactgacctggrgttgccagatgactggtggttgttagcttgtctgaaaaataaattatattaaaataattattacctattttaaactaattaccaggaattta

SEQ ID NO: 708789 - DNA, 598 bp, Homo sapiens
acgttgagattatatttctaaaatgagtcaacagtgtttgggcgttgatatgtatttacgtacctgtgtgcatataatagttgaggttttatgtgctatttagttaagattctttgttgtttgttgcttatctatatttaaagtcattttcctttttgctgttcatcagatagcaatgtacttgatcctccttaataataatgtgtgcaacaatattgattaagtcacatttaaaataaacttcaattattatatttttataagatagaataatggggtagaaactttatttaagaaccacttttatacataaaagtgagtgggtttgaatgactaatsttacagtataacaactgaatatgccactgggcctggatgaaatatctcaacataagacctgatactatgaaactatgagaagagaacatagaagaaagggtcctggatattagtcttgacgatggttgttgttttttttttttaatatcacaccaaaaagtaagactaaaaaagcaaacataaatacatgagactactaaatcaaactaaaaatcttctgcacatcaaaggaaactatcatcaaaatgaaacttcagcc

SEQ ID NO: 708790 - DNA, 621 bp, Homo sapiens
tctcacgcctcagccaccggagcagctgagactacaggcgtgcaccaccacaccctgctactttttttatttttggaagagatggtgttttgccatgttggccaggctggtctagagctcctgacctcaagtaattcacctgcctcagcctcccaaagtgctgggattacaggcatgagccagtgygcctggccaaggttgaccatattcttgatgagccacctgtgtacaatctgaattcttttcttgtttaactcattggtctgtgcatctgacagtaaagttgagttatttcacttctgtgaaagccaggctgcagttatctttgaccgcttgaaatgctaaaatacaggtgaacctcacaactaaggctctgcccaaggccagagagagaatcctccctcattgctttgagcagaatgcctggtactggagtagatttgcttaaaggcaactctgcatttgataaaatatcagagcaatttatgtccttgtacccttgttccttttctttcctcttaggcagaaatgttaattgacaatcaaaggagtaacaggtgcatacctgaattcacaagcctttggggcccatcttgaatacttctgcagatccaggcctgg

SEQ ID NO: 708791 - DNA, 578 bp, Homo sapiens
ttatgcatatgctataaaccccacaatacattattattgtttattcaatttatcttttaaaaattaaaaataatttaaaatatcttttaaataacaaaaaagtcttacatatttactatatataaagtgcattttttggtgcacttttttcctccctgtcaacctatatttctattattttccctctgcctgataacttcctttagctttgcttgaaatatgggtctgttgctgatgaagtgttgctgcttttattttgcaccccatctccttttttataattgttattgttcaggcaggacagtaaatcttgtccctgttaacttcattttggtgagaaatggaagtcttcrttagttttaaatgtaggttaagttgtcggtagttaatgctgaattctttaatagctgagttgcagtaacattaggtattcactgtgggtgcctctgacttccttcagaggtcaatatatagggatcagggtggataactataaaatccaggttgtattcctctgtacagatagtgtagctgtattagtctgcttgggctgccatattaagataccatagtgtggg

SEQ ID NO: 708792 - DNA, 578 bp, Homo sapiens
ttatgcatatgctataaaccccacaatacattattattgtttattcaatttatcttttaaaaattaaaaataatttaaaatatcttttaaataacaaaaaagtcttacatatttactatatataaagtgcattttttggtgcacttttttcctccctgtcaacctatatttctattattttccctctgcctgataacttcctttagctttgcttgaaatatgggtctgttgctgatgaagtgttgctgcttttattttgcaccccatctccttttttataattgttattgttcaggcaggacagtaaatcttgtccctgttaacttcattttggtgagaaatggaagtcttcgttagttttaaatgtaggttaagttgtcrgtagttaatgctgaattctttaatagctgagttgcagtaacattaggtattcactgtgggtgcctctgacttccttcagaggtcaatatatagggatcagggtggataactataaaatccaggttgtattcctctgtacagatagtgtagctgtattagtctgcttgggctgccatattaagataccatagtgtggg

SEQ ID NO: 708793 - DNA, 621 bp, Homo sapiens
tactttttttgtgccatttaggaaggacattgtagttcttacccttttttctccttttaatgtaattaaggtggtgaaagtactcagttgcaactctaataagaagtgcaaaaagaagcagttccaagccagaagataatatcaaactaaaatatttccagcaatatcagcaaaatgtaaagacaatatcggaaacaaacatttgctgcctcctaccttctctgtygattttaattcagaaaatttaagtgatttttctcatatcgaaaatgagttaaaatactagagagtcttttattccttataaactaagtcagagtaatttattttatctggaggagagtattaaattagctgtcaaccgtgctatacaggtggatggtaactattgaatgaaatgaccaaatctctggtcctgcggcattcatttttaatctctgctttccattgaaaaaggcaaaacatgaaatattgagataatagtactaaaactccaagtaattgcttttgttagctcaactcatgtttactcatattaattactgaaatttgataacccctttgttttttacttagcctgattctgaatgcagtggacagagctataaatcaggtaggtgg

SEQ ID NO: 708794 - DNA, 1836 bp, Homo sapiens
aaatcttcttatccttactggatcatgggttttgttgttgttgttgtttgtatatatagaaaagtgtgttttctggctgggcgtggtagctcatgcctgaaatcccagcactttgggaggccgaggtgggcagatcatttgaggtcaggagttcaaaacaagcctggccaacatgtcgaaaccccctctctacaaaaatgcaaaaattagctgggcatggtggtgcacatctgtaatctcagatacttgggaggctgaggctggagaattgttgaacttgggaggcagaggttgcagtgaacagagatctcgccactgcactccagcctgggagacagtgcgagactccatctcaaaaaaacccaaaaaacaaaacaacaaaaaaagaaaagtgtgttttcctacaggtttgtcttactacttctttatgtatagtatatgtagcttcatatggaagtctaacttcactacattaaaaacaacaaggtcaaactgagaattctaccaaaatatcctctgtgggtggcctgtgatcctaacatgatatagcacctgttatcctagagatgaagaaaagttcaagtactttctgtgcttgtcagagacctgtgatgacacacagaaatctggcatacaggacccgactctgttagctgtattctgacgttacttctggggctttggaatgtgtttatgtgtagcagatggagctattagttagctgtgctatcttgaagaattgctttcccaggtaatcagctctgctcatttaggatgtcgtttccccacctcgatatgtcagctcaagaagcaggaatgattaattgctgcaactggacagtgcactagaataaggggaaccatcccctggtactcccattcaacagggagtttgaagtgctatgaggcagagcaaacaagatggaaacgatgaccaggatgcttcctgaagcttacctgtcagtatatagagttgctgtggcaacctgaagatttgcaattcataggaagagtagagcgagacaaaaccttaagtcatggctgtcattacagtggaatgggtgccaccaacacctggcaacctctattacttcaacttgtttcttttcacgcttggagaaataaaatgcataaaagattaatatgcatagtaaaccttttggtaaaacatgtatgtgttctgcatttcagatgagtaaaaacttcaagagttcccctctacttaaatcaatattacctaataaggttcaaagtgaggttaccatcagactcttgataaaataagaactatgatgcaaggataaagaaagcatattctctttcaaatttaaaaaaggtggggggatagataacagtgtatttttaaaattgttgcccctcctggaaatgcttataatgtattaatgtaaattatgtgccctctttgcagctttctctgtcaccatgcatagtaaggagaaagttagttctgggttttgttaggtctaaatggttcttttccatttcttcttgttaagtaacgggtgttttaagtttctcctggggcaagtacaakccatagagatgaatgttaaaagcacttagttgaggattatctttctggaggggggaaactcaaataacaaaattactgtggtttgtaaatacggtcacatcatgtatgcatgttctgtgattttgtcacttaatggaaatgtaggatttccagcatcaaactaacattacaattgtcctcttcaggtgttcactcgaatgttgaaggttgatgggtatgtaaatcaaaactcatttaaattttatccagttggcactaaggcctcgacttttgtctttgct

SEQ ID NO: 708795 - DNA, 1134 bp, Homo sapiens
tgaggaggggcagcagtcatcacagcccactccgtccctcttactctgtgtctcatgtctctccaaagaccataactctatatactgaaaaggtgaatggggctccaagtaaacaggaagagatgtgtggatgtaaggatcacccatgcaaaacaggccagttaggggccaggtgtggtggctcatgcctgtatagccaccacattgggaggctgaggtgggaggatcacttgaggtcaggagtttgagaccagcctggccagcatgatgaaaccccatctctactaaaaatacaaaaattagctgggtgtggtgatgggtgcctgtaatcccagctactcgggaggctgaggcaggagaatctcttgaacctgggaggcagaggttgcagtgaactgagattgtgctactgcactcagcctgggtgacagaatgagacttcatctcaaaaacaaaaacaaaacaaaacaataaaaccaaaaatcccaggccacttaggaagagaaaaaaaaaaaaatctcatttggtagccttgaaaattaggccagaacctgacctacatgggctgagtgaggggcagccatccttcaataaaacatggcccaggacagcaccttggggaatccatctgctgtcacttgggtaattttatggctggtcagactttctaagtgccctggccatgcctttattcttcatacctctcctttcagatttctccgacactgaccgtgctcagataggtggttagaatgcaacagctactagcacaatattataatttcagggttataagggtttttggggtcaatatcatattggtgcctgagtctcttttactatgtccccatttagtggctgcccagccttggtttgaattccccatgtatcagggagatcattacctacccaggaaatcttttacaattttaggcaaccataaccattagaaacatcttctcatattctccttaaacatgtttctaggtagctttctcttatttctaggtgttccttctgtctctttccccaaagccacttggaataagttgactcactcctccactcatcaacccctcatatatttgaaagttgttttctttttttargaaatctaactctatatcatgaaca

SEQ ID NO: 708796 - DNA, 477 bp, Homo sapiens
ttaagaaattttaaatacaagaaaactgtccatcaaaactgcagtttttgaaaaaaaagttttacaagaaaatcagtgttgaaaattttacttaagactttgaaaartaactgaatttccaatcacatagcaacactaacaagataattaaagaaaaaaatgccaattgagttataagaatcaccaaaaattaagatcaaaagaaacttccagagagagttttatttcatactataaatctcataaggggaagaattttggcttataattcttttttcatccttagaacctagaactttgaggaacatattagtaactaatgatgacattttcttgactagtacaatcaaaatgatattagcttctttcccccaaaaaagagcaaccttggtcaaattgggatatataactttttgttttatttttagaaaaatatatattgaagcattctaattgaggaaatatatttatcatatt

SEQ ID NO: 708797 - DNA, 605 bp, Homo sapiens
atgacaccaagtgccctcaaagtggctgcaaggtttaatttaggagaatggtttgaaagatacaaataggcttctagaaaattacccaccagaggtaatatgtacttaaggaaatcaggcacagctgaggtgggactaccatatggaaaatcgaaagattaaaagataatgtgttaatttaatgatgcggccgttgttccagctctattctcctactttaaatctagcatgcaaaaattcaagctttcgccaacaagtaagatgaatgatagttttttaaatgaagaaaataatgataccaragaaaagcatctagttaatggcatttctttgtcctcaagggaaaactcaataataccacaccctaaattgaggaccctttgattagtcttcctgtacaaatgcatagtagtctctttccctgtcttactcttcaacataacctgccagctaagatggccaaaattagagaaaattatatgctatgaaaaagagtaaaatcaaactaaatgacaaacaaattgcagcagatagtccaaacaagaagcaggaaatgttttttaaaactcaatattttcatagagataaaagaagataaaacaccc

SEQ ID NO: 708798 - DNA, 1083 bp, Homo sapiens
acagccatcaaaaaatctagaaaggtgatggcaggtagagaggatgaaaggtacaaacacaatgaactgagaatattagacagccaggatggctagaacctagtaagcaaatgggaaaaaatgtagggaataagttagaggcagggaggcagatagggactaaaattacatatgggaggctctgtaaggcatttgaatgttattcatgtggaaaaagttatagccaaagggaggatgctatgattttctcaagttgggttaggtaccccttgggttatgttttaatttgactgcttttgttgcagccagaaggttgtagaatgaggtggagtatttcccatgggagctgtggttctgggcagataaaacaatgcacaattctattctcttcacaattctgttcaagtacttctgttataaatccccttaacagtaagtgcccccattgtcaatcacagtggccactgctcttccaaaaccagctttatctaggttttattttctaccagttttcaatatcttaaattttcttctcttttatacaattttaaggctgtttaaaagggctagctcaattggaatatgcataactttccmatgttggaaagtgatctttgctatgctgatcattgattgattacctgacagtcaacacctatttgaatcactgtctcttgcctctaagcattggcttccaagtagatttcactgggctttgtattttaaagtttcctattttccaagctctgttatttgccatgcttcttttcagttttcttaggaaaaaaatgattggatcctgggggcatttgctagatatctggcaaggagcatcacacaggtataaaagcaagtcaacctaactgaggaaaattgagtaaaatggaaaaggatgccagtagaaaggagagaatctgggaggaaaaaaaaaagggaaactatatacagtcaggtagtagtcatatcaaaaaacaaaggaatgcccccaaagagttatgaattgctgcaggagaattaatgagatggaaaatttctcaaggaaaaagagccaagtatatataaaggggagaaaagcataaaatg

SEQ ID NO: 708799 - DNA, 755 bp, Homo sapiens
gcctctctaagtgctgggattacaggcgtgagccaccgtgcctggctctcttttcttacttaatgtctgtgtcaattaaatagaaatgtatcaagttaaaaaccttgcctcggtagcttccagtgcaaataaaggtacccatgccaccccattctggccagcagtaaaattgatggaagcctctggttggggcttcaaggaaagctttatcaaaagataaactcactggctttgtcccttagttcagtggtccccaaccttttkggcaccaagagaccagttttgtggaagacaattttttccatggaccaggagggttccgggggatggttttgggatgaaaatgtttcaccttagatatcatcgggcattcaattctcataaggagcctgcaacctagacctctcacatgtgcagttcacaatagggttcatgctcctatgagaatctaatgccactgctgatctgacaggaggcagagctcaggcagtaatgctcactagttccgttgctcgcctcctgctgtgcagcccagttcctaacaggacacagaccagtactggttcgcaacccagggtttgggggcccctgtcttagttcctttgccttccttccagatggatgcctggaggaacaatcatcccgcaattgtgaaaattgaagccatattttaaagttggtttcaattgtaatacagaagaaatctggaccttgatgacatttgagctagagtactaatcttgatcttcctattc

SEQ ID NO: 708800 - DNA, 755 bp, Homo sapiens
gcctctctaagtgctgggattacaggcgtgagccaccgtgcctggctctcttttcttacttaatgtctgtgtcaattaaatagaaatgtatcaagttaaaaaccttgcctcggtagcttccagtgcaaataaaggtacccatgccaccccattctggccagcagtaaaattgatggaagcctctggttggggcttcaaggaaagctttatcaaaagataaactcactggctttgtcccttagttcagtggtccccaacctttttggcaccaagagaccagttttgtggaagacaattttttccatggaccaggagggttccgggggatggttttgggatgaaaatgtttcaccttagatatcatcgggcattcaattctcataaggagcctgcaacctagacctctcacatgtgcagttcacartagggttcatgctcctatgagaatctaatgccactgctgatctgacaggaggcagagctcaggcagtaatgctcactagttccgttgctcgcctcctgctgtgcagcccagttcctaacaggacacagaccagtactggttcgcaacccagggtttgggggcccctgtcttagttcctttgccttccttccagatggatgcctggaggaacaatcatcccgcaattgtgaaaattgaagccatattttaaagttggtttcaattgtaatacagaagaaatctggaccttgatgacatttgagctagagtactaatcttgatcttcctattc

SEQ ID NO: 708801 - DNA, 755 bp, Homo sapiens
gcctctctaagtgctgggattacaggcgtgagccaccgtgcctggctctcttttcttacttaatgtctgtgtcaattaaatagaaatgtatcaagttaaaaaccttgcctcggtagcttccagtgcaaataaaggtacccatgccaccccattctggccagcagtaaaattgatggaagcctctggttggggcttcaaggaaagctttatcaaaagataaactcactggctttgtcccttagttcagtggtccccaacctttttggcaccaagagaccagttttgtggaagacaattttttccatggaccaggagggttccgggggatggttttgggatgaaaatgtttcaccttagatatcatcgggcattcaattctcataaggagcctgcaacctagacctctcacatgtgcagttcacaatagggttcatgctcctatgagaatctaatgccactgctgatctgacaggaggcagagctcaggcagtaatgctcactagttccgttgctcgcctcctgctgtgcagcccagttcctaacaggacacagaccagtactggttcgcaacccagggtttgggggcccctgtcttagttcctttgccttccttccagatggatgcctggaggaacaatcatcccgcaattgtgaaaattgaagccatattttaaagttggtttcaattgtaatasagaagaaatctggaccttgatgacatttgagctagagtactaatcttgatcttcctattc

SEQ ID NO: 708802 - DNA, 1691 bp, Homo sapiens
tatcagcagcatgagaacagactaatacaccaattgaggttcctccagagaattaacaaaatgtccakgcactctttcgttgttcccccatacccacagacctgccatccctggccctgcctggatgccggtacctggccactgctgctatattccatgcttttggacaagagcatgttcagtattgtccaggagacccagggagctcaagacagagctgagatccagttcctacagccacagttaacaccccagcccccgacacacacacagacttttcaatgcaaaatcaaaccattcccaaatatccagctacatattgttttacctttgaagagaaaaaagcatcagtggggttatgtgattttcatagatgaacaatttttgcaaatatgttaattgaagagtaattggtgctttcttgaccctcctgagcactgatgcttgccaaagggttatacatttcagactaatgatgatatccattactatatgtgcaattgcttataaactaatatatagtcatattaaaatctctaatctgattgagaaattttcagaaacaaggtacactgattttctcaccacttatttcctgctctcatgacagaatttctggagttctttgaattcacctggtttttggagctctgtcaagtcaatatttataactgaactagttcaaacagttcaagcattgtctcttcctttctggttgaagttctgtcttagaagactgttgtagtcagctgtgcttgtcataaagttttgtttaaaattattttagaattttcttctttggctttaatttaaatttttgtttgtttacttttttttttttttttccccggctcactgcaagctccacctcccaggttcacaccattctcctgcctcagcctcccaagcagctgggactaacaggcgcccgccaccaggcctggctaatttttttgtattttttagtagagacagggtttcaccgtgttagccaggatggtctcgatcttctgacctcatgatccacctgcctcggcctcccaaagtgctgggattagaggtgtgagccaccgtgcccagccttgtttactttttaatttataggattgtaaatgaaactatacttggcctcagtttattctctgggaaataggttcttgctacaggtacagtttataataaggatttatttcataatagggagctttttatagattttaatatcatagttgccatttaaaaaattgtattaaaggccgggcgcagtggcttatatctgcaatcccagcattttgggaggccaaggcgggtagatcacctgagattaggagtttgagatcagcctggccaacatggtgaaaaccccgtctctactaaaaatacaaaaaattagctgggcgtggtggtgtgtgcctgaattcccagctactctggaggctggggcaggagaatcacttgaacctgggaggcagagattgcaatgagctgagattgcgccactgcactgcacagagtgaaactctgtcaaaaaaaaaatgcattaaaaatggtaatgatcaccatttattgcttgcctacagtatgtcagtcattatacaaggtatattttataattataaatattatttattatctgattacaaatatgttataccttgcactgtgtcctgtatgtctgttatgtttatttc

SEQ ID NO: 708803 - DNA, 1691 bp, Homo sapiens
tatcagcagcatgagaacagactaatacaccaattgaggttcctccagagaattaacaaaatgtccaggcactctttcgttgttcccccatacccacagacctgccatccctggccctgcctggatgccggtacctggccactgctgctatattccatgcttttggacaagagcatgttcagtattgtccaggagacccagggagctcaagacagagctgagatccagttcctacagccacagttaacaccccagcccccgacacacacacagacttttcaatgcaaaatcaaaccattcccaaatatccagctacatattgttttacctttgaagagaaaaaagcatcagtggggttatgtgattttcatagatgaacaatttttgcaaatatgttaattgaagagtaattggtgctttyttgaccctcctgagcactgatgcttgccaaagggttatacatttcagactaatgatgatatccattactatatgtgcaattgcttataaactaatatatagtcatattaaaatctctaatctgattgagaaattttcagaaacaaggtacactgattttctcaccacttatttcctgctctcatgacagaatttctggagttctttgaattcacctggtttttggagctctgtcaagtcaatatttataactgaactagttcaaacagttcaagcattgtctcttcctttctggttgaagttctgtcttagaagactgttgtagtcagctgtgcttgtcataaagttttgtttaaaattattttagaattttcttctttggctttaatttaaatttttgtttgtttacttttttttttttttttccccggctcactgcaagctccacctcccaggttcacaccattctcctgcctcagcctcccaagcagctgggactaacaggcgcccgccaccaggcctggctaatttttttgtattttttagtagagacagggtttcaccgtgttagccaggatggtctcgatcttctgacctcatgatccacctgcctcggcctcccaaagtgctgggattagaggtgtgagccaccgtgcccagccttgtttactttttaatttataggattgtaaatgaaactatacttggcctcagtttattctctgggaaataggttcttgctacaggtacagtttataataaggatttatttcataatagggagctttttatagattttaatatcatagttgccatttaaaaaattgtattaaaggccgggcgcagtggcttatatctgcaatcccagcattttgggaggccaaggcgggtagatcacctgagattaggagtttgagatcagcctggccaacatggtgaaaaccccgtctctactaaaaatacaaaaaattagctgggcgtggtggtgtgtgcctgaattcccagctactctggaggctggggcaggagaatcacttgaacctgggaggcagagattgcaatgagctgagattgcgccactgcactgcacagagtgaaactctgtcaaaaaaaaaatgcattaaaaatggtaatgatcaccatttattgcttgcctacagtatgtcagtcattatacaaggtatattttataattataaatattatttattatctgattacaaatatgttataccttgcactgtgtcctgtatgtctgttatgtttatttc

SEQ ID NO: 708804 - DNA, 1691 bp, Homo sapiens
tatcagcagcatgagaacagactaatacaccaattgaggttcctccagagaattaacaaaatgtccaggcactctttcgttgttcccccatacccacagacctgccatccctggccctgcctggatgccggtacctggccactgctgctatattccatgcttttggacaagagcatgttcagtattgtccaggagacccagggagctcaagacagagctgagatccagttcctacagccacagttaacaccccagcccccgacacacacacagacttttcaatgcaaaatcaaaccattcccaaatatccagctacatattgttttacctttgaagagaaaaaagcatcagtggggttatgtgattttcatagatgaacaatttttgcaaatatgttaattgaagagtaattggtgctttcttgaccctcctgagcactgatgcttgccaaagggttatacatttcagactaatgatgatatccattactatatgtgcaattgcttataaactaatatatagtcatattaaaatctctaatctgattgagaaattttcagaaacaaggtacactgattttctyaccacttatttcctgctctcatgacagaatttctggagttctttgaattcacctggtttttggagctctgtcaagtcaatatttataactgaactagttcaaacagttcaagcattgtctcttcctttctggttgaagttctgtcttagaagactgttgtagtcagctgtgcttgtcataaagttttgtttaaaattattttagaattttcttctttggctttaatttaaatttttgtttgtttacttttttttttttttttccccggctcactgcaagctccacctcccaggttcacaccattctcctgcctcagcctcccaagcagctgggactaacaggcgcccgccaccaggcctggctaatttttttgtattttttagtagagacagggtttcaccgtgttagccaggatggtctcgatcttctgacctcatgatccacctgcctcggcctcccaaagtgctgggattagaggtgtgagccaccgtgcccagccttgtttactttttaatttataggattgtaaatgaaactatacttggcctcagtttattctctgggaaataggttcttgctacaggtacagtttataataaggatttatttcataatagggagctttttatagattttaatatcatagttgccatttaaaaaattgtattaaaggccgggcgcagtggcttatatctgcaatcccagcattttgggaggccaaggcgggtagatcacctgagattaggagtttgagatcagcctggccaacatggtgaaaaccccgtctctactaaaaatacaaaaaattagctgggcgtggtggtgtgtgcctgaattcccagctactctggaggctggggcaggagaatcacttgaacctgggaggcagagattgcaatgagctgagattgcgccactgcactgcacagagtgaaactctgtcaaaaaaaaaatgcattaaaaatggtaatgatcaccatttattgcttgcctacagtatgtcagtcattatacaaggtatattttataattataaatattatttattatctgattacaaatatgttataccttgcactgtgtcctgtatgtctgttatgtttatttc

SEQ ID NO: 708805 - DNA, 1024 bp, Homo sapiens
cagccccttccctcctgagcagacactggctgagattttccagcttcgactttctagatggtgagaggatggggatgctcagagggacagtgaaggcactgaggcagtaactgtggcaaccatagaagaggctggccacgtgctcatagcggccttcctcctgagacacccgggaaggctgagtctacctcacaggtgtgcctgataaaatttttttgggcagtgttttccttggcttccaaacatagccatccattggaggttttatgtggaagcatctttccagcaggcacaatgacatggctatttcccttgtgactggacgcaaggaaaggatctatgaagagaatgtagccccgaatccctcccttctctcaacttggagcagacagggagccatgtgtggtttccttgctaagatttttgcagtttattctgtgtggctgtgtgtgttggtcccttgccaataatcctagactcacccatcccggcacaggcttktaactgtgggccaagccaaattctgaagcagcgcagttgtttgttgtctgaactcagtcttccccaacacatacttttcttgttgtcctgcacacaccctctcatcagcacccctcccaagtttgttctgagccacctgatataacctcaggtgaacaagaaggctgccctgtggctcttcacggatgaaaagccaaaggcagctgtggcttcggtttgtccccagtagtcactggccacggtgatacctgggttaacatgacctgcccataaatcagtttgctgcaattgcagtgagaggaaggtaccttgtagaaaacctctagattttatgagcttgtttccctgactgcattccagagccacgtgtgagacttgggttaacgtgacctgtccgtaaatcattttgctgaaattcagtgagaggaagtaccagtagagaacctctagattttatgagcttgcttccctgactccattccagtgatcatgatccacaaatgacgaggctgggtggttgcca

SEQ ID NO: 708806 - DNA, 1024 bp, Homo sapiens
cagccccttccctcctgagcagacactggctgagattttccagcttcgactttctagatggtgagaggatggggatgctcagagggacagtgaaggcactgaggcagtaactgtggcaaccatagaagaggctggccacgtgctcatagcggccttcctcctgagacacccgggaaggctgagtctacctcacaggtgtgcctgataaaatttttttgggcagtgttttccttggcttccaaacatagccatccattggaggttttatgtggaagcatctttccagcaggcacaatgacatggctatttcccttgtgactggacgcaaggaaaggatctatgaagagaatgtagccccgaatccctcccttctctcaacttggagcagacagggagccatgtgtggtttccttgctaagatttttgcagtttattctgtgtggctgtgtgtgttggtcccttgccaataatcctagactcacccatcccggcacaggcttttwactgtgggccaagccaaattctgaagcagcgcagttgtttgttgtctgaactcagtcttccccaacacatacttttcttgttgtcctgcacacaccctctcatcagcacccctcccaagtttgttctgagccacctgatataacctcaggtgaacaagaaggctgccctgtggctcttcacggatgaaaagccaaaggcagctgtggcttcggtttgtccccagtagtcactggccacggtgatacctgggttaacatgacctgcccataaatcagtttgctgcaattgcagtgagaggaaggtaccttgtagaaaacctctagattttatgagcttgtttccctgactgcattccagagccacgtgtgagacttgggttaacgtgacctgtccgtaaatcattttgctgaaattcagtgagaggaagtaccagtagagaacctctagattttatgagcttgcttccctgactccattccagtgatcatgatccacaaatgacgaggctgggtggttgcca

SEQ ID NO: 708807 - DNA, 1024 bp, Homo sapiens
cagccccttccctcctgagcagacactggctgagattttccagcttcgactttctagatggtgagaggatggggatgctcagagggacagtgaaggcactgaggcagtaactgtggcaaccatagaagaggctggccacgtgctcatagcggccttcctcctgagacacccgggaaggctgagtctacctcacaggtgtgcctgataaaatttttttgggcagtgttttccttggcttccaaacatagccatccattggaggttttatgtggaagcatctttccagcaggcacaatgacatggctatttcccttgtgactggacgcaaggaaaggatctatgaagagaatgtagccccgaatccctcccttctctcaacttggagcagacagggagccatgtgtggtttccttgctaagatttttgcagtttattctgtgtggctgtgtgtgttggtcccttgccaataatcctagactcacccatcccggcacaggcttttaactgtgggccaagccaaattctgaagcagcgcagttgtttgttgtctgaactcagtcttccccaacacatacttttcttgttgtcctgcacacaccctctcatcagcacccctcccaagtttgttctgagccacctgatataacctcaggtgaacaagaaggctgccctgtggctcttcacggatgaaaagccaaaggcagctgtggcttcgstttgtccccagtagtcactggccacggtgatacctgggttaacatgacctgcccataaatcagtttgctgcaattgcagtgagaggaaggtaccttgtagaaaacctctagattttatgagcttgtttccctgactgcattccagagccacgtgtgagacttgggttaacgtgacctgtccgtaaatcattttgctgaaattcagtgagaggaagtaccagtagagaacctctagattttatgagcttgcttccctgactccattccagtgatcatgatccacaaatgacgaggctgggtggttgcca

SEQ ID NO: 708808 - DNA, 1024 bp, Homo sapiens
cagccccttccctcctgagcagacactggctgagattttccagcttcgactttctagatggtgagaggatggggatgctcagagggacagtgaaggcactgaggcagtaactgtggcaaccatagaagaggctggccacgtgctcatagcggccttcctcctgagacacccgggaaggctgagtctacctcacaggtgtgcctgataaaatttttttgggcagtgttttccttggcttccaaacatagccatccattggaggttttatgtggaagcatctttccagcaggcacaatgacatggctatttcccttgtgactggacgcaaggaaaggatctatgaagagaatgtagccccgaatccctcccttctctcaacttggagcagacagggagccatgtgtggtttccttgctaagatttttgcagtttattctgtgtggctgtgtgtgttggtcccttgccaataatcctagactcacccatcccggcacaggcttttaactgtgggccaagccaaattctgaagcagcgcagttgtttgttgtctgaactcagtcttccccaacacatacttttcttgttgtcctgcacacaccctctcatcagcacccctcccaagtttgttctgagccacctgatataacctcaggtgaacaagaaggctgccctgtggctcttcacggatgaaaagccaaaggcagctgtggcttcggtttgtccccagtagtcactggccacggtgakacctgggttaacatgacctgcccataaatcagtttgctgcaattgcagtgagaggaaggtaccttgtagaaaacctctagattttatgagcttgtttccctgactgcattccagagccacgtgtgagacttgggttaacgtgacctgtccgtaaatcattttgctgaaattcagtgagaggaagtaccagtagagaacctctagattttatgagcttgcttccctgactccattccagtgatcatgatccacaaatgacgaggctgggtggttgcca

SEQ ID NO: 708809 - DNA, 1024 bp, Homo sapiens
cagccccttccctcctgagcagacactggctgagattttccagcttcgactttctagatggtgagaggatggggatgctcagagggacagtgaaggcactgaggcagtaactgtggcaaccatagaagaggctggccacgtgctcatagcggccttcctcctgagacacccgggaaggctgagtctacctcacaggtgtgcctgataaaatttttttgggcagtgttttccttggcttccaaacatagccatccattggaggttttatgtggaagcatctttccagcaggcacaatgacatggctatttcccttgtgactggacgcaaggaaaggatctatgaagagaatgtagccccgaatccctcccttctctcaacttggagcagacagggagccatgtgtggtttccttgctaagatttttgcagtttattctgtgtggctgtgtgtgttggtcccttgccaataatcctagactcacccatcccggcacaggcttttaactgtgggccaagccaaattctgaagcagcgcagttgtttgttgtctgaactcagtcttccccaacacatacttttcttgttgtcctgcacacaccctctcatcagcacccctcccaagtttgttctgagccacctgatataacctcaggtgaacaagaaggctgccctgtggctcttcacggatgaaaagccaaaggcagctgtggcttcggtttgtccccagtagtcactggccacggtgatacctgggttaacatgacctgcccataaatcagtttgctgcaattgcagtgagaggaaggtaccttgtagaaaacctctagattttatgagcttgtttccctgactgcattccagagccacgtgtgagacttgggttaacgtgacctgtccgtaaatcattttgctgaaattcagtgagaggaagtaccagtagagaacctctagattttatgagcttgcttccctgactccattccagtgatcatgatccamaaatgacgaggctgggtggttgcca

SEQ ID NO: 708810 - DNA, 1372 bp, Homo sapiens
gtctagagagggacgctggaactcatacttctgaatttaaatgggaaatagacaaaaatgttacgtgtttataaaagattttaaaatcacaacaaatgctgaatatacatcatttcctagtatatgtaatacttactaaatgggactcatattaggttgcaaaagaaattacaaaaaaactggagctagggaccaaaggactaacagaagtgagaacaaaaaacacgccccatatattttaggaaaaaacggcacagtgatttaatggtaagtcactataaacatgaagggaaagactgccatccaaggaagcgcagaaaaggacacccctcaggtcctggatggaggaggatgacccccaatactggatggagaaggatgcccccagtcctagatggagaaggatgcccccctcagtcctggatggagacgtcatgagtaactgtcggtaggaaacatcatgttcttcattctgcccttgctccttgggctccaacaggaaaaaccagaaattctgtggatataaaacatggaaacattcattctttaaagaaaaaggctgcagagacaagaacagcgaaaggatggtattgaatacatgcaaatggataaaatatgaatgattatgttctcatgttcaacccaatttttaaaagtggatgtatgagcagtgcgagcatttagtcaggccatggtgagcctgtgggcagcggtggcaaacccggactctgcccgccgacaccagcggccccgaaaccctagagccagaggccacctagtggccaaagtcaggcagtcggcccacagctgcaggagagctgcaacccgcccttcagcggattcctggaggctgcacagtgcccagctcccgccacccggtgctctgggcgcgggcaaatgaccctcaggccgtctgggaccgggccagccctgcagcctcagcggtggrctcagagacggctgccacgtgcacacggtgaactatagcagctgtggcagcccccgaccctgtgcaagccaccggcagtgcagaccccatgaccaaaagccgccgcgtcccctaactcagacggtcggccccccagcagccagagggaggaaacctgcagctcagccccatcccagcgcttgcactgtgctcagcgcctgtaatcccactctctgggcgcggacgaggaagactggaccttacggtgggagggcggtgcactcggggaccctcaagccttctggaacaagccctgccatcctccgccgcgggctcagcggcagctgccacctgcacactcctggaagcagcagcggtggcagctctggtctctgccagctccagcaggagcgcagactgtagagccagaagtcactgcagcgc

SEQ ID NO: 708811 - DNA, 1372 bp, Homo sapiens
gtctagagagggacgctggaactcatacttctgaatttaaatgggaaatagacaaaaatgttacgtgtttataaaagattttaaaatcacaacaaatgctgaatatacatcatttcctagtatatgtaatacttactaaatgggactcatattaggttgcaaaagaaattacaaaaaaactggagctagggaccaaaggactaacagaagtgagaacaaaaaacacgccccatatattttaggaaaaaacggcacagtgatttaatggtaagtcactataaacatgaagggaaagactgccatccaaggaagcgcagaaaaggacacccctcaggtcctggatggaggaggatgacccccaatactggatggagaaggatgcccccagtcctagatggagaaggatgcccccctcagtcctggatggagacgtcatgagtaactgtcggtaggaaacatcatgttcttcattctgcccttgctccttgggctccaacaggaaaaaccagaaattctgtggatataaaacatggaaacattcattctttaaagaaaaaggctgcagagacaagaacagcgaaaggatggtattgaatacatgcaaatggataaaatatgaatgattatgttctcatgttcaacccaatttttaaaagtggatgtatgagcagtgcgagcatttagtcaggccatggtgagcctgtgggcagcggtggcaaacccggactctgcccgccgacaccagcggccccgaaaccctagagccagaggccacctagtggccaaagtcaggcagtcggcccacagctgcaggagagctgcaacccgcccttcagcggattcctggaggctgcacagtgcccagctcccgccacccggtgctctgggcgcgggcaaatgaccctcaggccgtctgggaccgggccagccctgcagcctcagcggtggactcagagacggctgccacgtgcacacggtgaactatagcagctgtggcagcccccgaccctgtgcaagccaccggcagtgcagaccccatgaccaaaagccgccgcgtcccctaactcagacggtcggccccccagcagccagagggaggaaacctgcagctcagccccatcccagcgcttgcactgtgctcagcgcctgtaatcccactctctgggcgcggacraggaagactggaccttacggtgggagggcggtgcactcggggaccctcaagccttctggaacaagccctgccatcctccgccgcgggctcagcggcagctgccacctgcacactcctggaagcagcagcggtggcagctctggtctctgccagctccagcaggagcgcagactgtagagccagaagtcactgcagcgc

SEQ ID NO: 708812 - DNA, 575 bp, Homo sapiens
tctccaaagcctgcaggccagaacggctagtcacccaaacagcaaaggtggtggcctgcccctctctccaggagctctgtcccaggaacatttcaaatttccattggccaagggatgctggtgggggtagctrgaggccccagttgggaggtcctgtccagtgaggtggaacaggatcaggggcctgcttacagaagcagtctggccatgatttggtaaagcagctatgctgtgctctgggatctcttctttccctggtcagtttgtactctccaaagccctcaggctggaatgactaagttgcccgaacgggaaagatggcggcctgccccatcttttctctcagagttttatcttgtttcatggaacttaatttttagcctgttgattttactgtctacattagatttgttgagaaagattctgtaatcttttaggttagacaaatgagaattcattgtcttctgtaaataaacctgttcatgtcttgttctctggaaagaagtctctttcagctctctgactttggtcacaatcatgtagagcagtagccagtctacaatgatgtaattgaa

SEQ ID NO: 708813 - DNA, 575 bp, Homo sapiens
tctccaaagcctgcaggccagaacggctagtcacccaaacagcaaaggtggtggcctgcccctctctccaggagctctgtcccaggaacatttcaaatttccattggccaagggatgctggtgggggtagctggaggccccagttgggaggtcctgtccagtgaggtggaacaggatcaggggcctgcttacagaagcagtctggccatgatttggtaaagcagctatgctgtgctctgggatctcttctttccctggtcagtttgtactctccaaagccctcaggctggaatgactaagttgcccgaacgggaaagatggcggcctgccccatcttttctctcagagttttatcttgtttcatggaacttaatttttagcctgttgattttactgtctacattagayttgttgagaaagattctgtaatcttttaggttagacaaatgagaattcattgtcttctgtaaataaacctgttcatgtcttgttctctggaaagaagtctctttcagctctctgactttggtcacaatcatgtagagcagtagccagtctacaatgatgtaattgaa

SEQ ID NO: 708814 - DNA, 2059 bp, Homo sapiens
attagtaattgtgctgagggaaactgcttacatagacattgcagatcaaatatttggagttaaaatgttagtctacatagatggatgattgtaactttactgccattaaaaagatttcagattgcattcatgcttctgtgtacacataatgaaaaatggacaaataatgaagatctctccttcagtctgctctgtttaattctgctgtctgctcttctctaatgctgcatccctaattgtacacagtttagtgatatctaggagtataaagttgtcacccatcgataaaaatcacaaagttggtttaaaaaaaaagaaatagtcatagatgatggtataggtggagaggggttgctgggctttatgtaaagtgctattcaaagcttcacatataggtttcattcaaactttaagaagaaaaaaatgaacaatcagaaatgggtaagatgtggggatataaatagatattttgtacataagacttctgcatccccaaatattagcttgttgtggaattctgtcatctattcttgtttcagtcaaaacaagcaaaaaaaaaaaaaaacagtcagaacagtatgaacaacaatcatctagttccaccaaaaacttttcactcagcaagcaagcattgagtccctagctgaagatgcaaagaggagcaagaaatattctcttccattgagacggtcattgtctaaaggaaaatgtagataagcaaccagacattcagaatgacctgtgttacaagcaataataaagctgagcgctgggtactatggggcacttgggaaggctgcctaagccagagagcttcacagggagccttgatgtctgagtaagaattaaccaggtgaagcagaaggggaaataggctctaggaacagagagctttgagcgcaaaggcaggcagagtgtgaggagaggaggccttacttccttgtgactgcagcatgaaggtaaggggagggctgagagaaatgaggctccacaggtgctcctggatgtcctaattaattttgaattaacaaatcataagtatgactttttctctgtttttttttaaaaaaactttgttccttaattgcatgcaaaatgtatctgttgagataaaataatttcatacctatttctaattagttgctcaaataattgttatccttggagagcagtaaatgacagatgaacattaaaaattttgtaaaaatgtcaattgcagtttgttcatatatcacgtagcaattaccagccttgtctggctgacatatacctgagggagtgtggaaagtgccgaatgcctgaagataaatcaactcttcctctgggaggtgagtttattcttctttgaaacccatgggtatttagtgtctggagatggtggtatggagtacatagagaagcccttcattaggagtgaactcttacttattttctctgatgaactctcagactattttgctgcctcaaattgcactaygacctgtcaggcgttagagagatcagcagtggagacagtcccaggaaacagtctggaaacaaaagggtctgcccctctcctgggtacatcaaatatggaagcatcacatttgccaagagacaacaccataagaggataactgacagcagtcaattctatcctgaaaatgctctgaggctttaagcatagtttactgccttgacattgggcctcagagtacacctgccttttctcccactatcctgataaattgtgcactctaaaatgtttctctgtatcaatgtagcaaacctccatttattagcaactttaagtaacctccaggtcctttagatgactttcattcttctttgtcctggacatttttatatgacagacaaaaatatctattctcagagctggaggagataaaaatgttttccctgaagggaatgaactcttaattaagctaaaagtttttaaagagtatatattaaatgtaaatacagtattatagaaaattataatgtaataaatttactgtgaaagagtccatttttctggtataatactttttatgtagagtttaaaaaaaattgaaca

SEQ ID NO: 708815 - DNA, 2059 bp, Homo sapiens
attagtaattgtgctgagggaaactgcttacatagacattgcagatcaaatatttggagttaaaatgttagtctacatagatggatgattgtaactttactgccattaaaaagatttcagattgcattcatgcttctgtgtacacataatgaaaaatggacaaataatgaagatctctccttcagtctgctctgtttaattctgctgtctgctcttctctaatgctgcatccctaattgtacacagtttagtgatatctaggagtataaagttgtcacccatcgataaaaatcacaaagttggtttaaaaaaaaagaaatagtcatagatgatggtataggtggagaggggttgctgggctttatgtaaagtgctattcaaagcttcacatataggtttcattcaaactttaagaagaaaaaaatgaacaatcagaaatgggtaagatgtggggatataaatagatattttgtacataagacttctgcatccccaaatattagcttgttgtggaattctgtcatctattcttgtttcagtcaaaacaagcaaaaaaaaaaaaaaacagtcagaacagtatgaacaacaatcatctagttccaccaaaaacttttcactcagcaagcaagcattgagtccctagctgaagatgcaaagaggagcaagaaatattctcttccattgagacggtcattgtctaaaggaaaatgtagataagcaaccagacattcagaatgacctgtgttacaagcaataataaagctgagcgctgggtactatggggcacttgggaaggctgcctaagccagagagcttcacagggagccttgatgtctgagtaagaattaaccaggtgaagcagaaggggaaataggctctaggaacagagagctttgagcgcaaaggcaggcagagtgtgaggagaggaggccttacttccttgtgactgcagcatgaaggtaaggggagggctgagagaaatgaggctccacaggtgctcctggatgtcctaattaattttgaattaacaaatcataagtatgactttttctctgtttttttttaaaaaaactttgttccttaattgcatgcaaaatgtatctgttgagataaaataatttcatacctatttctaattagttgctcaaataattgttatccttggagagcagtaaatgacagatgaacattaaaaattttgtaaaaatgtcaattgcagtttgttcatatatcacgtagcaattaccagccttgtctggctgacatatacctgagggagtgtggaaagtgccgaatgcctgaagataaatcaactcttcctctgggaggtgagtttattcttctttgaaacccatgggtatttagtgtctggagatggtggtatggagtacatagagaagcccttcattaggagtgaactcttacttattttctctgatgaactctcagactattttgctgcctcaaattgcactacgacctgtcaggcgttagagagatcagcagtggagacagtcccaggaaacagtctggaaacaaaagggtctgcccctctcctgggtacatcaaatatggaagcatcacatttgccaagagacaacaccataagaggataactgacagcagtcaattctatcctgaaaatgctctgaggctttaagcatagtttactgccttgacattgggcctcagagtacacctgccttttctcccactatcctgataaattstgcactctaaaatgtttctctgtatcaatgtagcaaacctccatttattagcaactttaagtaacctccaggtcctttagatgactttcattcttctttgtcctggacatttttatatgacagacaaaaatatctattctcagagctggaggagataaaaatgttttccctgaagggaatgaactcttaattaagctaaaagtttttaaagagtatatattaaatgtaaatacagtattatagaaaattataatgtaataaatttactgtgaaagagtccatttttctggtataatactttttatgtagagtttaaaaaaaattgaaca

SEQ ID NO: 708816 - DNA, 606 bp, Homo sapiens
aaatgtcttcttttgagaagtgtctgttcatatcctttgcccactttttgatgggattgtttgtatttttcttgcaaatttgtttcagttcatgtgccacatatacaccatggaatactatgcagccataaaaaatgagttcatgtcctttgtagggacatggatgaagctggaaaccatcattctcagcaaactatcgcaaggacaaaaaaccaaacactgcatgttctcrctcataggtgggaattgaacaatgagaacacatggacacaggaaggggaacatcacacgccagggcctgttgtggggtgggggcaggggggagggatagcattaggagatatacctaatgctaaatgacaagttaatgggtgcagcaccccaacatggcagatgtatacatatgtaacacacccgcattttgtgcacacataccctaaatcaaagtataataaaaaaaaggtaggtatcaaaaacataacaattcaaactctcttttaattaaagttggttcttgtattggtagtaagtagggagcttggctggagagatgtgtacaagtgtagatggaagtccccgggtaaagctcttgtttgggaagattca

SEQ ID NO: 708817 - DNA, 606 bp, Homo sapiens
aaatgtcttcttttgagaagtgtctgttcatatcctttgcccactttttgatgggattgtttgtatttttcttgcaaatttgtttcagttcatgtgccacatatacaccatggaatactatgcagccataaaaaatgagttcatgtcctttgtagggacatggatgaagctggaaaccatcattctcagcaaactatcgcaaggacaaaaaaccaaacactgcatgttctcgctcataggtgggaattgaacaatgagaacacatggacacaggaaggggaacatcacacgccagggcctgttgtggggtgggggcaggggggagggatagcattaggagatatacctaatgctaaatgacaagttaatgggtgcagcaccccaacatggcagatgtatacatatgtaacacacccgcattttgtgcacacataccctaaatcaaagtataataaaaaaaaggtaggtatcaaaaacataacaattcaaactctcttttaattaaagttggttcttgtattggtagtaagtagggagcttggctggagagatgtgtacaagtgtagatggaagtccccgggtaaagctcttgtttgggaagrttca

SEQ ID NO: 708818 - DNA, 669 bp, Homo sapiens
tttcttgggttagcttactttaaatatttctccgggaatatgtcagactcaattgtccactctggtatccagggttttattcataatagtgtttttctttttatattaatacttacattaagcttaattaagaacattttacatacatttgtgaattcagtagttctttcraaaagatactcatttgaattcaattctatttaaggtatgtaggtttttgcaaagcatatgcctaagctcattattcaattatgatgtcagttgttatagtaaaatgattattgccctacttaaaaaaatgccagctaaaaatctatctgaaaaacataactcctcttcagagaagattctcaagaatcatctggtccatattgatttatactttaaaaagatgggggtaaaaaaaaaagttatgtacaggttgatagcataagagattctgatctcaacactgacgttctgatctatatatccatatacttgttcaacatttccacctggaggtgtaatagacattcacatttaacagctctaaaatgggcctcctgatacacccactgctaaccacccccttcccaatacatacacaaacttgctatttcaccagtcttctacctctaaccaaatgctaattcaatttgtttagtagttcagccaaaaactttgggg

SEQ ID NO: 708819 - DNA, 669 bp, Homo sapiens
tttcttgggttagcttactttaaatatttctccgggaatatgtcagactcaattgtccactctggtatccagggttttattcataatagtgtttttctttttatattaatacttacattaagcttaattaagaacattttacatacatttgtgaattcagtagttctttcgaaaagatactcatttgaattcaattctatttaaggtatgtaggtttttgcaaagcatatgcctaagctcattattcaattatgatgtcagttrttatagtaaaatgattattgccctacttaaaaaaatgccagctaaaaatctatctgaaaaacataactcctcttcagagaagattctcaagaatcatctggtccatattgatttatactttaaaaagatgggggtaaaaaaaaaagttatgtacaggttgatagcataagagattctgatctcaacactgacgttctgatctatatatccatatacttgttcaacatttccacctggaggtgtaatagacattcacatttaacagctctaaaatgggcctcctgatacacccactgctaaccacccccttcccaatacatacacaaacttgctatttcaccagtcttctacctctaaccaaatgctaattcaatttgtttagtagttcagccaaaaactttgggg

SEQ ID NO: 708820 - DNA, 669 bp, Homo sapiens
tttcttgggttagcttactttaaatatttctccgggaatatgtcagactcaattgtccactctggtatccagggttttattcataatagtgtttttctttttatattaatacttacattaagcttaattaagaacattttacatacatttgtgaattcagtagttctttcgaaaagatactcatttgaattcaattctatttaaggtatgtaggtttttgcaaagcatatgcctaagctcattattcaattatgatgtcagttgttatagtaaaatgattattgycctacttaaaaaaatgccagctaaaaatctatctgaaaaacataactcctcttcagagaagattctcaagaatcatctggtccatattgatttatactttaaaaagatgggggtaaaaaaaaaagttatgtacaggttgatagcataagagattctgatctcaacactgacgttctgatctatatatccatatacttgttcaacatttccacctggaggtgtaatagacattcacatttaacagctctaaaatgggcctcctgatacacccactgctaaccacccccttcccaatacatacacaaacttgctatttcaccagtcttctacctctaaccaaatgctaattcaatttgtttagtagttcagccaaaaactttgggg

SEQ ID NO: 708821 - DNA, 669 bp, Homo sapiens
tttcttgggttagcttactttaaatatttctccgggaatatgtcagactcaattgtccactctggtatccagggttttattcataatagtgtttttctttttatattaatacttacattaagcttaattaagaacattttacatacatttgtgaattcagtagttctttcgaaaagatactcatttgaattcaattctatttaaggtatgtaggtttttgcaaagcatatgcctaagctcattattcaattatgatgtcagttgttatagtaaaatgattattgccctacttaaaaaaatgccagctaaaaatctatctgaaaaacataactcctcttcagagaagattctcaagaatcatctggtccatattgatttatactttaaaaagatgggggtaaaaaaaaaagttatgtacaggttgatagcataagagattctgatctcaacactgaygttctgatctatatatccatatacttgttcaacatttccacctggaggtgtaatagacattcacatttaacagctctaaaatgggcctcctgatacacccactgctaaccacccccttcccaatacatacacaaacttgctatttcaccagtcttctacctctaaccaaatgctaattcaatttgtttagtagttcagccaaaaactttgggg

SEQ ID NO: 708822 - DNA, 1576 bp, Homo sapiens
tcccaacactttgggaggccgaggtgggtggatcatgaggtcaggagactgagaccaacctggctaacatgatgaaaccctgtctctactaaaaatacaaaaaattagccaggcatggtggtgggtgcctgtagtcccagtacttgggaggctgaggcaggagaatgctgtgaacccgggaggtggaggttgcagtgagccaagattgctccactgcactccagcctgggtgacagtgtgagactccatcacaagaataaataaataaataaataaataaataaataaataaataaataaataaaataaaaagataccattaaatatttaacaaattaattgactataaactagcatctatccattctattcattcattcaagaaatatacattgtcagctgggtgcgatggctcacctctgtaatcccagcacttcgggaggctactggagttagaaagatcaataagaggaacaggtaaagaaggaccatttattaactgtctactatgtgccaagcacacacattatttgtcagaatctaaagtaaattcttcaaggttacatagctaataagtattaaaatgaatttcaaaagttagtcaacttgactctgaagtccacattcactccactataccaggctgctccttcataaattatactaatccctgtcataaagcaagatttgatacttggctattattatttatcccaaaatacaaatgtttctaatactttgggatgcaattttacctattccagaatacattgcagaatcaaatatggactttatacagagtatcaattagagaatgtatgaagaaggcaaggcaatcttctcaacttatgactttaacacgttcaaaggtaacatcttttatctggacaggatctattgcagaatcaagccccattgttgtctggaagcagactaaagggaagaaaagaaatgcttatatttgatagattaataacattccaatcactttactttttagatgcaagaaagcaaagcctagaaaaattaaatgtctaagggaactaacttcacatatcaaatcagaatgaggaatataaactaggtcttctgggtttctaaaccattttcaaagagtaagtgattcacattaaaaagacatatttcagctgctctgcctatggagtagccattccgttcttttattcctttaccttcttaataaacttgaaaaaataaaaattaaaaaatactaagacatatttgtactttccagttagtaaaatcaaaaattattttccacttcttattgtagtatctaatgatagaaatcttaattcagcatttctcaatctttggtgtgaataaaastcacttgagaaatatgttaaaatgctggttctcaggccataacacagaactatgtttgtaaatttgagaaagggcccaggagaatttgcatttttaacaaaaacttagattattctgatataactgatcacagatctacactttgaaatatattgccttaaagttagcagaaaatactgacacacactaataaaaaattgagatttgacccatggaaagactacac

SEQ ID NO: 708823 - DNA, 1576 bp, Homo sapiens
tcccaacactttgggaggccgaggtgggtggatcatgaggtcaggagactgagaccaacctggctaacatgatgaaaccctgtctctactaaaaatacaaaaaattagccaggcatggtggtgggtgcctgtagtcccagtacttgggaggctgaggcaggagaatgctgtgaacccgggaggtggaggttgcagtgagccaagattgctccactgcactccagcctgggtgacagtgtgagactccatcacaagaataaataaataaataaataaataaataaataaataaataaataaataaaataaaaagataccattaaatatttaacaaattaattgactataaactagcatctatccattctattcattcattcaagaaatatacattgtcagctgggtgcgatggctcacctctgtaatcccagcacttcgggaggctactggagttagaaagatcaataagaggaacaggtaaagaaggaccatttattaactgtctactatgtgccaagcacacacattatttgtcagaatctaaagtaaattcttcaaggttacatagctaataagtattaaaatgaatttcaaaagttagtcaacttgactctgaagtccacattcactccactataccaggctgctccttcataaattatactaatccctgtcataaagcaagatttgatacttggctattattatttatcccaaaatacaaatgtttctaatactttgggatgcaattttacctattccagaatacattgcagaatcaaatatggactttatacagagtatcaattagagaatgtatgaagaaggcaaggcaatcttctcaacttatgactttaacacgttcaaaggtaacatcttttatctggacaggatctattgcagaatcaagccccattgttgtctggaagcagactaaagggaagaaaagaaatgcttatatttgatagattaataacattccaatcactttactttttagatgcaagaaagcaaagcctagaaaaattaaatgtctaagggaactaacttcacatatcaaatcagaatgaggaatataaactaggtcttctgggtttctaaaccattttcaaagagtaagtgattcacattaaaaagacatatttcagctgctctgcctatggagtagccattccgttcttttattcctttaccttcttaataaacttgaaaaaataaaaattaaaaaatactaagacatatttgtactttccagttagtaaaatcaaaaattattttccacttcttattgtagtatctaatgatagaaatcttaattcagcatttctcaatctttggtgtgaataaaagtcacttgagaaatatgttaaaatgctggttctcaggccataacacagaactatgtttgtaaatttgagaaagggcccaggagaatttgcatttttaacaaaaacttagattattctgatataactgrtcacagatctacactttgaaatatattgccttaaagttagcagaaaatactgacacacactaataaaaaattgagatttgacccatggaaagactacac

SEQ ID NO: 708824 - DNA, 1135 bp, Homo sapiens
cagcactttaagaggtcaatgcaggaggatcacttgagtcctggagttcaagaccagcctggacaacatggaatgattacatctctacaaaaattagctggacgtagtggcacatacctgtggtcctagctactcaggaggctgaggtgagagaatcacttgagmccagaaagttaagactgctaggagccgtgattacaccactgcactcctggcttgggcaatgaagcacaactgtgtctcaaaacacacacacacacacacacacacacacacacaaacaaagaaacaaaaacctttgttaagccactcacacttcctgttcttcaatttgttttctctcttgagaaagggaaaccatcagcagaatctccatttctacataaggttacaaatatagtggaattcaatcaatagaaagatggatagtcttagaaaagttacttaaaacttaaatgtaggactatgacttcctttcagttattcttctcaaacatggacagtttcaaatcaacttactactgttttttttttgagagtgcttgagctttcagaaaaccttctgcaaacccagttttcaatgcattttggtgagcttcaggtatgtttttggttttcatgagtctgtccaaactctcaacatctgatcctctgtcccgcaaaagaaacccgtgaatacacaaacaacacatcaatactggttaacgacacagtgacatttcccaacaatattgtgaccactcaaataaattcactaaaattctataatttttactgtcaatgtgaagaaatggattaagactcaacaatgaattaatcaataactaggaaactaacactagatcctattcctgcgttaatcaattaatagtatcaagaaggtggcattattctctgcaagaatactatactgaaaagaggtcacatgttatcttagagtttgattggcttaatattcacatccctttatctctgctagaggaataatttcattaatttactaaatgtctactaagcagcattcacatacttggtcttatataagttctgaagatgtggccaggcgtggtggctcacacctgtaatcccagcactctgggaggccaaggcaggcagatcacgaggccaggagatc

SEQ ID NO: 708825 - DNA, 1166 bp, Homo sapiens
tatccattctattcattcattcaagaaatatacattgtcagctgggtgcgatggctcacctctgtaatcccagcacttcgggaggctactggagttagaaagatcaataagaggaacaggtaaagaaggaccatttattaactgtctactatgtgccaagcacacacattatttgtcagaatctaaagtaaattcttcaaggttacatagctaataagtattaaaatgaatttcaaaagttagtcaacttgactctgaagtcyacattcactccactataccaggctgctccttcataaattatactaatccctgtcataaagcaagatttgatacttggctattattatttatcccaaaatacaaatgtttctaatactttgggatgcaattttacctattccagaatacattgcagaatcaaatatggactttatacagagtatcaattagagaatgtatgaagaaggcaaggcaatcttctcaacttatgactttaacacgttcaaaggtaacatcttttatctggacaggatctattgcagaatcaagccccattgttgtctggaagcagactaaagggaagaaaagaaatgcttatatttgatagattaataacattccaatcactttactttttagatgcaagaaagcaaagcctagaaaaattaaatgtctaagggaactaacttcacatatcaaatcagaatgaggaatataaactaggtcttctgggtttctaaaccattttcaaagagtaagtgattcacattaaaaagacatatttcagctgctctgcctatggagtagccattccgttcttttattcctttaccttcttaataaacttgaaaaaataaaaattaaaaaatactaagacatatttgtactttccagttagtaaaatcaaaaattattttccacttcttattgtagtatctaatgatagaaatcttaattcagcatttctcaatctttggtgtgaataaaagtcacttgagaaatatgttaaaatgctggttctcaggccataacacagaactatgtttgtaaatttgagaaagggcccaggagaatttgcatttttaacaaaaacttagattattctgatataactgatcacagatctacactttgaaatatattgccttaaagttagcagaaaa

SEQ ID NO: 708826 - DNA, 1166 bp, Homo sapiens
tatccattctattcattcattcaagaaatatacattgtcagctgggtgcgatggctcacctctgtaatcccagcacttcgggaggctactggagttagaaagatcaataagaggaacaggtaaagaaggaccatttattaactgtctactatgtgccaagcacacacattatttgtcagaatctaaagtaaattcttcaaggttacatagctaataagtattaaaatgaatttcaaaagttagtcaacttgactctgaagtccacattcactccactataccaggctgctccttcataaattatactaatccctgtcataaagcaagatttgatacttggctattattatttatcccaaaatacaaatgtttctaatactttgggatgcaattttacctattccagaatacattgcagaatcaaatatggactttatacagagtatcaattagagaatgtatgaagaaggcaaggcaatcttctcaacttatgactttaacacgttcaaaggtaacatcttttatctggacaggatctattgcagaatcaagccccattgttgtctggaagcagactaaagggaagaaaagaaatgcttatatttgatagattaataacattccaatcactttactttttagatgcaagaaagcaaagcctagaaaaattaaatgtctaagggaactaacttcacatatcaaatcagaatgaggaatataaactaggtcttctgggtttctaaaccattttcaaagagtaagtgattcacattaaaaagacatatttcagctgctctgcctatggagtagccattccgttcttttattcctttaccttcttaataaacttgaaaaaataaaaattaaaaaatactaagacatatttgtactttccagttagtaaaatcaaaaattattttccacttcttattgtagtatctaatgatagaaatcttaattcagcatttctcaatctttggtgtgaataaaagtcacttgagaaatatgttaaaatgctggttctcaggccataacacagaactatgtttgtaaatttgagaaagggcccaggagaatttgcatttttaacaaaaacttagattattctgatataactgrtcacagatctacactttgaaatatattgccttaaagttagcagaaaa

SEQ ID NO: 708827 - DNA, 3080 bp, Homo sapiens
cacacagaaaacatacaataccactaaattgcttaaaaccaggaagaaaatattaaaatcatccaaaggaaaaaaacacattatatataaaagaataaggattaaaaactacagcacacttctcatcagaaacaatgtgggccacaaaacaatggagcaatatctttaaaatactcagagaaaaatactgttgacttagaattctatacctagcaaaaatatcttttagaaatgaaggggtattgaaaactttttaaagatatgcaaaagctaaaagaattcatcaccagcagacttgcattgcaagagatgtcacagaaagacttcagatgggaggaaaatgttgacagatggaaatgtgagtacatacagaggaataaagaacactgggaatgcctactatctttgtatctatggcaactatcttgtacatagtaaaatagagatagctgaataaaatgtttttaaataaagcaattttgataattgacaggcaatattaagaacatcagctaaatatttttttctccttagctttgttccatgtctacattccaaaacaatttcataggcattattttcataattttaatttattttacaattattgttgaatagcaacatttttaattttggacaactaaaacaaatttttcattctattatcctgttttaactgagttgattttattctttaatatacagacttgcctttcaaaaggcaatacttaaatggaaattttatttccgcatgccagaaccaccaatcacaactgacggtttacctgttgctcacaagaatctgcaggaaattgaaccctaggccttgcaactcattggactcacaaacactcactgcactggaccccctggggtcaactttatgtcataagtatctgtcaggttcacagaattaagtgtccagcttataaggatgagtaacattgatttatccctccagaaggaagcttaactttttccttcagtttgctttaatgaagcctcatccatcttgcatgctcaggcagtgagtaatttctgttaagtgaatttttggaagctaaaaattacaacaaatcttctcattttattgccttttaaaaaaatctaccaaattttccctgacttccaaaattataatgctgtattctagagatgatgtcacttcattgtttcatcaaaagtgagcccctggaatgatgactcatacaggttaatttgcctttaatgtggcaatttgatgcttagaaatggttctgatttattaatgactatctttgtttcccctagaaataaagtctgtgtatagaacaagatccctccatcaatgctcctaaatgttatggacattattgcttttgtctatttcattgctgcagggagtattcacattcaattaatctagttaggcctttggctacttacttctttacattttcagacatctatttttttatactgcgcttattttcctgaattggattttgctgacattattcactaataagaataatctattttttaatatggcaattgactgatcaattcattctgggtataatctttcaatttttgacagttctcaggtgacactattgttacagaatatcaagtcattttctaactattaaagacttgatggtaacaggttatacaaaagaagtgttggcattcttctgaacagagcaagagattcctaaagagtaaaatgaacaaaatcgcaatcttatactattatgacttaaagaatatgaaagaaaagtttgaatgtcatataaacgtacagaattgtcttatatgaagagacaaaggctataatggaataaaaatttcatcaaacatttaataatttacattgaattcagtttactgggaatcccaatgttgcaagcacagtgctatgtgctagaaacaaaaataagaagaccatcctgtgaaccagtaagaaagacatacttgtgttctttattaggtatagaacacagaaaaatccccgaaatacacacacayacacacacacacacacacacacatgcacaaatctgttaaatgtcctgtttagtttctggatacaagtttttgagctttagttttcctaatctttaaaaagagttaatattagtcggacagcgtggctcacaattgtaatcccagcactttgggggacctaggcaggtgaatcacgaggtcaggagatcaagaccatcctggctaatatggtgaaatcttgtctctactaaaaatacaaaaaattagctgggcgtggtggcaggcgcctgtagtcccacctactcgggaggctgaggcaggagaatggtgtaaacccaggtggtggagcttgcagtgagccaagatcaggtcactgcactccagcctgggtgacagagtgagaccctatcccccccaacaaaagagttaatatttgtacctacttcttaatagggcttcacaatgattaaagagataatacatgaaagtgcacagcaaaaaggctggtccatagtaaagacttcatattattgatttattacctattacaattaactttaatgattatcttattttaggaatagtcactttgaatatttaagtttatctataaacttgtagaggaacatacacacatttttaaaaatcctttccatatagctattcttttccttcatatatttgccaaagttgaccaaactagcaaacaaacatctttaacaaattttacactaaaaaggttaacaggttctatattgtgataaaaatggatcaaactagaaattagcatctgcaaatataaaatacgtacatctgtaaatataaaaaaataaaaaaatgaaacccagactacctcccaaatttaaataagtcaggatattgaagttattaaaatgtattatagacaatcaagaaattaatataaatgccaatatgacatacatgatgtccatggaaggtgaaagaaatttaaaagaaagccacacattcttacatgcatttgtaattaaacaagtgtgaaagctaagtattccactaaatgaaagcaaagacagatataaagaaaagagttagaccaggtacagtggcta

SEQ ID NO: 708828 - DNA, 3080 bp, Homo sapiens
cacacagaaaacatacaataccactaaattgcttaaaaccaggaagaaaatattaaaatcatccaaaggaaaaaaacacattatatataaaagaataaggattaaaaactacagcacacttctcatcagaaacaatgtgggccacaaaacaatggagcaatatctttaaaatactcagagaaaaatactgttgacttagaattctatacctagcaaaaatatcttttagaaatgaaggggtattgaaaactttttaaagatatgcaaaagctaaaagaattcatcaccagcagacttgcattgcaagagatgtcacagaaagacttcagatgggaggaaaatgttgacagatggaaatgtgagtacatacagaggaataaagaacactgggaatgcctactatctttgtatctatggcaactatcttgtacatagtaaaatagagatagctgaataaaatgtttttaaataaagcaattttgataattgacaggcaatattaagaacatcagctaaatatttttttctccttagctttgttccatgtctacattccaaaacaatttcataggcattattttcataattttaatttattttacaattattgttgaatagcaacatttttaattttggacaactaaaacaaatttttcattctattatcctgttttaactgagttgattttattctttaatatacagacttgcctttcaaaaggcaatacttaaatggaaattttatttccgcatgccagaaccaccaatcacaactgacggtttacctgttgctcacaagaatctgcaggaaattgaaccctaggccttgcaactcattggactcacaaacactcactgcactggaccccctggggtcaactttatgtcataagtatctgtcaggttcacagaattaagtgtccagcttataaggatgagtaacattgatttatccctccagaaggaagcttaactttttccttcagtttgctttaatgaagcctcatccatcttgcatgctcaggcagtgagtaatttctgttaagtgaatttttggaagctaaaaattacaacaaatcttctcattttattgccttttaaaaaaatctaccaaattttccctgacttccaaaattataatgctgtattctagagatgatgtcacttcattgtttcatcaaaagtgagcccctggaatgatgactcatacaggttaatttgcctttaatgtggcaatttgatgcttagaaatggttctgatttattaatgactatctttgtttcccctagaaataaagtctgtgtatagaacaagatccctccatcaatgctcctaaatgttatggacattattgcttttgtctatttcattgctgcagggagtattcacattcaattaatctagttaggcctttggctacttacttctttacattttcagacatctatttttttatactgcgcttattttcctgaattggattttgctgacattattcactaataagaataatctattttttaatatggcaattgactgatcaattcattctgggtataatctttcaatttttgacagttctcaggtgacactattgttacagaatatcaagtcattttctaactattaaagacttgatggtaacaggttatacaaaagaagtgttggcattcttctgaacagagcaagagattcctaaagagtaaaatgaacaaaatcgcaatcttatactattatgacttaaagaatatgaaagaaaagtttgaatgtcatataaacgtacagaattgtcttatatgaagagacaaaggctataatggaataaaaatttcatcaaacatttaataatttacattgaattcagtttactgggaatcccaatgttgcaagcacagtgctatgtgctagaaacaaaaataagaagaccatcctgtgaaccagtaagaaagacatacttgtgttctttattaggtatagaacacagaaaaatccccgaaatacacacacacrcacacacacacacacacacacatgcacaaatctgttaaatgtcctgtttagtttctggatacaagtttttgagctttagttttcctaatctttaaaaagagttaatattagtcggacagcgtggctcacaattgtaatcccagcactttgggggacctaggcaggtgaatcacgaggtcaggagatcaagaccatcctggctaatatggtgaaatcttgtctctactaaaaatacaaaaaattagctgggcgtggtggcaggcgcctgtagtcccacctactcgggaggctgaggcaggagaatggtgtaaacccaggtggtggagcttgcagtgagccaagatcaggtcactgcactccagcctgggtgacagagtgagaccctatcccccccaacaaaagagttaatatttgtacctacttcttaatagggcttcacaatgattaaagagataatacatgaaagtgcacagcaaaaaggctggtccatagtaaagacttcatattattgatttattacctattacaattaactttaatgattatcttattttaggaatagtcactttgaatatttaagtttatctataaacttgtagaggaacatacacacatttttaaaaatcctttccatatagctattcttttccttcatatatttgccaaagttgaccaaactagcaaacaaacatctttaacaaattttacactaaaaaggttaacaggttctatattgtgataaaaatggatcaaactagaaattagcatctgcaaatataaaatacgtacatctgtaaatataaaaaaataaaaaaatgaaacccagactacctcccaaatttaaataagtcaggatattgaagttattaaaatgtattatagacaatcaagaaattaatataaatgccaatatgacatacatgatgtccatggaaggtgaaagaaatttaaaagaaagccacacattcttacatgcatttgtaattaaacaagtgtgaaagctaagtattccactaaatgaaagcaaagacagatataaagaaaagagttagaccaggtacagtggcta

SEQ ID NO: 708829 - DNA, 3080 bp, Homo sapiens
cacacagaaaacatacaataccactaaattgcttaaaaccaggaagaaaatattaaaatcatccaaaggaaaaaaacacattatatataaaagaataaggattaaaaactacagcacacttctcatcagaaacaatgtgggccacaaaacaatggagcaatatctttaaaatactcagagaaaaatactgttgacttagaattctatacctagcaaaaatatcttttagaaatgaaggggtattgaaaactttttaaagatatgcaaaagctaaaagaattcatcaccagcagacttgcattgcaagagatgtcacagaaagacttcagatgggaggaaaatgttgacagatggaaatgtgagtacatacagaggaataaagaacactgggaatgcctactatctttgtatctatggcaactatcttgtacatagtaaaatagagatagctgaataaaatgtttttaaataaagcaattttgataattgacaggcaatattaagaacatcagctaaatatttttttctccttagctttgttccatgtctacattccaaaacaatttcataggcattattttcataattttaatttattttacaattattgttgaatagcaacatttttaattttggacaactaaaacaaatttttcattctattatcctgttttaactgagttgattttattctttaatatacagacttgcctttcaaaaggcaatacttaaatggaaattttatttccgcatgccagaaccaccaatcacaactgacggtttacctgttgctcacaagaatctgcaggaaattgaaccctaggccttgcaactcattggactcacaaacactcactgcactggaccccctggggtcaactttatgtcataagtatctgtcaggttcacagaattaagtgtccagcttataaggatgagtaacattgatttatccctccagaaggaagcttaactttttccttcagtttgctttaatgaagcctcatccatcttgcatgctcaggcagtgagtaatttctgttaagtgaatttttggaagctaaaaattacaacaaatcttctcattttattgccttttaaaaaaatctaccaaattttccctgacttccaaaattataatgctgtattctagagatgatgtcacttcattgtttcatcaaaagtgagcccctggaatgatgactcatacaggttaatttgcctttaatgtggcaatttgatgcttagaaatggttctgatttattaatgactatctttgtttcccctagaaataaagtctgtgtatagaacaagatccctccatcaatgctcctaaatgttatggacattattgcttttgtctatttcattgctgcagggagtattcacattcaattaatctagttaggcctttggctacttacttctttacattttcagacatctatttttttatactgcgcttattttcctgaattggattttgctgacattattcactaataagaataatctattttttaatatggcaattgactgatcaattcattctgggtataatctttcaatttttgacagttctcaggtgacactattgttacagaatatcaagtcattttctaactattaaagacttgatggtaacaggttatacaaaagaagtgttggcattcttctgaacagagcaagagattcctaaagagtaaaatgaacaaaatcgcaatcttatactattatgacttaaagaatatgaaagaaaagtttgaatgtcatataaacgtacagaattgtcttatatgaagagacaaaggctataatggaataaaaatttcatcaaacatttaataatttacattgaattcagtttactgggaatcccaatgttgcaagcacagtgctatgtgctagaaacaaaaataagaagaccatcctgtgaaccagtaagaaagacatacttgtgttctttattaggtatagaacacagaaaaatccccgaaatacacacacacacacacacacacacacacacacatgcacaaatctgttaaatgtcctgtttagtttctggatacaagtttttgagctttagttttcctaatctttaaaaagagttaatattagtcggacascgtggctcacaattgtaatcccagcactttgggggacctaggcaggtgaatcacgaggtcaggagatcaagaccatcctggctaatatggtgaaatcttgtctctactaaaaatacaaaaaattagctgggcgtggtggcaggcgcctgtagtcccacctactcgggaggctgaggcaggagaatggtgtaaacccaggtggtggagcttgcagtgagccaagatcaggtcactgcactccagcctgggtgacagagtgagaccctatcccccccaacaaaagagttaatatttgtacctacttcttaatagggcttcacaatgattaaagagataatacatgaaagtgcacagcaaaaaggctggtccatagtaaagacttcatattattgatttattacctattacaattaactttaatgattatcttattttaggaatagtcactttgaatatttaagtttatctataaacttgtagaggaacatacacacatttttaaaaatcctttccatatagctattcttttccttcatatatttgccaaagttgaccaaactagcaaacaaacatctttaacaaattttacactaaaaaggttaacaggttctatattgtgataaaaatggatcaaactagaaattagcatctgcaaatataaaatacgtacatctgtaaatataaaaaaataaaaaaatgaaacccagactacctcccaaatttaaataagtcaggatattgaagttattaaaatgtattatagacaatcaagaaattaatataaatgccaatatgacatacatgatgtccatggaaggtgaaagaaatttaaaagaaagccacacattcttacatgcatttgtaattaaacaagtgtgaaagctaagtattccactaaatgaaagcaaagacagatataaagaaaagagttagaccaggtacagtggcta

SEQ ID NO: 708830 - DNA, 3080 bp, Homo sapiens
cacacagaaaacatacaataccactaaattgcttaaaaccaggaagaaaatattaaaatcatccaaaggaaaaaaacacattatatataaaagaataaggattaaaaactacagcacacttctcatcagaaacaatgtgggccacaaaacaatggagcaatatctttaaaatactcagagaaaaatactgttgacttagaattctatacctagcaaaaatatcttttagaaatgaaggggtattgaaaactttttaaagatatgcaaaagctaaaagaattcatcaccagcagacttgcattgcaagagatgtcacagaaagacttcagatgggaggaaaatgttgacagatggaaatgtgagtacatacagaggaataaagaacactgggaatgcctactatctttgtatctatggcaactatcttgtacatagtaaaatagagatagctgaataaaatgtttttaaataaagcaattttgataattgacaggcaatattaagaacatcagctaaatatttttttctccttagctttgttccatgtctacattccaaaacaatttcataggcattattttcataattttaatttattttacaattattgttgaatagcaacatttttaattttggacaactaaaacaaatttttcattctattatcctgttttaactgagttgattttattctttaatatacagacttgcctttcaaaaggcaatacttaaatggaaattttatttccgcatgccagaaccaccaatcacaactgacggtttacctgttgctcacaagaatctgcaggaaattgaaccctaggccttgcaactcattggactcacaaacactcactgcactggaccccctggggtcaactttatgtcataagtatctgtcaggttcacagaattaagtgtccagcttataaggatgagtaacattgatttatccctccagaaggaagcttaactttttccttcagtttgctttaatgaagcctcatccatcttgcatgctcaggcagtgagtaatttctgttaagtgaatttttggaagctaaaaattacaacaaatcttctcattttattgccttttaaaaaaatctaccaaattttccctgacttccaaaattataatgctgtattctagagatgatgtcacttcattgtttcatcaaaagtgagcccctggaatgatgactcatacaggttaatttgcctttaatgtggcaatttgatgcttagaaatggttctgatttattaatgactatctttgtttcccctagaaataaagtctgtgtatagaacaagatccctccatcaatgctcctaaatgttatggacattattgcttttgtctatttcattgctgcagggagtattcacattcaattaatctagttaggcctttggctacttacttctttacattttcagacatctatttttttatactgcgcttattttcctgaattggattttgctgacattattcactaataagaataatctattttttaatatggcaattgactgatcaattcattctgggtataatctttcaatttttgacagttctcaggtgacactattgttacagaatatcaagtcattttctaactattaaagacttgatggtaacaggttatacaaaagaagtgttggcattcttctgaacagagcaagagattcctaaagagtaaaatgaacaaaatcgcaatcttatactattatgacttaaagaatatgaaagaaaagtttgaatgtcatataaacgtacagaattgtcttatatgaagagacaaaggctataatggaataaaaatttcatcaaacatttaataatttacattgaattcagtttactgggaatcccaatgttgcaagcacagtgctatgtgctagaaacaaaaataagaagaccatcctgtgaaccagtaagaaagacatacttgtgttctttattaggtatagaacacagaaaaatccccgaaatacacacacacacacacacacacacacacacacatgcacaaatctgttaaatgtcctgtttagtttctggatacaagtttttgagctttagttttcctaatctttaaaaagagttaatattagtcggacagcgtggctcacaattgtaatcccagcactttgggggacctaggcaggtgaatcacgaggtcaggagatcaagaccatcctggctaatatggtgaaatcttgtctctactaaaaatacaaaaaattagctgggcgtggtggcaggcgcctgtagtcccacctactcgggaggctgaggcaggagaatggtgtaaacccaggtggtggagcttgcagtgagccaagatcaggtcactgcactccagcctgggtgacagagtgagaccctatcccccccaacaaaagagttaatatttgtacctacttcttaatagggcttcacaatgattaaagagataatacatgaaagtgcacagcraaaaggctggtccatagtaaagacttcatattattgatttattacctattacaattaactttaatgattatcttattttaggaatagtcactttgaatatttaagtttatctataaacttgtagaggaacatacacacatttttaaaaatcctttccatatagctattcttttccttcatatatttgccaaagttgaccaaactagcaaacaaacatctttaacaaattttacactaaaaaggttaacaggttctatattgtgataaaaatggatcaaactagaaattagcatctgcaaatataaaatacgtacatctgtaaatataaaaaaataaaaaaatgaaacccagactacctcccaaatttaaataagtcaggatattgaagttattaaaatgtattatagacaatcaagaaattaatataaatgccaatatgacatacatgatgtccatggaaggtgaaagaaatttaaaagaaagccacacattcttacatgcatttgtaattaaacaagtgtgaaagctaagtattccactaaatgaaagcaaagacagatataaagaaaagagttagaccaggtacagtggcta

SEQ ID NO: 708831 - DNA, 3080 bp, Homo sapiens
cacacagaaaacatacaataccactaaattgcttaaaaccaggaagaaaatattaaaatcatccaaaggaaaaaaacacattatatataaaagaataaggattaaaaactacagcacacttctcatcagaaacaatgtgggccacaaaacaatggagcaatatctttaaaatactcagagaaaaatactgttgacttagaattctatacctagcaaaaatatcttttagaaatgaaggggtattgaaaactttttaaagatatgcaaaagctaaaagaattcatcaccagcagacttgcattgcaagagatgtcacagaaagacttcagatgggaggaaaatgttgacagatggaaatgtgagtacatacagaggaataaagaacactgggaatgcctactatctttgtatctatggcaactatcttgtacatagtaaaatagagatagctgaataaaatgtttttaaataaagcaattttgataattgacaggcaatattaagaacatcagctaaatatttttttctccttagctttgttccatgtctacattccaaaacaatttcataggcattattttcataattttaatttattttacaattattgttgaatagcaacatttttaattttggacaactaaaacaaatttttcattctattatcctgttttaactgagttgattttattctttaatatacagacttgcctttcaaaaggcaatacttaaatggaaattttatttccgcatgccagaaccaccaatcacaactgacggtttacctgttgctcacaagaatctgcaggaaattgaaccctaggccttgcaactcattggactcacaaacactcactgcactggaccccctggggtcaactttatgtcataagtatctgtcaggttcacagaattaagtgtccagcttataaggatgagtaacattgatttatccctccagaaggaagcttaactttttccttcagtttgctttaatgaagcctcatccatcttgcatgctcaggcagtgagtaatttctgttaagtgaatttttggaagctaaaaattacaacaaatcttctcattttattgccttttaaaaaaatctaccaaattttccctgacttccaaaattataatgctgtattctagagatgatgtcacttcattgtttcatcaaaagtgagcccctggaatgatgactcatacaggttaatttgcctttaatgtggcaatttgatgcttagaaatggttctgatttattaatgactatctttgtttcccctagaaataaagtctgtgtatagaacaagatccctccatcaatgctcctaaatgttatggacattattgcttttgtctatttcattgctgcagggagtattcacattcaattaatctagttaggcctttggctacttacttctttacattttcagacatctatttttttatactgcgcttattttcctgaattggattttgctgacattattcactaataagaataatctattttttaatatggcaattgactgatcaattcattctgggtataatctttcaatttttgacagttctcaggtgacactattgttacagaatatcaagtcattttctaactattaaagacttgatggtaacaggttatacaaaagaagtgttggcattcttctgaacagagcaagagattcctaaagagtaaaatgaacaaaatcgcaatcttatactattatgacttaaagaatatgaaagaaaagtttgaatgtcatataaacgtacagaattgtcttatatgaagagacaaaggctataatggaataaaaatttcatcaaacatttaataatttacattgaattcagtttactgggaatcccaatgttgcaagcacagtgctatgtgctagaaacaaaaataagaagaccatcctgtgaaccagtaagaaagacatacttgtgttctttattaggtatagaacacagaaaaatccccgaaatacacacacacacacacacacacacacacacacatgcacaaatctgttaaatgtcctgtttagtttctggatacaagtttttgagctttagttttcctaatctttaaaaagagttaatattagtcggacagcgtggctcacaattgtaatcccagcactttgggggacctaggcaggtgaatcacgaggtcaggagatcaagaccatcctggctaatatggtgaaatcttgtctctactaaaaatacaaaaaattagctgggcgtggtggcaggcgcctgtagtcccacctactcgggaggctgaggcaggagaatggtgtaaacccaggtggtggagcttgcagtgagccaagatcaggtcactgcactccagcctgggtgacagagtgagaccctatcccccccaacaaaagagttaatatttgtacctacttcttaatagggcttcacaatgattaaagagataatacatgaaagtgcacagcaaaaaggctggtccatagtaaagacttcatattattgatttattacctattacaattaactttaatgattatcttattttaggaatagtcactttgaatatttaagtttatctataaacttgtagaggaacatacacacatttttaaaaatcctttccatatagctattcttttccttcatatatttgccaaagttgaccaaactagcaaacaaacatctttaacaaattttacactaaaaaggttaacaggttctatattgtgataaaaatggatcaaactagaaattagcatctgcaaatataaaatacgtacatctgtaaatataaaaaaataaaaaaatgaaacccagactacctccmaaatttaaataagtcaggatattgaagttattaaaatgtattatagacaatcaagaaattaatataaatgccaatatgacatacatgatgtccatggaaggtgaaagaaatttaaaagaaagccacacattcttacatgcatttgtaattaaacaagtgtgaaagctaagtattccactaaatgaaagcaaagacagatataaagaaaagagttagaccaggtacagtggcta

SEQ ID NO: 708832 - DNA, 1856 bp, Homo sapiens
tgatccacccatctcggcctcccaaagtgctgggattacaggcatgagccattgcacccaagcttacatcctgtagttttttattattacaaatattattttatattgtgtgtctattaacagatttatgcagatttttttgttcaaattctacagcagaattttcagaaattttgcttcatgattatggtagtaaacaattgtatatgtgtttatatatttacatttaacagaaagctttatagtttcatgtagttttttaatactgttcagcatcattatatttttcaacatatggactcttttgggcattaaaaaaataaacagcatctcactatgttactcaggctcatcttgaactcttagcctcaactaatctgcctgccttggcctcccaagtctctgggattacagacatgagccactggtgcctggccaccatgtagcatttcttgtgggaccatgccagtggtgataaataccttcaccttttgtttattttgtaagttctttattgtttccttatttttaattccagaataattccaaataatttcaaagcaaacagtattgattggtattagtttttcttttatcacataaaaatttggaaagttctcatcctcttttatcttcaaataacccctctactactttttccctacatttgtcttctaagatttcttttccaaacgtagtaatctagttaatggtgttcagtaagtttaacattccatgttttcattttgttttgcaattttattttatttcatttcactttattttatatatatattttttgagatggagtctggctctgtcgcccagactggagtgcagtggcacgatctctgctcactgcaagctctgcctcccaggttcacgccattctcctgcctcagcctcctgagtagctgggactacaggtgcccgccaccatgcccagctaatttttggtattttttagtagagacggggtttcaccgtgttagtcaggacggtctcgatctcctgacctcgtgatccgcccccctcagcctcccaaagtgctgggattacaggcgtgagccaccacgcccaaccaattttatttcttttttgtttcatattttggagtacaccacctcacatcagttaattgtgtttttagattttattttgtatgataattgtgaatgacaatattcaactctgtacactttaagacagtgtggagccaaagttaaatacgaatcagtcatatgtctataactaatataataatttatttgtttgtgtatacacatattatttctgtattgtttatgacttgtatgtttgtgagtgatcaatgatggttttatctgagtagtcataaaaactctcctacttctagtatctatttgggaatttatttttgtgtaggagaaacacttttttgatttgaaggtaattttaaaaactatcaatttagtcccttttttaggtattattactgtttatttttaattatcaakaacataaaatttagaatcttaatttaaaagaagtgtgtagtttatattaattatttggacattattatacaatatatctctagaatgtttttgtcttgcaaaactaaaactgaatacacattaaacaactactcatttctcccattttctggccctttatgaacaattctgttttcctgtttttgagtctaactgctttaaatatctcatgtaagtggattcatacagtattttttgtggctgacctatgttattttgcataatttcatgaaagtttattatggttgttagaatatttcctttttttttagacggagtttcacccttgttgcccaggctggagtgcagtgcagcgatctc

SEQ ID NO: 708833 - DNA, 1743 bp, Homo sapiens
cgatcttaatgtctataaatagaatactggttacttaaaaaaatgtaagggggttagatatttgacagtggtrgggaataaagaaatcttttacgttttattctatatgttttatgcttttacaagcatttctatttttattatttatttgtttgtttatttttgtgtgtgtgtgtgtgatggagttttgcacttgttgcccaggctggagtgcaatggcatgatctcgactcactgcagcctccacctcctgggttcaagcaatgctcctgcctcagcctcctgagtagctggaattacaggtgcccaccaccaagccaccatgcccagctaatttttgtatttttagtagagatggagtttcaacatgttggccacgctggtctcaaactcctgaccccaggtgatctgtccacctcgacctcccaaagtcctgggattacaggcatgagccaccgtgcctggccttttacaaacattcttcatggattaattgtataattaaaatttcaatgaataaaataattagattgatataagtaatataataatattatataaaacttgggaaaaagagaagcctgatgtgattaactgaacttctgattccatattagtatatttccacctgcttttcctaaatattttatttcctcgattgattcatacactttcttgaggatagcaaaccttttggaatattttccaaccagaatgaggggatttcctaaatatatgcaaaaaaattcagttgtcttagcttttaaaatatagcatattaaaaatattcaccttttcttgggaccattttgtccctgcaatgaaactcaacactagtgtgcataatcctccagatccatgtaaaccaatacgttggctgcctaagacagcagaaacacacgtagtcaaaacaaggaatcctctcttcaatgtaagttttttctagaattagatagatatttagaaattagtttatattaaatatataagatttgacattatctattatatatgtttgaccctttgatattatgtctttaaatgttatattaaatgtctaaaatttcgattttctttctcaccatacattttagcagacttactaccaagtaacaaaatttccgactagtaacgtttcatcttctgccacatctctgatactagtatcagtaaaatggttaaagtattactttaagtgaagaagaaaagagacccataaaatctccagtttcatataacatatccaatgaattcttaaaaaatatttgaatatctctttggtcaatatgttacaactaaatttggatggaaattacagaaatacaaaagtaatggcatgttttcctttaaggcaggaaatggctaagtttgagtgttgcctttgtcaaaggatagcaggagtgaatttcagtcagaaaatatgaagaaataaatgggaacctatctccccctaaaatgtttaagggaaaatttgggggaaattatcaaacatcaataggcaatttagtagagaaagggaaagtataattcagagggatactctgcattaagtatattttttgacattccttatttgccaaatcaggaagcagagactttaatcaaagccattgacctgtatcaatcactgctgtgctcagttttaaatacagagtaggcattggaggctagttttagaaaaatagagttaagtattaaatttcatggatcttaccaaagtttaatattttgaaaaaaatgtct

SEQ ID NO: 708834 - DNA, 1743 bp, Homo sapiens
cgatcttaatgtctataaatagaatactggttacttaaaaaaatgtaagggggttagatatttgacagtggtggggaataaagaaatcttttaygttttattctatatgttttatgcttttacaagcatttctatttttattatttatttgtttgtttatttttgtgtgtgtgtgtgtgatggagttttgcacttgttgcccaggctggagtgcaatggcatgatctcgactcactgcagcctccacctcctgggttcaagcaatgctcctgcctcagcctcctgagtagctggaattacaggtgcccaccaccaagccaccatgcccagctaatttttgtatttttagtagagatggagtttcaacatgttggccacgctggtctcaaactcctgaccccaggtgatctgtccacctcgacctcccaaagtcctgggattacaggcatgagccaccgtgcctggccttttacaaacattcttcatggattaattgtataattaaaatttcaatgaataaaataattagattgatataagtaatataataatattatataaaacttgggaaaaagagaagcctgatgtgattaactgaacttctgattccatattagtatatttccacctgcttttcctaaatattttatttcctcgattgattcatacactttcttgaggatagcaaaccttttggaatattttccaaccagaatgaggggatttcctaaatatatgcaaaaaaattcagttgtcttagcttttaaaatatagcatattaaaaatattcaccttttcttgggaccattttgtccctgcaatgaaactcaacactagtgtgcataatcctccagatccatgtaaaccaatacgttggctgcctaagacagcagaaacacacgtagtcaaaacaaggaatcctctcttcaatgtaagttttttctagaattagatagatatttagaaattagtttatattaaatatataagatttgacattatctattatatatgtttgaccctttgatattatgtctttaaatgttatattaaatgtctaaaatttcgattttctttctcaccatacattttagcagacttactaccaagtaacaaaatttccgactagtaacgtttcatcttctgccacatctctgatactagtatcagtaaaatggttaaagtattactttaagtgaagaagaaaagagacccataaaatctccagtttcatataacatatccaatgaattcttaaaaaatatttgaatatctctttggtcaatatgttacaactaaatttggatggaaattacagaaatacaaaagtaatggcatgttttcctttaaggcaggaaatggctaagtttgagtgttgcctttgtcaaaggatagcaggagtgaatttcagtcagaaaatatgaagaaataaatgggaacctatctccccctaaaatgtttaagggaaaatttgggggaaattatcaaacatcaataggcaatttagtagagaaagggaaagtataattcagagggatactctgcattaagtatattttttgacattccttatttgccaaatcaggaagcagagactttaatcaaagccattgacctgtatcaatcactgctgtgctcagttttaaatacagagtaggcattggaggctagttttagaaaaatagagttaagtattaaatttcatggatcttaccaaagtttaatattttgaaaaaaatgtct

SEQ ID NO: 708835 - DNA, 1743 bp, Homo sapiens
cgatcttaatgtctataaatagaatactggttacttaaaaaaatgtaagggggttagatatttgacagtggtggggaataaagaaatcttttacgttttattctatatgttttatgcttttacaagcatttctatttttattatttatttgtttgtttatttttktgtgtgtgtgtgtgatggagttttgcacttgttgcccaggctggagtgcaatggcatgatctcgactcactgcagcctccacctcctgggttcaagcaatgctcctgcctcagcctcctgagtagctggaattacaggtgcccaccaccaagccaccatgcccagctaatttttgtatttttagtagagatggagtttcaacatgttggccacgctggtctcaaactcctgaccccaggtgatctgtccacctcgacctcccaaagtcctgggattacaggcatgagccaccgtgcctggccttttacaaacattcttcatggattaattgtataattaaaatttcaatgaataaaataattagattgatataagtaatataataatattatataaaacttgggaaaaagagaagcctgatgtgattaactgaacttctgattccatattagtatatttccacctgcttttcctaaatattttatttcctcgattgattcatacactttcttgaggatagcaaaccttttggaatattttccaaccagaatgaggggatttcctaaatatatgcaaaaaaattcagttgtcttagcttttaaaatatagcatattaaaaatattcaccttttcttgggaccattttgtccctgcaatgaaactcaacactagtgtgcataatcctccagatccatgtaaaccaatacgttggctgcctaagacagcagaaacacacgtagtcaaaacaaggaatcctctcttcaatgtaagttttttctagaattagatagatatttagaaattagtttatattaaatatataagatttgacattatctattatatatgtttgaccctttgatattatgtctttaaatgttatattaaatgtctaaaatttcgattttctttctcaccatacattttagcagacttactaccaagtaacaaaatttccgactagtaacgtttcatcttctgccacatctctgatactagtatcagtaaaatggttaaagtattactttaagtgaagaagaaaagagacccataaaatctccagtttcatataacatatccaatgaattcttaaaaaatatttgaatatctctttggtcaatatgttacaactaaatttggatggaaattacagaaatacaaaagtaatggcatgttttcctttaaggcaggaaatggctaagtttgagtgttgcctttgtcaaaggatagcaggagtgaatttcagtcagaaaatatgaagaaataaatgggaacctatctccccctaaaatgtttaagggaaaatttgggggaaattatcaaacatcaataggcaatttagtagagaaagggaaagtataattcagagggatactctgcattaagtatattttttgacattccttatttgccaaatcaggaagcagagactttaatcaaagccattgacctgtatcaatcactgctgtgctcagttttaaatacagagtaggcattggaggctagttttagaaaaatagagttaagtattaaatttcatggatcttaccaaagtttaatattttgaaaaaaatgtct

SEQ ID NO: 708836 - DNA, 1743 bp, Homo sapiens
cgatcttaatgtctataaatagaatactggttacttaaaaaaatgtaagggggttagatatttgacagtggtggggaataaagaaatcttttacgttttattctatatgttttatgcttttacaagcatttctatttttattatttatttgtttgtttatttttgtgtgtgtgtgtgtgatggagttttgcacttgttgcccaggctggagtgcaatggcatgatctcgactcactgcagcctccacctcctgggttcaagcaatgctcctgcctcagcctcctgagtagctggaattacaggtgcccaccaccaagccaccatgcccagctaatttttgtatttttagtagagatggagtttcaacatgttggccacgctggtctcaaactcctgaccccaggtgatctgtccacctcgacctcccaaagtcctgggattacaggcatgagccaccgtgcctggccttttacaaacattcttcatggattaattgtataattaaaatttcaatgaataaaataattagattgatataagtaatataataatattatataaaacttgggaaaaagagaagcctgatgtgattaactgaacttctgattccatattagtatatttcyacctgcttttcctaaatattttatttcctcgattgattcatacactttcttgaggatagcaaaccttttggaatattttccaaccagaatgaggggatttcctaaatatatgcaaaaaaattcagttgtcttagcttttaaaatatagcatattaaaaatattcaccttttcttgggaccattttgtccctgcaatgaaactcaacactagtgtgcataatcctccagatccatgtaaaccaatacgttggctgcctaagacagcagaaacacacgtagtcaaaacaaggaatcctctcttcaatgtaagttttttctagaattagatagatatttagaaattagtttatattaaatatataagatttgacattatctattatatatgtttgaccctttgatattatgtctttaaatgttatattaaatgtctaaaatttcgattttctttctcaccatacattttagcagacttactaccaagtaacaaaatttccgactagtaacgtttcatcttctgccacatctctgatactagtatcagtaaaatggttaaagtattactttaagtgaagaagaaaagagacccataaaatctccagtttcatataacatatccaatgaattcttaaaaaatatttgaatatctctttggtcaatatgttacaactaaatttggatggaaattacagaaatacaaaagtaatggcatgttttcctttaaggcaggaaatggctaagtttgagtgttgcctttgtcaaaggatagcaggagtgaatttcagtcagaaaatatgaagaaataaatgggaacctatctccccctaaaatgtttaagggaaaatttgggggaaattatcaaacatcaataggcaatttagtagagaaagggaaagtataattcagagggatactctgcattaagtatattttttgacattccttatttgccaaatcaggaagcagagactttaatcaaagccattgacctgtatcaatcactgctgtgctcagttttaaatacagagtaggcattggaggctagttttagaaaaatagagttaagtattaaatttcatggatcttaccaaagtttaatattttgaaaaaaatgtct

SEQ ID NO: 708837 - DNA, 1743 bp, Homo sapiens
cgatcttaatgtctataaatagaatactggttacttaaaaaaatgtaagggggttagatatttgacagtggtggggaataaagaaatcttttacgttttattctatatgttttatgcttttacaagcatttctatttttattatttatttgtttgtttatttttgtgtgtgtgtgtgtgatggagttttgcacttgttgcccaggctggagtgcaatggcatgatctcgactcactgcagcctccacctcctgggttcaagcaatgctcctgcctcagcctcctgagtagctggaattacaggtgcccaccaccaagccaccatgcccagctaatttttgtatttttagtagagatggagtttcaacatgttggccacgctggtctcaaactcctgaccccaggtgatctgtccacctcgacctcccaaagtcctgggattacaggcatgagccaccgtgcctggccttttacaaacattcttcatggattaattgtataattaaaatttcaatgaataaaataattagattgatataagtaatataataatattatataaaacttgggaaaaagagaagcctgatgtgattaactgaacttctgattccatattagtatatttccacctgcttttcctaaatattttatttcctcrattgattcatacactttcttgaggatagcaaaccttttggaatattttccaaccagaatgaggggatttcctaaatatatgcaaaaaaattcagttgtcttagcttttaaaatatagcatattaaaaatattcaccttttcttgggaccattttgtccctgcaatgaaactcaacactagtgtgcataatcctccagatccatgtaaaccaatacgttggctgcctaagacagcagaaacacacgtagtcaaaacaaggaatcctctcttcaatgtaagttttttctagaattagatagatatttagaaattagtttatattaaatatataagatttgacattatctattatatatgtttgaccctttgatattatgtctttaaatgttatattaaatgtctaaaatttcgattttctttctcaccatacattttagcagacttactaccaagtaacaaaatttccgactagtaacgtttcatcttctgccacatctctgatactagtatcagtaaaatggttaaagtattactttaagtgaagaagaaaagagacccataaaatctccagtttcatataacatatccaatgaattcttaaaaaatatttgaatatctctttggtcaatatgttacaactaaatttggatggaaattacagaaatacaaaagtaatggcatgttttcctttaaggcaggaaatggctaagtttgagtgttgcctttgtcaaaggatagcaggagtgaatttcagtcagaaaatatgaagaaataaatgggaacctatctccccctaaaatgtttaagggaaaatttgggggaaattatcaaacatcaataggcaatttagtagagaaagggaaagtataattcagagggatactctgcattaagtatattttttgacattccttatttgccaaatcaggaagcagagactttaatcaaagccattgacctgtatcaatcactgctgtgctcagttttaaatacagagtaggcattggaggctagttttagaaaaatagagttaagtattaaatttcatggatcttaccaaagtttaatattttgaaaaaaatgtct

SEQ ID NO: 708838 - DNA, 1306 bp, Homo sapiens
cactatggcctggccctggccctagccctggtcctgccatatcyctggccctgcccttatccaggccctgcccctactgctgccctggcctggaacctggtcctgtcaaggacctgccctgactctgccatggccctggccctgctctgccttgttcctggccctgatcctttcctggctctgcactggtctttccctggccctgagctggcagtggtctgcccctggtcttgccatcactctgccctgctgtgctctggatgtgtcatcaccctgccctggccctactctgcctttgatcctgccctggccttaccttggccctcaccctagtcttcgctaggccctgctctggagctggccgtagcacagacctggccctgaccctggccctggtctttgtcctgccatagccctggccctgaagtggacttggaggtgtcctggccctggcgtaacatggctctgcattggcctgtccctgccctgcccctaccatcgccttgccctgctctgccctgtcccagtactgacccggccatgctatttccctgccctaccctgtcttggctgtgccctggctcggttctgtccctggccccggccctgccctggacatgctctgacactgcctcagccttggcactagcctggctctttcttggcatcagccctgctctctctgtggactggctcttgtcctgtcctgcactggccataccatgccctgccctgccctgccctgactcagccctggctcagccctggcccagccttggccttggcattgcccctgttcctgccatatttcttgccctgtccctaccctggccttggccctgacccttaccttgctctggccctgcccttgccctaacgcagcccctggccctgtcatggccctgccctggacctttcctggccctggcccttccctgcttgagaccttgccctggttctcccctggccctgaccctgaaatgcctggccctaccctggccttgcactgctctggcccttgccctgactctggtcctgtcactggcctagccccagccctgttgctggtcttaccatggcccagaccctgccttggccctgccctgaaactgtcctggaccctggctgtgccaagatcctgcactgtccttgcccttgttttgctcctgccccaaacctggtcctgcccaggccctggccctggccctgccctggctgttccctggccctgcccaggtcttggcactggcctggccctggcctgccttggccctatgctttcctggccctgccttgccggccctgg

SEQ ID NO: 708839 - DNA, 1532 bp, Homo sapiens
tgcctcagtttccacgggagtgtgtgtgggtgtgtgagggtgtgtatgggtgttggcctgcgcacaccggagggggggtcggtatacagtcggcgcctaatgcatgcggcgcctcccccctccccccagtccccgtggggcggaacctggggactggagtccaccggagcagtaggcggcacccgcggggagacaggtgtcggcgcagcctgggaggctcaggtgctacctttgccgggtggggtttgtgaggagtgagctcttcgtccccggaggcgagcaaatctgtcggtggctcatcacagagcgctgttttggaaagcgttccacccacctcagcttcgtgctgtgtttgggccactagtcagggggaaggatgctgagcgacatggactttagaggtggggctcccgctggacgggatggctctgggctctccagcttacccccacccttgcctcccaaacccgttagagsgtaggaatcattgggagcacgtgataaaaatgccacggattgtggctcaccaaagcagggaagcggatttggaacttaggctcccaagttgtgatccgtcgagcttggcaagcactgttttagagagtaggcttcctgcaagcaggagccggttttgtgtatacctcaccatggcatcttggtacctggcatggtgcctggcacaccgtagatgatcagaaaatatctgtagaaagtctaaattattagggatagtgcagcataggagttcttgagacattttcaggagcttcttgagattaatatctgtcagatttgttttacagtatatgatttttctcagctcccaacttttgtgattgtttttaatgccatgttttcagtatgttctaggcaaaagcagggtatatgttgcttagtatacactatccactaggccggttgcggtggctcactcctgtaatctcagcactttgggaggcagattgcttgagcccaggggcttgaggctatagtgagccaaggagttagaggccagtgtgggaaacatagtgaggctcgtctccgcaaaaattagctgggtgtggtagcatgcatttgcagtcccagctactctggaggctgaggtgggaggatcacttgggctcaggaagtacaagttgcagtgagccaaggttgtgccactgcattccagcctggataacacagagaaacccagtctcttaaataattaaataaatacataaatgattatgtatactccagctaggttaaaattaattctgaatcaaaattctaaattaaaatatgcatgtttctttctcttcatcatttgagaacactaggcttttaggatttcattccgttggggcaggtaaatatctacatttttgacaaagcaaatatgaatcactgttaattcaagaaaggtgggaatttgcttaaacctgagtatttgtagtctttgtgatttttttaaactttaaatataagttttcttttttttctttttttttttgagatggagtctcactctgtcatccaggctggagtgc

SEQ ID NO: 708840 - DNA, 1532 bp, Homo sapiens
tgcctcagtttccacgggagtgtgtgtgggtgtgtgagggtgtgtatgggtgttggcctgcgcacaccggagggggggtcggtatacagtcggcgcctaatgcatgcggcgcctcccccctccccccagtccccgtggggcggaacctggggactggagtccaccggagcagtaggcggcacccgcggggagacaggtgtcggcgcagcctgggaggctcaggtgctacctttgccgggtggggtttgtgaggagtgagctcttcgtccccggaggcgagcaaatctgtcggtggctcatcacagagcgctgttttggaaagcgttccacccacctcagcttcgtgctgtgtttgggccactagtcagggggaaggatgctgagcgacatggactttagaggtggggctcccgctggacgggatggctctgggctctccagcttacccccacccttgcctcccaaacccgttagagcgtaggaatcattgggagcacgtgataaaaatgccacggattgtggctcaccaaagcagggaagcggatttggaacttaggctcccaagttgtgatccgtcgagcttggcaagcactgttttagagagtaggcttcctgcaagcaggagccggttttgtgtatacctcaccatggcatcttggtacctggcatggtgcctggcacaccgtagatgatcagaaaatatctgtaraaagtctaaattattagggatagtgcagcataggagttcttgagacattttcaggagcttcttgagattaatatctgtcagatttgttttacagtatatgatttttctcagctcccaacttttgtgattgtttttaatgccatgttttcagtatgttctaggcaaaagcagggtatatgttgcttagtatacactatccactaggccggttgcggtggctcactcctgtaatctcagcactttgggaggcagattgcttgagcccaggggcttgaggctatagtgagccaaggagttagaggccagtgtgggaaacatagtgaggctcgtctccgcaaaaattagctgggtgtggtagcatgcatttgcagtcccagctactctggaggctgaggtgggaggatcacttgggctcaggaagtacaagttgcagtgagccaaggttgtgccactgcattccagcctggataacacagagaaacccagtctcttaaataattaaataaatacataaatgattatgtatactccagctaggttaaaattaattctgaatcaaaattctaaattaaaatatgcatgtttctttctcttcatcatttgagaacactaggcttttaggatttcattccgttggggcaggtaaatatctacatttttgacaaagcaaatatgaatcactgttaattcaagaaaggtgggaatttgcttaaacctgagtatttgtagtctttgtgatttttttaaactttaaatataagttttcttttttttctttttttttttgagatggagtctcactctgtcatccaggctggagtgc

SEQ ID NO: 708841 - DNA, 1150 bp, Homo sapiens
ttgattggcagcctctcaccaacccatgccaggcacactggggtgtggtagatggcagcatccacgatccactgcaatgcagaggtgtttccctccacagcagttttcccccatggattaagagttgtgaaactgccaatctagatacactttaaagataaattctgtgggaaaaggtcttgtcttttccacaggtgtcttccgtgccagttttgggggacttcgacctttgactcaatcactataccccttcctattttctctctcaagttgtcgagagactatcagatctgtgtgacgtgtatggcatcatttcaccctcctaatgttttcttttctataattgcaggagccattgacactggagaatgatacgtaccctgaaataactcacttcctgaggaaaaagcgccatctctagggtacagaaacctgattctgggctccttttgggaaggaggatttggggtctggtgagagcaaatgattttgcaagtataaaaccatgtccagagaggctgtagggatatctgtgagcccagaggaaacaccaggggatcctgtgcgaagcaccatggcttcagctagggtgggaggagtgggtgggcctctctctaatgacttatcctggtgtttgtgtttctaaagatttgattgtggagagcatatctgatgatggggatttgtaggtaggtaactgctttccacgtaagatccaattggagagagttcccaggggccttcggggtatccatgctgcttgggaggttaagggagggggcatgaaatcaaaacgaaacaggaaatatgtgtcatatyggatttggtcttttccgggtttattggcataatagttagaactgtctctctgggctatgagggtgctgtgttatttaaaggtggtctttcccagaacacctggccttttcttttctgcctctgccaaacatcacagcctttgggttggattagtcagcaccccttgggattgtgcagaagaggtttggggttgcattgagtgtcacctgtggtgaacagaatctgagggacacaactctctcacaggcacttcctccaacctggagacagagttctcctggtgtgtgcccaggggtggaggagaaattgacagtctgcctctgaactttca

SEQ ID NO: 708842 - DNA, 676 bp, Homo sapiens
ccctgttaactgggtgaaagtcttgcctttataaacccagaaatacacaaacaagcattctcccattgtcttaaacagcaactgcattctggtgagagtaatcacttctgtctctgaaacaccttcttactgttgtatcaaattcctctgacacagaagaaacattcaaataacctacaactgtacatctttatccctaacaaaaatggacccaagagaacaccttgattacttctattaactttgtttctctcacttgcaaaacaacatgaccatttcttcccccaagaaactgaatcaagatgtttgggtagttttataacaaaacctasaaaagtattcttcaaaaaacatatttgtggcaataacatggggcccagttctttcctagttgtccttaatgtctgataaaccagaattataagcaaaagcaataataaaaattataccttcaattttatgaatttgaatcttgagtattactactatctttatgataaacattctattacaatcttgtgtataagaaattttcatattaataaatgtcaacatctggcccactgaccaaagcaatcaaataacattgacaggcagtaagacaacatttcttgtttccttggggtaagtgctagaatagaaagcagtaaaataactttattctaaaatttatgct

SEQ ID NO: 708843 - DNA, 664 bp, Homo sapiens
ttgattctcaatgtccaatttctagtaacaattttcttgctatctgctgccttttcctgaagccaatatcacttatattagattttaattactttagcacccagtccttatatattttttgtatttttaaactcttactaagttattctgtagtaacaacatcaaaatctcattggctcacaaccagtgatttctttctcacccatgcgacattccaactgcagtttggctttggaactgcactgctaattgtgctccatttagcttctttattcaggaatctaaactgaaggaagagctccaaactatgtcatgctgttatttgtgatagagtggataaagcaatgccagagctagaaaaaggattttaccatttcttttggagcgctcacctttctttggccatagcaaatcacaaggtccaatatgatgtcaaagagaaggagaaaagttatgccatcaagagtccatgcaggrcatataggatttagcaaaaaggtgtaatttccttatagggaaggcagtcaataactggggacaataacataattaagcacagcgggcgactatttaatgtgttaatcttgggcatattttggattttatgtgacgtctgatcaaaacaataatgtcaaatatagtgagtattttcatacctgctttc

SEQ ID NO: 708844 - DNA, 664 bp, Homo sapiens
ttgattctcaatgtccaatttctagtaacaattttcttgctatctgctgccttttcctgaagccaatatcacttatattagattttaattactttagcacccagtccttatatattttttgtatttttaaactcttactaagttattctgtagtaacaacatcaaaatctcattggctcacaaccagtgatttctttctcacccatgcgacattccaactgcagtttggctttggaactgcactgctaattgtgctccatttagcttctttattcaggaatctaaactgaaggaagagctccaaactatgtcatgctgttatttgtgatagagtggataaagcaatgccagagctagaaaaaggattttaccatttcttttggagcgctcacctttctttggccatagcaaatcacaaggtccaatatgatgtcaaagagaaggagaaaagttatgccatcaagagtccatgcagggcatataggatttagcaaaaaggtgtaatttccttatagggaaggcagtcaataactggggacaataacataattaagcacagcgggygactatttaatgtgttaatcttgggcatattttggattttatgtgacgtctgatcaaaacaataatgtcaaatatagtgagtattttcatacctgctttc

SEQ ID NO: 708845 - DNA, 664 bp, Homo sapiens
ttgattctcaatgtccaatttctagtaacaattttcttgctatctgctgccttttcctgaagccaatatcacttatattagattttaattactttagcacccagtccttatatattttttgtatttttaaactcttactaagttattctgtagtaacaacatcaaaatctcattggctcacaaccagtgatttctttctcacccatgcgacattccaactgcagtttggctttggaactgcactgctaattgtgctccatttagcttctttattcaggaatctaaactgaaggaagagctccaaactatgtcatgctgttatttgtgatagagtggataaagcaatgccagagctagaaaaaggattttaccatttcttttggagcgctcacctttctttggccatagcaaatcacaaggtccaatatgatgtcaaagagaaggagaaaagttatgccatcaagagtccatgcagggcatataggatttagcaaaaaggtgtaatttccttatagggaaggcagtcaataactggggacaataacataattaagcacagcgggcgactatttaatgtgttaatcttgggcatattttggattttatgtgacrtctgatcaaaacaataatgtcaaatatagtgagtattttcatacctgctttc

SEQ ID NO: 708846 - DNA, 604 bp, Homo sapiens
aatcatagacatatatcaatataatactaaaatactgctatttcattttataaaagaattatctctgaagatgtctgtctacaaaattatatatatgtacatatataattatatatatatatatataaaatatctgtaataattatatataaaaaaatctgtatcagaaacctggcatttccctgtcactgcaaatgcatcttaactagaggcgtgctgccttgaagtgatcctgtgttttgtgagatatctaagcttactaatgggtcaaaaacaaatctaccctgtgtgtgggttttcttcaactgtgaaagatcctttacactgtgaccatttgatggcattttaaaatgccaatcttagcaamtgtagttagttaggcatattttgactttaagagagtgaaaatgaggttaaaacgaaaaagaaaaaagaaaaaaactggctgctaacatctgacagcattaaaactttagcattaggaccaaagaatacagagtgtgacaccaaaatacagctttctaacttagatgtgggtcaatatacttcaaaaaagactcagtattaatactgtagcaatttctctcatgacacatgcatacac

SEQ ID NO: 708847 - DNA, 604 bp, Homo sapiens
aatcatagacatatatcaatataatactaaaatactgctatttcattttataaaagaattatctctgaagatgtctgtctacaaaattatatatatgtacatatataattatatatatatatatataaaatatctgtaataattatatataaaaaaatctgtatcagaaacctggcatttccctgtcactgcaaatgcatcttaactagaggcgtgctgccttgaagtgatcctgtgttttgtgagatatctaagcttactaatgggtcaaaaacaaatctaccctgtgtgtgggttttcttcaactgtgaaagatcctttacactgtgaccatttgatggcattttaaaatgccaatcttagcaaatgtagttagttaggcatattttgactttaagagagtgaaaatgaggttaaaacgaaaargaaaaaagaaaaaaactggctgctaacatctgacagcattaaaactttagcattaggaccaaagaatacagagtgtgacaccaaaatacagctttctaacttagatgtgggtcaatatacttcaaaaaagactcagtattaatactgtagcaatttctctcatgacacatgcatacac

SEQ ID NO: 708848 - DNA, 604 bp, Homo sapiens
aatcatagacatatatcaatataatactaaaatactgctatttcattttataaaagaattatctctgaagatgtctgtctacaaaattatatatatgtacatatataattatatatatatatatataaaatatctgtaataattatatataaaaaaatctgtatcagaaacctggcatttccctgtcactgcaaatgcatcttaactagaggcgtgctgccttgaagtgatcctgtgttttgtgagatatctaagcttactaatgggtcaaaaacaaatctaccctgtgtgtgggttttcttcaactgtgaaagatcctttacactgtgaccatttgatggcattttaaaatgccaatcttagcaaatgtagttagttaggcatattttgactttaagagagtgaaaatgaggttaaaacgaaaaagaaaaaagaaaaaaactggctgctaacatctgacagcattaaaactttagcattaggaccaaagaatacagagtgtracaccaaaatacagctttctaacttagatgtgggtcaatatacttcaaaaaagactcagtattaatactgtagcaatttctctcatgacacatgcatacac

SEQ ID NO: 708849 - DNA, 604 bp, Homo sapiens
aatcatagacatatatcaatataatactaaaatactgctatttcattttataaaagaattatctctgaagatgtctgtctacaaaattatatatatgtacatatataattatatatatatatatataaaatatctgtaataattatatataaaaaaatctgtatcagaaacctggcatttccctgtcactgcaaatgcatcttaactagaggcgtgctgccttgaagtgatcctgtgttttgtgagatatctaagcttactaatgggtcaaaaacaaatctaccctgtgtgtgggttttcttcaactgtgaaagatcctttacactgtgaccatttgatggcattttaaaatgccaatcttagcaaatgtagttagttaggcatattttgactttaagagagtgaaaatgaggttaaaacgaaaaagaaaaaagaaaaaaactggctgctaacatctgacagcattaaaactttagcattaggaccaaagaatacagagtgtgacaccaaaatayagctttctaacttagatgtgggtcaatatacttcaaaaaagactcagtattaatactgtagcaatttctctcatgacacatgcatacac

SEQ ID NO: 708850 - DNA, 630 bp, Homo sapiens
ctttgttagatttgtatgccattggccctattataaatggtatgatcttaaaattaaacagaagtgttagtaaaagtgagaattcttgcctttattcaagatctcamagggaaaattagttgtctctgccatgaagtataatgttaggagaatagatgccctttaataagttgaggaaattccctttctattctagtttattgagcattttttcctgaatgagtataacatatttttcaatttttttatctgtgtatgttgaaattcattaacttttttcttgttaatatggtaaatttcattgcttctatttcaaatgttagaccaacttttcagtcctggaataaacactacttggtcttgctgtatcatccactctacctatattgttagattcagtaattcaatttgataatattttctgaataattattccatctttgagatatattgatttgtaattctctttatctttctctacctctctcttcttcctcctcctcctcctctatgctttcccctccttttccttcttgcaatatctttgtaagttcttaatgttggggtaatgttagccataaagaaaaagattgagttgtactccctcattttcttgtgtttggaaaaagt

SEQ ID NO: 708851 - DNA, 642 bp, Homo sapiens
ttgaatttcaaagagcccttatatttaaattatctttttatatatcctataccttaataaacatttaacaacttagtggactagcatggtatttcctgagaagaaaaaggtgtatgtgtgtgtgtgtgtgtgtgtgtgtgtgtgtgtgtgtgtgtgtgtgtgatgaatttgatgaatttttgcatatgtgcttacactacctacaccaagcacactctaatctccaaaatgtttccattgttccattatggcaaatatcattccctagagataatcttctttccagtttttaacamcagcttcaaaagatcttgtcaatagtattctaaatttacagtctcatcagcaatgtagaaatgtatagtctcatgagcaatgtaagaaaattctagttgttccacatatttgataatgcttgtcatttttagactgtttaattctgactattcttgtgggcatttagtaatatccaagtattgatttaatttagtttttgcctgatgagtaatgatactgaccaccattttatatgtgtattggccatttagatattctctttttaaaagtacctgctcatgtatttcgtccatttttaagtgggtttgttatattctagcactgatttgtgggagctttttacat

SEQ ID NO: 708852 - DNA, 1157 bp, Homo sapiens
aaaaaaaacccaaacctcataagctcttttgctggaatttgtcacgtagctggagatacaaagtacccagtcttggaaaagatttaagaactatgtttaagcttgccatcaatgtacaaacattaaaataattagaaattcacatggcaaatttgaaactaaactaataaaaagaaatttctggtattttctgccacaattaaattttaaaatatggtaagattgatatacataatactctcgcttaggatctggtctattccaaatagaattgttctcacaatagcaatgtattttatagtgrccatacagtcatgatgatcatcaaagggacaataagaatacacagataaaaagagtacaatgggattaaacagattgtgtttcatagattcatttctgactttcttgctagtaatggaaaagtaatgcagacttacttcatttccaaaacagagacttagttatttggttacaagctcattaaaataccagatttattatcatgattaatatatatatatatgtatatatatagtatatatataattatatataatatgtatcaaatatgtaattatatatacatatagaggatattattaaagtgattgacagttaatatttgaattatgtctctatgtaaaattgaggtttgaataacaccttgatttgtatccagtaatttgagttgtagaatttattcatctaagctctagagaaaaggctgccatctactgaaaaattagggtgtcttcttggagtccaaggatagtcccgagaaaactctactaccattgtggccattactttttctaaaagctacaaaatgaaaaatgaggtaccatgattattcccccggcatttaaacaaataaggagagggatgtatgtgagacggaggggcaaacacgtttggtgtatggagggttcaccgtaaagtgaaggggtgagggttggggaatcactcaataacagtacttagaattaccaagacctgaaatctgggaaaaaattggttggtggactaaaatataaacaagatgaaaacattgagataaatggggggaaaattagaagctctgaaaacagaaaccacagaaatatagatgggagagagaaagtgagatagaaatagaggctaaaaatagggaggca

SEQ ID NO: 708853 - DNA, 1349 bp, Homo sapiens
attcttgttaaagaaagcctcagatcacatcaatgtaaaagaggactgttagggataaaaaggaacagaagagattggaatcatcaaggattgagataagtttgagaatctgtctgacatttttccatcttctctgagaaccttaagcactccagataagtgaaatctttcaaatccttatatgcttccaaagaagagtcctccaaagtgaaatattttagttgaggtgtgtgcacctcccctaaatgcctcataatttagttgaagtttatgttcacttcttatattctttgtaaaatttgaaaacaagtggtaaccaactagtctataaaatattttcctcagcatattggcatgttacatgagcgttccaaaaccaaaattaaggtttttctttttaaaccatagtgaaaacagatttgatctcaatagaacggctattgaaatatatctggtaactggaaagtcattagggccacagttatcaaactaaatataatcccatcatttatcatcagtaattaaaatttaagttagatgtggggcatgtaaatgagagaaacctggtatcatcaaacaatgtattgcatcttgatgacaaatgccagagaagccctatacatataccaacctgatgcgtgtcctgatttattatttctaattccatttataatttcttcaaatgcctgtagagactaatggttctttaagtttaaaacatctccatgtagctacctggtttaatagcctgagatcaaaaaagctactgagaagttatatattttgtttgaaatgactggtggaggatatgatgaaattaacataaagtaataaaaatagcatttaagagttcacattttcaccttgggaggctgaggagggccgatcacctgaggtcaggagtttgagaccagcctgaccaacatggagaaacctcttctctactaaaaatataaaattagccgggtgtggtggcacatgcctgtaatcccagctcctcaggaggctgaggcaggagaattgtttgaacccgggagatggaggttgcggtgagccgagattgcgccattgcactccagccagggcaacaagagcaaaattcygtctcaaaaaaataaaaaaaaaagagtttacattttcattctcacatactaattaacatgctaaatcttatttagagtttataagtctaatacatactccgtattttcattggagttctttgtgaaatacagattttaatgactcctaattgcctatataataaagtacacactcctgaacgaggttcagaaaatcttcaatatctgggatcaacatgtattttcaacttctcttcgtgatcctat

SEQ ID NO: 708854 - DNA, 594 bp, Homo sapiens
ctttagaaatcaccagaagcatagctcagagatctgaagttagctgacaataaggttagcggttggcatctgctatgcatctagtcaatggctggcgacaacagaagacataggtcaaagggaagccactatcagacatatagttcaagatctagtagatacaagagaagtgggtcagtggatggaagctgttaatcaggaatcttggtatgtggtgtgtgttggtggatgccctgaactacagacacargaagtggcaggaacaaagtgagtttcttggcagagtctggacacaggacaatcagtagaagggccgcaatagatttgacagttgctgaacgcacatttggctggctggcagctggtgggtttgttactgttctcctggcagttgtccaggacccaggttggaaactactaagtaagcagagggcacctctttagctcactcttctagagcagagaaaaacaaatcaggaaaaaagaatgtagcaataactcctcaaagagcaggagctctcatttccaaagcagcagtagctgaaacacatgagttaacaaagtgagtttcagaagatgtatagaagctttttc

SEQ ID NO: 708855 - DNA, 659 bp, Homo sapiens
cacatgtatattagaaacctctgcactgacaagttatttaagatttttttcacttttttttgacatggtgtctcactctgttgcctaggctggagaacagtgtcacgatctgcgctcactgcagactccgcctccctggttgaagcgattttcctgcctcagcctcccgagtagctgggattacaagcatgcaccgtcatgcctggctaatttttgtgtttttagtagagacagggtttcaccatgttggycaggctggtctcgaactcccgacctcaggtgttcttgagatcgcttgccttggcctcccagagtgctgggattacaggcgtgagccatggtgcccggcctcaccctttttttttttactgactgaccatcaagtgacatcggcaattcaggcaatgctttgtatttctgacctgtagcataaggacaagcagcccagggaagctcattctccacaaggctacccagagttcccagggaacactctgttccttcatgaagtgcagaaatgaagaatagcctgagatgtgcaaggagtttttcagaacttctcttgtagaacgaagatccatttttataatctcctggtttatgaaagcccaaggtcactttcaacatgaggcatcatccagtaactgctggcaagtgtc

SEQ ID NO: 708856 - DNA, 2056 bp, Homo sapiens
ggatcccaaaacctgaccatctgaacttgtcttttgtctctctgggtcatgttttaagcgtgtagacctgggatgacctgactgcgtgatgctggggcacaaggtgtggaggggtggatatataatggtggtcttatcgcaggcatttaggtgaatgtcagtgtctctctccagagatgaaggaactgggatatggcagtaactttgagggtggatctttttatttttatttttaatgtttgtgggtacatagtaagtgtatatatttatggggtacatgaaatgttttgataagggcatgcaatgtcaaatagtacatcatgaagaatggggtatccatcccctcaagcatttatcctttgatttacaaacaaccctattatactctttcagttattttattttatttttaatttttttgagatggagttttgctcttgttgcctaggctggattgcaatggcacggtcttggctcactgcaacctccgtctcttgggttcaagcaattcttctgcctcagcctcccaagtagctgggattacaggtgcccaccaccatgcctggctaatttttgtatttttagtagagacggggttttaccatgttggccaggctgctctcgaatgcctaacctcaggtgatccgcccacctaggcctcccaaagtgctgggattacaggcacaagccactatgcctggcctctttatttaaaaatgtacagttaagttattgttgactatagtcaccctgttgtgctatcaaatagtgggtctcatttattctttctaagtattttatttttttacctattacaccccctgagggcggatcttaatgcttgacacttagatgatgctcaataaaagttggtagggtattgtaaccccayattctgccagagattctatcatcaaggtttagtcctttatttacagtgggatcagaccgccaacattctaatgatcacaaatctagttcctgctttgtttttactttgtggttgtgcatgcatatggaaagcattggaaatgagaagaaagaaatagtcttaaaacgagtatttggagctgaataaggaactgagtatggactctcatagaaatcatagtcgtatattctatccacgttggaatttttacaccacttatttgccatgagtttttggatagcattttggtgtgacatttgaaatattacctgcataaatgtacgcctgtagtttactgaaatcctgttaatctagatgtaagagaaaaaggcctgaagatatgaccacctaggggatcaaggaatgcgactcaatgacatcatccttaaagcatctcctaggagtgaggagtcagatgggtgaggttcttgcatcacagggagtagccaccttctttaaaaagtgccagtctccccacagtgctagaattctttcatttctttgggcacacaggctgaaatccatatttcatctattaggaatatatgtggataaataagttctgctttaaaaatacgactactctggaaaattgatcttagaaagaacactttcaaccctatcactttctttctgataccttgcagaagtcatccacactgaaaaagggaagtttggtgggagacagggagggatgttggcctcttggtgagagagagagaaaagcaggcccaggaagggtactcagtgcaggattctgggatggaccaggatgacttaagggagatgaaaggagagaaggggagaaaaagagaggcaggagggcactacaatttttccaattttgctattttgtcacaaaccaaattatctaaaagtgttgaacgtattcaatacttttttttttcccagtagaggaagcatatgaatgaaatagaatattatagatcatctaaagcagtcacaattctctgtgtgtaaatcaaaacgacgacaacaacaacaacaaaacttattcggagtgttggttacagtggtctcatttaggtaaagaacagggtaagcaccaagaagatcccacggctatacccaaggccactcagctaactgggccagacaggacct

SEQ ID NO: 708857 - DNA, 2056 bp, Homo sapiens
ggatcccaaaacctgaccatctgaacttgtcttttgtctctctgggtcatgttttaagcgtgtagacctgggatgacctgactgcgtgatgctggggcacaaggtgtggaggggtggatatataatggtggtcttatcgcaggcatttaggtgaatgtcagtgtctctctccagagatgaaggaactgggatatggcagtaactttgagggtggatctttttatttttatttttaatgtttgtgggtacatagtaagtgtatatatttatggggtacatgaaatgttttgataagggcatgcaatgtcaaatagtacatcatgaagaatggggtatccatcccctcaagcatttatcctttgatttacaaacaaccctattatactctttcagttattttattttatttttaatttttttgagatggagttttgctcttgttgcctaggctggattgcaatggcacggtcttggctcactgcaacctccgtctcttgggttcaagcaattcttctgcctcagcctcccaagtagctgggattacaggtgcccaccaccatgcctggctaatttttgtatttttagtagagacggggttttaccatgttggccaggctgctctcgaatgcctaacctcaggtgatccgcccacctaggcctcccaaagtgctgggattacaggcacaagccactatgcctggcctctttatttaaaaatgtacagttaagttattgttgactatagtcaccctgttgtgctatcaaatagtgggtctcatttattctttctaagtattttatttttttacctattacaccccctgagggcggatcttaatgcttgacacttagatgatgctcaataaaagttggtagggtattgtaaccccacattctgccagagattctatcatcaaggtttagtcctttatttacagtgggatcagaccgccaacattctaatgatcacaaatctagttcctgctttgtttttactttgtggttgtgcatgcatatggaaagcattggaaatgagaagaaagaaatagtcttaaaacgagtatttggagctgaataaggaactgagtatggactctcatagaaatcatagtcgtatattctatccacgttggaatttttacaccacttatttgccatgagtttttggatagcattttggtgtgacatttgaaatattacctgcataaatgtaygcctgtagtttactgaaatcctgttaatctagatgtaagagaaaaaggcctgaagatatgaccacctaggggatcaaggaatgcgactcaatgacatcatccttaaagcatctcctaggagtgaggagtcagatgggtgaggttcttgcatcacagggagtagccaccttctttaaaaagtgccagtctccccacagtgctagaattctttcatttctttgggcacacaggctgaaatccatatttcatctattaggaatatatgtggataaataagttctgctttaaaaatacgactactctggaaaattgatcttagaaagaacactttcaaccctatcactttctttctgataccttgcagaagtcatccacactgaaaaagggaagtttggtgggagacagggagggatgttggcctcttggtgagagagagagaaaagcaggcccaggaagggtactcagtgcaggattctgggatggaccaggatgacttaagggagatgaaaggagagaaggggagaaaaagagaggcaggagggcactacaatttttccaattttgctattttgtcacaaaccaaattatctaaaagtgttgaacgtattcaatacttttttttttcccagtagaggaagcatatgaatgaaatagaatattatagatcatctaaagcagtcacaattctctgtgtgtaaatcaaaacgacgacaacaacaacaacaaaacttattcggagtgttggttacagtggtctcatttaggtaaagaacagggtaagcaccaagaagatcccacggctatacccaaggccactcagctaactgggccagacaggacct

SEQ ID NO: 708858 - DNA, 2056 bp, Homo sapiens
ggatcccaaaacctgaccatctgaacttgtcttttgtctctctgggtcatgttttaagcgtgtagacctgggatgacctgactgcgtgatgctggggcacaaggtgtggaggggtggatatataatggtggtcttatcgcaggcatttaggtgaatgtcagtgtctctctccagagatgaaggaactgggatatggcagtaactttgagggtggatctttttatttttatttttaatgtttgtgggtacatagtaagtgtatatatttatggggtacatgaaatgttttgataagggcatgcaatgtcaaatagtacatcatgaagaatggggtatccatcccctcaagcatttatcctttgatttacaaacaaccctattatactctttcagttattttattttatttttaatttttttgagatggagttttgctcttgttgcctaggctggattgcaatggcacggtcttggctcactgcaacctccgtctcttgggttcaagcaattcttctgcctcagcctcccaagtagctgggattacaggtgcccaccaccatgcctggctaatttttgtatttttagtagagacggggttttaccatgttggccaggctgctctcgaatgcctaacctcaggtgatccgcccacctaggcctcccaaagtgctgggattacaggcacaagccactatgcctggcctctttatttaaaaatgtacagttaagttattgttgactatagtcaccctgttgtgctatcaaatagtgggtctcatttattctttctaagtattttatttttttacctattacaccccctgagggcggatcttaatgcttgacacttagatgatgctcaataaaagttggtagggtattgtaaccccacattctgccagagattctatcatcaaggtttagtcctttatttacagtgggatcagaccgccaacattctaatgatcacaaatctagttcctgctttgtttttactttgtggttgtgcatgcatatggaaagcattggaaatgagaagaaagaaatagtcttaaaacgagtatttggagctgaataaggaactgagtatggactctcatagaaatcatagtcgtatattctatccacgttggaatttttacaccacttatttgccatgagtttttggatagcattttggtgtgacatttgaaatattacctgcataaatgtacgcctgtagtttactgaaatcctgttaatctagatgtaagagaaaaaggcctgaagatatgaccacctaggggatcaaggaatgygactcaatgacatcatccttaaagcatctcctaggagtgaggagtcagatgggtgaggttcttgcatcacagggagtagccaccttctttaaaaagtgccagtctccccacagtgctagaattctttcatttctttgggcacacaggctgaaatccatatttcatctattaggaatatatgtggataaataagttctgctttaaaaatacgactactctggaaaattgatcttagaaagaacactttcaaccctatcactttctttctgataccttgcagaagtcatccacactgaaaaagggaagtttggtgggagacagggagggatgttggcctcttggtgagagagagagaaaagcaggcccaggaagggtactcagtgcaggattctgggatggaccaggatgacttaagggagatgaaaggagagaaggggagaaaaagagaggcaggagggcactacaatttttccaattttgctattttgtcacaaaccaaattatctaaaagtgttgaacgtattcaatacttttttttttcccagtagaggaagcatatgaatgaaatagaatattatagatcatctaaagcagtcacaattctctgtgtgtaaatcaaaacgacgacaacaacaacaacaaaacttattcggagtgttggttacagtggtctcatttaggtaaagaacagggtaagcaccaagaagatcccacggctatacccaaggccactcagctaactgggccagacaggacct

SEQ ID NO: 708859 - DNA, 1265 bp, Homo sapiens
taaacctagatgatgggttgataggtgcagcaaaccaccatggcgcatgtacacctatgtaacaaacctgcacattcggtacatgtatcccggaacttaaaatacaaaataagtaaaataaataaattgtaccctcctcacccttcaatgtgtctacatgcctaatttttcctggtcatgagacaaaaacccagatttagctgaactaaggagcaaaaatcctgcatcagtatgtctagcctatattgtagtgcaatgattcctaaacatgtgaagctggctgcatagggagccctggaaaagcttgctggaaaagaacctccaaataaacacagggattcttattctgcggttcagttatggggctcaagagtccatattgtgaggccaggcacagtggctcacacctgaaatctcagcgtttttggaagccaaggtgggaggaccacttgagaccaggagttcgagaccagcctgggcaatagtgagactccgttcctacaacaatttcaaaaattagccaggcatgggggtgcatacctgtagttccagctactcatgagaccaaggtgggaggatcacttgagaccagaaggcaaaggctgcagtgagctatgatcatgtcattgcactccagcctgagcaacaacagagcaagaccctgtctctaaaaaaagtaatatttttaaaaataaaaaatcaaatattataatttattaagatcaaataaagtaacacaatcctgattttagctggactcctggctacccagaatacagactgaatattccagtcttccttgaagcaataggtattctcataactaagttctgatcaatgaaaatgaaatggaagtagaagtatcatgtggctgcttaagacaccaccttcgaagccagctcatactggcccttcccctcgccctactgttcatcactcaccccttcaggctagctgaggatgtgatggccagggctggggaaggtatgttgaaccttcattgccacattaggaagacagagaaggcaaagaaggaacctgtgtackccttttcctttaaaggaaaaataaattctacttgcttacaccattcttattttgtgttttccatcttgggctggatcaaatcctaactaaagacctaagtttttataccaataatttctatcaagacgttagaaaatgttttcttattgaattttcttgctctccaaaaagaaaacttaattttttcttgcttctgcagatgtacaaattattcaaga

SEQ ID NO: 708860 - DNA, 2388 bp, Homo sapiens
aaggataagatactattttataccattgcatcctaagaatacttctccattgctatagtactaaactgatattgattattaccagtaagaacaaaacttgggggaaaattaaggaccataaagtctttgaaaggaatttactggatattgaatgttttagaacaagtttcaaaatcttaaattgataaacagagagcaacaacttgatgaagaagtgctgttctctttcagtgtgcaaaccctgtaagataaaagttgttaaatacaatttaattcactctggagtacagttaaatagatatgatggatggcaggttaacttgatctttctcatcggttaaattatgatagatgagggatgttcacgctgaatttccaggcagagtctgtgtttgaactccctgtctttatcaagagcttccaatcaacaactgttctaaatccatctccatcagatcaatgtgacactctgcaattatgataaaggggaaggccagaaaccttacagaataagtccctcggtattgtgtgtgatgtgaagtgcaatcaacatgtcagggaaacaaaactgtctcaacaaatctgcagtattttggacttcgaagtgagctttttaatcacccctctcctcagtgaaggaaaaatgtttctggatccataattacttgtctttagggaaagaatttactatgaggcactggtatagaaatttcatacttcatgtttctgagcaatacaatcacagataaatgacttttaattacctattctaaattcgaatgaagagtgatacagaccagctacactgtggataatccaagaataatcatttggcctttaggtaacaatacaggtgtttgttgagtgctaagtgtattcagtgcatttatgtttctaattatgtgtgctttaaggtaatatggacacttctctgctacctcatgaaaacactaattcataacttgaggaggaaccayaggaactctaaaagtaaaggaagacatccttaggggtaacatagaaatgactggccattaaatattcaaacagtgtcagacaacaatttatgcaccaaatttctaaataaataagcatccagtacgtaacagagaaaaagtgaacatgacatagctcattttcagcatcaatcatcctatggtgacaccctctaaagaatctagaattaaagatttgttaaagttatcatgcattttagtatgtttagaggccactttcatttacaagggtccattttggcccttgtaaaactggttttattacttaagtgccaaatgttaatcattacagaacccaaggacagtgttacagtgaggctctaggtgtaacagattcagagccaacgcagattttttttccataaatatttgatacttgaaaagtatttcatataagcctgaaagtacatgtagagtatatttttcaatcatgaatacactagagacaacttcaacacggaatgtataaaagctttaattcattattttatcattaagataaaaatgagactaagatttaaatttatgttggctttagatggttctatatgattagttttttttaatccttcaagttaaaagtatcctaaaaaatagaagtaactgaggataataactgaagtaataaattcaactgtgtgctttgaaatgataaggacaaaatacctaccagtggctccagaactgacaatatggcaagtaaaactaagagccccaaggccatttttaattgctctacttaaatgaatgttaccatttccatttgacatcaactctaccttgactatattcttctaagtcttttgtactgtttttttttcagccttattataaaataaatgctattttaaatacaatggaagttctgtctgtagcagaaaattaaaagagccaggaagagataatataacactcaaagaccagcctaaggcatgattgtataatctatcttgagaagatcatctatttcactacccagagggggttccacaaaccctgaatcagggtcacacaacacctgtgccaaatccttggggaaaataaagttaagccataagtgaggaccatttatttattaccttgatgtacaacaaaggccaagccattccattcaggaacacctcccataaaaagttggagggggccagtgtgggctcacatctataatcccagcattttgagaggctgaggcaggaggacatttgagcccacgagtttgagaccagcctgggtaacaaagctagatcctgtctctacaaaaaatttaaaaattagcccagtgtggtggtgcacaactgtgggcccagctactcaggaggctgaggcaggaggattgcttgaggccaggaattcaagactgcagtgggcctgt

SEQ ID NO: 708861 - DNA, 648 bp, Homo sapiens
atagaaggtgacaggacagcaagaaatacaaccacattggatgtgccatttcatagttcatttcctaatggtaaatgagacttacatatttcacaggccttcaatttacttgaaaaaacagaaacaaatatgctcttgaattgctcatgagtttttttccatgttttcaaatataaaactaattcataataattcataattaatacgcttctcaattttggctatttatgtcatgttaacagcagaaattgatatgagtttcacaaataaatgactacctgaggcaggtagtttattgccaaagtaaaagagtccttttaccacattggctggggacaatagagtcatagccattcttcattcgaaaggaagatattgtcttagaatatatattcatgacccaaaacatgtaccttattcatgaaatcaataaaagaataaaagcaagktaatagggaattctaagtgcccaagaagatagcagaatatgtgaacattaagtagggtaaatagggcagacttaacagtgaagataaaatttgagcaaaggtatgaagaaggttaggcagttggcccaattgacattcaaggcaagaacttcccaggcgaaggaactagctagagtaaatatcctacagcaggagttcc

SEQ ID NO: 708862 - DNA, 1453 bp, Homo sapiens
tttgtgtgtacatattaaccctagggcaaattatcacaagcgagggtggtacatcagttatgatatatttgtaatttggttttatacttccaaattgccctttgcatggtcagttttgcaacacagaggtgtgttggggggggcacatgtgcacatacatgtcttagtttctcattgtatcttctctaagtttgggtttagaatgtttctggcttgttagtttttgcacagactttcatgaccatacatatccattgtgaatttccccatatttctttatgaattctaccttataaagccccttataaaaccatcagatctcttgagaactcattcactatcacgagaacagcatggaggtaaccactcccatgattcaattacctcctacagggtccctcccacaacatgtagggattacgggaactacaattcaagatgagatttggatgggctcattgccaaagcatatcacccgggttttctgaatcaactttttaaagaagtatccttttattcaatgcatagttgagtttggctttttgattcaatctgaaaatactgttaatttagtgagttaaaccacatcatagtgactgaaaagaaagttatagttagcttgagttgtgccatattgttatgaattatgttttctgtttatatgtctatcatgttatgtatgttgtttttcatttgtttgttattgtgtatagttttttcctgatatctaagaaagtttaaaagtttgatctagtggttacatttataattacaatttcaataataccattagttaatttttagaagatatgtattaaataattagtgaataaattttctctttttttcttgttcctcatttttctccactacatgattttagtggatttaactatctttatatactaataaatatgattatattacttgacttttcaactgtaaatagtcttcaacttcccattctatcagaggaaggaggaattatttacccagtagccttttttttccttcaccaataacttttacagttacgttgtatttacattcttattcttaattccacggtaatgcttagttccatggtaatttattcttagttccatggtaaatatatatgtattttttktgtgtgtgtatatatatatatatatatgaatatatatacacacgcacacacacacatatcttaaacttactaccagtatttttgccttgtttctccagacattccttgtttgtcttatctagaattgtagaaatttctaggaacccgaaaaaaaaaatacatatatatatatattatttgagaccaagctgctttatttaagacgaagtctcgctcttgttgcccatgctggagtgcaatggcacaaatctaggctcaccgcaacctctgcctcccaggttcaagcaattgtctcctgcctcagcctcccagctaatggaaaaa

SEQ ID NO: 708863 - DNA, 1453 bp, Homo sapiens
tttgtgtgtacatattaaccctagggcaaattatcacaagcgagggtggtacatcagttatgatatatttgtaatttggttttatacttccaaattgccctttgcatggtcagttttgcaacacagaggtgtgttggggggggcacatgtgcacatacatgtcttagtttctcattgtatcttctctaagtttgggtttagaatgtttctggcttgttagtttttgcacagactttcatgaccatacatatccattgtgaatttccccatatttctttatgaattctaccttataaagccccttataaaaccatcagatctcttgagaactcattcactatcacgagaacagcatggaggtaaccactcccatgattcaattacctcctacagggtccctcccacaacatgtagggattacgggaactacaattcaagatgagatttggatgggctcattgccaaagcatatcacccgggttttctgaatcaactttttaaagaagtatccttttattcaatgcatagttgagtttggctttttgattcaatctgaaaatactgttaatttagtgagttaaaccacatcatagtgactgaaaagaaagttatagttagcttgagttgtgccatattgttatgaattatgttttctgtttatatgtctatcatgttatgtatgttgtttttcatttgtttgttattgtgtatagttttttcctgatatctaagaaagtttaaaagtttgatctagtggttacatttataattacaatttcaataataccattagttaatttttagaagatatgtattaaataattagtgaataaattttctctttttttcttgttcctcatttttctccactacatgattttagtggatttaactatctttatatactaataaatatgattatattacttgacttttcaactgtaaatagtcttcaacttcccattctatcagaggaaggaggaattatttacccagtagccttttttttccttcaccaataacttttacagttacgttgtatttacattcttattcttaattccacggtaatgcttagttccatggtaatttattcttagttccatggtaaatatatatgtattttttgtgtgtgtgtatatatatatatatatatgaatatatatacacacgcacacacacacatatcttaaacttactaccagtatttttgccttgtttctccagacattccttgtttgtcttatctagaattgtagaaatttctaggaacccgaaaaaaaaaatacatatatatatatattatttgagaccaagytgctttatttaagacgaagtctcgctcttgttgcccatgctggagtgcaatggcacaaatctaggctcaccgcaacctctgcctcccaggttcaagcaattgtctcctgcctcagcctcccagctaatggaaaaa

SEQ ID NO: 708864 - DNA, 593 bp, Homo sapiens
ggcgcagttgctcacacctgtaatcccaacactttggaaagcgaacacgagcggatcgcttgagctcaggagtttgagaccagcctgggcaacatggtgaaaccccatgtctacaaaaaaatacaaaaaattagccggtgtggtggcacacacctgtagtctcagctatttgagaggctgaggtgggaggattgcttgcacccaggaggtggaagtcgcagtgagctgagattgcaccactgcactccaggctgggtgataagcaagatcctatctcaaaaaaaaaaaattaaaaaagcttttaaraattaaaaaaataaataaatgtgttatgctgttctcttgttaatgtcttctgttataaagatgttggctctggactttaaatgggtgaggaaaaggtattacaccttttcacccttatgttgttttagtgataaacttaatacaaactcagaaaacaaggggagtatgtggactctctagaaaaggtagaatttggaaatgaaaatgtaagaactttttatcagatgaagggaaagggagtattttccagtgagggaaaacagcataaaggtccaatgagctaagtg

SEQ ID NO: 708865 - DNA, 604 bp, Homo sapiens
aaaattgatagtgataactcagaagttaacacttcatccaggaaatctttcctcatttatgaagcattccactttgttgctgtagcctttgtaatacttacatagttaattactctagcctcctcccacccccccattaggctgtaagtttatggagagtcttcccaatgctttgtaccgggcttgtcattaaatgaatactcaacatattaattgaactgatgatagagttgggatttggtgtctgagtgaggttttcaaattctgatttcaggagttggaaagcaattaacagttgtgaggttcttatttttgagaaggtataaaattttcagtggaaacaatatatatccttgggttttaaaaatatatatttcaaaagttagctattttatgaggctgattgaaattttttattgtggtaaaatatatgtaataaagtttaccattttaatgatttttacgtatacagttctrtagcattaaatatattcacagtgttttgtaactgtcaccttcattcacatcctcttgcaaacaccattctctttttgtatgtatgaatttgaccactttaggtatctcatataaccggaatcatcca

SEQ ID NO: 708866 - DNA, 1632 bp, Homo sapiens
attaggagaaatacctaatgtagatgacaggttgatgggtgctgcaaaccaccatggcacgtgtatacctatggaacaaacctgcatgctctgcccatgtatcccagaacttaaagtacaacaaagaaaactttacataaatgcataaagtctagaacagctaatatattataatgaaatatcwactataatcccagctcaaacagaacaccatgaaattatgaagggctttccacaaatctctaaatttatgtcttcataagattacatttctatttcttcttgaataatttccttatttgagctatgatttagtgatagtaagacggtaattataaggagaaacttctcccaacactccattgagaaaattctgcctcatttcaccacacaccagagtcttaagcagtcacttctaatgtagctgaacaatagatcctcacccacctgagtctatgaattgaatcaacatatgtgagataaggcccccaaggagtggtagtaagctgggaatgccatcagctcatcttccttcaggcctatatttgtcattgtcacttgtagaagcaggacagccctggcgttggggttgttagaaacagagagtatcaaagggaaaactgaagttccctaatttttggaaaacagcagattggagacagatgggctccagcgttttccatgtgtgaggtcattatcccaggtagccttgctcaggacctcaggaccacatttcttgtcagcaaaacagaagtcaaatgatatttctaccttccaagagaatagaacataatgtcagattttctcatggattcccacaagttcaagaaactttcatggccttatttaactgcttaagcatttcaactaaaaaattgtctttcaaatacacaggaatctatttggaataattttaaccagaaaaagttggaattctaaagtaaaaaatgcataaggcaatcaaaattttttacagcttttaatttagatgtcaatggggaaaaaaacattctctgaaatttgcttttataccattaaagacttattttttactaccagcaatacagggcaactcattcaggttgaatcttgaaggtaaactttaacttaattttaagttttggctaatttttaagcatttatcaatcacctaccatgatttcatctcagaaaccaaaatctcaatttcatttaggcctttgaaatattaaaacagaaggttaaatgcttcaaaaaaatattcatgtagaggcttatatatgtggaccaggaatctccctgtattacaaagcttatgagaacataacaaatgttgatacacacatttaattctaaaataaaaacttacaacaaataaaactgtaacaaatcaagaaaattttgtaggtttcacattttatgtctgaaaatataggtataaacactcaaggaaggataaaagaaatcacaagagaaaatagaaaatatctagagacaaattaaaaatatgaaatactgaaagagatacatcaaaaacaataccataagggaaaaatttatagctataaatgataaaaaataagataccgaataaacaactttactcctaaggaactagaaacagagggaaaaagagggactactaaaagaggg

SEQ ID NO: 708867 - DNA, 1632 bp, Homo sapiens
attaggagaaatacctaatgtagatgacaggttgatgggtgctgcaaaccaccatggcacgtgtatacctatggaacaaacctgcatgctctgcccatgtatcccagaacttaaagtacaacaaagaaaactttacataaatgcataaagtctagaacagctaatatattataatgaaatatcaactataatcccagctcaaacagaacaccatgaaattatgaagggctttccacaaatctctaaatttatgtcttcataagattacatttctatttcttcttgaataatttccttatttgagctatgatttagtgatagtaagacggtaattatraggagaaacttctcccaacactccattgagaaaattctgcctcatttcaccacacaccagagtcttaagcagtcacttctaatgtagctgaacaatagatcctcacccacctgagtctatgaattgaatcaacatatgtgagataaggcccccaaggagtggtagtaagctgggaatgccatcagctcatcttccttcaggcctatatttgtcattgtcacttgtagaagcaggacagccctggcgttggggttgttagaaacagagagtatcaaagggaaaactgaagttccctaatttttggaaaacagcagattggagacagatgggctccagcgttttccatgtgtgaggtcattatcccaggtagccttgctcaggacctcaggaccacatttcttgtcagcaaaacagaagtcaaatgatatttctaccttccaagagaatagaacataatgtcagattttctcatggattcccacaagttcaagaaactttcatggccttatttaactgcttaagcatttcaactaaaaaattgtctttcaaatacacaggaatctatttggaataattttaaccagaaaaagttggaattctaaagtaaaaaatgcataaggcaatcaaaattttttacagcttttaatttagatgtcaatggggaaaaaaacattctctgaaatttgcttttataccattaaagacttattttttactaccagcaatacagggcaactcattcaggttgaatcttgaaggtaaactttaacttaattttaagttttggctaatttttaagcatttatcaatcacctaccatgatttcatctcagaaaccaaaatctcaatttcatttaggcctttgaaatattaaaacagaaggttaaatgcttcaaaaaaatattcatgtagaggcttatatatgtggaccaggaatctccctgtattacaaagcttatgagaacataacaaatgttgatacacacatttaattctaaaataaaaacttacaacaaataaaactgtaacaaatcaagaaaattttgtaggtttcacattttatgtctgaaaatataggtataaacactcaaggaaggataaaagaaatcacaagagaaaatagaaaatatctagagacaaattaaaaatatgaaatactgaaagagatacatcaaaaacaataccataagggaaaaatttatagctataaatgataaaaaataagataccgaataaacaactttactcctaaggaactagaaacagagggaaaaagagggactactaaaagaggg

SEQ ID NO: 708868 - DNA, 1632 bp, Homo sapiens
attaggagaaatacctaatgtagatgacaggttgatgggtgctgcaaaccaccatggcacgtgtatacctatggaacaaacctgcatgctctgcccatgtatcccagaacttaaagtacaacaaagaaaactttacataaatgcataaagtctagaacagctaatatattataatgaaatatcaactataatcccagctcaaacagaacaccatgaaattatgaagggctttccacaaatctctaaatttatgtcttcataagattacatttctatttcttcttgaataatttccttatttgagctatgatttagtgatagtaagacggtaattataaggagaaacttctcccaacactccattgagaaaattctgcctcatttcaccacacaccagagtcttaagcagtcacttctaatgtagctgaacaatagatcctcacccacctgagtctatgaattgaatcaacatatgtgagataaggcccccaaggagtggtagtaagctgggaatgccatcagctcatcttccttcaggcctatatttgtcattgtcacttgtagaagcaggacagccctggcgttggggttgktagaaacagagagtatcaaagggaaaactgaagttccctaatttttggaaaacagcagattggagacagatgggctccagcgttttccatgtgtgaggtcattatcccaggtagccttgctcaggacctcaggaccacatttcttgtcagcaaaacagaagtcaaatgatatttctaccttccaagagaatagaacataatgtcagattttctcatggattcccacaagttcaagaaactttcatggccttatttaactgcttaagcatttcaactaaaaaattgtctttcaaatacacaggaatctatttggaataattttaaccagaaaaagttggaattctaaagtaaaaaatgcataaggcaatcaaaattttttacagcttttaatttagatgtcaatggggaaaaaaacattctctgaaatttgcttttataccattaaagacttattttttactaccagcaatacagggcaactcattcaggttgaatcttgaaggtaaactttaacttaattttaagttttggctaatttttaagcatttatcaatcacctaccatgatttcatctcagaaaccaaaatctcaatttcatttaggcctttgaaatattaaaacagaaggttaaatgcttcaaaaaaatattcatgtagaggcttatatatgtggaccaggaatctccctgtattacaaagcttatgagaacataacaaatgttgatacacacatttaattctaaaataaaaacttacaacaaataaaactgtaacaaatcaagaaaattttgtaggtttcacattttatgtctgaaaatataggtataaacactcaaggaaggataaaagaaatcacaagagaaaatagaaaatatctagagacaaattaaaaatatgaaatactgaaagagatacatcaaaaacaataccataagggaaaaatttatagctataaatgataaaaaataagataccgaataaacaactttactcctaaggaactagaaacagagggaaaaagagggactactaaaagaggg

SEQ ID NO: 708869 - DNA, 1632 bp, Homo sapiens
attaggagaaatacctaatgtagatgacaggttgatgggtgctgcaaaccaccatggcacgtgtatacctatggaacaaacctgcatgctctgcccatgtatcccagaacttaaagtacaacaaagaaaactttacataaatgcataaagtctagaacagctaatatattataatgaaatatcaactataatcccagctcaaacagaacaccatgaaattatgaagggctttccacaaatctctaaatttatgtcttcataagattacatttctatttcttcttgaataatttccttatttgagctatgatttagtgatagtaagacggtaattataaggagaaacttctcccaacactccattgagaaaattctgcctcatttcaccacacaccagagtcttaagcagtcacttctaatgtagctgaacaatagatcctcacccacctgagtctatgaattgaatcaacatatgtgagataaggcccccaaggagtggtagtaagctgggaatgccatcagctcatcttccttcaggcctatatttgtcattgtcacttgtagaagcaggacagccctggcgttggggttgttagaaacagagagtatcaaagggaaaactgaagttccctaatttttggaaaacagcagattggagacagatgggctccagcgttttccatgtgtgaggtcattatcccaggtagccttgctcaggacctcaggaccacatttcttgtcagcaaaacagaagtcaaatgatatttctaccttccaagagaatagaacataatgtcagattttctcatggattcccacaagttcaagaaactttcatggccttatttaactgcttaagcatttcaactaaaaaattgtctttcaaatacacaggaatctatttggaataattttaaccagaaaaagttggaattctaaagtaaaaaatgcataaggcaatcaaaattttttacagcttttaatttagatgtcaatggggaaaaaaacattctctgaaatttgcttttataccattaaagacttattttttaytaccagcaatacagggcaactcattcaggttgaatcttgaaggtaaactttaacttaattttaagttttggctaatttttaagcatttatcaatcacctaccatgatttcatctcagaaaccaaaatctcaatttcatttaggcctttgaaatattaaaacagaaggttaaatgcttcaaaaaaatattcatgtagaggcttatatatgtggaccaggaatctccctgtattacaaagcttatgagaacataacaaatgttgatacacacatttaattctaaaataaaaacttacaacaaataaaactgtaacaaatcaagaaaattttgtaggtttcacattttatgtctgaaaatataggtataaacactcaaggaaggataaaagaaatcacaagagaaaatagaaaatatctagagacaaattaaaaatatgaaatactgaaagagatacatcaaaaacaataccataagggaaaaatttatagctataaatgataaaaaataagataccgaataaacaactttactcctaaggaactagaaacagagggaaaaagagggactactaaaagaggg

SEQ ID NO: 708870 - DNA, 1632 bp, Homo sapiens
attaggagaaatacctaatgtagatgacaggttgatgggtgctgcaaaccaccatggcacgtgtatacctatggaacaaacctgcatgctctgcccatgtatcccagaacttaaagtacaacaaagaaaactttacataaatgcataaagtctagaacagctaatatattataatgaaatatcaactataatcccagctcaaacagaacaccatgaaattatgaagggctttccacaaatctctaaatttatgtcttcataagattacatttctatttcttcttgaataatttccttatttgagctatgatttagtgatagtaagacggtaattataaggagaaacttctcccaacactccattgagaaaattctgcctcatttcaccacacaccagagtcttaagcagtcacttctaatgtagctgaacaatagatcctcacccacctgagtctatgaattgaatcaacatatgtgagataaggcccccaaggagtggtagtaagctgggaatgccatcagctcatcttccttcaggcctatatttgtcattgtcacttgtagaagcaggacagccctggcgttggggttgttagaaacagagagtatcaaagggaaaactgaagttccctaatttttggaaaacagcagattggagacagatgggctccagcgttttccatgtgtgaggtcattatcccaggtagccttgctcaggacctcaggaccacatttcttgtcagcaaaacagaagtcaaatgatatttctaccttccaagagaatagaacataatgtcagattttctcatggattcccacaagttcaagaaactttcatggccttatttaactgcttaagcatttcaactaaaaaattgtctttcaaatacacaggaatctatttggaataattttaaccagaaaaagttggaattctaaagtaaaaaatgcataaggcaatcaaaattttttacagcttttaatttagatgtcaatggggaaaaaaacattctctgaaatttgcttttataccattaaagacttattttttactaccagcaatacagggcaactcattcaggttgaatcttgaaggtaaactttaacttaattttaagttttggctaatttttaagcatttatcaatcacctaccatgatttcatctcagaaaccaaaatctcaatttcatttaggcctttgaaatattaaaacagaaggtkaaatgcttcaaaaaaatattcatgtagaggcttatatatgtggaccaggaatctccctgtattacaaagcttatgagaacataacaaatgttgatacacacatttaattctaaaataaaaacttacaacaaataaaactgtaacaaatcaagaaaattttgtaggtttcacattttatgtctgaaaatataggtataaacactcaaggaaggataaaagaaatcacaagagaaaatagaaaatatctagagacaaattaaaaatatgaaatactgaaagagatacatcaaaaacaataccataagggaaaaatttatagctataaatgataaaaaataagataccgaataaacaactttactcctaaggaactagaaacagagggaaaaagagggactactaaaagaggg

SEQ ID NO: 708871 - DNA, 1632 bp, Homo sapiens
attaggagaaatacctaatgtagatgacaggttgatgggtgctgcaaaccaccatggcacgtgtatacctatggaacaaacctgcatgctctgcccatgtatcccagaacttaaagtacaacaaagaaaactttacataaatgcataaagtctagaacagctaatatattataatgaaatatcaactataatcccagctcaaacagaacaccatgaaattatgaagggctttccacaaatctctaaatttatgtcttcataagattacatttctatttcttcttgaataatttccttatttgagctatgatttagtgatagtaagacggtaattataaggagaaacttctcccaacactccattgagaaaattctgcctcatttcaccacacaccagagtcttaagcagtcacttctaatgtagctgaacaatagatcctcacccacctgagtctatgaattgaatcaacatatgtgagataaggcccccaaggagtggtagtaagctgggaatgccatcagctcatcttccttcaggcctatatttgtcattgtcacttgtagaagcaggacagccctggcgttggggttgttagaaacagagagtatcaaagggaaaactgaagttccctaatttttggaaaacagcagattggagacagatgggctccagcgttttccatgtgtgaggtcattatcccaggtagccttgctcaggacctcaggaccacatttcttgtcagcaaaacagaagtcaaatgatatttctaccttccaagagaatagaacataatgtcagattttctcatggattcccacaagttcaagaaactttcatggccttatttaactgcttaagcatttcaactaaaaaattgtctttcaaatacacaggaatctatttggaataattttaaccagaaaaagttggaattctaaagtaaaaaatgcataaggcaatcaaaattttttacagcttttaatttagatgtcaatggggaaaaaaacattctctgaaatttgcttttataccattaaagacttattttttactaccagcaatacagggcaactcattcaggttgaatcttgaaggtaaactttaacttaattttaagttttggctaatttttaagcatttatcaatcacctaccatgatttcatctcagaaaccaaaatctcaatttcatttaggcctttgaaatattaaaacagaaggttaaatgcttcaaaaaaatattcatgtagaggcttatatatgtggaccaggaatctccmtgtattacaaagcttatgagaacataacaaatgttgatacacacatttaattctaaaataaaaacttacaacaaataaaactgtaacaaatcaagaaaattttgtaggtttcacattttatgtctgaaaatataggtataaacactcaaggaaggataaaagaaatcacaagagaaaatagaaaatatctagagacaaattaaaaatatgaaatactgaaagagatacatcaaaaacaataccataagggaaaaatttatagctataaatgataaaaaataagataccgaataaacaactttactcctaaggaactagaaacagagggaaaaagagggactactaaaagaggg

SEQ ID NO: 708872 - DNA, 1632 bp, Homo sapiens
attaggagaaatacctaatgtagatgacaggttgatgggtgctgcaaaccaccatggcacgtgtatacctatggaacaaacctgcatgctctgcccatgtatcccagaacttaaagtacaacaaagaaaactttacataaatgcataaagtctagaacagctaatatattataatgaaatatcaactataatcccagctcaaacagaacaccatgaaattatgaagggctttccacaaatctctaaatttatgtcttcataagattacatttctatttcttcttgaataatttccttatttgagctatgatttagtgatagtaagacggtaattataaggagaaacttctcccaacactccattgagaaaattctgcctcatttcaccacacaccagagtcttaagcagtcacttctaatgtagctgaacaatagatcctcacccacctgagtctatgaattgaatcaacatatgtgagataaggcccccaaggagtggtagtaagctgggaatgccatcagctcatcttccttcaggcctatatttgtcattgtcacttgtagaagcaggacagccctggcgttggggttgttagaaacagagagtatcaaagggaaaactgaagttccctaatttttggaaaacagcagattggagacagatgggctccagcgttttccatgtgtgaggtcattatcccaggtagccttgctcaggacctcaggaccacatttcttgtcagcaaaacagaagtcaaatgatatttctaccttccaagagaatagaacataatgtcagattttctcatggattcccacaagttcaagaaactttcatggccttatttaactgcttaagcatttcaactaaaaaattgtctttcaaatacacaggaatctatttggaataattttaaccagaaaaagttggaattctaaagtaaaaaatgcataaggcaatcaaaattttttacagcttttaatttagatgtcaatggggaaaaaaacattctctgaaatttgcttttataccattaaagacttattttttactaccagcaatacagggcaactcattcaggttgaatcttgaaggtaaactttaacttaattttaagttttggctaatttttaagcatttatcaatcacctaccatgatttcatctcagaaaccaaaatctcaatttcatttaggcctttgaaatattaaaacagaaggttaaatgcttcaaaaaaatattcatgtagaggcttatatatgtggaccaggaatctccctgtattacaaagyttatgagaacataacaaatgttgatacacacatttaattctaaaataaaaacttacaacaaataaaactgtaacaaatcaagaaaattttgtaggtttcacattttatgtctgaaaatataggtataaacactcaaggaaggataaaagaaatcacaagagaaaatagaaaatatctagagacaaattaaaaatatgaaatactgaaagagatacatcaaaaacaataccataagggaaaaatttatagctataaatgataaaaaataagataccgaataaacaactttactcctaaggaactagaaacagagggaaaaagagggactactaaaagaggg

SEQ ID NO: 708873 - DNA, 552 bp, Homo sapiens
tttttcttgctaatttgtttgagttccttgtagattatagatattagtcctttgtcagatgtatagattgtgaagattttctcccactctgtgggttgtctgtttactctgctgactgttccttttgctgtgcagaagtttttatgaagcaagtctttggggaggatattttgtctcataaaagttattacaaacatcaagaaagtggattccagccgggcgcagtggctcacgcctgtaatcccagcactttgggaggccaagacgggtggatcacgaggtcaggagatccagaccatcctgggtaacacggggaaacctgtctctactaaaaatacaaaaaattagctgggcatggtggcgggcgcctgtagtcccagctacttgggaggctgaggcaggagaatagcgtgaacctgggaggtggagcttgcagtgagccgagattgtgccactgcactccagcctgggggacagagcgagactctgtctcaaaaaaaaaaaaaaaaaaagaaagaaagaaagaaagaaakaaagtggattcctcttcca

SEQ ID NO: 708874 - DNA, 1257 bp, Homo sapiens
ggccttccttgtgcacaacactggcgtgcattctttcttctgcctgcctctgttattacattggttttaaagaaaccaaaatccttggtgagctgcctgtaggcatgagggaaggaaggatgagtatttctgactttgctttttgaaaagcttccaaatgtggagcaaagaacaggagacaaacaaggagtggtggtggttcttgcatgtcactttgaatgtaactttgaagccaggttgtcctagatggcttatggttataggacagttgtcttaaaaaacaaaaactaaaactacagcacatagacaccaacacagatgagcaaatgctaaattgtcatgtaatgcaagtgactgatcagatgtatagcactggtgaaaggttcctgctgttttgccagcctcttgaaggaatctcagtagacttacaaattcacgtttatgtttcatcatttaacaatggttctttattttacctttttaaggacctaataaataagtcagacaatgacacaagatttggagagctgaaacatttctaaattatattacgatcactactgcttgaggtatttatttgcattttatggggaatttcttaagcaacctgaaattttttgttttgtttcgtttcattttgttttgagtcagtgtctttctttgtcgcccaggctggagtgcaacctggagtgccacaattatagctgactgcagctttgaattcctgggctcaagggatcctcccacctcarcttcccaagtagctgcgactacaggcacatgccaccatgcttggctaattaaaaatttttttttgtagagacgggaccttaccatgttgctcagactggtcttgaactcctggcctcaagtgatccacccaccttggcctcccaaagcactgggattacaggcctgagccattgcactcggcctaagctgaaatgttttggttcctaaaagtgtccatgtgtaagaaaaaagaactgtaggtctttggaccatatcaaggttttatttacatatccccctcttccctacacccaaaattgaatgtagaaaaagtgagggtgttgcaaatacaagtgacagtaacaaacttcgaatgaggttgaacctttacagcagcagtgaagccatgaacgatctcttccgggtgtcctagaggagccctcgtgccttacaggaagttctagccctgtgcagccaacacacacctgtatttgttcagatgtcaccttggtggcacagtgcaga

SEQ ID NO: 708875 - DNA, 1257 bp, Homo sapiens
ggccttccttgtgcacaacactggcgtgcattctttcttctgcctgcctctgttattacattggttttaaagaaaccaaaatccttggtgagctgcctgtaggcatgagggaaggaaggatgagtatttctgactttgctttttgaaaagcttccaaatgtggagcaaagaacaggagacaaacaaggagtggtggtggttcttgcatgtcactttgaatgtaactttgaagccaggttgtcctagatggcttatggttataggacagttgtcttaaaaaacaaaaactaaaactacagcacatagacaccaacacagatgagcaaatgctaaattgtcatgtaatgcaagtgactgatcagatgtatagcactggtgaaaggttcctgctgttttgccagcctcttgaaggaatctcagtagacttacaaattcacgtttatgtttcatcatttaacaatggttctttattttacctttttaaggacctaataaataagtcagacaatgacacaagatttggagagctgaaacatttctaaattatattacgatcactactgcttgaggtatttatttgcattttatggggaatttcttaagcaacctgaaattttttgttttgtttcgtttcattttgttttgagtcagtgtctttctttgtcgcccaggctggagtgcaacctggagtgccacaattatagctgactgcagctttgaattcctgggctcaagggatcctcccacctcagcttcccaagtagctgcgactacaggcacatgccaccatgcttggctaattaaaaatttttttttgtagagacgggaccttaccatgttgctcagactggtcttgaactcctggcctcaagtgatccacccaccttggcctcccaaagcactgggattacaggcctgagccattgcactcggcctaagctgaaatgttttggttcctaaaagtgtccatgtgtaagaaaaaagaactgtaggtctttggaccatatcaaggttttatttacatatccccctcttycctacacccaaaattgaatgtagaaaaagtgagggtgttgcaaatacaagtgacagtaacaaacttcgaatgaggttgaacctttacagcagcagtgaagccatgaacgatctcttccgggtgtcctagaggagccctcgtgccttacaggaagttctagccctgtgcagccaacacacacctgtatttgttcagatgtcaccttggtggcacagtgcaga

SEQ ID NO: 708876 - DNA, 1793 bp, Homo sapiens
ctcccctccctaggatttatattaatcacagaaaattaactcttaacataggagagaaaactcaaagtctccatgcccaggacagacttcacctattctttcaactaaagggctgttacctgagagacttaatctgcataattagacaacctttgttcacagtgcacttccacccctcaccttcccataacttgtcactacctcccccagggcccataggaacttagtcccagtccattgtctgctcttgagtccactcatctcctcattgaggggtccctctccacacagactgatggggctcagagaggcggcccctgcagtccccatgggacagctctgacccggccctctcaggcatgctgtgctccttcccatgcaattggcctcaattttcacttttgtttctgagtggtgatggggggaactgaaatactcaaatgcttgtaaataaatcaccctgtctcattgctcagctgagtgttttttgccaatacagagcttccgtgtgctcacgctcatgggagtcagctgtggggaaggtgggacggtggggtttgcacagaataagcacatggcgtggtctgcagggcctcctttttatgcagctgcctgcgctcctgtcctgtccctggcagaggaagtgtgtgcagaaggatctgaaagtcgggggtgaggtgggcagcgggttcagaggcaaccgtccccaggggtgtgagtttggcactggttctccacctgatatgcccccaggcactgcccttctctgcaggcccccagccctcactacaggccaggcttccccactgggtctccttcctggaaggcagcgttggccttcctgtccctgcttgcctccccactgtccacctcggccacagagacgctcactctccctcctcagtctggagagctcctcactgcccctgcaggccctccagtcctgtcacttcagtcactctgtctcccccagccccactccagccctgctccgccctctgccctcctgccctgtgagccttctgccttccccctcctgcccagcaaactccactcacctctcacgctgtcatttcctccaggagatcttttctaagttgaagccttctgtccaagacactcccataatgatgaatctaaccatcctcccttcctagaggggctcatggagaacagaacatggstgccctgcctggatcccttcagagcctcaggcccagctcaggaccctgcctaagagcaggcacttgataaacgcctgttgaatgaatgaatacatgagccatggtgtccagcgagagaacactgctgccccagaagaggtgcgtgcggtggggagggggtggagactgggggacaggaacagtgacaacaggggcccagtcttgggtggtggtcacagctcgagggccaccagaagtcttcccagcagacggggccatgcacaaccgtgtcacagcacatgcctcagaaatcatgttgctgacagcagtcagtgtcaagccacagtcagcgtctacacgtgcccccgcttctcaggctttgaacctgaatcaccccttctgtccagaggaagccatccacaaagttggagcatcaaggtgagagctgaggcacaggagagggaagtgtctgcctcaagactctgtcctcttccagacacgtgtcctgtccccgcttccccagctaggcaacctctcaaagcagggtgttcactctcaacagggcagaagaatttgcccatcttctgatagggcagaagatgacgggaggacagccacacatgttccaaa

SEQ ID NO: 708877 - DNA, 1793 bp, Homo sapiens
ctcccctccctaggatttatattaatcacagaaaattaactcttaacataggagagaaaactcaaagtctccatgcccaggacagacttcacctattctttcaactaaagggctgttacctgagagacttaatctgcataattagacaacctttgttcacagtgcacttccacccctcaccttcccataacttgtcactacctcccccagggcccataggaacttagtcccagtccattgtctgctcttgagtccactcatctcctcattgaggggtccctctccacacagactgatggggctcagagaggcggcccctgcagtccccatgggacagctctgacccggccctctcaggcatgctgtgctccttcccatgcaattggcctcaattttcacttttgtttctgagtggtgatggggggaactgaaatactcaaatgcttgtaaataaatcaccctgtctcattgctcagctgagtgttttttgccaatacagagcttccgtgtgctcacgctcatgggagtcagctgtggggaaggtgggacggtggggtttgcacagaataagcacatggcgtggtctgcagggcctcctttttatgcagctgcctgcgctcctgtcctgtccctggcagaggaagtgtgtgcagaaggatctgaaagtcgggggtgaggtgggcagcgggttcagaggcaaccgtccccaggggtgtgagtttggcactggttctccacctgatatgcccccaggcactgcccttctctgcaggcccccagccctcactacaggccaggcttccccactgggtctccttcctggaaggcagcgttggccttcctgtccctgcttgcctccccactgtccacctcggccacagagacgctcactctccctcctcagtctggagagctcctcactgcccctgcaggccctccagtcctgtcacttcagtcactctgtctcccccagccccactccagccctgctccgccctctgccctcctgccctgtgagccttctgccttccccctcctgcccagcaaactccactcacctctcacgctgtcatttcctccaggagatcttttctaagttgaagccttctgtccaagacactcccataatgatgaatctaaccatcctcccttcctagaggggctcatggagaacagaacatgggtgccctgcctggatcccttcagagcctcaggcccagctcaggaccctgcctaagagcargcacttgataaacgcctgttgaatgaatgaatacatgagccatggtgtccagcgagagaacactgctgccccagaagaggtgcgtgcggtggggagggggtggagactgggggacaggaacagtgacaacaggggcccagtcttgggtggtggtcacagctcgagggccaccagaagtcttcccagcagacggggccatgcacaaccgtgtcacagcacatgcctcagaaatcatgttgctgacagcagtcagtgtcaagccacagtcagcgtctacacgtgcccccgcttctcaggctttgaacctgaatcaccccttctgtccagaggaagccatccacaaagttggagcatcaaggtgagagctgaggcacaggagagggaagtgtctgcctcaagactctgtcctcttccagacacgtgtcctgtccccgcttccccagctaggcaacctctcaaagcagggtgttcactctcaacagggcagaagaatttgcccatcttctgatagggcagaagatgacgggaggacagccacacatgttccaaa

SEQ ID NO: 708878 - DNA, 1169 bp, Homo sapiens
ttttatggagacacatctgtgtgaccttaggaaggtctcccaagagctctgggtttgtttcttcccctgtgaattggcttatgattgtgtcacttggccttasaggtatgtaaagctccccagttaccagatcttactgtctcagggaacatcctgcagatattcagggccccacactggagctattcttcaggttccacgtttgaaaggttgaaaggcgttaagagcgtgacatgaaatgagtgggtgaatttatttttaggaaacaatatataggtaattagttttggaaatgggcttccgttaacttatcaccccttactcttttctggggcatcatccagttatttttcctcagtcatagaatttggggcttttgaaaatgtctctatgagaaatagacacacaccttgcaactccttaagatcttgcccttgtaattaaatttttgagcaccatttttatataggagtaaatgagataattaagagatatttcaagaaagagaagtatatgagaaaataaatggtttctgctgcgtgattaaacactgcagctgagaccttgatgagcagtcatttgttggaagtgtacttcatcatcgggagtggtgtcctgattatcgttcaagaaacatgttgggagaaggcaaagacggacgtgatgacacctgtgcaaagacggacgtgatgacatgtatgccgaagcgtgtcttgactcagtgtaggattgataccaacatctcttggatgttgtgggatatggagcattaaaatatacaataatttatgctagtggtgcagtgtaatgaggacttgctgtgaatctcaaatcgatttcggagaagctgaacctaatgttttcctgattgtcaaaccctccagtaatgattataaataaccactgttttctttatattagagaaaacctaaaagaaaaaccaaacatgttcaacaatgagcaacagtacaaaagaaaaagtacaaagtctagcatatccaataacaattattagctaattaattttactcgaccacctggtgttggaggcatccctctcctctctggcatggtagagtgagaacttcctggtcctatagatccaggcccaaatcgtggtcctgactcagtgtttttaagataatgtgtccttggacaagttgcttgat

SEQ ID NO: 708879 - DNA, 1601 bp, Homo sapiens
gctttaaaatacagcagtaggtgtggcaagagacacatttcctcctttccatcatcaggtgaactttctgaagtactgcatgaactattttcatctgcagaatattgaaggtaattctttcacatcagtgcctgatgaggattaattagtgaatgcttacagggtggtttaaaatgaaaaatgaaaaagtatttaaatgtcagctatagctctcactgtatcataagcactgagctctgacgcttgctgagaattcccctttccacagctatgctcacaaggtggtaggaaagcaggagcagttttttctaactgcaataaaccatccatctatcactccacaccattttccaggaagaaaacaggaatcaagtcccacagacggattcttcattatcttctagaaaactacataaaatggtcattttttcctttttgtgagtctcactcttttgcccagactagagtgcagtggcacagacatagctcactgcagcctcgatatcccaggctcaagtgagctgggatctgtagtcccagctactcaggaggctaaggtgggagggtcatcaaggaaaactgtagctttccttggctcatgacttccttccatctttaaaaccagcagtgtaacattttcaagcctcgatctgactctgacactctgcttttgtcattacttctcctgctctgacttctttagagacccttgtgatgacattgagtccttgtgatgacactaggaccaccagagaatccaggataacctcccgatctcaggtctttcaccatgtctgccttgcaagggatcccattccagattgaggcaggggcggggattaggatgcagatgtcattggaattattctacctgccacacccacaatcaccaagcatgagactcttcagtattgtgttggacatggaaacaggtagtttataattttttaaaacattgcccaattccttagagttcaaaaggaaccaacaatctaaaccacttaaggaaagtggagtgatctcctctctgtttaagtaaggattcatctgtacttcctgtcagggcgtagggactcagagggctctcttacttccactacacccagagaggcccattgaggagactcctccctacccaagtggctacagtgytgtctgagtggatctggtggcaagcttgactacactgcagagactgctgtgtgctgggcatgagctctgtcctccatatgatcagctggctagaggcacctatattcaaattccatctggctcattgttttacctgtatgaaatacagaggtagaatgtgtattcctgtgttaataatctctgttaactgcatagcagcattattctaaaacttggttaattgaattaaaaagtatttcagatttacactgaaaaaggaaaaacattatcaagccacacaaatccagaactacactttcattcagtcacatatttgtatggagcacactgtgtgctggggaaatagaaatgaacaagagagatgaagtctcagcccttcatgtgattggtagttggcatcagagccacgaagtacatcagaacgctggggttgcctgctagatgaactt

SEQ ID NO: 708880 - DNA, 677 bp, Homo sapiens
ttaagggcccctctcgtaaatctgtgtttcagagaggagggataagaggggttcagcaatctgcctaaagtgacagtactggtcagtgagtgccaaatataagcaattcaacctgcaaaaagccactccctcttacyctacgtggacagacttgaggacaaagcaagccttgatcatcgctacctgcagagtagactgtatgtgtgaacgtggccaactatgcccaagccatgctgagctcaggcagagccaggcgaaccccacaggtagcagctacccagactgaggctatctgaccttgatgctgagttcctctactgtgctcggaggggtccagaacccaaaactcagcacttccttaactcatgcatgctctgaacctgagagagggagaggtatgtgctgcctttcagtttctatgaggatggttttcttggaaagttctagagcagcgatggaggctctgagctctcagatggatatgagctggaatccgacttttcttgcccttttcttgctctgcctcaccttcctgggcctgagcttcttcatcggtaagctgccattgtagtgttgtcacaaggatcaaaggataatggttgtaaaatgcttagcaccatgcctggcacatggcaagcccctgatacacaagcactgggattagtatgtgcatcatt

SEQ ID NO: 708881 - DNA, 613 bp, Homo sapiens
atatttagtctgtgcaaatgtgaagagttcagaatatctttttttaggggtgatcagcatgtccatgtctgctttactcaaccctggtgctacaaatacattcatgagtcattttacaatcttcacctaaagtttggagtgataaggattaaaacaaacaaacaaaaaaacctcccacaccagccatattgttgtcatgcaaggacacctccaagctccaggagcatctgtgctagtgagtgcctctgctggcccgggctcttagtattacgagctaattcacctgagaacctgacactctggcagttcaggcagaggaagccgagctgtttgttgggctaatacagttttcttgttctaggtgagaaggaagcatgtagagcacgtgctcagtatttgctgggagctagtgaaagctgtggaatgccgctggtcaagctgcagagacagggcaactggggcaggtgatggcagtggcagtgctgttggtggcagatggctggggcccaggacactgagggtggcctggctccgtcattcctcagacaactgtgctgsctatatatactccaaccctgtctatgtgtgaggcctcatgctggctgctggaaga

SEQ ID NO: 708882 - DNA, 613 bp, Homo sapiens
atatttagtctgtgcaaatgtgaagagttcagaatatctttttttaggggtgatcagcatgtccatgtctgctttactcaaccctggtgctacaaatacattcatgagtcattttacaatcttcacctaaagtttggagtgataaggattaaaacaaacaaacaaaaaaacctcccacaccagccatattgttgtcatgcaaggacacctccaagctccaggagcatctgtgctagtgagtgcctctgctggcccgggctcttagtattacgagctaattcacctgagaacctgacactctggcagttcaggcagaggaagccgagctgtttgttgggctaatacagttttcttgttctaggtgagaaggaagcatgtagagcacgtgctcagtatttgctgggagctagtgaaagctgtggaatgccgctggtcaagctgcagagacagggcaactggggcaggtgatggcagtggcagtgctgttggtggcagatggctggggcccaggacactgagggtggcctggctccgtcattcctcagacaactgtgctggmtatatatactccaaccctgtctatgtgtgaggcctcatgctggctgctggaaga

SEQ ID NO: 708883 - DNA, 655 bp, Homo sapiens
tcacgatttatgtttacagactgcagtaaagacaggcataagaaattataaaagtaytaatttggggaactaataaatgtccatgaaatcttcacaatccatgttcttctgccatggcttcagccggtccctccattcggggtccctgacttcccgcaacacccccgcaaaattttaaatatctgttacccaccattggtacattaccgatctggtaaacctctcaattacatttaatgcacacaaagtaaagttattgaatattttatcctgtgtgacctcattttaagaggtacataagaaaatactttttctctgaaggccttgcattgtaataaaatatacggaaaaaaataacatgtagttttcataaaaattgatttaattggtaatttcaagaagggtaatttaacttttaattatgtcaccctaaattcctaagattgtgtatcttccagcttcagactaggcaatatcatcattttcccttcacccaaccttttagagggcagactaaaaaaccagttttctaaattgtttgctcccctcactgtgaatttaagcagcatttggcagtactgaagccttaatctagtccagcagtgaatactaaggatgaagatttgatcaagttggaaaaccactttcacacagc

SEQ ID NO: 708884 - DNA, 655 bp, Homo sapiens
tcacgatttatgtttacagactgcagtaaagacaggcataagaaattataaaagtactaatttggggaactaataaatgtccatgaaatcttcacaatccatgttcttctgccatggcttcagccggtccctccattcggggtccctgacttcccgcaacacccccgcaaaattttaaatatctgttacccaccattggtacattaccratctggtaaacctctcaattacatttaatgcacacaaagtaaagttattgaatattttatcctgtgtgacctcattttaagaggtacataagaaaatactttttctctgaaggccttgcattgtaataaaatatacggaaaaaaataacatgtagttttcataaaaattgatttaattggtaatttcaagaagggtaatttaacttttaattatgtcaccctaaattcctaagattgtgtatcttccagcttcagactaggcaatatcatcattttcccttcacccaaccttttagagggcagactaaaaaaccagttttctaaattgtttgctcccctcactgtgaatttaagcagcatttggcagtactgaagccttaatctagtccagcagtgaatactaaggatgaagatttgatcaagttggaaaaccactttcacacagc

SEQ ID NO: 708885 - DNA, 655 bp, Homo sapiens
tcacgatttatgtttacagactgcagtaaagacaggcataagaaattataaaagtactaatttggggaactaataaatgtccatgaaatcttcacaatccatgttcttctgccatggcttcagccggtccctccattcggggtccctgacttcccgcaacacccccgcaaaattttaaatatctgttacccaccattggtacattaccgatctggtaaacctctcaattacatttaatgcacacaaagtaaagttattgaatattttatcctgtgtgacctcattttaagaggtacataagaaaatactttttctctgaaggccttgcattgtaataaaatatacggaaaaaaataacatgtagttttcataaaaattgatttaattggtaatttcaagaagggtaatttaacttttaattatgtcaccctaaattcctaagattgtgtatcttccagcttcagactaggcaatatcatcattttcccttcacccaaccttttagagggcagactaaaaaaccagttttctaaattgtttgctcccctcactgtgaatttaagcagcatttggcagtactgaagccttaatctagtcyagcagtgaatactaaggatgaagatttgatcaagttggaaaaccactttcacacagc

SEQ ID NO: 708886 - DNA, 1693 bp, Homo sapiens
ttctattctattctattctattctattctattctattccattccattccattctaattttatttttttggagatggagtctcrctctcatgcccaggcttgagagtgcagtggcgccaacggctcactgcaacctctgcctcccgggttcaagcaattctcctgcctcagcctcccgagtagttgggattacaggcacacactaccactcacggttaatttgtgcatttttagtagacacagggtttcgccatattggccaggctggcctcaaactcctgacatcaagtgatctgctggccttggcccccaaaagtgctgggattacaggagtgagccgccttgcccggtggagactcagtttttagagcctcagcttctggatcctcacacagctctgctgaagaaagtggctgtatctgcagcctttcttttctcacaagcctcttccttccacttggcaatacaaacgcaaaccggccccatccccaaggcagacagtgcactgtcccaggacacaacacctctagtgggcagaaagaagaaactgtctaagagattggtgctgacttcgagaaaacaatttttttcaataattagaattacttcaatgactgattaacaaattgttagccactgaggtagatacattttaagtttctcctttcaatcaaattgaagaaggagaatatgaagtaactcataaattaattcaaattggaggctgtacgctgtcatatggttctccttccatttctatccatccagttttgtaggtttgtacctcgagtttatttgtgcttatctcagaaagtgagaaagagaaagagaaaaagagaaagaaaggagaagagataggcaaggaaggaaggaaggaaagaaggaaggaaggaagaaaggaaggaaggaagggaggggttgctaaaccctgtttcattttagcaatatgtaatatttatcaacagatacatgagctagtggggaaaaaaatgctctgcctgtattactaagagattattttccaataacactttactttttatgtgtaataattatttgtcataatatgtaatatgtttgtgtcatttatgtctaagtgtgtacttctaatcattgtaacaatcacttaatccagagaatattttttaaaactgagaatattatagtcacatagaatgaaaaattaaatttaaatttatatacccattttgttgcagatggtaaccaataaaatattttcaagcataaaaatattacattagggtaatattttgaggaggaagtagaatggaaacagaagtttatgtaggaaaagaaatgatgcaaaatatctgtaagagaaaagtttgttcttgtgcttctgaaatatatgatgatggatagaaaattgctacagtatttaaaagataacataaaagtgatgtttggtcataaaaagtataactgatatataatatctgaaattacatgctatataatcatttaaatttaagataaaaattttaggtgtgaacttaaaaatgtgcatgcagtacgtaggttttcagtgttgtttaggtggcgcataagtgaaaagtgaagaccattagtcctcaagagagtaccatctccatccattccccaagagcttcccttctctcttctctatggtttctaccaattcctctggatagtaaaaaaaaaaaaaaaaaaaa

SEQ ID NO: 708887 - DNA, 1693 bp, Homo sapiens
ttctattctattctattctattctattctattctattccattccattccattctaattttatttttttggagatggagtctcactctcatgcccaggcttgagagtgcagtggcgccaacggctcactgcaacctctgcctcccgggttcaagcaattctcctgcctcagcctcccgagtagttgggattacaggcacacactaccactcacggttaatttgtgcatttttagtagacacrgggtttcgccatattggccaggctggcctcaaactcctgacatcaagtgatctgctggccttggcccccaaaagtgctgggattacaggagtgagccgccttgcccggtggagactcagtttttagagcctcagcttctggatcctcacacagctctgctgaagaaagtggctgtatctgcagcctttcttttctcacaagcctcttccttccacttggcaatacaaacgcaaaccggccccatccccaaggcagacagtgcactgtcccaggacacaacacctctagtgggcagaaagaagaaactgtctaagagattggtgctgacttcgagaaaacaatttttttcaataattagaattacttcaatgactgattaacaaattgttagccactgaggtagatacattttaagtttctcctttcaatcaaattgaagaaggagaatatgaagtaactcataaattaattcaaattggaggctgtacgctgtcatatggttctccttccatttctatccatccagttttgtaggtttgtacctcgagtttatttgtgcttatctcagaaagtgagaaagagaaagagaaaaagagaaagaaaggagaagagataggcaaggaaggaaggaaggaaagaaggaaggaaggaagaaaggaaggaaggaagggaggggttgctaaaccctgtttcattttagcaatatgtaatatttatcaacagatacatgagctagtggggaaaaaaatgctctgcctgtattactaagagattattttccaataacactttactttttatgtgtaataattatttgtcataatatgtaatatgtttgtgtcatttatgtctaagtgtgtacttctaatcattgtaacaatcacttaatccagagaatattttttaaaactgagaatattatagtcacatagaatgaaaaattaaatttaaatttatatacccattttgttgcagatggtaaccaataaaatattttcaagcataaaaatattacattagggtaatattttgaggaggaagtagaatggaaacagaagtttatgtaggaaaagaaatgatgcaaaatatctgtaagagaaaagtttgttcttgtgcttctgaaatatatgatgatggatagaaaattgctacagtatttaaaagataacataaaagtgatgtttggtcataaaaagtataactgatatataatatctgaaattacatgctatataatcatttaaatttaagataaaaattttaggtgtgaacttaaaaatgtgcatgcagtacgtaggttttcagtgttgtttaggtggcgcataagtgaaaagtgaagaccattagtcctcaagagagtaccatctccatccattccccaagagcttcccttctctcttctctatggtttctaccaattcctctggatagtaaaaaaaaaaaaaaaaaaaa

SEQ ID NO: 708888 - DNA, 1693 bp, Homo sapiens
ttctattctattctattctattctattctattctattccattccattccattctaattttatttttttggagatggagtctcactctcatgcccaggcttgagagtgcagtggcgccaacggctcactgcaacctctgcctcccgggttcaagcaattctcctgcctcagcctcccgagtagttgggattacaggcacacactaccactcacggttaatttgtgcatttttagtagacacagggtttcgccatattggccaggctggcctcaaactcctgacatcaagtgatctgctggccttggcccccaaaagtgctgggattacaggagtgagccgccttgcccggtggagactcagtttttagagcctcagcttctggatcctcacacagctctgctgaagaaagtggctgtatctgcagcctttcttttctcacaagcctcttccttccacttggcaatacaaacgcaaaccggccccatccccaaggcagacagtgcactgtcccaggacacaacacctctagtgggcagaaagaagaaactgtctaagagattggtgctgacttcgagaaaacaatttttttcaataattagaattacttcaatgactgattaacaaattgttagccactgaggtagatacattttaagtttctcctttcaatcaaattgaagaaggagaatatgaagtaactcataaattaattcaaattggaggctgtacgctgtcatatggttctccttccatttctatccatccagttttgtaggtttgtacctcgagtttatttgtgcttatctcagaaagtgagaaagagaaagagaaaaagagaaagaaaggagaagagataggcaaggaaggaaggaaggaaagaaggaaggaaggaagaaaggaaggaaggaagggaggggttgctaaaccctgtttcattttagcaatatgtaatatttatcaacagatacatgagctagtggggaaaaaaatgctctgcctgtattactaagagattattttccaataacactttactttttatgtgtaataattatttgtcataatatgtaatatgtttgtgtcatttatgtctaagtgtgtacttctaatcattgtaacaatcacttaatccagagaatattttttaaaactgagaatattatagtcacatagaatgaaaaattaaatttaaatttatatacccattttgttgcagatggtaaccaataaaatattttcaagcataaaaatattacattagggtaatattttgaggaggaagtagaatggaaacagaagtttaygtaggaaaagaaatgatgcaaaatatctgtaagagaaaagtttgttcttgtgcttctgaaatatatgatgatggatagaaaattgctacagtatttaaaagataacataaaagtgatgtttggtcataaaaagtataactgatatataatatctgaaattacatgctatataatcatttaaatttaagataaaaattttaggtgtgaacttaaaaatgtgcatgcagtacgtaggttttcagtgttgtttaggtggcgcataagtgaaaagtgaagaccattagtcctcaagagagtaccatctccatccattccccaagagcttcccttctctcttctctatggtttctaccaattcctctggatagtaaaaaaaaaaaaaaaaaaaa

SEQ ID NO: 708889 - DNA, 1409 bp, Homo sapiens
atttaattcctgttttccagcatgttttttttcccctttccaactgtctcactggcttgcagatttcaacagtgagggtacaacctgaaaatgtcattccactgtagtccacagcttccagaatgctctgggaatcactgagaacatcatctagaatatctttgtcccttaaaataaatttgttcaataggtcaaagccatttgaaagaaagccttggctactaacactttcctatgcaagatgtttattagggatttgtctgatatccaaggctgactcatttgtaaatgatacaaatctgaggataccagagtttctcaaactggcttatttgtgaacagttttctaagttttacgtttctgtgtcaataaaaatcttaaaaagaataaaactaccagatgcacaccatcgatatcagaatcattcaaagtacttgtgaatgatgcaaattttggggtccagccttaactgagtcggaagctctgggctggggtccagggagcagccatttttaacaagttccccaggtgattataaatcacaccaaatcttaagaaccattgatctaggcgaccagtccatatcaaaaatcccacaggtgacaaagtgcgttcagatagatgtttcatagaagttggaaccgaaaacgggtggaaaaacagcccactcagacatatacgagagctgaactgaagataatctacactacacgattcacagtttgcaggagttattgcttggatcctgtcattgcatgcatcagtctgcagcagcagttcattagcagtaagtatagtaataaataacaataaaggattgtcctgttcccaattccagcaataattggattagatgcctatttattaaagattgcagtaacactgcaactctgaccttaatttccaagtttttacaaagttgccaagggatgtctcattaaaatgggaaattgaggactaattgccrgcagttttagttaactttgagatctgactatcttaaaccctgcaaatagagaatttcaatacattttggtataccatacttaggcaaacaagcattccctgggctgcttagtaaaacttagtgaaccaaattaaataaggaaactgaccagaggctccatccttctaaagcacaacatgaggaattttatttcagaaaaacaatatcatttatcgttttaaattagtgtgttgttaattttagtgttcaggccttgcatttctcctatcaatttattaaggttattttggttttatacttgatgagccctataaacttaaatctggttttacatccatatatgtttagaaatattttctttcattaaaggatgagatttcagctcaataaaagaggaccatcattctaatatgggccaggctgttttataaacagtgagtt

SEQ ID NO: 708890 - DNA, 1017 bp, Homo sapiens
atggaaactcaatgtaaatgtgtttttctacctctaaaagagccacctttccttgacacctactttgaacagcagaagggccttgactggtgagattctgtaatgtatgtggcttttggtatcctagaggagatgtcggcagtttgccctcattgagaaaaaaagtcaggccaagtccccaaagtcaccttgaagctgcatgcatctatccctgattcagattcatgttgtggcttagaaatgacttcaacctagtagctggcatttaggcaggaaaatcagcatcatagaaagttaggaactttgggccgggcgcaatggctcacgcccgtaatcccagcactttgggaggctgaggcaggcggatcacctgaggttgggagttcgagaccagcctgaccaacatggagaaaccccgtctctactaaaaatacaaaattagccaggcgtggtgacgcatgcctgtaatcccagctactcgggaggctgaggcaggagtattgcttgaacccgggaggcggagtttgcggtgagccaagatcgcaccattgcactccagcctggcaacaagggtgaaactccgtctcaaaaaaaaaaaaagaaagaaagaaagttaggaactttggaagcattctgtccaatgtcctcattttacagattagaaaactgtaggatggtgtagcaaaaaaaaaaaagaaaaggaggagaaagaggaagagagcatgtcccagtgggccagaagcccccagctgcatggcatggtcatgggctaagagcgcctgctttggagagagtagtggtaacagcagccacaactcattcatcagcaactatccatgagaacttactgtatgccagatactgtactgggggtatgggatacacagataaacaaaacatatggccggggtgcttggtggctcatgctgtaatcccagcactttgtgaggctgagatgggaggatcattgaggccaggagtttgagaccagccaggacaacatagygagaccctcca

SEQ ID NO: 708891 - DNA, 625 bp, Homo sapiens
tgcagaagaaataaattgcaactcagccggtgtggaagaggttttcaaacatagcatgcacaagatgctattctatgtttgctttcaggatttgaaaagaaatcctgtgtaggtgttttgtgagaactagaaactgccaccactgtttaatttcatataacaacaaattccttccctatgtggtcatattaatattgctgcttaagagattgatgcttttacctactcacgcacacctgaatgtgtgagtaagtgaaacctacacaaacctacacacaatgmtattcagtttattggaagacatggcattaaaagccatcaagcccaaactgctattcagtttataagacaatgtgatattaaaagccatcaagcccaaatacaaaagaacattggaagtatagaagtgttacaaatagagaggagaaatcaaatgtagaagagaaattgtgaagcaagagaaagcaagacttcggcaagatagaaccaacatttgataccagaaatacctgacaagagtgattgctatcaagagatgaaaaggatatttgtattttctcaggttctatgtgcatctgcttgtgattatgttcataactgccaaacttctgtttcatattccata

SEQ ID NO: 708892 - DNA, 1114 bp, Homo sapiens
cctttatggtttttctttgtgacttggcctctagaatcataaaaaaagaaagaaacatcatgtccacttccaatgtgtagagtgatctctttattttttcccatatcctaacccagacaatttcttatactwtgggaaaattaaagctgctaaacaacattcttctgtcattgaataccttagactttaaatgcatgtggcataatgggtactaacaatgtatgtcctctgtacccctaccaatccttacagcatgtctcactaattcatcaccatccaatcaataatggcccctgcagagagggggtggaagaaggatgcctttctatttcccataaatatttgaaattggcctgattatattgtcttgtgcttgggtgcagggacaatagcctttcatttagatgagcagagcgatacacaggtggagaagtacctagttaggaagattaaataaaaatgtgccactgaactgtgtaacagcagaaaccatcatctgcctatattccaattgcataaaattgggtcttattaacaaaaggtaatacgagacagaaaccaacagaacagaacactgccgatttcccattgtcacatgtacagttatcttcctctccctttttctttctttctccaaccttttccctttctgtttgcactccctatttccaccccccaccacagaaactttcttgccctcttgtcacctttctctttattactttccttctaattttctcctttatcttattttctttctatctttcctcttggacatagtagtaacataaccaggagagtgatttgagattatcaatcttgcagctttaagaagtataagcttcaaagggattagcctacatgtggggaaaatgattagaaaatattacaaatttttaggcaagtgatgatgaggttctgaaatggtggttgcgggaaaggtaaagagaaggtggatgcgagaaatattgtaaagatggaattgacagcttcacaattgtattaaggactagagcatactttcagaacattagataatcatttgcacatcataactgcgatttttcaactgctaatttggcattgcaatgtgaacttcaacaatctgcccttt

SEQ ID NO: 708893 - DNA, 651 bp, Homo sapiens
tatcagttatccagagataatttagagtatacgggagaatgtgcatagattatatgcaaatattttgtcatttttcataaggaacttctgtatctgtggattttggcatccacgggggtcctggacccaatccagcaatgatactgagggacaactgtatayctatatcacctcctcttcttcccctatttcgtctcctttgtgttatcaccaccaccgctatagaggacgattatgattagggacctagggataaaagatgccataagacttggtttattcctccccttaagaactattcagccctggggagagacagaacttagataaaaaaagatctattacaaaacaaggtgactaagctaggtcaaatgcgtattacaatcaatatgtcaaaaggcaaatgcctgactgaatgctgtaactgttgggataattttatgctcttttttgactctctgccattccttggcctagaatatattttctttttatactgtcagtttgatcttcctccaagaagactttccttctttccatctctcttcccatctatgctaggtactactcgtatgtcctcttatagcacaatggaaagacctccattaaaatacttactattccctaatgtttatttatttgtcttcctga

SEQ ID NO: 708894 - DNA, 651 bp, Homo sapiens
tatcagttatccagagataatttagagtatacgggagaatgtgcatagattatatgcaaatattttgtcatttttcataaggaacttctgtatctgtggattttggcatccacgggggtcctggacccaatccagcaatgatactgagggacaactgtatatctatatcacctcctcttcttcccctatttcgtctcctttgtgttatcaccaccaccgctatagaggacgattatgattagggacctagggataaaagatgccataagacttggtttattcctccccttaagaactattcagccctggggagagacagaacttagataaaaaaagatctattacaaaacaaggtgactaagctaggtcaaatgcgtattacaatcaatatgtcaaaaggcaaatgcctgactgaatgctgtaactgtygggataattttatgctcttttttgactctctgccattccttggcctagaatatattttctttttatactgtcagtttgatcttcctccaagaagactttccttctttccatctctcttcccatctatgctaggtactactcgtatgtcctcttatagcacaatggaaagacctccattaaaatacttactattccctaatgtttatttatttgtcttcctga

SEQ ID NO: 708895 - DNA, 2814 bp, Homo sapiens
acacacttcatccaaggacaaaatggactcctgagaaaggtgtgagacccaggcagagatgggcagcctgtgaaacaggcaacagatgctcaccttgtcatctctatctctgtctccccaccagagctcaggacaatggcccccaggagccactggatgttccattttagtcctggcttgtacggagtgcgccctctttctgagaggaggtgagagggaagggatggaaagggccaggctccctgcatgctcccagggactgcaattctctcccagtaggcaggaggatgggcaattacacatacagaggggtgtctggtcaaaagaaccaacaaaatcccatggcttaacaaaagccttcaaaatcttctctgggaaagaattccaggctctcccaaattgtaactcattgtatcacgaacacttactttggaaatcatgtcagattctaaatttgaagaacacttctaatatctgagcacctacctactgggtgcccagggtagtgcttggcggttttacatctttggcacagagataggcatacatgtcttattgtctaacagtagtaattttttttgcagactttgattctattataacagctccagtattgtgcaataactgccgtcactccagtggaagcattgttcctggtctgtgacttttatttcacgagtagataaagatttaagagggaaatgactgagaaacttgtgtttggattaatgtaaataagacacaaggttttcatgcccttctgctttcactggggactcatttccctaatacagtctcgttgtaaaacaatccactcctgaggaggtcaacagtgaaaagtttgtcttctgaaattagtaatcaaagagtgaaaataattaatagagaaaacagtgcagttccacactgcgttcccatgtagatgtctatagaacaataaatcagtaggggaaagaaacaatataggcatttacaattaggcctcatgcataatgccctggaaggagaatttgtgttaaaaaagacaacatctgctgcaagttggtttataaataatacagctagatattcaggtaatgacatgacagacggtctcttgtgtccttgtcctttcgtgtccagtgctgagtgtgtttacatcccgcagcttatgacatacatgcctggcctgcttgtgctcgggccaggagcctctctcttctcagttaaatgcttctttacccaaaccatagcattccacattgacgacccagatatccagagaaatctgctccatttggttttaattgatcccttactgtgagaaggtaagcgcctgaaagaagtgtgatcagatgctcattcagtactttcatccatgaaccaatttcttttgtgttgacacccaggcttgacaaaaagagtgatggttaaggtcaagtgcatgaaagctaattctaaacaatgatggatgagccaaggcttgggctctatcttatctaggatgttctgctaaaaggttggatattttctccccatttttaaaagtcctcttattctcaaattaatggagttatcacagatccagtatttgtggggatcttttcttttattattcagctctttgccactctgctgacagcagtgtgagtgatggccttcaagcagatgattcttctttgccatgaaggaactgataaatactgcctgtctctgcaataaattgtgcatgaaatagtccactctggtaatctacagagttatggtaaggaaaatggctttgtgaggaaatacagcaaaactgaaattaactgaaatccagttaaacagaatctctaaagaagctgaattatatgtttgtttatttgctattgtttgtttctatttatattcatctttgggggaaaatagtagtgttgtctggggcttaatcaaaaaattcattttcaggacatttaatgtaattagagatttattcccagctctggtaccttctatgtcctcagtccttacctatgagatttcccatttataatgatgacccagaggccaagcagcacccagaattcacaaataaaaataaaaataagcttatgaatttccatttcctaaaatgaagcaaatttatgtatgacacacatttgtcaatagtaaagaccgaataaaaagatgcaaaaattaaagattttaaattagaaatctcaagctccattttagtatataaggatttttaccatacttagtaacacataatgcatttctaaaaagatttaaatgagttgttgggataatttttgttagtttatttggataggtgctttagacttcagtgttttgttgaagtggttatagagtcttttctgaaatatacacatgctgttagatatctctctctaggatatctatatctatggccactatagagatrttacccggcttgtaaactaactgaacatgttctctttcatttccacacattgacctaatatgtgctaggaactcatttgtaaacccaaatattttgtgtctttctcatggatattaaaatgtgccctggtgttagcctttcacaatagagtataaatttaagtcaatgcgttgacccttccaggcatcttaccagtgtcaggatgatctcaaagagtgaaatcaaaatgtttgtcatcattaaaaaagcatcagtgagcaagtattgtgatgaaaaccaaaaatctcttaacatcatggtattgttgagctgaaagaaaacttggaaagcatccagtagctcattccaatgatttaggctcaattcatattgaggccctgctttatgtcaggcaatacactgttttg

SEQ ID NO: 708896 - DNA, 597 bp, Homo sapiens
tcttatcaaaaataaaatgtatgcctgcattatatgcagcatagaaaaaaatgaaggaaaaggcgtatttgctgtctttaaatcaaatttatcaaactggtctgatttgtttcatcactttgattatatgaacttagtttcttatagaaaaaaatgctatgagggatagtaattttgaggagaaatattttttcttggaargctaacacatttaaaatattagaaggccaggtatggtggctcatacctgtaatcccagctctttaggagactgaggtgggagcatcacttgaggccaggagctcaagaccagactgggcaacatagcaagatcccatgtctaaaaaaaaataaaaataaaaaataaaatattagaagttcagtttctatattttctggggattttgaggatattaaattcatataagcacttatcagccattcaggacaaagttcctttattgtaagaaactttgtaatctaatttattaatacattgttgatataagaaaagatttcagacacgaggagaggtaaaggcttttctcggttggaggctcacagacccactgagtgcatgtagcttctgccatgcat

SEQ ID NO: 708897 - DNA, 985 bp, Homo sapiens
aaaatgggaaaacgtcactgtactaacataaaaatccagcatgtggatacatagagaaaaataaatttatttatacatgaagtaattttatccttagaggctttagctgaggcgttcctcctgctgtagggagaaggggacttgtttcagatgaacagtgtcactctctaagggccacctgggcctcagcctcagccggtgtccatgggcactttgagccctggagaggtggcctctcagccacccacactcccacaggcagcagtcacaaacttgggacaaaaaaataaaaaacaactgtgtgcagcgccagagagagccctgaggaggctgaccctggacggagcccacgcctggaggaaggggcggcagaggccagccgcctgctttctgttgcttttccctagagggtggcctcagtccaagccaagcagagggagcaagaatctggacatctggacaaaaagccacagcttattgcctcgaagagccaaagaacagaatttgggcagctcaaaaatccaggaaaaggagaaagccagagaaggggagtcctaccttccgtggtcacctaaatctcctggcactaataatcagcacagcccttatactggttaccattttaatcctaggcttgacttatgtaggaggccccagccgggctgaaagcaaagttgagcaaaattggtcggtcagcctccctactgccatgcctcacgagttttaaaaatcacattgtgagcctgagtcaatccttcaagacagatcctgagtggctaactggtcctaaattcaaaatagakccatggagccatttgctggaaaacccacatgcttgtgtaactttgggactttcatagctctctgctcctgttcacgccacctgaatcaacagctgccaggaaatcccatgtcacctcctggaccttaacccacagacagtacctatgttgactaatcatgactaaacaagcattggccaatc

SEQ ID NO: 708898 - DNA, 618 bp, Homo sapiens
tcatttgctcttgtcgccaccctggaagaggtgcctttttcctcccgtcatgattctgaggcctccccggcgatatggaactgtaagtccaattaaacctctttctcttcccagtctcaggtatgtcagcagcaaaaaaaaacaggctaatacagtctgtaaatcatatgaaacctgagagcatgaaaataacactaaatgtaaaattaatacaaactacatggaaggtgaagggaaagtataggtagaaagtaaaattatctcactcattgttttatagggttcagctrtaatcatcatatcatttgaaggggaaaaatcaagtgtgctaaaataatttaagaacaaagataaaattcaaggaaaataagagtaattaatataatttaaggatagggaaagggagaagatgagggaaagaataaaataattatattattatccacactatggaactaataggcaggatttaataaaaatgttgagtatatgatggaaaggtatttatatatatatgtgacaactagcaaaagcactaaacagcctaaatagaaacacgcacacaaacacacacatgccccacatatagtaaaaggcattgtacatacacacatacaa

SEQ ID NO: 708899 - DNA, 637 bp, Homo sapiens
cactccaaaaacccaatcagacaagtggccgtaatctgactcccagcacacagggagctgcggggcaggcaatgagagctgcactctggctggggaaggcatgagtgacagacccacagcaaggcggtgggggtaagtccttctttgccttaagggaacaacgcttagggccaaaagatgaaactgtctcttttattatagatgtttgtgccttcttaggcagaatctggaaggcagctatagggcaggtgggtggttcttttagatctgagtactgggcattttcagaagagaggcatagagaaggtagaagaaaagggrtgctttttagccaaatcctccatatgtttcagatctgcaaaagcccaggaaaattaccctatggaggtgaatctagctatagtacatttcttcggaaaaattactcacccagacgctcagctgtcctggagtggatgaagctgagtgttcagctagaaagtaatgtgtccgattcagtacatcaacaaacccgctttgttctggggcaaaagaagcaaatctaattgtgttgatcatttccagtgactgtgaacatataagggaacactgacaataaaagcagggtgctatgggtgacgctagggtgagccctcat

SEQ ID NO: 708900 - DNA, 1697 bp, Homo sapiens
tgacaacagattttaagacctaattttataaacttagaacgyctctgtttttaagtatagtacctgcaagacatattaacagtgattaacaggtctaattttagtcagcaggttttgttccaatttgtacagtcatttatatccatttagactaaaaagtgaattaaaatagaactgtatacccattcttaatacattataaattaatactaaatgtcataaattcagttgtttagagacttgtaacccaagattttgtattactattaggataaatgtgtatctttcattagactttaattaatggtctatgtgtgttctctagccacatagtctagaaaagtcgtctctagcttctttttattgtacaccctgtccaaaaaaaatgtgcatactcccaatatctggatatttatgtatgaatagtaagtgtgcttaatatattacacattataaaacaaaattctttattaacaattaatactttacactgtttcaatttgtcttcccaatttcttagggtggaaccacccttcaagctctaacacaactgaaatagggtttatacgtctgtgaccaggagaaaaagagaaagcttggtcttgctgtacataaattttctcttcaaggagaagtacatatttcatgagaataaatagtttcagaatgatgctacagcacagtgtctttttcttttatggggatgagggtgcattgttggacttctctttgcttagtactatgttaggtgcttcaccagtgccgtttaaccctgctaggtggttactgccgtttagagaggtagaaacagaggttctgagagctaacttgctcaaatagttgagattggatttagcatagtttgacatcagaaataaaattctttgtactctacattgccacttcagtattgaagcattctgctctggaaggttagtattttggattaacttgtgccctaatcgtaggatactgaatttctaatatgcataatttaaaataccactatccaaattagtttacttgataaaattttggtgtctgtactacccacaaggcacagttttaattgtaatatagttctaatgtgtccagctaaaaatttactgtcatttgtagtacagaaagttaatttgcgtatatatatagacactagctttaaaaattaaatattacaatttttctaggctttaaaatttaaatttcgttaataatggtttgtattagttctgggacccttgagaagggttcagttactgtaattgtttttgcaaatgggtggggaatctactgcctttcttcctgccttattcagctaatgaactattctgattcactagggaggaaatgggaaatgaagtggtaattcaagggtgtattttgtaccccttggttaccaacaacctgaaaatgatccagggaaccaagtatttgtgttagtctgttagagatttctatctagaaaattttcaaacaatgtttataggttggaattctaggtggttctttacagcgtaagtttttaaggaaaggtagcatttagttataagggaatgcttaatatattgctgatttggttttgaatacttttgccttaaacataaaaatgttttagtatgtgtattttaatatcgtagcttatacaatatgtaaaaatacctattgtagctacaccaaactgcctgtgacagtctctg

SEQ ID NO: 708901 - DNA, 1697 bp, Homo sapiens
tgacaacagattttaagacctaattttataaacttagaacgtctctgtttttaagtatagtacctgcaagacatattaacagtgattaacaggtctaattttagtcagcaggttttgttccaatttgtacagtcatttatatccatttagactaaaaagtgaattaaaatagaactgtatacccattcttaatacattataaattaatactaaatgtcataawttcagttgtttagagacttgtaacccaagattttgtattactattaggataaatgtgtatctttcattagactttaattaatggtctatgtgtgttctctagccacatagtctagaaaagtcgtctctagcttctttttattgtacaccctgtccaaaaaaaatgtgcatactcccaatatctggatatttatgtatgaatagtaagtgtgcttaatatattacacattataaaacaaaattctttattaacaattaatactttacactgtttcaatttgtcttcccaatttcttagggtggaaccacccttcaagctctaacacaactgaaatagggtttatacgtctgtgaccaggagaaaaagagaaagcttggtcttgctgtacataaattttctcttcaaggagaagtacatatttcatgagaataaatagtttcagaatgatgctacagcacagtgtctttttcttttatggggatgagggtgcattgttggacttctctttgcttagtactatgttaggtgcttcaccagtgccgtttaaccctgctaggtggttactgccgtttagagaggtagaaacagaggttctgagagctaacttgctcaaatagttgagattggatttagcatagtttgacatcagaaataaaattctttgtactctacattgccacttcagtattgaagcattctgctctggaaggttagtattttggattaacttgtgccctaatcgtaggatactgaatttctaatatgcataatttaaaataccactatccaaattagtttacttgataaaattttggtgtctgtactacccacaaggcacagttttaattgtaatatagttctaatgtgtccagctaaaaatttactgtcatttgtagtacagaaagttaatttgcgtatatatatagacactagctttaaaaattaaatattacaatttttctaggctttaaaatttaaatttcgttaataatggtttgtattagttctgggacccttgagaagggttcagttactgtaattgtttttgcaaatgggtggggaatctactgcctttcttcctgccttattcagctaatgaactattctgattcactagggaggaaatgggaaatgaagtggtaattcaagggtgtattttgtaccccttggttaccaacaacctgaaaatgatccagggaaccaagtatttgtgttagtctgttagagatttctatctagaaaattttcaaacaatgtttataggttggaattctaggtggttctttacagcgtaagtttttaaggaaaggtagcatttagttataagggaatgcttaatatattgctgatttggttttgaatacttttgccttaaacataaaaatgttttagtatgtgtattttaatatcgtagcttatacaatatgtaaaaatacctattgtagctacaccaaactgcctgtgacagtctctg

SEQ ID NO: 708902 - DNA, 1697 bp, Homo sapiens
tgacaacagattttaagacctaattttataaacttagaacgtctctgtttttaagtatagtacctgcaagacatattaacagtgattaacaggtctaattttagtcagcaggttttgttccaatttgtacagtcatttatatccatttagactaaaaagtgaattaaaatagaactgtatacccattcttaatacattataaattaatactaaatgtcataaattcagttgtttagagacttgtaacccaagattttgtattactattaggataaatgtgtatctttcattagactttaattaatggtctatgtgtgttctctagccacatagtctagaaaagtcgtctctagcttctttttattgtacaccctgtccaaaaaaaatgtgcatactcccaatatctggatatttatgtatgaatagtaagtgtgcttaatatattacacattataaaacaaaattctttattaacaattaatactttacactgtttcaatttgtcttcccaatttcttagggtggaaccacccttcaagctctaacacaactgaaatagggtttatacgtctgtgaccaggagaaaaagagaaagcttggtcttgctgtacataaattttctcttcaaggagaagtacatatttcatgagaataaatagtttcagaatgatgctacagcacagtgtctttttcttttatggggatgagggtgcattgttggacttctctttgcttagtactatgttaggtgcttcaccagtgccgtttaaccctgctaggtggttactgccgtttagagaggtagaaacagaggttctgagagctaacttgctcaaatagttgagattggatttagcatagtttgacatcagaaataaaattctttgtactctacattgccacttcagtattgaagcattctgctctggaaggttagtattttggattaacttgtgccctaatcgtaggatactgaatttctaatatgcataatttaaaataccactatccaaattagtttacttgataaaattttggtgtctgtactacccacaaggcacagttttaattgtaatatagttctaatgtgtcyagctaaaaatttactgtcatttgtagtacagaaagttaatttgcgtatatatatagacactagctttaaaaattaaatattacaatttttctaggctttaaaatttaaatttcgttaataatggtttgtattagttctgggacccttgagaagggttcagttactgtaattgtttttgcaaatgggtggggaatctactgcctttcttcctgccttattcagctaatgaactattctgattcactagggaggaaatgggaaatgaagtggtaattcaagggtgtattttgtaccccttggttaccaacaacctgaaaatgatccagggaaccaagtatttgtgttagtctgttagagatttctatctagaaaattttcaaacaatgtttataggttggaattctaggtggttctttacagcgtaagtttttaaggaaaggtagcatttagttataagggaatgcttaatatattgctgatttggttttgaatacttttgccttaaacataaaaatgttttagtatgtgtattttaatatcgtagcttatacaatatgtaaaaatacctattgtagctacaccaaactgcctgtgacagtctctg

SEQ ID NO: 708903 - DNA, 1080 bp, Homo sapiens
ttcacaccattctcctacctcagcctccccagtagctgggactacaggtgcccaccaccacgcctggctaacttttttttttgtatttttagtagagacggggtttcactgtgttagccaggatgatctcgatctcctgacctcgtgatccgcctgccttggcctcccaaagtgctgggattacatgcaagagccaccatacctggccgtaggagagtgtttttaggaaatttagggctaattggttatcatgcctgaaacttactcttacgtggtccagaaaaaccttccatacaaatagaggatgataaggtaaaggtggtaaactgttaacaacggtgagtctgagtgcagagtatatgggagttctctgcactatttctaaactttcctgaaagtttgaaattatttcaacttaaattttaaaataaaggtgaaataaaaattttgagacaaaataataataatagtgaagtacaggaaaaaagatcagctttgctatgaatcgaatcatcctgaaatctggtgaaagatttctgttcatttattttaccttgtagattccaagctagctttggaagaaggctgaaggaattctctgctagaaatgcaatctctgaattctccaattactgaaagtataattttacacatgyttccataaaagagctgaacatcattaggtcgttggggaagatcatatactgaaatagaaaataatgtttgaaatacatgaatgttcacacaagcataccacaaagtaacagatacatttgtatatttatagctatagaatattagtttcctgggttgggggaggtgacatttggattagcagtataccacctggcacaaaattacagtcaattcagcaccagtggctgacagctcagacttggaacctgaatttgaactacctttgccactcatttactttgtgacttttggcaagttacttaacctccctgaacttagtttccccaactataatatagagtaacgatctgtatcaggggttgtgagcattaaaataagaatgcctttgtagatatattcggcaacaaacatttatatgaagct

SEQ ID NO: 708904 - DNA, 1773 bp, Homo sapiens
tgatgccttattgctacatccttctatgattaaagaaggcaagagagctcacttgagactcttccataagtacactaatcccatttatgagagtggagcccttatgaccgaattatatcccaaaggccccaccttttaactatattaggtatttgggtccaccatataaattttgagaggatactagccttcagactatagtgttgggataatgttacttacctcaaagaacagtagctcagatcaagagtaggatttcacagcgttgtgatctctttgataatgctatgtgtgtgccattttactgggttttctgtcctgactttgtttattgtctaagtcctcatttttggacaatcatttccctgaaaaactggctaaattttttatttttccccctcaagttttgttgcatttccaaggcactgacaattttgcatgaacatttgatgtattatttggcccaaccttctgaaatttatgcagccttaagcatggcgaattggaaagagcactggaattgaagtcagaagttcttgacttaatcctcaactcagctaccaactctccctgtgaccttgggcwaggatagccaggctgaaatttggctcatttacactcctagttctaaatcaggccctgctgagtgtttggactttgaaatacttctctgaagagacatatactcatctaagcagtttgccaacaatttcgtggagtttcctgacatatctccatggaactctcagacttttcagagcatggttggaaaacaactgccatgaaatcatggcattgaattaacaaaactcatttttttaatccactcatttattccacaaatatttatttttgataagtgccaagcttaataggaaataaatcgaaatgatcctagggatagaagataataatttctttgacttagaagtcttgtgattccaaagtccttaaaatgaaaagaaactctatctcccattctaccctacccccaacacacacacacatatgcacacacacttcaccaccaccatagctgccaagcttcataagttcctccatctctgcactgcttgttcattaggagggtgccccttaagcagcactggggccaggcttcagctgctcagtcattctcaatttgtctcagccatattatttcttctaccagccatttcggagcatgtctatgccttccttccatcgttactccatcttatttattttttagtattttcttaacagttcctccagacgctctcattaagtgctgggctaattaacctcctgtttctgagcagtggtgctgtggtgagctgcctggccttgcaggagggctccttgttgcgtgggaggaagtcggcccagctccagtccgcttacacacctactaatggctcacaaccacacctggcacctacttagcaaggttgtttttgtttttgttttttgatttttttttcaaaactgatgttctttattccagacaagcatacaccatggcccccgccaccctcactcactgacaatatcagtgattgaaatctctcagccccagaaaccggagctctccattaacgttgcagacatgttttccatgctacagactcagtaggcacttagcagctcctctccaagatgttctggttcatggttaagagcagctgatacagccagtaccacagagagcctgcacagaatcaaaagctagggatctctggaattctgaggtatgcaaaatgacatgtcaccactgtggcttttcctccccat

SEQ ID NO: 708905 - DNA, 635 bp, Homo sapiens
tgttcttcagttctgcaaaagcagtgagaggctaagcctgctctcagttacactgatagcttttaggaaataaaatagtaatggcaaatacaatacaatgatgttgtccatataatattcaataaaaccagactaaataaaaaggaaattggtcagaaatagaagaaacttagtcaatgatgytcttagcccaacatctcaagctgtctggcaaaatcagatgtaattacaagcaaggtaatgggaagaaacattttactaagacaggtgttcaagaaacacaaaaccatgcaaagaaggtgatgatgctggagttatgtgaaccaagcagcatcctcctcccctcttcccttccctcaggtgaatgacaacgtacgtttaacaggatctcgggcaagaggttcctgggtagtcttgagtaaactttgggacactatggaaaaaataagagaacataactaaaaacaaaaagagaaacatgggaatgatggctgaaatgcacgagtccactgacaaaaaaacaacctaacaaacaaaatcactcacttaggtttggtccctccaacaaaaccaaaatgaacatataaacataagatctattttcgtaagaagttaacatttgagaatgctggata

SEQ ID NO: 708906 - DNA, 594 bp, Homo sapiens
aaacaaaactaggaaagcagtttacctccatatctcactgtctacatggcaaatatgcatacgcaatgtttcaagtcaacattttatgttgttttctgtttctaaataaagctactagactacattacacattttatcaaatacttgcttttaccttactaaatgtgtatttatcatatttgctttggcatatttttgtttattttactttttcttatacaataaaaaatgttcactggttatctacaatgtgcawagcagtgatacagaagttagagcttacattaaaatgagaccagccgggcttggtggctcatgcctgtaaacccagcactttgggaggccgagatggatggatcacttgaggtcagcagttcaagatcagcctggctaacatggtgaaaccctgtctctactaaaactacaaaaaaaaaaaatatattagccgggcgcagtggcaggtgcctgtaatcccagctacttgggaggctgaggcaagagaatcgcttgaacctgggcagcagaggttgcagtgagccaagactgtgccactgccttccagcctgggtgacagagtgagacttcgtctcaaaa

SEQ ID NO: 708907 - DNA, 603 bp, Homo sapiens
cacctcctctgcatcatccaagatgtctctcatcacatccatactctgaacagcaggatggaaaatgtcccctccctttaagggggcaaccctgaagtcacacacattatttcttacttagcgacaatgccatcaagtcctctttttctgcaaaggaagctggaagttgtagtcttcatgagcgrtggccatgcaccaggtagaaatctgtagttgtgtttctgataagaagagaacagatactgagggacagatcgcagttttggtcacactaggtctgttaaatgacatcattcccatcatttgagttggcacaaggtggtggaaaccacagggggaagacccaccctgacactctgacgatatttttgggctggaagaggaagaagaatcagaaatgccccaggtgtgccccaagcacacactccattgaaggctgcccacaaatctccatggccctgcaccaccgtctgccaccccattttcccagtctgttctgtgtgtggtctcctgccaccccgtctcctttaccgcccatccaggtcccagtcaccgtgtcctctgaagtcctggcgaccactcccttgccttcctgtgcacatc

SEQ ID NO: 708908 - DNA, 603 bp, Homo sapiens
cacctcctctgcatcatccaagatgtctctcatcacatccatactctgaacagcaggatggaaaatgtcccctccctttaagggggcaaccctgaagtcacacacattatttcttacttagcgacaatgccatcaagtcctctttttctgcaaaggaagctggaagttgtagtcttcatgagcggtggccatgcaccaggtagaaatctgtagttgtgtttctgataagaagagaacagatactgagggacagatcgcagtyttggtcacactaggtctgttaaatgacatcattcccatcatttgagttggcacaaggtggtggaaaccacagggggaagacccaccctgacactctgacgatatttttgggctggaagaggaagaagaatcagaaatgccccaggtgtgccccaagcacacactccattgaaggctgcccacaaatctccatggccctgcaccaccgtctgccaccccattttcccagtctgttctgtgtgtggtctcctgccaccccgtctcctttaccgcccatccaggtcccagtcaccgtgtcctctgaagtcctggcgaccactcccttgccttcctgtgcacatc

SEQ ID NO: 708909 - DNA, 603 bp, Homo sapiens
cacctcctctgcatcatccaagatgtctctcatcacatccatactctgaacagcaggatggaaaatgtcccctccctttaagggggcaaccctgaagtcacacacattatttcttacttagcgacaatgccatcaagtcctctttttctgcaaaggaagctggaagttgtagtcttcatgagcggtggccatgcaccaggtagaaatctgtagttgtgtttctgataagaagagaacagatactgagggacagatcgcagttttggtcacactaggtctgttaaatgacatcattcccatcatttgagttggcacaaggtggtggaaaccacagggggaagacccaccctgacactctgacgatatttttgggctggaagaggaagaagaatcagaaatgccccaggygtgccccaagcacacactccattgaaggctgcccacaaatctccatggccctgcaccaccgtctgccaccccattttcccagtctgttctgtgtgtggtctcctgccaccccgtctcctttaccgcccatccaggtcccagtcaccgtgtcctctgaagtcctggcgaccactcccttgccttcctgtgcacatc

SEQ ID NO: 708910 - DNA, 609 bp, Homo sapiens
ctcctggctgatttttcttcagcacactcatacttgtttgtttttyatttgtcttccttactagtatttaagctcgagtattgggattcggtttttcattgctctatcctcaaagcctagaacaatggcaggtgcatactaggcatccaataaatattgattggactttgataaaaacaataatacatattgtttatggctatgtcatagataacatatgaagcctgggtaggaaaggagtccagtagtatcaggagagaggctccctcggagaggagagagaaggcacaggatggggttggggatgctggagctctccgactctgtaacagcttttatttctttaaaaaattactggaagacttttggcaacataataacgtttgttatatctgggtggtggttctataggagccctacagtattctttgtctgcttttctgtgtgtttgaaatatttcaaaatttaaaagaataatgcatacaggtatttgaggaatgaaggagcttctaatccaatcatggggcctgggggctgccctgatccccctattgcatttggaccatggccctgattaaatccaacagcccaaggtacagggggtgcccg

SEQ ID NO: 708911 - DNA, 1108 bp, Homo sapiens
tcagctttggccctgcagcaggctccaggctgtgacacacatctcaggtctcttttctaacaagtcaagggattgaggatccagatgtgcttggagcccatgtgaggcatttgacatatgtaatttcacttaagtctctcaataattctgaattagcccacattgtataggttagaaaactgatacactgacaggttaagtaactggcctaaggtcacacagctagtaaagtggtagagttgggattaaaatccaaagtgctctttcctctccatcaatggacgctatcatcaaggccagctttatagtagcgaaagagacatgctttattctcatattgacctcaataaaaaaccaaggacctcaaaattcaatcttcatttatttattccacagtgacttattgaatgcctattattttccaggcatttctagcaayggtgaaattaatacagtgcaggcactcacatcctttatgcatctcaaaggctatctagctaatgcgctggatgttgtgaggcccattatccatagtgtacacacgcccgcagcccctccttctgatggtttaacttggagcaatcctcaatggttgtgcatagccagatacacgcactgtgcacacaggcactgggttctgggtcacctccctggcatcccaggcctctgtctgcttccttcagtgcttccttcttcagccgtccctccctggatcccagccacctgagctccatccatccctgatttcattccttttttttcctcttccagctctagtccacagccttcctccccaggacatgtgattcaagcctgaagcatacaatgggagcacaaaggaggaggggacagagaaaagaaatgagcatcagccttgggaatgtctcctctgactgtagagtcaggagacattaagatgaacattcactggaacatatacattctggtagattccgatgagaattaagcccattcattcatctggtaaatatctagtgaacatctaccatgcatcaggcagagaactaggtgctgggattgtagtggggaaggcaacagttgtgacacctgcccttatgggctcacagtctagtgggctggggtgggg

SEQ ID NO: 708912 - DNA, 840 bp, Homo sapiens
tttctccaacttaatgccttagaacaacacaaatttattattttacagttctggaggtgggaagtccaaaatcatcgtcactgggttaggtctcaatgtcggcagggctggctgaggctctcrggaggattatctttccttgcctttttccagcttctagaagccaccttcaacacctaccatcagatctaaattccagacagcaagaagatgtgaaaacgctctttccttcctttaaaggcaaaactcaagacacacatcaaaacatcaaaactcaaggcacacatccaaactcatggcacacattaagtctgctcacatcttgatagtcacatggctacactcagctgcaagaaaccctgggaagtatagtctttggcttggccacttgtctagctcaaaaattactacagaggaataaggggagacagatagtggtctcctcttcttcaagagaggtaagagggcacaatgctgccttttgtctgatgtgatggttaagaaggaacagaccaatgtgaggtgtgagttatgtgctgtgacttggactcattcaacagcaagacccaaggtttactctgatgggacagatgggcagaatcagtgaccacatcccctgtcatgaacctgctgcagccagtgtgatacctgtccagcacagagattggcccaggggaaagagcgtgggctttagagccagattaaattgggcttgtatttgggttctccacttgatagatgtgtgaacctctttgggtctcagtttctgaataaataaagtggaaatgacaaaactgaccttgggcttttgggcatattcaatgaaacaatgtaaacaat

SEQ ID NO: 708913 - DNA, 934 bp, Homo sapiens
ttgtgaaaaccagaatgtctccaggcactgccatwcgtcccctaatggcaaaatcaccccgaatgagaatcactacaataaggtgattcagaaggaaaagaaggtagcctcagggtccatgaaggcttcacaagaggtgggggtcatctggattaggcctgcaagtgggatgtctcaggcagctgagggccattctaggtgggaagaacaaatgcctaaaggtctgggaggaggaagggcacgggtttgggaatgtgaagagttctacgttgccaaaacgtgtggttgcagcacgggcactgagaaaagtcaaggctgggtaggtagagggagggagaatcagcttgtgaatggcttctcttcctttgtcctcaggaaacactgaactcctcttattctcctaactcgacctgggtgggcccagctcctctccccagcctcttcccgccctccaggatctgcctgaatgtttcactgttccttctgacaggctctgtcgttcccattctttactggttactttcttctcattattagctcttgaccggcactctcctgggaaacattcctgtaccacacggggtggtggggttgcccccacgcttggtgttctgctctgacagggcctgcacatccctccagagcctgtgggacagcaatgcttcctcatacacctgcctgctcagcctggaccagagtcctcaacgcggacctagggattatatcgccagactatcacaccctcagaacccaggccaccgccagcacctgaaagcttatcaaatgaatagaagggccctgcagaccaagttaaggagcctgcattccctcagtcacaactaagggctccctttaaaattgtttttttaaataaatgtgtttatagttgaccaaaatatctagaatacatgagcttgtttaatcaaataattta

SEQ ID NO: 708914 - DNA, 934 bp, Homo sapiens
ttgtgaaaaccagaatgtctccaggcactgccattcgtcccctaatggcaaaatcaccccgaatgagaatcactacaataaggtgattcagaaggaaaagaaggtagcctcagggtccatgaaggcttcacaagaggtgggggtcatctggattaggcctgcaagtgggatgtctcaggcagctgagggccattctaggtgggaagaacaaatgcctaaaggtctgggaggaggaagggcacgggtttgggaakgtgaagagttctacgttgccaaaacgtgtggttgcagcacgggcactgagaaaagtcaaggctgggtaggtagagggagggagaatcagcttgtgaatggcttctcttcctttgtcctcaggaaacactgaactcctcttattctcctaactcgacctgggtgggcccagctcctctccccagcctcttcccgccctccaggatctgcctgaatgtttcactgttccttctgacaggctctgtcgttcccattctttactggttactttcttctcattattagctcttgaccggcactctcctgggaaacattcctgtaccacacggggtggtggggttgcccccacgcttggtgttctgctctgacagggcctgcacatccctccagagcctgtgggacagcaatgcttcctcatacacctgcctgctcagcctggaccagagtcctcaacgcggacctagggattatatcgccagactatcacaccctcagaacccaggccaccgccagcacctgaaagcttatcaaatgaatagaagggccctgcagaccaagttaaggagcctgcattccctcagtcacaactaagggctccctttaaaattgtttttttaaataaatgtgtttatagttgaccaaaatatctagaatacatgagcttgtttaatcaaataattta

SEQ ID NO: 708915 - DNA, 1803 bp, Homo sapiens
gtgaccaggtcctccacgaagcgttcccaggttatgacamccgccccaggccgctgctgctctggatacttcatctctctcttgcctctgccctgtcagcactttcacagagccaccgacagccacttctgtggcattgccagttacttgtgacagacaattccttaagcataggggacatgtcttattgtcattctacctgtcctagcccagtgcctagtaagaggtatgatagatgtttcttaaatgaagaaagcagaggaaaaagccttttgtataggtcatgctatcaaagcatttaatgtgggacaggagttctcaactggaggcaattttgtccccaagagaacatttggcaatgtctaaaaacatttttagctgtcacaatgatgggatgcttgtagcatctagtgggtagaggccaaggatgcttctcaacatcctatgatgcacaggacagcaccccttgccccagcaaagaattctctaactcaatatgtcagtgctgctgaggctgagcaactccgattacaggaaatgggtggagagacacagaaacttccttctaggatgatgtaactaataactgtaatcacataaatttatatactctcatgaataattcctattcagattctttcatcaggatacttatttttatttttttgagagatagtcttcctctgtcatccaggctggagtgcagtgacacaatcatagctcactgcagcctcaaactcctgggctcaagcaattctcccacctcagcctctggagtagctgggactataggcatgcaccaccatgcccagctaattttaaaattttttgtagaggttgggtctcgctatattgcccaggccgctctcaaactccttgcctcaagtgatcctcctgccttggcctctcaaagcactgccattacaggcatgagccaccacacgaggccctcaccagaattaacaggtaaggaaatgagacacagagagcaaaagactagcttgcgactggccaaatcagcagtgagctcaaactagacacagagagcaaaagactagcttgcgactggccaaatcagcagtgagctcaaactagaatcccggtatcatgacatggtcagtattcctcccaccttttctttgtactgggaggaagattttggttctgaagataaggcagtgtcttagaaaagtgggacctcaggactagaaagtccccagtgtcttctctcctttgagaggggagacccagcagagtatctgtcccacagcagggccacgctctgatgagggaaaggcccaaggccacagctggtctggcccagctggtatagagccctcatctcctctcccctgggccctgcacagcactctgcccttcacacagaatctgagtctttcacacacactacgcttctaacagcctcttctcttctggagtcagccggtaaacagaagccacccaggggcaattcctaagcatgtctcagagatttggaggaagggaagagcaagcaagcagcacactgcatagaaaactggtaacattctgtctccttaaccttttccacacagagcccatctgaatggaagccaagctttattacatgacccgagtgtagaaggcagttcagatattcagtctgagagtcaaaattgtcaaagtaagttatttcacagaaagaaattatactaggcccgaaacagaaatcatggggaaggaaagatgggaataaggtgcttaaaaaatttaaaaatacacctcctctggccagagggaacagcatgcgtgaaggcccagagc

SEQ ID NO: 708916 - DNA, 1803 bp, Homo sapiens
gtgaccaggtcctccacgaagcgttcccaggttatgacacccgccccaggccrctgctgctctggatacttcatctctctcttgcctctgccctgtcagcactttcacagagccaccgacagccacttctgtggcattgccagttacttgtgacagacaattccttaagcataggggacatgtcttattgtcattctacctgtcctagcccagtgcctagtaagaggtatgatagatgtttcttaaatgaagaaagcagaggaaaaagccttttgtataggtcatgctatcaaagcatttaatgtgggacaggagttctcaactggaggcaattttgtccccaagagaacatttggcaatgtctaaaaacatttttagctgtcacaatgatgggatgcttgtagcatctagtgggtagaggccaaggatgcttctcaacatcctatgatgcacaggacagcaccccttgccccagcaaagaattctctaactcaatatgtcagtgctgctgaggctgagcaactccgattacaggaaatgggtggagagacacagaaacttccttctaggatgatgtaactaataactgtaatcacataaatttatatactctcatgaataattcctattcagattctttcatcaggatacttatttttatttttttgagagatagtcttcctctgtcatccaggctggagtgcagtgacacaatcatagctcactgcagcctcaaactcctgggctcaagcaattctcccacctcagcctctggagtagctgggactataggcatgcaccaccatgcccagctaattttaaaattttttgtagaggttgggtctcgctatattgcccaggccgctctcaaactccttgcctcaagtgatcctcctgccttggcctctcaaagcactgccattacaggcatgagccaccacacgaggccctcaccagaattaacaggtaaggaaatgagacacagagagcaaaagactagcttgcgactggccaaatcagcagtgagctcaaactagacacagagagcaaaagactagcttgcgactggccaaatcagcagtgagctcaaactagaatcccggtatcatgacatggtcagtattcctcccaccttttctttgtactgggaggaagattttggttctgaagataaggcagtgtcttagaaaagtgggacctcaggactagaaagtccccagtgtcttctctcctttgagaggggagacccagcagagtatctgtcccacagcagggccacgctctgatgagggaaaggcccaaggccacagctggtctggcccagctggtatagagccctcatctcctctcccctgggccctgcacagcactctgcccttcacacagaatctgagtctttcacacacactacgcttctaacagcctcttctcttctggagtcagccggtaaacagaagccacccaggggcaattcctaagcatgtctcagagatttggaggaagggaagagcaagcaagcagcacactgcatagaaaactggtaacattctgtctccttaaccttttccacacagagcccatctgaatggaagccaagctttattacatgacccgagtgtagaaggcagttcagatattcagtctgagagtcaaaattgtcaaagtaagttatttcacagaaagaaattatactaggcccgaaacagaaatcatggggaaggaaagatgggaataaggtgcttaaaaaatttaaaaatacacctcctctggccagagggaacagcatgcgtgaaggcccagagc

SEQ ID NO: 708917 - DNA, 830 bp, Homo sapiens
tcatgcaactcacacagatgtgtggaactaatgaagaaatatggggcataccaaagaagcccaatttattttagcctcatccattttataaggcaaaaattgtcacagtttttctagaggtcacctaggaaatctaaaaaattcttatttttccctaaaaatcagaaaatatttactttttggaatttaagatataatttcagatgggcaaaaattaagtgttatcagaggagatttggtcactgygataaagataggaatacaggtacagagaagaaaatggtggcaataatcccaatgacaatacaatattctaaaataagcatagaaaaatatatcataattgttagaaaatgtatccgtttcataattaattatgctgtacaaatgtttttttcttatttttctttctagcttcattgaagtatgattgataaataaaaattgtacatatttaagttatataatatgatgtgatgtatgtatacattgtgaagtaatagccgcagtcaattaacattttcatcaacttacaaagttacactttctctgtgtgtgtctatgtgtgcttgtatggaaatacataagacctaccctgttagcaaaattcaagtatacaatacattcttatcagctgtagctactatgctatatatgttaggtatccagaatttattcatcttttaactaaaagcatctccccatttttcctaccttctaatccctagcatctaatgagtttaaattttttagatttcacagataaatgagattatgcagtatatttgtctttctgtgtctggcttattttacttagcattttgttctct

SEQ ID NO: 708918 - DNA, 830 bp, Homo sapiens
tcatgcaactcacacagatgtgtggaactaatgaagaaatatggggcataccaaagaagcccaatttattttagcctcatccattttataaggcaaaaattgtcacagtttttctagaggtcacctaggaaatctaaaaaattcttatttttccctaaaaatcagaaaatatttactttttggaatttaagatataatttcagatgggcaaaaattaagtgttatcagaggagatttggtcactgtgataaagataggaayacaggtacagagaagaaaatggtggcaataatcccaatgacaatacaatattctaaaataagcatagaaaaatatatcataattgttagaaaatgtatccgtttcataattaattatgctgtacaaatgtttttttcttatttttctttctagcttcattgaagtatgattgataaataaaaattgtacatatttaagttatataatatgatgtgatgtatgtatacattgtgaagtaatagccgcagtcaattaacattttcatcaacttacaaagttacactttctctgtgtgtgtctatgtgtgcttgtatggaaatacataagacctaccctgttagcaaaattcaagtatacaatacattcttatcagctgtagctactatgctatatatgttaggtatccagaatttattcatcttttaactaaaagcatctccccatttttcctaccttctaatccctagcatctaatgagtttaaattttttagatttcacagataaatgagattatgcagtatatttgtctttctgtgtctggcttattttacttagcattttgttctct

SEQ ID NO: 708919 - DNA, 830 bp, Homo sapiens
tcatgcaactcacacagatgtgtggaactaatgaagaaatatggggcataccaaagaagcccaatttattttagcctcatccattttataaggcaaaaattgtcacagtttttctagaggtcacctaggaaatctaaaaaattcttatttttccctaaaaatcagaaaatatttactttttggaatttaagatataatttcagatgggcaaaaattaagtgttatcagaggagatttggtcactgtgataaagataggaatacaggtacagagaagaaaatggtggcaataatcccaatgacaatacaatattctaaaataagcatagaaaaatatatcataattgttagaaaatgtatccgtttcataattaattatgctgtacaaatgtttttttcttatttttctttctagcttcattgaagtatgattgataaataaaaattgtacatatttaagttatataatatgatgtgatgtatgtatacattgtgaagtaatagccgcagtcaattaacattttcatcaacttacaaagttacactttctctgtgtgtgtctatgtgtgcttgtatggaaatacataagacctaccctgttagcaaaattcaagtatacaatacattcttatcagctgtagctactatgctatatatgttaggtatccagaatttattcatcttttaactaaaagcatctccccatttttcctaccttctaatccctagcatctaatgagtttaaattttttagatttcacagataaatgagattatgcagtatatttgtctttctgtgtctggcttattttacttagcattwtgttctct

SEQ ID NO: 708920 - DNA, 614 bp, Homo sapiens
tgggacacctcagccaaagttttagtcatctttttgtttaaagccagagaggaagggggaaggatcagggcaaagaggaaagaaaggccctgtaaacagactgttgtggtgcagcttgtggcccagccacktgaacttacagacttttcagccaggtcttcatggccgacaccatgccagatgacacattcatccggagtggatggcattgcagtagaggagccctgcacttagggagccttggagatccctgaattcagcagccacagttgtactactttctggctggggccacggagtttgcaccctttggttgaatcaaacctaacttattcagatgcaactcattttctaaggagtgttttcacactgctataaagtactacctgagactgggtaatttataaaaaaaaaaaagaggtttaattgactgcacagctgggcaggcctcaggaaaagtacaatcattgcagaaggtgaagggaaaacaagacacgtcttacatgggggcaggagagagagtgtatgggaaaaccaccacacactttcaaatcatcagacctcatgagaactccctcattatcataagaacggcacaggggaaactgctgcca

SEQ ID NO: 708921 - DNA, 1546 bp, Homo sapiens
tgcctgggctgacatatgcagtcaaggccattatgtgtcacgacctctcccttagcctacaagttcctagaaggcagcaaccaggcctctgtagtattcctgactgattctttttggagccatggatacaatgaatgtttgggacaatgaggacaaatggcttcttgacgctttcagggaatctgtacacttcacagacaggttcggtgtctcagaaaagtgacctgtaaaggttaaatacagtattacaaatcataatgctaaaacatgagaacgtgtgttataatcacttgaaatggccaggtgcagtggctcacacctgtaatcccagcactttgggaggccaaggcaggtgtatcatgaggtcaggagtttgagaccagcctggccaacatggtgaaaccctgtctttactaaagatacaaaaaaatagctgggcatggtggtgggcacctgtaatcccagctactcgggatgctgaggcaggagaatcgcttgaacccaggaggtggaagttgcagtgagtcgagatcatgccattgcactccagcctgggtgacagggtgagagtccatctcaaaaaaaaaaaaaaaaaatcacttgaaataagtcccagctcccctaggggtgtggtgacagtgtggcctcaacaggaaaaactggggaaaggccaggaaggagcagaggcccagatggggcagtcgccctcagaatccatcctactggatattctggccagaggttgagaatccctttgcagtggactgacattcccccaagactggcacccagggtgctgctcagatgctttcctatgtttctcaaagcactggcttgtatattttgtttcctggccttcgggcactgcatttcctgttcaatgtgttctgcaggcagcatcttatgtggacggtctgctacggtgtctgaatgtttatgtccccccaaaaattcatatgttacaatcctaacatccaaggtgatggtactaagaggtggggcctttgggaggtgattgggccataaagttggagccctcaggaatagggttagtgcccttataaaataagcctgagagagacctcttgccccttctaccacgggaggacacagtgagaaagtcttctctgtgaaccaggacacagactatcgcctgacgctgaatccgctggcaccttaatcttagacttcccagcctccagaactgtcagaaataaacttctattgtttataagcactaagtcacggtattttgttgttgtggttgttactggagccttaacagactaagacaggatttaacctgaagacaaacacttacgggaaagatacttggaagctgaatttccttctacctaactggctgccctccctgctggatgctgtgtgctataaagtaatataaatgaatcattcctgaaataatcaaaatgcmctgatactctcaaagggcaggaagaggagagcccctgaatgggaaagctgctaggctgtatcagcttggctaaactttcttcctgatttttccttctctcatttctaaaag

SEQ ID NO: 708922 - DNA, 658 bp, Homo sapiens
gttttcatttattgtgcatttgaaggttatacttctctgtctccttttagttaggtggagctgaagtgatgtgtgtcacatccaggaagagccatttaattgcttatgtgagrctctagcaatctcttggaaattgtagaggaagatcatgttacaagggagttgccacaagattgaaacattcttgatttctaggtcaccaaatggaaacaagttgtcctggatagtcactgcgattcacagtaaactttctatgaacaggaaacaaactgtaaagggattaagtcactcagattgtgttctgttttgctactacagcatgatttaggttatcctgatgaattcagatattggaactagagttagtatgacactataaaaaaaatttgaaacgtaaggcactgacttagttgttgggcaatgttcagcttctaggaatatggcatgagaggctataagtaagacaaaggactgcattagttacggcacagcaagcaccattgttttggctctttttgtaccccgaattcaatggaggtaatgtggaaaggcccaggtggatggtgcatacgtggttggtttgtatcatacccgaagaaccctaagtttaagaaatctgaaccttctctgggctgcaagtaatctgtttgagctttgc

SEQ ID NO: 708923 - DNA, 658 bp, Homo sapiens
gttttcatttattgtgcatttgaaggttatacttctctgtctccttttagttaggtggagctgaagtgatgtgtgtcacatccaggaagagccatttaattgcttatgtgagactctagcaatctcttggaaattgtagaggaagatcatgttacaagggagttgccacaagattgaaacattcttgatttctaggtcaccaaatggaaacaagttgtcctggatagtcactgcgattcacagtaaactttctaygaacaggaaacaaactgtaaagggattaagtcactcagattgtgttctgttttgctactacagcatgatttaggttatcctgatgaattcagatattggaactagagttagtatgacactataaaaaaaatttgaaacgtaaggcactgacttagttgttgggcaatgttcagcttctaggaatatggcatgagaggctataagtaagacaaaggactgcattagttacggcacagcaagcaccattgttttggctctttttgtaccccgaattcaatggaggtaatgtggaaaggcccaggtggatggtgcatacgtggttggtttgtatcatacccgaagaaccctaagtttaagaaatctgaaccttctctgggctgcaagtaatctgtttgagctttgc

SEQ ID NO: 708924 - DNA, 658 bp, Homo sapiens
gttttcatttattgtgcatttgaaggttatacttctctgtctccttttagttaggtggagctgaagtgatgtgtgtcacatccaggaagagccatttaattgcttatgtgagactctagcaatctcttggaaattgtagaggaagatcatgttacaagggagttgccacaagattgaaacattcttgatttctaggtcaccaaatggaaacaagttgtcctggatagtcactgcgattcacagtaaactttctatgaacargaaacaaactgtaaagggattaagtcactcagattgtgttctgttttgctactacagcatgatttaggttatcctgatgaattcagatattggaactagagttagtatgacactataaaaaaaatttgaaacgtaaggcactgacttagttgttgggcaatgttcagcttctaggaatatggcatgagaggctataagtaagacaaaggactgcattagttacggcacagcaagcaccattgttttggctctttttgtaccccgaattcaatggaggtaatgtggaaaggcccaggtggatggtgcatacgtggttggtttgtatcatacccgaagaaccctaagtttaagaaatctgaaccttctctgggctgcaagtaatctgtttgagctttgc

SEQ ID NO: 708925 - DNA, 658 bp, Homo sapiens
gttttcatttattgtgcatttgaaggttatacttctctgtctccttttagttaggtggagctgaagtgatgtgtgtcacatccaggaagagccatttaattgcttatgtgagactctagcaatctcttggaaattgtagaggaagatcatgttacaagggagttgccacaagattgaaacattcttgatttctaggtcaccaaatggaaacaagttgtcctggatagtcactgcgattcacagtaaactttctatgaacaggaaacaaactgtaaagggattaagtcactcagattgtgttctgttttgctactacagcatgatttaggttatcctgatgaattcagatattggaactrgagttagtatgacactataaaaaaaatttgaaacgtaaggcactgacttagttgttgggcaatgttcagcttctaggaatatggcatgagaggctataagtaagacaaaggactgcattagttacggcacagcaagcaccattgttttggctctttttgtaccccgaattcaatggaggtaatgtggaaaggcccaggtggatggtgcatacgtggttggtttgtatcatacccgaagaaccctaagtttaagaaatctgaaccttctctgggctgcaagtaatctgtttgagctttgc

SEQ ID NO: 708926 - DNA, 1285 bp, Homo sapiens
aagccccacttctttgagatgtggatcttctggcggccagggaacttgaacttggccctgcgtagggcgtcaatcacatgctccttgttctgcagcttggtgaggatcgacatgataacttggccaatacaaaccccggccacagtgccctggggctttccaaaggcacctcgcatgcctatttgagcctgtcagccccagcacaggacaacgtcttgttgatgcggatgacgtggaaggagtggagccacacccggatatggaagccatctttgccacagctttttaccatgtacttattggcacaaattcgggcagcctccagggcttcagaggacagctgctcaaattcatctgacaccatgtggccataaagcggaaactcatccacttttaccttcttccgccccaggtcaaagatgcgaatcttgacatcaaggacaccttggcagaagcgagactttgggtacggcttgttcttacaataccggtaacaacccgcggggcggcggcccatggcgacaccaggatcttcagtagtgctctcaagggaaagagagcatgaattcttattaatataataatttatgtactttacctcaatttatttttattttttatgtttaattgacaaatagaagtgttatatgcatatttttttttctttttttttttttttgagacggagtcttgctctgttgcccaggctggaatgcaggggcgcaatctcggctcactgcaagctccgcctcctgggttcacgtcattctcctgcctcagcctcccaagtagctgggactacaggtgcctgccaccaagccaggctaattttytttttttttttcgtatttttagtagagagaaggtttcactgtgttagccaggatggtctcgatctcctgacctcgtgatctgcccgcctcggcctcccaaagtgctggggttacaggcctgagccaccacgcccggctgaattgtatatatttatgctgtacaacatgtacaatatatatccaacatatatcttgggtatatatctagacactatggaatggcagaatcaggctaattatcatattccatttcctcacacacttaccatttttgtggtgacagcacttaaaatctacccttttggcacatagtacattgctgttaagtatgatcactgagtcctgaacttattgctcctaactgaaattttaaaattgatttctttcttatcttcctgtctttacttggaagccaactattgtttttcttggcttttaaatgatgggtggca

SEQ ID NO: 708927 - DNA, 591 bp, Homo sapiens
agaaaaaagccatcacgattattaaaagcaaaataaaccaataattttagcctgagaattaaaggaaagaaatgagaaaggaaggaagaaagggaggaaagaaggaagggaagaagccaggcaggcaatcggtaagtcaagaatattgagagcactgctgtgttcttgaattggaagatttaatataaaaaaacactgtccaaaatagacttaatataattcaaaattaaattcagacttttaaaatatgaagctcatatgaaataattaaaaagtgaataagttgataatttttttaagtaagagtgaaacttaatagttgytatgctatggttttgtataataaatgttatttgaatggcaaaattaaatatgaaagcatattttaaagttacaacaatgaaaactgtgtcactgaatcatagactgatcattgaaacagagtaaatagccgttaaattgattcttgcttacataaaaacttcaaataagaagaattttttattagcaaatgatgcagtaaaattgatcaggtaggcgagaatgttagagttttcctctgtagcaagtaaattgtaagaataacaattc

SEQ ID NO: 708928 - DNA, 439 bp, Homo sapiens
accctccatcggtgtttggacttgtgcatcaggcaaccgacctgttaaggtcacagcagcaaaagctgagctaatggtgttatttccaycaagctgttaagcctgtaaagatctttatcaggcgagactttgtggtcctgtcataccgaaagtagtgcaagggtacacccctctgtagccgaccagaatatgccactccaaatgtgcctcttggcatagaattattattattattattattattcttattttttatgagatggagtcttgctctgtatgcccaggctagagtgcaatggcgtgatcttggctcaccgcaatctccgcctcctgggtccaagcgattctcctgtctcagcctcccaagtagctgggattacaggcacgcaccaccacgcccggctattttgtatttttagtagagacagggtctctccat

SEQ ID NO: 708929 - DNA, 439 bp, Homo sapiens
accctccatcggtgtttggacttgtgcatcaggcaaccgacctgttaaggtcacagcagcaaaagctgagctaatggtgttatttccatcaagctgttaagcctgtaaagatctttatcaggcgagactttgtggtcctgtcataccgaaagtagtgcaagggtacacccctctgtagccgaccagaatatgccactccaaatgtgcctcttggcatagaattattattattattattattattcttattttttatgagatggagtcttgctctgtatgcccaggctagagygcaatggcgtgatcttggctcaccgcaatctccgcctcctgggtccaagcgattctcctgtctcagcctcccaagtagctgggattacaggcacgcaccaccacgcccggctattttgtatttttagtagagacagggtctctccat

SEQ ID NO: 708930 - DNA, 2202 bp, Homo sapiens
atatcattcgccaggtggtccaaattaacatcactaatgccaggcagatggcatgagtttccagatgttactttctgtcaaggacatgttggacttaggtaataggcagcctgaggatgtgtaagcttcatttataaagaaggaagtataatacatatttaaaaatcaattttaataaaattggaaaataaaaagggaaaaagactgaaaacttctatgtcaatttaagaaaagtatgaagaatttttctagattgaagtagactaaagagaaatgatatgcaaatgtaacaggtgatcccagaatggattttccttggagagagaaaaatgtgctataaatcatattatgtgctcagttggcaaaaatgggtatggaaggtactgtatcagagttaaatttgttgaagttgataatgtcattttttaaaggaattttcttgttcctaatatatttaatgtaaagatcgatgatatatgcatctaactctcaaatagttcagcaaaattatatatatataactacatatgtgtgtacatatatatgtacacatatatctaatacataagatgtatatatacatgcatacatacctacacagagagcgcaatggggcaaaatatcaatgagaggtgaatctgactggtaaaggatactctttgtactattcttgaaatgctttgtaagttcaaaattatatctgaaataaaacaaaaaaatttcaaactgaagatattttgattatattgagactgatgttttaaagtcccaagaagcaggtcctgagataaaaatgggtaagtcaatgatttttataaaacctggtggcaagacaaacaggtaaatcaatggcaaatttaagattaggaagtggaacragctcaacaaggatatgatttcatccttgaagacagtgttcagcttgatcccatagggaacttagaaatgaagtcaagccccagtattgttctgctccatcaatggcaagggagctgaacttctggctttcctggatggcagaaaaaggaggctcccattaggaggagtgcaattctcagaagaatttgggtggctggcctgtggaaaacggatgcagtaggaagtgaggatgagggcttacagaaaaggtagaaaggaatctcagaagagctagatgaaacactacctcatgcttttatagtttaaaattcccctgaatagatttttaaagtaacatgtaaatttggaagagatgaaaactttgaattatttaaatacagagatgatggttgttccattccagacatcatttttgaaggttagctatcatgtgccagatgtcttacaaaaaataggtgtgtgtgtgtgtgtgtgtgtgtgtgctgtttttgttattatttatcttaaactctctggacatataaaacctgttttgctttagtaattaaaggcaactttttttctaaaacttagtgctaagtgctcaatacctaaggagagaattagatcaaacaatgtggttttaatatactttttgtcttcactaatataaggagataacctattgggggtttcatattttctccataatgttcataaggtgtgctatcggcatttcagcaatatagcctccttgtgggctatagcatttcaatcattacaggaaatttcacttctctggactccatctgcaaaagatcagtagcgctcttcctcccccacattgaattacataaaaaactgctttcatctgtatataacatgtgattctaaacatcccttaggtttaagtggctatagtatgtattagcataatattgaagtttaaggaaagtaagagtttaaacattcaatgtagacattgctaaatgttttcttccaatttgaagggttacagcatgttactttttttcttgagtgttatcaaactcaaaagataatagctaatttacagaacattatttctactgggaaaaaataatcacatttaatgttatcaaagatatggatataatctaaataattttaactgtgcttaggttatatttaaacattaaagatagcatttcttaaaaattagtattttttaaattttattttattttttattatactttaagttttagggtacatgtgcacattgtgcaggttagttacatatgtatacatgtgccatgctggtgcgctgcacccactaactcgtcatctagcattaggtatatc

SEQ ID NO: 708931 - DNA, 2202 bp, Homo sapiens
atatcattcgccaggtggtccaaattaacatcactaatgccaggcagatggcatgagtttccagatgttactttctgtcaaggacatgttggacttaggtaataggcagcctgaggatgtgtaagcttcatttataaagaaggaagtataatacatatttaaaaatcaattttaataaaattggaaaataaaaagggaaaaagactgaaaacttctatgtcaatttaagaaaagtatgaagaatttttctagattgaagtagactaaagagaaatgatatgcaaatgtaacaggtgatcccagaatggattttccttggagagagaaaaatgtgctataaatcatattatgtgctcagttggcaaaaatgggtatggaaggtactgtatcagagttaaatttgttgaagttgataatgtcattttttaaaggaattttcttgttcctaatatatttaatgtaaagatcgatgatatatgcatctaactctcaaatagttcagcaaaattatatatatataactacatatgtgtgtacatatatatgtacacatatatctaatacataagatgtatatatacatgcatacatacctacacagagagcgcaatggggcaaaatatcaatgagaggtgaatctgactggtaaaggatactctttgtactattcttgaaatgctttgtaagttcaaaattatatctgaaataaaacaaaaaaatttcaaactgaagatattttgattatattgagactgatgttttaaagtcccaagaagcaggtcctgagataaaaatgggtaagtcaatgatttttataaaacctggtggcaagacaaacaggtaaatcaatggcaaatttaagattaggaagtggaacgagctcaacaaggatatgatttcatccttgaagacagtgttcagcttgatcccatagggaacttagaaatgaagtcaagccccagtattgttctgctccatcaatggcaagggagctgaacttctggctttcctggatggcagaaaaaggaggctcccattaggaggagtgcaattctcagaagaatttgggtggctggcctgtggaaaacggatgcagtaggaagtgaggatgagggcttacagaaaaggtagaaaggaatctcagaagagctagatgaaacactacctcatgcttttatagtttaaaattcccctgaatagatttttaaagtaacatgtaaatttggaagagatgaaaactttgaattatttaaatacagagatgatggttgttccattccagacatcatttttgaaggttagctatcatgtgccagatgtcttacaaaaaataggtgtgtgtgtgtgtgtgtgtgtgtgtgctgtttttgttattatttatcttaaactctctggacatataaaacctgttttgctttagtaattaaaggcaactttttttctaaaacttagtgctaagtgctcaatacctaaggagagaattagatcaaacaatgtggttttaatatactttttgtcttcactaatataaggagataacctattgggggtttcatattttctccataatgttcataaggtgtgctatcggcatttcagcaatatagcctccttgtgggctatagcatttcaatcattacaggaaatttcacttctctggactccatctgcaaaagatcagtagcgctcttcctcccccacattgaattacataaaaaactgctttcatctgtwtataacatgtgattctaaacatcccttaggtttaagtggctatagtatgtattagcataatattgaagtttaaggaaagtaagagtttaaacattcaatgtagacattgctaaatgttttcttccaatttgaagggttacagcatgttactttttttcttgagtgttatcaaactcaaaagataatagctaatttacagaacattatttctactgggaaaaaataatcacatttaatgttatcaaagatatggatataatctaaataattttaactgtgcttaggttatatttaaacattaaagatagcatttcttaaaaattagtattttttaaattttattttattttttattatactttaagttttagggtacatgtgcacattgtgcaggttagttacatatgtatacatgtgccatgctggtgcgctgcacccactaactcgtcatctagcattaggtatatc

SEQ ID NO: 708932 - DNA, 2202 bp, Homo sapiens
atatcattcgccaggtggtccaaattaacatcactaatgccaggcagatggcatgagtttccagatgttactttctgtcaaggacatgttggacttaggtaataggcagcctgaggatgtgtaagcttcatttataaagaaggaagtataatacatatttaaaaatcaattttaataaaattggaaaataaaaagggaaaaagactgaaaacttctatgtcaatttaagaaaagtatgaagaatttttctagattgaagtagactaaagagaaatgatatgcaaatgtaacaggtgatcccagaatggattttccttggagagagaaaaatgtgctataaatcatattatgtgctcagttggcaaaaatgggtatggaaggtactgtatcagagttaaatttgttgaagttgataatgtcattttttaaaggaattttcttgttcctaatatatttaatgtaaagatcgatgatatatgcatctaactctcaaatagttcagcaaaattatatatatataactacatatgtgtgtacatatatatgtacacatatatctaatacataagatgtatatatacatgcatacatacctacacagagagcgcaatggggcaaaatatcaatgagaggtgaatctgactggtaaaggatactctttgtactattcttgaaatgctttgtaagttcaaaattatatctgaaataaaacaaaaaaatttcaaactgaagatattttgattatattgagactgatgttttaaagtcccaagaagcaggtcctgagataaaaatgggtaagtcaatgatttttataaaacctggtggcaagacaaacaggtaaatcaatggcaaatttaagattaggaagtggaacgagctcaacaaggatatgatttcatccttgaagacagtgttcagcttgatcccatagggaacttagaaatgaagtcaagccccagtattgttctgctccatcaatggcaagggagctgaacttctggctttcctggatggcagaaaaaggaggctcccattaggaggagtgcaattctcagaagaatttgggtggctggcctgtggaaaacggatgcagtaggaagtgaggatgagggcttacagaaaaggtagaaaggaatctcagaagagctagatgaaacactacctcatgcttttatagtttaaaattcccctgaatagatttttaaagtaacatgtaaatttggaagagatgaaaactttgaattatttaaatacagagatgatggttgttccattccagacatcatttttgaaggttagctatcatgtgccagatgtcttacaaaaaataggtgtgtgtgtgtgtgtgtgtgtgtgtgctgtttttgttattatttatcttaaactctctggacatataaaacctgttttgctttagtaattaaaggcaactttttttctaaaacttagtgctaagtgctcaatacctaaggagagaattagatcaaacaatgtggttttaatatactttttgtcttcactaatataaggagataacctattgggggtttcatattttctccataatgttcataaggtgtgctatcggcatttcagcaatatagcctccttgtgggctatagcatttcaatcattacaggaaatttcacttctctggactccatctgcaaaagatcagtagcgctcttcctcccccacattgaattacataaaaaactgctttcatctgtatataacatgtgattctaaacatcccttaggtttaagtggctatagtatgtattagcataatattgaagtttaaggaaaktaagagtttaaacattcaatgtagacattgctaaatgttttcttccaatttgaagggttacagcatgttactttttttcttgagtgttatcaaactcaaaagataatagctaatttacagaacattatttctactgggaaaaaataatcacatttaatgttatcaaagatatggatataatctaaataattttaactgtgcttaggttatatttaaacattaaagatagcatttcttaaaaattagtattttttaaattttattttattttttattatactttaagttttagggtacatgtgcacattgtgcaggttagttacatatgtatacatgtgccatgctggtgcgctgcacccactaactcgtcatctagcattaggtatatc

SEQ ID NO: 708933 - DNA, 2202 bp, Homo sapiens
atatcattcgccaggtggtccaaattaacatcactaatgccaggcagatggcatgagtttccagatgttactttctgtcaaggacatgttggacttaggtaataggcagcctgaggatgtgtaagcttcatttataaagaaggaagtataatacatatttaaaaatcaattttaataaaattggaaaataaaaagggaaaaagactgaaaacttctatgtcaatttaagaaaagtatgaagaatttttctagattgaagtagactaaagagaaatgatatgcaaatgtaacaggtgatcccagaatggattttccttggagagagaaaaatgtgctataaatcatattatgtgctcagttggcaaaaatgggtatggaaggtactgtatcagagttaaatttgttgaagttgataatgtcattttttaaaggaattttcttgttcctaatatatttaatgtaaagatcgatgatatatgcatctaactctcaaatagttcagcaaaattatatatatataactacatatgtgtgtacatatatatgtacacatatatctaatacataagatgtatatatacatgcatacatacctacacagagagcgcaatggggcaaaatatcaatgagaggtgaatctgactggtaaaggatactctttgtactattcttgaaatgctttgtaagttcaaaattatatctgaaataaaacaaaaaaatttcaaactgaagatattttgattatattgagactgatgttttaaagtcccaagaagcaggtcctgagataaaaatgggtaagtcaatgatttttataaaacctggtggcaagacaaacaggtaaatcaatggcaaatttaagattaggaagtggaacgagctcaacaaggatatgatttcatccttgaagacagtgttcagcttgatcccatagggaacttagaaatgaagtcaagccccagtattgttctgctccatcaatggcaagggagctgaacttctggctttcctggatggcagaaaaaggaggctcccattaggaggagtgcaattctcagaagaatttgggtggctggcctgtggaaaacggatgcagtaggaagtgaggatgagggcttacagaaaaggtagaaaggaatctcagaagagctagatgaaacactacctcatgcttttatagtttaaaattcccctgaatagatttttaaagtaacatgtaaatttggaagagatgaaaactttgaattatttaaatacagagatgatggttgttccattccagacatcatttttgaaggttagctatcatgtgccagatgtcttacaaaaaataggtgtgtgtgtgtgtgtgtgtgtgtgtgctgtttttgttattatttatcttaaactctctggacatataaaacctgttttgctttagtaattaaaggcaactttttttctaaaacttagtgctaagtgctcaatacctaaggagagaattagatcaaacaatgtggttttaatatactttttgtcttcactaatataaggagataacctattgggggtttcatattttctccataatgttcataaggtgtgctatcggcatttcagcaatatagcctccttgtgggctatagcatttcaatcattacaggaaatttcacttctctggactccatctgcaaaagatcagtagcgctcttcctcccccacattgaattacataaaaaactgctttcatctgtatataacatgtgattctaaacatcccttaggtttaagtggctatagtatgtattagcataatattgaagtttaaggaaagtaagagtttaaacattcaatgtagacattgctaaatgttytcttccaatttgaagggttacagcatgttactttttttcttgagtgttatcaaactcaaaagataatagctaatttacagaacattatttctactgggaaaaaataatcacatttaatgttatcaaagatatggatataatctaaataattttaactgtgcttaggttatatttaaacattaaagatagcatttcttaaaaattagtattttttaaattttattttattttttattatactttaagttttagggtacatgtgcacattgtgcaggttagttacatatgtatacatgtgccatgctggtgcgctgcacccactaactcgtcatctagcattaggtatatc

SEQ ID NO: 708934 - DNA, 644 bp, Homo sapiens
ggggttgggttccagaccactgtaataaaatgaacaaagtaagtaacacatacattttggttttccagtgcataaaatgtacgtttacactatactgaagcctattaagcgtgcaatagtattatgtttcaaaaatgtrcatacctgaacttaaaaatattttatttctaaaatatgctaacaatcgtctgacacagagacacaaagtgagcccatgctgttggagaaatagcactgatagacttgttccatgcagagttgccacaaactttcaatcttaaaaaaaatacagtatctgtgaagttcaataaagcaaagagcaataaaaccagatacacctgtacatgagaccctaaagcagagaatctgtcctggtcaggtcagagagatgatacaagaaggaggaagagaagaaaggagactgagaagggaaggagaaggagaaagagaagaagagatttgaaggatgagagggtcttaacgaattgttactggctttgaagatgaaggaaagtagccatgaatcaagggacacaaggagcctctagaagccagaaacagtcctcagctgagagtcagcaaggacaaactgatctcagacctgcgacggcaagaaactcaattttgtcaacaacccacataaa

SEQ ID NO: 708935 - DNA, 644 bp, Homo sapiens
ggggttgggttccagaccactgtaataaaatgaacaaagtaagtaacacatacattttggttttccagtgcataaaatgtacgtttacactatactgaagcctattaagcgtgcaatagtattatgtttcaaaaatgtgcatacctgaacttaaaaatattttatttctaaaatatgctaacaatcgtctgacacagagacacaaagtgagcccatgctgttggagaaatagcactgatagacttgttccatgcagagttgccacaaactttcaatcttaaaaaaaatacagtatctgtgaagttcaataaagcaaagagcaataaaaccagatacacctgtacatgagaccctaaagcagagaatctgtcctggtcaggtcagagagatgatacaagaaggaggaagagaagaaaggagactgagaagggaaggagaaggagaaagagaagaagagatttgaaggatgagagggtcttaacgaattgttactggctttgaagatgaaggaaagtagccatgaatcaagggacacaaggagcctctagaagccagaaacagtcctcagctgagagtcagcaaggacaaactgatctcagacctgcgacsgcaagaaactcaattttgtcaacaacccacataaa

SEQ ID NO: 708936 - DNA, 607 bp, Homo sapiens
acattaccccaacattaagaacttacaaagatattgcaagaaggaaaaggaggggaaagcatagaggaggaggaggaggaagaagagagaggtagagaaagataaagagaattacaaatcaatatatctcaaagatggaataattattcagaaaatattatcaaattgaattactgaatctaacaatataggtagagtggatgatacagcaagaccaagtagtgtttattccaggactgaaaagttggtctaacatttgaaatagaagcaatgaaatttaccatattaacaagaaaaaagttaatgaatttcaacatacacagataaaaaaattgaaaaatatgttatactcattcaggaaaaaatgctcaataaactagaatagaaagggaatttcctcaacttattaaagggcatctattctcctaacattatacttcatggcagagacaactaattttccctktgagatcttgaataaaggcaagaattctcacttttactaacacttctgtttaattttaagatcataccatttataatagggccaatggcatacaaatctaacaaagagatgtataaaaactataatctcaatactgcaaaa

SEQ ID NO: 708937 - DNA, 1028 bp, Homo sapiens
atggagttgctttggttcaaatgcctctgacagaaccagcccattagagaggttcttttggactgctcctaggctgtaggcctcaggaataattctcaggaagacttccagataaaactagctttttttctttgctttgtttttgtgggccatgttttatttgtcctttttcctcaaacaggataacaaaagatacagactattcaatacaatgaaatagacaaaacaaattctaagagactgtgataccacatgctacatttaatcttattttattcatgtttgccttgggatggggaatagaccattcagtaaaaacatacagtaaaatcaaaatgtcgtatcatatacaacttttaaactacaataatgatggactttaattatttccacacacacaattttaacattagctttttaaataaacacaagacttctaggagtaatttataataaagtaattcctaatttttctttatagataaattcctatatacagtgatttcttyatagacaaattcctatatacagtgatcgtttacttaaaataaacacgtaagtaaattaagtacatggacatgcttaagatgagctaacattatatattcagttaggtaggcaacaagctgtagtgccagatggagtaagtgtatttgcaaataaattttaaaaactaagttactttttataattaaatacagaaaatatactgatttgctaaaataaataagatgtgatatattaacacttcactataaagaatgcataccagaatattcataaacagtaaatgagtcttattaagaatagtttactaaaataaatgctggctaaatagatgtgcatattgtgaagcactatgagtggtatatgttttgccacatacttctgttatcttgagctagataacacatgtgtactcaattcagcagtcattttcagttgttactggtatcatatgttttaagaaatgtgtacagtgtgaaaaacttaaaaaatattcatgaataaaaaatgttttagaaaaa

SEQ ID NO: 708938 - DNA, 1313 bp, Homo sapiens
tggtrtaaaccaaagtatgaatccatatgaggaaatcaagaccaatgtaaatgacttcctctttccagtgttcatgaataaaatttcatctaccttctatacatgatggttctatctggctagtgtccaaggacaaagaccatcatttttactactgatgtttgtatagtggcaggaagataaatgagtaaagttatctgtttcttgtgaaatgatgaagtattgtgaacaatatgcatgcccaaattaacaaaaacatgttacataaaaataaatgaaatgaatggaaatccagacaagagcatggactcaagaaaagggtagggttatatttgaagcaggagatttaaaaatatggaactagacatgattctcaaaattagttatagcgcattcttttgaaatcaaatgtactgaggtaaaggtaatagagaattaagagacttagatctagaaagaatgtaaatgggtttacatagactataaatcaatacattttatttattttgtttagcctatgagtatatggagagttttcaaatgttaactggagtcaatgtcagtggtagtgaaatataataaaatagagttaagtggttgcctgaaccctcctgcagataattattatgaaatatgaataaaataatatttgaaagtagtattgaatgtcttcaaaacagacaaaagagagaggatattatcttttgaaaaactgcaatcaaatagtctgtttgtggctttcttacttcatggtattttctgaccgttatgatcagagtagccaaaaatcagtcttaccactaacagttgacagagaatattgttcatgaataaaaatacaaaagaaaatttaagggcaaagttctgaaaataggggatcttcagtagacatgatatataaaatctgaatataaactgccgagatgcgttacgtaccagtaaagtacatacacggtggacgttacaggggcccatagcaaaaacacatcaggcaaggaccaaacacaaaattgccactgacagtaagagggatgccaggtaatgtttgtaattctttgttgttgtttaaactaatgcattcctcagtgagtgctcagctcacgggattgaaagagggagtcttgcacaattgatgtgccagaggacaaaacctgatacaagaagagcaggtggaaatttaagatgcagtctccagaagcaagaaaattacagagaaagtgctcagtaatagctgagcatgaactttatccaaatccttaacaaacactcaaattacacatgaaagaggggacagccagggatttaggcttaaa

SEQ ID NO: 708939 - DNA, 1313 bp, Homo sapiens
tggtgtaaaccaaagtatgaatccatatgaggaaatcaagaccaatgtaaatgacttcctctttccagtgttcatgaataaaatttcatctaccttctatacatgatggttctatctggctagtgtccaaggacaaagaccatcatttttactactgatgtttgtatagtggcaggaagataaatgagtaaagttatctgtttcttgtgaaatgatgaagtattgtgaacaatatgcatgcccaaattaacaaaaacatgttacataaaaataaatgaaatgaatggaaatccagacaagagcatggamtcaagaaaagggtagggttatatttgaagcaggagatttaaaaatatggaactagacatgattctcaaaattagttatagcgcattcttttgaaatcaaatgtactgaggtaaaggtaatagagaattaagagacttagatctagaaagaatgtaaatgggtttacatagactataaatcaatacattttatttattttgtttagcctatgagtatatggagagttttcaaatgttaactggagtcaatgtcagtggtagtgaaatataataaaatagagttaagtggttgcctgaaccctcctgcagataattattatgaaatatgaataaaataatatttgaaagtagtattgaatgtcttcaaaacagacaaaagagagaggatattatcttttgaaaaactgcaatcaaatagtctgtttgtggctttcttacttcatggtattttctgaccgttatgatcagagtagccaaaaatcagtcttaccactaacagttgacagagaatattgttcatgaataaaaatacaaaagaaaatttaagggcaaagttctgaaaataggggatcttcagtagacatgatatataaaatctgaatataaactgccgagatgcgttacgtaccagtaaagtacatacacggtggacgttacaggggcccatagcaaaaacacatcaggcaaggaccaaacacaaaattgccactgacagtaagagggatgccaggtaatgtttgtaattctttgttgttgtttaaactaatgcattcctcagtgagtgctcagctcacgggattgaaagagggagtcttgcacaattgatgtgccagaggacaaaacctgatacaagaagagcaggtggaaatttaagatgcagtctccagaagcaagaaaattacagagaaagtgctcagtaatagctgagcatgaactttatccaaatccttaacaaacactcaaattacacatgaaagaggggacagccagggatttaggcttaaa

SEQ ID NO: 708940 - DNA, 630 bp, Homo sapiens
gtcaaaacagacaaccatataagatggtttaggcatgaaagtagaaaggaatgaatgatatagttttcattaacagaaacccatgtaaatataattaagcacttatttagacatgagtgccaatgcatttgtgtcttccctttgggttttaattgggtgctgatgctgtgaaccatatgtacatatttataaatagcaaacattaacttgcatactttgcagaaagtatcaccataatgctaagtataatttttattagttcaggctcattatcttaacaattttaaagagaacaatattctccataagatgctacacgcctacattctgttaaaatcaaaatattaaagaattaacatattggctgagcagtactactccagaaatgtattgagaatcgtatccttagaaattcaatatatagtggaagatgtagtagtsaaatgaaaaacatctttttttaattctctaaattcactaatcaatttagtgtatgagagaaataaatttacatatttcatgttatcaagaacattttgtaaaaacatgttcatcactaaaggccagcgtcccctctttttgaagccatctgcaactttttaatgtgtacaatcagtattaatttaaaac

SEQ ID NO: 708941 - DNA, 824 bp, Homo sapiens
ttcttgtttcttttgtctcctctgactgtatgttttcaaagagcttatcttcaagctcactaattctttattctgcttggtaaattctggtattaaaagactataatgccattcttcagtatgcccattgcatttttctacttaattcgttttagttatttcaacctcttgtgtaatatacatgatggaattctaaattacttctctgcattatcttgtatttctttgagtttccttgaaacagctattttgaattctctctctgaatggtcacatgtctcttttttccaggattggtacctggtaccttacttagttcatttggtaaggtcatgttttcctggagtgtcttgatactggtagatgttcatctgtgtctggccattgaagaattatgtatttattatagtcttcactgtctgagcttgtttgtacctgtcttccttgagaaggctttccagatatttaaaaggacttgtgtgttgtaatctaggctgtatcttctttttcatgggaataaaagtggtttctgagaaaataaaaaaagatagactgaatgatgtggaagagtctttcttagatggtatcctagtccttattgacacaaaaratgttgcccttttcagaatgtttcatatccctcataactttttaggctaatgaaaaatatgtgatattcgtcatatatgtgggtactgttgtgctctaatttatgttttaaagttagattaagcctgtatctacactcctgtgtgtagtcagatagcatttttactattatgcagtcacatcagaatgtcaatttcctcctatactccttcttt

SEQ ID NO: 708942 - DNA, 824 bp, Homo sapiens
ttcttgtttcttttgtctcctctgactgtatgttttcaaagagcttatcttcaagctcactaattctttattctgcttggtaaattctggtattaaaagactataatgccattcttcagtatgcccattgcatttttctacttaattcgttttagttatttcaacctcttgtgtaatatacatgatggaattctaaattacttctctgcattatcttgtatttctttgagtttccttgaaacagctattttgaattctctctctgaatggtcacatgtctcttttttccaggattggtacctggtaccttacttagttcatttggtaaggtcatgttttcctggagtgtcttgatactggtagatgttcatctgtgtctggccattgaagaattatgtatttattatagtcttcactgtctgagcttgtttgtacctgtcttccttgagaaggctttccagatatttaaaaggacttgtgtgttgtaatctaggctgtatcttctttttcatgggaataaaagtggtttctgagaaaataaaaaaagatagactgaatgatgtggaagagtctttcttagatggtatcctagtccttattgacacaaaaaatgttgcccttttcagaatgtttcatatccctcataactttttaggctaatgaaaaataygtgatattcgtcatatatgtgggtactgttgtgctctaatttatgttttaaagttagattaagcctgtatctacactcctgtgtgtagtcagatagcatttttactattatgcagtcacatcagaatgtcaatttcctcctatactccttcttt

SEQ ID NO: 708943 - DNA, 590 bp, Homo sapiens
tctgttcttaaaacagaaagataattaactcatgttttaaatggacaaatttggcagttctgatatcagaattatggtcacaactaatgtgcctcagggatcatgtgcattttgtaaatctatgcgtatatagatgaagacaacaataagaactgaacagtggagaattaaagagaaaataatttatatgaaggtatttcttgctattaaaagtactctgctcaccaagtaaaacaggtctagatatatacaaatggcaaaaatcacagtggaaaaataaacatatttcaaaattttttcaagcatgtcaacaaaatttattttaaatacataatatatagaaaatacataaaacatgaaggttttttaaatacatggcatttgccaaatttgtactaattttaccaacataactactaagatatcaaatataaaaataaaaatgattacagcaacttattttattttcacaaacarcacttggatattacagtatgttgtcatttttaaaaaatattgttatatgatagctatcttatgagtgagtttttaatgaatcaattagtcaaatttaaaataatgttaaatta

SEQ ID NO: 708944 - DNA, 623 bp, Homo sapiens
aataaaacatgttcacattcttttgaagaaacctccacaatagaccactgtatgtaatgattccttagccaaaggcaaatttcttcgaatttcttcctttggcctctacaatatacataacacatacacattgccagattttaaaaaaattagaaaggattaaaggaattaaataattaagttatttaaatatataaatatagcaacaaaggctatcatatcattataaactgaatattataaaatgaatattaaaagttaacacagttcctttttattttaaagtcacaagacacatacctagataacatgtgcatcaaaagaaattcaagatgaaatttataactctcaaaagtaatgaaaaccatgatggtttatgataaaactattggtaaaagccaaatttcactcagtttataaactaaagtgtcttcataatcaaacagaaaaattaaagtagttttatattcaaattaagatgttagagaaaaaaattcccaattagctataagtaatttagaaaatttaagtgaagatttaaagtaaaattaatagattagagaaatgaaggttaaaatatctaygaatgccatatttgccatattttgagcacccagtaattg

SEQ ID NO: 708945 - DNA, 825 bp, Homo sapiens
taaaataatagaataataaacattctctatttagattagcaaactcttcttgttcaaagtgtgtaaaatagagaacaacttctccaaacatagttttatttatttattcatttatttttgagacagagtctcactctgtcacccaggctggcatgcagtggcttgatcagggctcattgcagccttgacctcccaggctcaagtgagccttctgcctcagtcccccaagtagctggggcaacaggtatgcacaaccacgtcctgctaattgtttgtagttttagtagagaccaggttttgccatgttaccaaggctggtctttaactcctacactcaagggatccacccatcttagcatcccgaagtgctgagattgcaggcatgagccatcatgcccggatccctccagacatggttttaaccatgaatttttaagatattctctcataaaaagagatctatctttgtcatgcacataaacagaaaactgaaaaatcaaccctgtttcaaagggagaacagatttttaaaaagaaataaagtaagagtaaacagtatttatttattttaattagtttcagtggctgttgatggactgctattatatcccataasaaaaattgactagagactcaattcgtatgtgaacaataaattaacactattttaatatatttgctatgagatagaagggaaccaatctctcagccccttaaaattttactttgcatctttaacattgaaagacaatagaaaagaaatcattgctttacaaggttagcatcctgggtcattgtattaaaatcttagacagtagtgttcctg

SEQ ID NO: 708946 - DNA, 825 bp, Homo sapiens
taaaataatagaataataaacattctctatttagattagcaaactcttcttgttcaaagtgtgtaaaatagagaacaacttctccaaacatagttttatttatttattcatttatttttgagacagagtctcactctgtcacccaggctggcatgcagtggcttgatcagggctcattgcagccttgacctcccaggctcaagtgagccttctgcctcagtcccccaagtagctggggcaacaggtatgcacaaccacgtcctgctaattgtttgtagttttagtagagaccaggttttgccatgttaccaaggctggtctttaactcctacactcaagggatccacccatcttagcatcccgaagtgctgagattgcaggcatgagccatcatgcccggatccctccagacatggttttaaccatgaatttttaagatattctctcataaaaagagatctatctttgtcatgcacataaacagaaaactgaaaaatcaaccctgtttcaaagggagaacagatttttaaaaagaaataaagtaagagtaaacagtatttatttattttaattagtttcagtggctgttgatggactgctattatatcccataagaaaaattgactagagactcaattcgtatgtgaacaataaattaacactattttaatatatttgctatgagataraagggaaccaatctctcagccccttaaaattttactttgcatctttaacattgaaagacaatagaaaagaaatcattgctttacaaggttagcatcctgggtcattgtattaaaatcttagacagtagtgttcctg

SEQ ID NO: 708947 - DNA, 1524 bp, Homo sapiens
acagtaattctttaaagatttgagttaccgatgtctacactcctaaaggtgaatggctcagttgtaccctacaaaatgcttctgttgctgtttctgcctctgttaagacaaagatcatgattctcaggactatagggaaatatatccataacattcctgtggtacacccacttaagctcagacccttatggccaataaaacaactattattgccatggctgaggccctaaagatggcaatactactggtctgaggcttttttggaggaaggaacttagaaatatgagcagggtagaaagcctaccaccctaaagtgtatcaagtaatcacagagatagggagacagagagaaagaaacaaaaagagacagggagggagagagaaaaaggacagaaagaaaatgggcaagggggaggcaggggaagaagtctggatataggaaaagtaaacaaaaacaatgaaacagaggtccccaatttgacctaacttgaaaaccaaaatttgctaaaagaacttatgtaacagaaagataaaaggcactgattgtattttgcacctctacagcaaaggctctgaaataattttaacacctgctaaattacaccaatttgcaaaccttcgtggccttaatactagaattcaaattacagttatagctgagaatctaatttaaacaagatttaacctataaatttagggcagttcttgaacacaaaatataggacagttataatccatcttaactacactaactgttgtcttgcttaaattccccgaggacgtagtatttattgccctaaaatacctctagtagtcacaattgctgcgatacattatgtaatagattaaaattaaatgaaacctttggcatttacaaactggcttgacaaaatggggccccgtagatattgtcccttcttcccagttaaaatagttaatacgtcccaatgtaaattaagataggacaatcaaagattgaaacccattgtataagagctatttagaggaggaatgattatctccactcattttcacttaacccaattttcccagttcttaaatattgaacaaatgaatgggatctcacaatatattattgtagtcttaatgctarggcttcatctattggacatcgatactcaatattattaaaattaccaacacagttgaatcagcaaaattattttcctattatacatctcaataataaatcccagtcaatgcttatttcaacagctctctatctacaatttgcccttcactccaaagagatacaataatcttttacctggctatccatggggtatgggtacaggccttgaaataatgtataaccatcataagcaagatcttcacagcatctagctttcttcaatagcataggcatgacgttatattggtgacatccttacccaaagagattcatttgacatgcttacaaggaagctcacaaaaaaagagaaagggccattgctccacgcatagttcatgggccaactgcctcaatcaaatccatgagaatta

SEQ ID NO: 708948 - DNA, 592 bp, Homo sapiens
atgctttgggaaggctaagacgggcagattgcctgaggcccagagtttgagacaagcctggccaacactgtgaaacccctcctctactaaaaacacacacaaaaattttgctcagcatgagtcccaagtagctgggagtacaggcatgtgccaccatgcccagctattttttcttgtgaagcacgagaatttcttgattctgggaggcggaagttgcactgagtcgaaatggtgcccctgcactccagactcggggacagatggagaccatgtctcaaaaataaataaataaagtaaataacaaaagaaggaaaatgttgactagagggtaagaacgcatgtaacatggtgaaagtttctaacatatatttaattagaggaaaagagttgagaattattaggaatcaattatcaaatagrtcatgtctgagaactggcaaagcctggaagtgacattatgccacagacataaaaataataaaatcttaagtgggggaaactaaaaaataccagaccacaaaacatcaaaaagtataaaagaattgttgaaaaccaaagatgcagagaaaaacttaaaaacagtcagaagtca

SEQ ID NO: 708949 - DNA, 612 bp, Homo sapiens
aataaataaaatgactaacttagttcaagtcttaatattaaatattaaccttagttcaattcttaatattaaaatattaggcttagaatggttataaatatataaaccttttatcactggagaatgaaaattaaagaagtaacacaatttttcctgattaaatttataaaaattatcttgtttgaatgtctaatcttctacttccgtttctaagtataaattttacatagacacctatagaattcaatcaattaaaatttaaattaaaaaatataggctactttatggttttgtttggtgatttaattacttcagtcagtatttattaacttggcttttatttcaccatwtcaatatttaccagctgagttttaacttcggttatataagtatctataatacatttaaaatattcgctagaatagagtggtatagtggacactgaagactcagaagaggacgagggtgatgagtaaggaatgaaaaaatacctattgggtacaatgtgcaccatttgggtgtcagatacgctcaaagctcagactttatcactgtataattctttcaggtaaccaaaaaccacttgtacccctaaaactattaaaatgtgtt

SEQ ID NO: 708950 - DNA, 1156 bp, Homo sapiens
acaaattaaagggagacatagacaaatccacagagttggcgatttgttaaatttctctgttagcaattgatagatcagctagaaatcagcaaagataccgaagatatgactaacactctcaagcatattgaccagaatatttgtggctaaatttacattttcaggataaaggatgatatatcagaatcaggtcttaatggtggtcatattaatttgtaattgtttatttctaagtatatcaatagattatatatttctactctagtatttcaaaagcatccaaagcattttcaagaattagaaattgtccattctaacaaatgaagcatagatgataccataactgtcattccacatattacagagagcagtttggaatgtgcgctctgaggccaagtgtacttaarttaagtcccatctctggcccttcttagttacacagcttgggtgtatcacttaatctcccatgattcttcactttctcttctgaaaatggagataatgatagcctctatctcacagagttaagcaagaatattaaaatcaaactgttatcgtggtcactgtgtcattatcaaaaatggaagccaaatttgctttgcatctcagtaaataaatgaattttcgtttgaaaagtgcaaataaatcaaacttgagatgatcacaaggagcctcttaacactgttgaaaccactggaggtttatcctgcaaagctatttagattaaatctgaaaagttcaaatctttacaccaaagctgaaccccatatggttcaggagtctttgcctgaaaatacatatgcttaagtagagttttcaatttgtttctttttgaaattcgtacagtttcccctcaattgcacccaaatgtttttcatttccttctccaggttgacaaagaatattgattttggtcataacagaattctctccagagaggtcagagaggttcttgttgatactgtctgatttaaatttcatttaagctgcttgtttttttaggcattaaataaaagaaattatctatagccaggaagagggtgtaaaaaggtgacacaagttaagaccacctgcctcctgacagaactgaagtttaaagtggattttttctttgagtagactttcaatcaagtaatatccagttttaaaataactt

SEQ ID NO: 708951 - DNA, 1156 bp, Homo sapiens
acaaattaaagggagacatagacaaatccacagagttggcgatttgttaaatttctctgttagcaattgatagatcagctagaaatcagcaaagataccgaagatatgactaacactctcaagcatattgaccagaatatttgtggctaaatttacattttcaggataaaggatgatatatcagaatcaggtcttaatggtggtcatattaatttgtaattgtttatttctaagtatatcaatagattatatatttctactctagtatttcaaaagcatccaaagcattttcaagaattagaaattgtccattctaacaaatgaagcatagatgataccataactgtcattccacatattacagagagcagtttggaatgtgcgctctgaggccaagtgtacttaagttaartcccatctctggcccttcttagttacacagcttgggtgtatcacttaatctcccatgattcttcactttctcttctgaaaatggagataatgatagcctctatctcacagagttaagcaagaatattaaaatcaaactgttatcgtggtcactgtgtcattatcaaaaatggaagccaaatttgctttgcatctcagtaaataaatgaattttcgtttgaaaagtgcaaataaatcaaacttgagatgatcacaaggagcctcttaacactgttgaaaccactggaggtttatcctgcaaagctatttagattaaatctgaaaagttcaaatctttacaccaaagctgaaccccatatggttcaggagtctttgcctgaaaatacatatgcttaagtagagttttcaatttgtttctttttgaaattcgtacagtttcccctcaattgcacccaaatgtttttcatttccttctccaggttgacaaagaatattgattttggtcataacagaattctctccagagaggtcagagaggttcttgttgatactgtctgatttaaatttcatttaagctgcttgtttttttaggcattaaataaaagaaattatctatagccaggaagagggtgtaaaaaggtgacacaagttaagaccacctgcctcctgacagaactgaagtttaaagtggattttttctttgagtagactttcaatcaagtaatatccagttttaaaataactt

SEQ ID NO: 708952 - DNA, 612 bp, Homo sapiens
tttcttttctctctttgttgtttaaggtattaagcacgaattattacatgagactggcagatagctattaatcctcttacagatttgagaaagttgattctcaaatatttatgcaccttctccttcattgttttctttaaatctgtcctcttaaaaagcttcttaagagctcagttaatgcttttgacttaactaggagaaaaaggcatgataatacaggcaagatggcattgttagcaattctggtagtggtttggaatgaatcctaagaggcagggatcttaaggacaaggaagagaagagagagagggagggatctttgatctctttctctggtaatcttaatgcataattttactaawacatgttctcaattcattcatattattaagctcttcctgcagttgatatctgagcagagtaagatttgtatttccatttttacttttttgaaagagaatatatggacagattattagtacaatttgggcactgtggttttaagaatatctgagtaaaataacaatatgaaataataaacagaagctctaacgtcaggtaacaaatagacagcaagaaaggttttgcaccatcctcttacggcctagagag

SEQ ID NO: 708953 - DNA, 616 bp, Homo sapiens
ttagttgttgggcaatgttcagcttctaggaatatggcatgagaggctataagtaagacaaaggactgcattagttacggcacagcaagcaccattgttttggctctttttgtaccccgaattcaatggaggtaatgtggaaaggcccaggtggatggtgcatacgtggttggtttgtatcatacccgaagaaccctaagtttaagaaatctgaaccttctctgggctgcaagtaatctgtttgagctttgccccagagagagagagagattgtctttattttattggaaagcaaaccaatctaccttctgatccgtagggagataatatatcctccaaagctgtttgcatgctaacatccttaaaaaatttatctggaacaaagctagctggtgcctgtgctcagaagacatgcagaaatgtaagaaacccatgagaattgsctcccaacccactatttctgtttccttgcttagtctttcccaatgcatctcaaattctacttcttcatgaattttttttctggactccaccagtcaagtacatttttctccttttaaccttgctgtattttgtgtttctcttttaagacacatattagtttgcactttttcac

SEQ ID NO: 708954 - DNA, 616 bp, Homo sapiens
ttagttgttgggcaatgttcagcttctaggaatatggcatgagaggctataagtaagacaaaggactgcattagttacggcacagcaagcaccattgttttggctctttttgtaccccgaattcaatggaggtaatgtggaaaggcccaggtggatggtgcatacgtggttggtttgtatcatacccgaagaaccctaagtttaagaaatctgaaccttctctgggctgcaagtaatctgtttgagctttgccccagagagagagagagattgtctttattttattggaaagcaaaccaatctaccttctgatccgtagggagataatatatcctccaaagctgtttgcatgctaacatccttaaaaaatttatctggaacaaagctagctggtgcctgtgctcagaagacatgcagaaatgtaagaaacccatgagaattgcctcccaacccactatttctgtttccttgcttagtctttcccartgcatctcaaattctacttcttcatgaattttttttctggactccaccagtcaagtacatttttctccttttaaccttgctgtattttgtgtttctcttttaagacacatattagtttgcactttttcac

SEQ ID NO: 708955 - DNA, 636 bp, Homo sapiens
tagcagctgggcgtggtgggagctgggccgagggtcaggcctggaggtggtgcccatcactgggtcccgctcaagagagaagaggctgggaagccaggtgcagctgtgtgcccacaggcgggtgagacaggactgggcctggatcccgcacccgctcgccgcgcagctcagcgcaagcggcctccgggggcctcctctctgcaaggggagcgcgcgcccggccctgaccctgcctgctgattctctggaaggttcatgtccrggactcctcggtgaccctgggcagagccacccacatgcgctgcctcccctcccaccgcctgacaggtctggagatgcccagagacttctggcatccaccagcagcgaggagcgtccctcccgcaaggcttggcctttcccctccagctttggcacaggacgcgttggtctgccgtttcttttgtgcacaaccatcagtcatgatgtcagccctgagctggggccacagaaccctgagcaaagtgggacataatggaaagcaaacaaaaaagaaagaaaatgatggtttcaaactaaaaacctgagttcacatagcgatagatttaaaactattttagaaaacactcattatctccctggcctattttttattaa

SEQ ID NO: 708956 - DNA, 636 bp, Homo sapiens
tagcagctgggcgtggtgggagctgggccgagggtcaggcctggaggtggtgcccatcactgggtcccgctcaagagagaagaggctgggaagccaggtgcagctgtgtgcccacaggcgggtgagacaggactgggcctggatcccgcacccgctcgccgcgcagctcagcgcaagcggcctccgggggcctcctctctgcaaggggagcgcgcgcccggccctgaccctgcctgctgattctctggaaggttcatgtccgggactcctcggtgaccctgggcagagccacccacatgcgctgcctcccctcccaccgcctgacaggtctggagatgcccagagacttctggcatccaccagcagcgaggagcgtccctcccgcaaggcttggcctttcccctccagctttggcrcaggacgcgttggtctgccgtttcttttgtgcacaaccatcagtcatgatgtcagccctgagctggggccacagaaccctgagcaaagtgggacataatggaaagcaaacaaaaaagaaagaaaatgatggtttcaaactaaaaacctgagttcacatagcgatagatttaaaactattttagaaaacactcattatctccctggcctattttttattaa

SEQ ID NO: 708957 - DNA, 610 bp, Homo sapiens
taaataaatggagtgatattttatattcacagataggaatactcaatattttttaaatgccaattccctccaacttgatataaattcagtacaatccaaatcaaaaccccacaagatattttttatatatggacaaaaaattctaaaatttatatggaaaagaaataagacccagtaaaagcaatacaaaactaaagaagaaaaatagatttgaaagactggccccataccattttaagacttattagctacagtaatctagaargcattaatatagtcagcatgtatttggcaaagtaacatagacaattcaatggaaaaaaactggaatgctaataaacttctggtgagtatgcaaaatcgtactactttcttaggaagacggttttgaaggtggtttcttacaaaccaaaatttaatcttaacatatagatcaacaatcacactccaagtcatttacctaatttagttgaaaacatatttacacaaaaatctgcacatgaatgctcacagaagttttgtacatgatcaccaaaaactggaagcaaccaagatattcttcagtgggtaaatggataaacaaactttggtacattgatactatgaaata

SEQ ID NO: 708958 - DNA, 602 bp, Homo sapiens
ctggtgaggaccttcatgctgtcatctcatggtagaaggtggaactagagtgtttatgcaggagaaaaagtgagagagagagagagagagagagagagcggggggaagggggccaaactcatctttatttttgtcagaaaaccactcccgataaaggcattaattattcaggagggtgtggcctaatcccctctttcaggtcccacctctcaacaatgttgcattggtattaagcacataaactttggggaacacattcaaaccatagcactccctgatgatgatcaaaagtagtttatggagacaagtctattgtttgtaagaggataacagaatagtagggatctagtgatttctttacacctatgtggcataaccaagttctgcctttgattctgccagctgggatgctgtttcacttatgtcctgactgaagatagttcttgcacaggatagtttggatgactcgtagaagtagatgactcatctactacttctgttcayagtagatgaacagaaaaactgtgctgagattatcataaaactttttcatttttgtgggaagataaatggtggcatgtggcttgccatttcatacttta

SEQ ID NO: 708959 - DNA, 678 bp, Homo sapiens
ggacctggttctctggattaaggaggggatgtgaccaccaattcctgttcagcccccactgaggcagtggagctctgcaattaagagtgaggctgtgattcacagaaaataaggaatattctggatagaaaagtggagcgcactgggcacagtggctcatgcctgtaatcccagcactttcagaggccaaggcaggtggatcacttgaggtcaggagttcgagaccagcctggccaacatggtgaaacccgtctctacaaaaaatacaaaaattagccgggtgtggtagtgcatgtctgtagtcccagctacctggggggctgaggcaagagaattgcttgaacctgggaggcggaggttgcagtgaactgagaccattccactgcactccagtttgggcaacagagcgagactgtctcaaaaaaaaaaaagaaaagaaaagatccgttccaagatggctgaataggaacagctctggtctgcggcttccagcgtgatcaacgcagaagacaggtgatttctgcatttccaactgaggtacctggttcatctcaatgggactggttggacagtgggtgcagcccacagatggtgagccaaagcagagtggggcatcatctcacccaggaagygcaaggggttgggggagttccctttcctagccaagggaagctgtga

SEQ ID NO: 708960 - DNA, 1602 bp, Homo sapiens
aatatgatcacacactatttcccctcccaatgagccaaagagaaacctggcatttccagcttaatcagtaattcctcctcactcatcatcgtcactcttaagaaagatttgttctgtgtctaaacgtcatggaaatttttttcaggcagcttcagtaagcagataaaaaggatggtaaggggtggaaggaggagaggaaaagcaagagtcgagcagatcttccaagagtagattaaatcagtctgcattaaaagagcacaaagtaggtgtctaagggcgagcagagaattggggcacaagagaagagggttagaaagacagttttgtgaggctgtttggtgaccaagatggtctgcaacacctgggcatgttgaaaaatgggaaaggaaaaaaaaggagggcttgtgaattgcattttctttcattgcttccaggagatgttagaggagagtggagtttctatttaattatttttaacatctctgaactgtgcttctttaaatgctttctgcttcagaattgagtaccaaggatcacacttaatagagtcatgatgggaacagccctgtccttgccaggctttgcttcctgatgcccccaaagtaactacccatagagaggaggagcagatgggaaaagggccaacttctcagcccttgccatactttgtcacaccaagctgctttgcttatatctaaggtctcacaatctctatcctaaactcttctacttttgatcagtaccccacaaagagaggcatcaagcacaccaagtctaaccaagaacagatggaacgccaaccttaaccaccctccaaaaattatctagcccctcaccagtcacccaatataaaaaataaaatcttatgaggcaaagaaaaacatatgtggttgctataagagctgtcactcctagaagcatttgaaaaaaatgatccctgatatattaatagtgtctatccttgaggaatgtgataaaagaagattgggatattcaagtgggcacacttttgcccaamaaatatcagagctgagattagatagcaaagaaacaggaggaaatccatatgatgataaaaatatagactatagatttagggagaaaaacagatttgaattcttttctggtcacttactggctgtttgatctagagcaaattacatagctgttctgagtctcagtttcccaatttgtaacagaaacagttacatatgcagaattatagaaattgctgagagataaagtaatcaacagaaaaagacaggaaaaaaatgacatagcttttcatgtatttaatgagtatttacaaagtagatatcacatgcaagactactgaggttaaaaggatatgttaaatataaccctgatcctgaaggaaccaacaatctatcagaagacataatacaaatattcatattctcaaatacatggagaactgtcactagtgtcatcaaaaagaagagcacaaagaattgtatggtgctacagaagctcagtgaaagaacagatggcacagagagatggaaagaagtttgcacttctgaagaaaaaaagacaaggaaataggatttaaagcacctcatagatattaacattgagaaa

SEQ ID NO: 708961 - DNA, 1663 bp, Homo sapiens
atctatgagatgatattacagcttcactgcatggcttctttaccaggttcttctcatccaacaagcaagctcatgttctagaagcctgaggcagagaaaaactgaatatcacttagtgataactatcttctgagcccaatcactctctttgaacaaatttgaattggctccgtttaaattgagttcctgatctaggagaacaaagaaagttattattctttctcccttacagtttctggcacccaacataggacagctgagacactgcagtcacacatgtacctgcagatgaggtcttgggacaacagacaaaaagctgggaacgaggtaaaaatattttactaatatcagctctcctggatctgtgcctggagtgcccagttgagagtgaaaggtaaatattccttcatgtcccttcctttccaaatttagtttagcaggagaaaatcatttgtttggattgtgactcttgagtccttgttctgagtcatttgttagatattgcttttcccttgttaatctgtcttctgttataagggtgccagccatgaaccttcttttctcccctgctgctttgtgggggacattcctggataggaaggacagtcttgatgtttttgtgattatacttttcagagggttccttcgtcttyctcatgaatacatttcatgatgcatgtgtcctctctgtatgaccacacaggtctgaatccatatatttagcctttgattatcttcctttttcatatctgtaatgccatgcacatgctattcttgaaatattatttgacccttttctttgctatgaacatgttcctatcgatgtggatcaaggtgagaagatgtttacaaatactagagaagccaccagttcccagctgaagttgcattgcctggaggacctgagatgaggagaaaaatgactgagcaaggtggagcaaaggagaagaaagacatttgaatgtactggattaatatatttggctttatattatacagagttatatagaatcatgaaatgttttatgtcctatgttttggattgagatatacctcacataatgactggtaaatcaatgatagtgcttcatcaaatttcccctgtgcaaacaggagcgaagagaagctatagtgagctccaaaaagaatgctccaaggaagatatccagggacttattatacttcactttagagctgtgatagcagcttgcctgaattgagatatttaccttttcaattcagtcctggtggcatagcaatgtttgctgctccatattctggaaataatgttgattgggctaatgtgtaatatttgctatggcaacttcggccatctccttgctatatgtatacatggattatttgggactaaacacacaaacccggtgaggcatttttaaaggctaaattaaatttaacttgtttttaaaacaaaaggtgacataattgttaaccagttactatcaaattttctttttgttttccccacgcatttttctttgaggatgaagttgtagggagtggtcctggtttaaatttgggtcctttagcctccagtctatcttgctaaaaaactcattccagcaggcttcttcacattcccattgtctcacatctagaactagacattgcttagacgtaaacatgcaagtatagtcatgca

SEQ ID NO: 708962 - DNA, 1033 bp, Homo sapiens
tttgttctctggtaaattttaagatagaagcagggagaaataaataaacatctttacaagagcaatgtaatctgcctgtgctgtatttatccttcaataatcttggaacaaaatggtctgcttgagaggaaatgtaagaaaccttaatcggggttttggaacttttaaaccaaacagtgctgtcacagcaattgatggtctcccattgaagacttgactctgtggttgtttttcttcttcagcaagacattataagtaaatccctttgttcattcttaagatgtgaagacacatcagaaaaaaaaaataaagagggaaataacattcctctcttttctaggaaactaaatagggatttgtgtttgtaatgtttgtggtttggcagacccatatccaaagaagaaaaataagtatttgttagtttccaagggagaaacatttgtattaggcaatccaactcatttgtctgagagaaaagccttaaagaatgtaatacattcttttatgattgagatccaaaaaagaatgggactgaggtcctggaaagagaatcttgaaagaaaaatggaacagatctgagtccagatacagccagacttctcacccctatcccaatataggtaacaagctttgtttgtgacccagaagggcccagaggcagtaaactggggaaaaaatattttgaggtacaccacttgtttacactagagaacccattccaaattgccccaccatgtaaggaggtttatcaatgtttcctcattttgttgtcaccattcagtcgtcttatcaccatgttaggataatttcagaaaagtattccattatgtttgaagacatagagaaatagtcactacttagctattttattaccatgttagtataatttcagaaaactatttcattatgtttgaagactggacacataatggtttgaggsggatgcctaagtttccaaaatgtgtggacataatttgataaattgatgtcttattctagcaatcaaaataatgaatacatcttttatatgtac

SEQ ID NO: 708963 - DNA, 639 bp, Homo sapiens
taatacaagttactgatggtgatgtcctggacctagagaagaagtcaggaaaagagttgttggaggaaggagctaatgcatattgtttgggacatatggtaggtacaattgaaccgtagttatatactgtcttgtgttgaaactttgagataattcaggtgctattctttgcttttcttggatcgtacagagattcctttcatgagaaccttcatgagagccctctggacaggcacaggccagagtagagacttgayagttaacattttagacagtaggagttgaggtggcaaggtgtactgaaatagaaacaagaaattgttaagtgtgagtaccagaggtttggctgtggggatacatctttttatttaatacttgtgttagttatctgatactatctaataatgcataacagattataaatttagtggcttatttgcatttattatctcctagttactgtaggttagggagttcgggcctggtttagctaggttttctgcttcagggtctcactaggctgcaatctaggtgttggctggggttacaatttcatcagaggcccaactggggaagattctgcttctcagctctttcaggttgttggcagaacccttacagtggtaggacagtccaccc

SEQ ID NO: 708964 - DNA, 1113 bp, Homo sapiens
tgaaaaatcttgagtgctcaaactacatgtaatttaaaatgtaatagtagttatataccagacattgttataagactttacatgtattatctcctttaatcatctcaaaaaatcctgtgaagttttacaaatgaagaaacagtttaaaaggtcgagggagttttccaaagtcatcagcttataagtgacggaggtaggattcaaaaccaagtatcctgactgcgaagcctgtgctctgaataattaaactgtgctgcctcccaaagaggctgtaactaccatatttactagtatgtaaggcacaaggataaaacatcacatatttagaaggctattgggggatgtatgttttgactagtacacagttagtttggtacttctttttgtaatgttggttttcatcaaatatgttgtgattctttagcatattggtaggtcaggtctaacacagtattggtagctacaatgtgtttacttagcacaaagtgagaaccctgtccatctccatattcatcatcagattatatatttcttttccagtgtgcaggtagcttggcctatgggcattaggcttccagtgtctcctggtgatcctaaacactgcccttcattttgaaactttgaaaacagtggcttcttaygtcactgtttgctcagcctggttttctcagccgattgatgatagtgtcctgctttactaacccctgcagtttcttatctggagttatcttggagttctgatggaaatacactttttcagaagtcttcttttttaccaaaataagaatatgagttctcagttggtttttgcattcagtatgtttttgtctgccttaaatctttgagaaattcttcattgttctagtctgtcagtggtatctcttctggctttgtggcattactacaaatttaacttttatggtttttgacctgggatttggaaaggaaagcatgtttcttcattcagccatctttaaccagaattccctgttcctcttgtttctgaactcttggtagtgcaagtccatggtgtctgtctgcaattctgaaatcctaaaggctttgaaattccaaaattttttccaaaatttatttttgtgaccaatctgattg

SEQ ID NO: 708965 - DNA, 635 bp, Homo sapiens
agataaacttctctcaagcagcataccaagtgtttgcaggatgggtgggaagaaagaagagcatgtgactgattatagggaaaaggacacatttgagttaaattttgttaaggattaacattaatttgtcagatttcagtcaacaagaagaaccggctcctaggtttttattagcacccatcccagtacttggcaggaggttttcgctcgacagatcatagctctcctactgctcctagctttgttgggaatgtttgtgtattttttcaaggcaagtagacagggctgctaaattaccttaatcttgaaacaactggatgccaccgcagctttccttaatttgccctcgttgctgcctgaagttgctctaagtgaatatttacctaacaatgtgatagaaaggtagtgctcctgtttctttcctagtggtgcttttcctgtattgtcaactcagcacatctttccagggcctttcttggagctacttggactcactacactctgggttaataggtctcttcactgtctttcagttttgggaaatttttagcctctgaattttcagggtgttcaaatgagatttcagtttggtgttaaagattgttaagttttagaccttttagtatccacrtaaa

SEQ ID NO: 708966 - DNA, 1760 bp, Homo sapiens
tgagaatgaacagcagggacagtattggcctctaacacacactaagccttggacgccttgctggttctcaggacagctgatgtggatgctgcgcatggcattattgggcccagacatcaggagcctgactgttactgtaatcctgggagccagtggagctctggcttctgcacagcatacttcacttttgagttttcccttttccactgagtccttcttagcaattttttgactgcagcaatcggttagaaattcgagggcctcctcttgcttcctctcccttagaaaaccccgagatggcagtgtgggcatgagctctggcaaacatggtgttaggcatgctgctttaggtcatgacaacaaatattccacctttcccagggcaacctttccatcaatccaaagatgtcttactattcagggaattaaagataccttctacttaataaaacgtatgctttctagtaatgtgctgtgcttgcctatgacacaccgctgacccctggaagaactcattcccacccttgagaagcaatcatcatctcaggaagaggtcccaaagtccactcgccacgcctcaggcactgaaggagtgcttgacctcaccaccatccgaccagcccatcagtgccaagaaccgaaccacacttatgggtcaaaaggaccggccaggaacccagcaccttcttcatgtcttgttagtgcctgggtctcactcagggatcagtggtgcctgcagtagtggggatggtgagcagctccctgaagatgcaggactatggtggtccaaccatctccctaagaagctctgttctgaaaatctgattaacaaatgtccaaatgcacttttaacattattatattataggaatgattccattctggagtacaatttcaccaccacgctatacctcaggtacacgatggggtaaaaaggatgctgttggcaggaacagaaaaccaaacacacatgttctcattcataaatgggagctgaacaatgagaacacatggacacagggagaggaacatcacatactagggcctgtcagggagtgggggactaggggagggatagcattaggacaaatgcctaatgtagatgatgggttgatgggtgagcaaaccagcatggcacgtgtatrcctatgtaacaaacctgcacattctgcacatgtatcccagaacttaaagtataattcaaaaaaaaaaaaagggatgttgttggaaggcctagagacagaaccatcatatagtattttttttctaggacacagtcaaaactacacaactcactctgggactgttagaacccaactcattcatggatcatgcactgccagcaattatctagaaatcataagttgaaaagtgcttcaaatttggcctaaattatgtgcagataattattgtaattagaaaagtaatgcagctcagaaaacctgcacatagaagtgtgataaaataatcttagtattgaatgacaaggacacacacatagttcaaacacaattctagtttcagaaagcccttggggaaaaggagaatatcattaaggtctccagattattaattaagccacctgctttattctgatagtaaggctttcttgttttttatcccattaaggtaaaattttcttttgaggaaggaaatttaggataatagtcattttacctctttatgccaaatttattgaacctatgtggctgttttcctttaaacaattgtatcataacatttttgagaagtaatctatt

SEQ ID NO: 708967 - DNA, 1760 bp, Homo sapiens
tgagaatgaacagcagggacagtattggcctctaacacacactaagccttggacgccttgctggttctcaggacagctgatgtggatgctgcgcatggcattattgggcccagacatcaggagcctgactgttactgtaatcctgggagccagtggagctctggcttctgcacagcatacttcacttttgagttttcccttttccactgagtccttcttagcaattttttgactgcagcaatcggttagaaattcgagggcctcctcttgcttcctctcccttagaaaaccccgagatggcagtgtgggcatgagctctggcaaacatggtgttaggcatgctgctttaggtcatgacaacaaatattccacctttcccagggcaacctttccatcaatccaaagatgtcttactattcagggaattaaagataccttctacttaataaaacgtatgctttctagtaatgtgctgtgcttgcctatgacacaccgctgacccctggaagaactcattcccacccttgagaagcaatcatcatctcaggaagaggtcccaaagtccactcgccacgcctcaggcactgaaggagtgcttgacctcaccaccatccgaccagcccatcagtgccaagaaccgaaccacacttatgggtcaaaaggaccggccaggaacccagcaccttcttcatgtcttgttagtgcctgggtctcactcagggatcagtggtgcctgcagtagtggggatggtgagcagctccctgaagatgcaggactatggtggtccaaccatctccctaagaagctctgttctgaaaatctgattaacaaatgtccaaatgcacttttaacattattatattataggaatgattccattctggagtacaatttcaccaccacgctatacctcaggtacacgatggggtaaaaaggatgctgttggcaggaacagaaaaccaaacacacatgttctcattcataaatgggagctgaacaatgagaacacatggacacagggagaggaacatcacatactagggcctgtcagggagtgggggactaggggagggatagcattaggacaaatgcctaatgtagatgatgggttgatgggtgagcaaaccagcatggcacgtgtatacctatgtaacaaacctgcacattctgcacatgtatcccagaacttaaagtataattcaaaaaaaaaaaaagggatgttgttggaaggcctagagacagaaccatcatatagtattttttttctaggacacagtcaaaactacacaactcactctgggactgttagaacccaactcattcatggatcatgcactgccagcaattatctagaaatcataagttgaaaagtgcttcaaatttggcctaaattatgtgcagataattattgtaattagaaaagtaatgcagctcagaaaacctgcacatagaagtgtgataaaataatcttagtattgaatgacaaggacacacacatagttcaaacacaattctagtttcagaaagcccttggggaaaaggagaatatcattaaggtctccagattattaattaagccacctgctttattctgatagtaaggctttcttgtkttttatcccattaaggtaaaattttcttttgaggaaggaaatttaggataatagtcattttacctctttatgccaaatttattgaacctatgtggctgttttcctttaaacaattgtatcataacatttttgagaagtaatctatt

SEQ ID NO: 708968 - DNA, 692 bp, Homo sapiens
aagatcacagatcccagaagctcaggatagcttgagaaggataaacaacagacaaccaaaaatatcctcaaatgtctaggggaaaaaataaagagaaaatcttgaaagcaaccaggagaaagaagcattacacattgcttacagaggaacaccaaagagaatctcagcacacttctcctcrgaagttacacaagccagaaggtaatagagggacatctttaaaataatgaaagagaaaatgattgtcagagagaatttcatactcagagaaaatatcttccccagaaaaggtaaaataaagattttccagaccaaaaaacaagctgagaaaatgtattaccagcagttctgctgtacatgaaatgctaaaattcttcaggcaggagtgtgatgccaaacggtcatttggattacacaaagaaatgaagctctggaaatggtaaaatacaggtaaatctaaaacacgttttaatttttattcactttaaacgtataactgaggtcaaacactgaaacagtaacagtacactattcagtctctcacatattgtgttaggcagaataatagaccccaaagatgtccacatcctaaaccctgaaaccttcaattatatcatcttccatggcagggggacttggcagatgggattaaattaaggactttgtggtgggaaggttttcctggcttatct

SEQ ID NO: 708969 - DNA, 692 bp, Homo sapiens
aagatcacagatcccagaagctcaggatagcttgagaaggataaacaacagacaaccaaaaatatcctcaaatgtctaggggaaaaaataaagagaaaatcttgaaagcaaccaggagaaagaagcattacacattgcttacagaggaacaccaaagagaatctcagcacacttctcctcagaagttacacaagccagaaggtaatagagggacatctttaaaataatgaaagagaaaatgattgtcmgagagaatttcatactcagagaaaatatcttccccagaaaaggtaaaataaagattttccagaccaaaaaacaagctgagaaaatgtattaccagcagttctgctgtacatgaaatgctaaaattcttcaggcaggagtgtgatgccaaacggtcatttggattacacaaagaaatgaagctctggaaatggtaaaatacaggtaaatctaaaacacgttttaatttttattcactttaaacgtataactgaggtcaaacactgaaacagtaacagtacactattcagtctctcacatattgtgttaggcagaataatagaccccaaagatgtccacatcctaaaccctgaaaccttcaattatatcatcttccatggcagggggacttggcagatgggattaaattaaggactttgtggtgggaaggttttcctggcttatct

SEQ ID NO: 708970 - DNA, 692 bp, Homo sapiens
aagatcacagatcccagaagctcaggatagcttgagaaggataaacaacagacaaccaaaaatatcctcaaatgtctaggggaaaaaataaagagaaaatcttgaaagcaaccaggagaaagaagcattacacattgcttacagaggaacaccaaagagaatctcagcacacttctcctcagaagttacacaagccagaaggtaatagagggacatctttaaaataatgaaagagaaaatgattgtcagagagaatttcatactcagagaaaatatcttccccagaaaaggtaaaataaagattttccagrccaaaaaacaagctgagaaaatgtattaccagcagttctgctgtacatgaaatgctaaaattcttcaggcaggagtgtgatgccaaacggtcatttggattacacaaagaaatgaagctctggaaatggtaaaatacaggtaaatctaaaacacgttttaatttttattcactttaaacgtataactgaggtcaaacactgaaacagtaacagtacactattcagtctctcacatattgtgttaggcagaataatagaccccaaagatgtccacatcctaaaccctgaaaccttcaattatatcatcttccatggcagggggacttggcagatgggattaaattaaggactttgtggtgggaaggttttcctggcttatct

SEQ ID NO: 708971 - DNA, 692 bp, Homo sapiens
aagatcacagatcccagaagctcaggatagcttgagaaggataaacaacagacaaccaaaaatatcctcaaatgtctaggggaaaaaataaagagaaaatcttgaaagcaaccaggagaaagaagcattacacattgcttacagaggaacaccaaagagaatctcagcacacttctcctcagaagttacacaagccagaaggtaatagagggacatctttaaaataatgaaagagaaaatgattgtcagagagaatttcatactcagagaaaatatcttccccagaaaaggtaaaataaagattttccagaccaaaaaacaagctgagaaaatgtattaccagcagttctgctgtacrtgaaatgctaaaattcttcaggcaggagtgtgatgccaaacggtcatttggattacacaaagaaatgaagctctggaaatggtaaaatacaggtaaatctaaaacacgttttaatttttattcactttaaacgtataactgaggtcaaacactgaaacagtaacagtacactattcagtctctcacatattgtgttaggcagaataatagaccccaaagatgtccacatcctaaaccctgaaaccttcaattatatcatcttccatggcagggggacttggcagatgggattaaattaaggactttgtggtgggaaggttttcctggcttatct

SEQ ID NO: 708972 - DNA, 692 bp, Homo sapiens
aagatcacagatcccagaagctcaggatagcttgagaaggataaacaacagacaaccaaaaatatcctcaaatgtctaggggaaaaaataaagagaaaatcttgaaagcaaccaggagaaagaagcattacacattgcttacagaggaacaccaaagagaatctcagcacacttctcctcagaagttacacaagccagaaggtaatagagggacatctttaaaataatgaaagagaaaatgattgtcagagagaatttcatactcagagaaaatatcttccccagaaaaggtaaaataaagattttccagaccaaaaaacaagctgagaaaatgtattaccagcagttctgctgtacatgaaatgctaaaattcttcaggcaggagtgtgatgccaaacggtcatttggattacacaaagaaaygaagctctggaaatggtaaaatacaggtaaatctaaaacacgttttaatttttattcactttaaacgtataactgaggtcaaacactgaaacagtaacagtacactattcagtctctcacatattgtgttaggcagaataatagaccccaaagatgtccacatcctaaaccctgaaaccttcaattatatcatcttccatggcagggggacttggcagatgggattaaattaaggactttgtggtgggaaggttttcctggcttatct

SEQ ID NO: 708973 - DNA, 652 bp, Homo sapiens
tctctctctcatcacccctctctctccctccctccctgtaagctggcagcattttgggtgggggctgccctgtcagcctggcccccgtgaagacagctctgagctgcaggaccgatggcaggcatgtaggtgagcgggacatgagtcctgggatttcagggctgttgtgacctggtgctagtccttcctgacaaccccagtgtgttcctggttcctgccgcaggaaatctgccctcactgctccacgcgccaggacgtgcactcctcctcctctttccgcacctrtctcccggctgcggctgctcacttgtacctgcaccattacttactgctgtattctttgctttttccagactgatgcacccaccagctgcaaatcttaggccagctacacccaacacagttgaatattgtggacaagctgtgccagacaaaatcatacatgatttcacttctaaaagcaggcaaaactgtcatgtttagtgaaccatatgtagtttgtaaaatagtaaaagcaaaacaaaatgattattgcaaatgtcaagatagttgtttcttttagggggaggaagaattttatggccggggagggctggcctggatgctggctttgtgttgcttcttgaccacgatgatcaccttgcaattgtct

SEQ ID NO: 708974 - DNA, 652 bp, Homo sapiens
tctctctctcatcacccctctctctccctccctccctgtaagctggcagcattttgggtgggggctgccctgtcagcctggcccccgtgaagacagctctgagctgcaggaccgatggcaggcatgtaggtgagcgggacatgagtcctgggatttcagggctgttgtgacctggtgctagtccttcctgacaaccccagtgtgttcctggttcctgccgcaggaaatctgccctcactgctccacgcgccaggacgtgcactcctcctcctctttccgcacctgtctccyggctgcggctgctcacttgtacctgcaccattacttactgctgtattctttgctttttccagactgatgcacccaccagctgcaaatcttaggccagctacacccaacacagttgaatattgtggacaagctgtgccagacaaaatcatacatgatttcacttctaaaagcaggcaaaactgtcatgtttagtgaaccatatgtagtttgtaaaatagtaaaagcaaaacaaaatgattattgcaaatgtcaagatagttgtttcttttagggggaggaagaattttatggccggggagggctggcctggatgctggctttgtgttgcttcttgaccacgatgatcaccttgcaattgtct

SEQ ID NO: 708975 - DNA, 652 bp, Homo sapiens
tctctctctcatcacccctctctctccctccctccctgtaagctggcagcattttgggtgggggctgccctgtcagcctggcccccgtgaagacagctctgagctgcaggaccgatggcaggcatgtaggtgagcgggacatgagtcctgggatttcagggctgttgtgacctggtgctagtccttcctgacaaccccagtgtgttcctggttcctgccgcaggaaatctgccctcactgctccacgcgccaggacgtgcactcctcctcctctttccgcacctgtctcccggctgcggctgctcacttgtacctgcaccattacttactgctgtattctttgctttttccagactgatgcacccaccagctgcaaatcttaggccagctacacccaacacagttgaatattgtggacaagctgtgccagacaaaatcatacatgatttcacttctaaaagcaggcaaaactgtcatgtttagtgaaccatatgtagtttgtaaaatagtaaaagcaaaacaaaatgattattgcaaaygtcaagatagttgtttcttttagggggaggaagaattttatggccggggagggctggcctggatgctggctttgtgttgcttcttgaccacgatgatcaccttgcaattgtct

SEQ ID NO: 708976 - DNA, 618 bp, Homo sapiens
aggcgcatgccaccacgcccagctacattttgtatttttagtagagatggggtttcaccacgttggtcaggctggtctagaattcctgacctcgtgatctacctgcctcagcctcccaaagtgctgggattacaggtgtgagccaccawgcccagcctttttttttttttctttaagatgaagtctcactctgtcgcccaggctggagggcagtggcatgatctcagctcactgcaagctctgcctcccgggttcaagcgattctcctacctcagcctcccgagtagctgtaatcccgagattacaggcacccgccaccacacccagctaacttttgtatttttggtagagacaaggttgaaataaggatgtaactgcaggtgacttctaccctcaagggcaggctgctcatttggacagatcattctaaagggtggtgctcattgttccatctgtacagtattcatgggcagcctcatgttggccctgcaagtgaaggtcctcttgaacacccttgtaacaggcaggatcacccttggaggtggccatggaagagaaaatcacttgggtgagcagatgcagaaaaggtgctgagagaaggtggactttgaattattc

SEQ ID NO: 708977 - DNA, 785 bp, Homo sapiens
actagagaatatttctattagtaattaatgtttttattggggtataagtgattttaatttaccatctgtgaaatgaatgttacaaaagcagcacataaagctctttagttrtctattttctatttccatttcaatgctctcattttattttgctgccagcaatacttttgagagccagttgttaccttgatttaagatgaattcacaacagaagcattttaatatcaagactgacttgagttaatccaatggtgtaacctaacaactatcaagccattcactttggtaaccttggtgagaacagtttcagtgggaagctgtagtagaaactttttgcaagtggttaaaaagtgagcaagaatgatggggtggatattttaagtgcaaataacttttaaagaaggttgattggaaaatgaaggaaaatagttgatgtagaaaccaatggtggtcttatgtgatatccactaattgcactataaccaacgagaatcactccctgtaagttttaaaattctctcacttcacttaactgaagttttacctattctgcattctgttttcccatgcttgtcaggtagcattttgctcaactgacaaattaacctgtgatctatggataatagcaagttaccagtttattgttcaaggtaatgtaataatacactcactctccagtaagttcaaacaaacacctctaataatgaaagtggtactggggaatgaatactgagggtgattgaattatctggcatctctggaatgacacaactaacaggtctaca

SEQ ID NO: 708978 - DNA, 785 bp, Homo sapiens
actagagaatatttctattagtaattaatgtttttattggggtataagtgattttaatttaccatctgtgaaatgaatgttacaaaagcagcacataaagctctttagttgtctattttctatttccatttcaatgctctcattttattttgctgccagcaatacttttgagagccagttgttaccttgatttaagrtgaattcacaacagaagcattttaatatcaagactgacttgagttaatccaatggtgtaacctaacaactatcaagccattcactttggtaaccttggtgagaacagtttcagtgggaagctgtagtagaaactttttgcaagtggttaaaaagtgagcaagaatgatggggtggatattttaagtgcaaataacttttaaagaaggttgattggaaaatgaaggaaaatagttgatgtagaaaccaatggtggtcttatgtgatatccactaattgcactataaccaacgagaatcactccctgtaagttttaaaattctctcacttcacttaactgaagttttacctattctgcattctgttttcccatgcttgtcaggtagcattttgctcaactgacaaattaacctgtgatctatggataatagcaagttaccagtttattgttcaaggtaatgtaataatacactcactctccagtaagttcaaacaaacacctctaataatgaaagtggtactggggaatgaatactgagggtgattgaattatctggcatctctggaatgacacaactaacaggtctaca

SEQ ID NO: 708979 - DNA, 643 bp, Homo sapiens
tgttttaattcctaaaacactattttcaaaaaggacattacggttaaattgtctgataaaagtaaggtggatttcttaggataattgaaatgtatgcattgacactaaaacttgtgaatgggcttactttctatatgctatgtgtttaaaaattctggccaggtgcggtggctcacgcctgtaatcccagcactttgggaggctgaggtgggtggatcacctgaggtcaggagttcgagaccagcctggctaacacggtaaaacgccatctctactaaaaatacaaaaattagctgggcgtggtggcgggcgcctgtaatcccagctagttgggaggctgaggcaraagaatcgcttgaacctgggaggtggaggttgcagtgagctgagatcatgccatcacactccaacttgggcaacagagccagacttcgtcgcaaaaaaaaaaaaaaaaaaaaatccgagagttaaacgaatatttaccttttttgttctaagagcacgttcagtgaacattttctacttagaaaaattttgcaatatatttttcaagtattttagaatgttttaacttcataaagtacttagtgtcatagttgttttgtttgttcttttagaatattatatgtgaaattaaaacctt

SEQ ID NO: 708980 - DNA, 643 bp, Homo sapiens
tgttttaattcctaaaacactattttcaaaaaggacattacggttaaattgtctgataaaagtaaggtggatttcttaggataattgaaatgtatgcattgacactaaaacttgtgaatgggcttactttctatatgctatgtgtttaaaaattctggccaggtgcggtggctcacgcctgtaatcccagcactttgggaggctgaggtgggtggatcacctgaggtcaggagttcgagaccagcctggctaacacggtaaaacgccatctctactaaaaatacaaaaattagctgggcgtggtggcgggcgcctgtaatcccagctagttgggaggctgaggcagaagaatcgcttgaacctgggaggtggaggttgcagtgagctgagatcatgccatcacactccaacttgggcaacagagccagacttcgtcgcaaaaaaaaaaaaaaaaaaaaatccgagagttaaacgaatatttaccttttttgttctaagagcacgttcagtgaacattttctacttaraaaaattttgcaatatatttttcaagtattttagaatgttttaacttcataaagtacttagtgtcatagttgttttgtttgttcttttagaatattatatgtgaaattaaaacctt

SEQ ID NO: 708981 - DNA, 1177 bp, Homo sapiens
tgcccctcctgccacctctattttatagatgaggaaaccgaggcccaagggcttagggaaccctgctctgaagcacacagtagggctgctgggctcagatcctccctccctgtgctgagctgccctcctcctgccacaatccccccacgacccgagcccacccttctcaccggcctctgccctagttccccgcatggtgtgggagtgtggggcatcctagcttttccccggcccccagttctttcacttccactggagtcctgtagggacagcttggggaccatgcaggcccgggtgggcgtgggggctcacatagctcggtggtgaacagctggcacatctctgggttgcagacggtaagggccatgtagaattgaggagcccgctggtgctcccggcaggcagccagcctccgcaggaccccgaccagcgacacgatggcttctgggcaatacagcacgtctacggtgaaagcttcaggttactgaaagggaccagcggacagttccaggtcatgctgacctcagcagaagggcgaggccagagaggcagcggtcatatgagactagtagatgccatttgatcatttgggccattagatggaaaggcaattacttgggtgaaaaaggagaacccttaatagagaaagctgcaaaagactgaagcaaaagaaaaaaatctccagactcactggtgttccttaaaaaacgwgctctggttctcggcctatctagagggctgtgaatgacacaaagcctgaccctgcgatgaacttcgtgtttcaggtgtctgcggatttgtctgctggcttgcaggggtgggcctgtgtccctggccactgctggacctgtgattttcagggctgggacccaggaccacaggcagagctctgttcgaccagagaggagactgagcgtgctggcaggggtgaggggttttccgtggcccagccaaacaccaccttctctcaagggccctgtccttatcccagaagtggttgttttcctcctgtggtctctgaaacacacaggcatggctctgggacagagccatgtggtgacgactgtaacgggagtatgcctgtctccaacaagagggctgtggcttgaaggtcagcttaagaggcacccctgtcctttgatgtcaccctggaggcccagagtaactcttctggaag

SEQ ID NO: 708982 - DNA, 1177 bp, Homo sapiens
tgcccctcctgccacctctattttatagatgaggaaaccgaggcccaagggcttagggaaccctgctctgaagcacacagtagggctgctgggctcagatcctccctccctgtgctgagctgccctcctcctgccacaatccccccacgacccgagcccacccttctcaccggcctctgccctagttccccgcatggtgtgggagtgtggggcatcctagcttttccccggcccccagttctttcacttccactggagtcctgtagggacagcttggggaccatgcaggcccgggtgggcgtgggggctcacatagctcggtggtgaacagctggcacatctctgggttgcagacggtaagggccatgtagaattgaggagcccgctggtgctcccggcaggcagccagcctccgcaggaccccgaccagcgacacgatggcttctgggcaatacagcacgtctacggtgaaagcttcaggttactgaaagggaccagcggacagttccaggtcatgctgacctcagcagaagggcgaggccagagaggcagcggtcatatgagactagtagatgccatttgatcatttgggccattagatggaaaggcaattacttgggtgaaaaaggagaacccttaatagagaaagctgcaaaagactgaagcaaaagaaaaaaatctccagactcactggtgttccttaaaaaacgtgctctggttctcggcctatctagagggctgtgaatgacacaaagcctgaccctgcgatgaacttcgtgtttcaggtgtctgcggatttgtctgctggcttgcaggggtgggcctgtgtccctggccacygctggacctgtgattttcagggctgggacccaggaccacaggcagagctctgttcgaccagagaggagactgagcgtgctggcaggggtgaggggttttccgtggcccagccaaacaccaccttctctcaagggccctgtccttatcccagaagtggttgttttcctcctgtggtctctgaaacacacaggcatggctctgggacagagccatgtggtgacgactgtaacgggagtatgcctgtctccaacaagagggctgtggcttgaaggtcagcttaagaggcacccctgtcctttgatgtcaccctggaggcccagagtaactcttctggaag

SEQ ID NO: 708983 - DNA, 733 bp, Homo sapiens
atgattttcaatcacggttttttgttacgagtggaaaatgcgtatttataaaaatgaagtagtatagacatgaacatgtagcaatctctataatcctgccatccaaggatggcacctgttaacgtgtatatcaacgatgtccaatcttttggcctacatgcgccacattggaagaagaagaatcgccttgggccacacataaaatacactaatgctagcaatagctgatgagctaaaagaaaaaaatcacaaaaaaatctcatattgttttaagaaagtttacagatttgtgtagggccacaggttggacaagcctgctatatatatgttctaggttttctcctataggtatacttatgtgaaaatgattattgtgataatttttttttgagatgaagtcttgctatgttgctcaaggtggccacaaactcctgggcttaagccatcctcccacctcagcctcctgagtagttggaatataggtactcataaccacgtgtgggtgattattattagtttttaaacaaaaatggggctgggtgcagtagctcacgcccgtattcctaacactttgggatgctgargcagcagatcacttgaggtcaggagttcaagatcagcctggccaacatggcgaaacctcaactctagaaacaatacaaaaattagccaggcgtggtagcacgcacctgtagtcccagctactcaggaggctgagatgagaggatagctt

SEQ ID NO: 708984 - DNA, 1632 bp, Homo sapiens
tcattagcagtgcctgtgtttggctgctaggagacattgtggggaaaaaaaaatctttgttgcttgagtgggggatggaaggagtgaagagaccaatgaatatgtatattatgtactgaagatgtgttttcttagactagtacactggcctgtctgcacatgtgcatgcaagattttaaaagattaatctttgtatttacaattatccttctaagtttattatatggaaatagattacagaaacaataggaaagttgtaccccaaaatatttatcatggctcattcaggacacctaaaattgtacaattcatagtgattttatttattctataattttttttcttattccattgtatgctccaggtgggaaacttggatgcttgaataatacataaaagaagcataggaggaaaaaaattcagaaatttcctgtgtactcatcatgtaaagataacagcttttaacgtgttgttgtatgcccttttagtgttcttttcattccagagaacacacacacagtcacatacggttttacaaaaatatcattttatatgtactgtcttatagactacattttataatgtggcattgtcattacgaacattttcttgtgtctaacatcatttttattagtcacataatatttcagtgattgtatttcctatggttcatttaaccaaactccaatttttattcacgcatttaggatgtttactttttttgctattaataatgttggaatgagtatccttgtacattcatctttcagtccttgtccaattatttccttagagcaaactcctagaagcagaattacccacttaaaggtctttcacatgctgcgtcgtgttttctttcagagagaacagaacaatttccatttgtaccaatagcgaatgaaggtaccctatgatcttctttataaataagactggaaaagatcatgaagttcccaatgtccaatatctgagttttatcagagacttcccttaatgaggctaaaacgagagccctggctccctttgatggggagggcacatattctcaaagaggggaatctgggctgcagaagacttatgattttgacttgacccagctaagtattttcaggaaatttgtcctccatagccccaaagtgcagcgtgaaaccagccagcatccaggtgctccctgcagtgagagtgtacaccactggcctccagactcttgcccatcctgtgttcccgatgtttctgcccacccccctcccctgcccacagatctagttttagtctcatggctctggttgccccaagccccagctccaggaagatgacagagggatcaggcaagccctgaggtgagtggtaagcttgtctctgggaaagagagaggacaggtctcagttccctkgggagtcctgaggaggaagacaatgtagtatcagcaaaggccaggggcacctgtgacctgagaaacaggtgactagaaaaccaaaccaaactgctccagattagggcagtccttccagttctgttctaattaagaacagtttcctttgtactcctagaaaacagaaccccccccaccctcaagctaggtgggacaggaggtggggcagaagagtgaaaacagaaggcctatttggcccc

SEQ ID NO: 708985 - DNA, 1632 bp, Homo sapiens
tcattagcagtgcctgtgtttggctgctaggagacattgtggggaaaaaaaaatctttgttgcttgagtgggggatggaaggagtgaagagaccaatgaatatgtatattatgtactgaagatgtgttttcttagactagtacactggcctgtctgcacatgtgcatgcaagattttaaaagattaatctttgtatttacaattatccttctaagtttattatatggaaatagattacagaaacaataggaaagttgtaccccaaaatatttatcatggctcattcaggacacctaaaattgtacaattcatagtgattttatttattctataattttttttcttattccattgtatgctccaggtgggaaacttggatgcttgaataatacataaaagaagcataggaggaaaaaaattcagaaatttcctgtgtactcatcatgtaaagataacagcttttaacgtgttgttgtatgcccttttagtgttcttttcattccagagaacacacacacagtcacatacggttttacaaaaatatcattttatatgtactgtcttatagactacattttataatgtggcattgtcattacgaacattttcttgtgtctaacatcatttttattagtcacataatatttcagtgattgtatttcctatggttcatttaaccaaactccaatttttattcacgcatttaggatgtttactttttttgctattaataatgttggaatgagtatccttgtacattcatctttcagtccttgtccaattatttccttagagcaaactcctagaagcagaattacccacttaaaggtctttcacatgctgcgtcgtgttttctttcagagagaacagaacaatttccatttgtaccaatagcgaatgaaggtaccctatgatcttctttataaataagactggaaaagatcatgaagttcccaatgtccaatatctgagttttatcagagacttcccttaatgaggctaaaacgagagccctggctccctttgatggggagggcacatattctcaaagaggggaatctgggctgcagaagacttatgattttgacttgacccagctaagtattttcaggaaatttgtcctccatagccccaaagtgcagcgtgaaaccagccagcatccaggtgctccctgcagtgagagtgtacaccactggcctccagactcttgcccatcctgtgttcccgatgtttctgcccacccccctcccctgcccacagatctagttttagtctcatggctctggttgccccaagccccagctccaggaagatgacagagggatcaggcaagccctgaggtgagtggtaagcttgtctctgggaaagagagaggacaggtctcagttccctggggagtcctgaggaggaagacaatgtagtatcagcaaaggccaggggcacctgtgacctgagaaacaggtgactagaaaaccaaaccaaactgctccarattagggcagtccttccagttctgttctaattaagaacagtttcctttgtactcctagaaaacagaaccccccccaccctcaagctaggtgggacaggaggtggggcagaagagtgaaaacagaaggcctatttggcccc

SEQ ID NO: 708986 - DNA, 635 bp, Homo sapiens
tatctggtagggctaataccccatgttgtgctgaactccagtcaactccaatggggacaggaccagattcaagaggcccaagaagagacccagagtcagcgagctagacatgggattttactggggacatacctacaggggattgagtccagtagcagtggggtgggcaggagaaccgcaatcacttgcaaaagtcatgtagtttacattaaaagtcttcataayaaaaataccataaaccaagttttcactcagtgccctccccctaacaacctccacctgtcaaccttcactcaaagcccaaaacaaatggactcatttccacaggagcgtgctggagctcagatgttcctcatagataggaaatgcatctggggattggccactgcctgattccttagctgggaactgtgaactgtattcaggtgtgtctgccttacagggtcgttctcagagtatgcttaagttattgctatcaggtgcgtttaccgtataccacccctcccctccactctaccaggctgctactctaccaggaatattgtggcccttcttgcattttatttttttatttgaaattcacagtctgatatggtttggctgtgtccccacccacaatcttatcttgaattata

SEQ ID NO: 708987 - DNA, 660 bp, Homo sapiens
tggggttgtcagcatccatgagtcgctgttgcagtaggtgctgacatctactcttctatgttgaagtgagagctggggccctcatgtttgctgggagaggggagtagggttgttggaagatgcttgctagggccatgaagggaagtaaaagggcagtgtgcatgatagatagacaagatttgacttattcaaacttgtccaacccctggcccagcacaaatttgcaaactttcttaaaacattatgaggttttttttttttgcgatttttttcttttggctcatcagctatcattagtgttagtgtattttaggtgtggcccaagacaattattcttcttccaatgtggcccagggaagccaaaagattgggcayccttgttttagataatgcaaggtgtaccatgtgtaagagccatttgaaatgcctgagttctctgttgagcactctgtggacctgcactctgggggaacacaggagaagacacagctcttgtcctcagggagctccttttccagaagacacaatgaatgcacagaagtccctagagaaccttctccatgaggacagggtctgatgtgatttgtagatgcaaattggaaatgtggcggccctagttcaaaaatgattaagaatttcaagatgatgactgcagagcat

SEQ ID NO: 708988 - DNA, 660 bp, Homo sapiens
tggggttgtcagcatccatgagtcgctgttgcagtaggtgctgacatctactcttctatgttgaagtgagagctggggccctcatgtttgctgggagaggggagtagggttgttggaagatgcttgctagggccatgaagggaagtaaaagggcagtgtgcatgatagatagacaagatttgacttattcaaacttgtccaacccctggcccagcacaaatttgcaaactttcttaaaacattatgaggttttttttttttgcgatttttttcttttggctcatcagctatcattagtgttagtgtattttaggtgtggcccaagacaattattcttcttccaatgtggcccagggaagccaaaagattgggcacccttgttttagataatgcaaggtgtaccatgtgtaagagccatttgaaatgcctgagttctctgttgagcactctgtggacctgcactctgggggaacacaggagaagacacagcycttgtcctcagggagctccttttccagaagacacaatgaatgcacagaagtccctagagaaccttctccatgaggacagggtctgatgtgatttgtagatgcaaattggaaatgtggcggccctagttcaaaaatgattaagaatttcaagatgatgactgcagagcat

SEQ ID NO: 708989 - DNA, 623 bp, Homo sapiens
ggatgatatttaaaagctgcctcatgcctgtgtgcccaggaataggaatgacagagagaaggcaccacggccttctcgtgtcccatcccatcgccactcccatgtcactaccgtctggcccggccactatgtgagcgtggaggagggagacccccacttccttgggagatgggcgagaggagagaaagttcccaggcaatcctcccagggctaggtggtgtcctccacacagcacagagtgagccctggtgtaccaagtgagcactgagtgagccctgaacgtgatgtatccagcgtccccctggccccggcacaccgcactgggaacagcctgataaaacacgggaatggcagggtgtgcagggacaggtgattggggggagggacaggaagagggatgagacggcatgaaccagagagatcagaagtggtagcacctgcctggccttcagaggggaggaggatctgagcayggaagagctcaaagagcagagcttcccgagtgggaaaataatctgaactaaggcaggcttggaagaccccaagaggccagaatggggggcctactttgcaggggagcaatgatttccagaagctgctttaaatggatacatttaggtaaa

SEQ ID NO: 708990 - DNA, 594 bp, Homo sapiens
tgtacagttcagtggyggtaagtaccatcacacagctgtgcaaccatcaccactggccacccctgtaacatttccgtattctcagcacacaatgtttgcatactgcacagcaaaagatgtcataaggaaaggcaggagatactatgttgagtaaaaactttagcaacatttgatatttctggcacacgaagctctcctattatttggtaaaagacattccaaaagaaaaatggataaaatagcatgaataggcatttcatgtacacagaaatctagatggctaatagatatctgaaaattggttgatgaaatgcaaattaaagcaataagaaaataccattttaacccatcaaactgaaaaaaattaaaatgagtcttcatccttatattactggtaagtatgaataaattgctgaaaattgatgttgggaataaaattaaagcaataatgtgatatcatttttcttataaaaccaacaaaaattaaaatgagtgaaacatccttgcattatttgtaggaatgtgagctgctaaaacttttggagaatgtaatctaaaaatatctgttaaaacttgaaatccagccaggcttgg

SEQ ID NO: 708991 - DNA, 1084 bp, Homo sapiens
acagttttccttgcaagactgcagragagctgcacaaattgcccttgggaggccaggcggagggtctctcccgggatgcatgttcactcttgccacagctggaggaagcaggccctaaggcttgcactgcaaagtgatgagaatgaagccctggttatgctagacttcaaggcatgcatgctcggaagggtaacaggatattgatgaactgtgaaaaatctctgctacaaagggaatggttggataaattgtagttctatctaactatggaatattatgtattcctaacaaaatgagttagactcatgctgggaagattgctcgtggtctagtaagtgattagcaagtggcagagtgagatgcatacaattatcccactgaaaacaacagccaacaaacatctgcatgtacaagcgtttcaatttgtatgaacgtgtgtggagggacacatatatgaacgtgtgtggagggacacattgggtacatcagggaaggggaattgaatgagggctggggatattgcgttaactttaaaaatgtatatctttgggtagtctcacttgttaacatgagcatgcttgattttcctaatttcaaaggaaagttatgtaaaaaaggtaaacattattaaataaaaaaacctttagtttttctagttgaggatctctttaccccaagacgattccaagtaataaaaagcaaacattatttcacaatgtgtctgtgtgtatttctaaagtctgctggaatgatatctgtgtctcccgtgctcatttgcaatgtgaacttgctgctttctcatggagaggtggagtctatctctccaccccctagaatgtggcagggggtcacattccagggtgatgctgggccagtgccaggcggggcccttcactggcctgaagcccggtgccaggagaaaggagtgcaaatatcctgagaaggctctgcagcgagaagcccaaggcctgtggggaagccgcagaggataagctgccttgaagggaggcaggctgaggagcccagggtgccgaaaagtgagggaagaaaccatctcacaaatagatcctggcaccctcaccct

SEQ ID NO: 708992 - DNA, 1084 bp, Homo sapiens
acagttttccttgcaagactgcagaasagctgcacaaattgcccttgggaggccaggcggagggtctctcccgggatgcatgttcactcttgccacagctggaggaagcaggccctaaggcttgcactgcaaagtgatgagaatgaagccctggttatgctagacttcaaggcatgcatgctcggaagggtaacaggatattgatgaactgtgaaaaatctctgctacaaagggaatggttggataaattgtagttctatctaactatggaatattatgtattcctaacaaaatgagttagactcatgctgggaagattgctcgtggtctagtaagtgattagcaagtggcagagtgagatgcatacaattatcccactgaaaacaacagccaacaaacatctgcatgtacaagcgtttcaatttgtatgaacgtgtgtggagggacacatatatgaacgtgtgtggagggacacattgggtacatcagggaaggggaattgaatgagggctggggatattgcgttaactttaaaaatgtatatctttgggtagtctcacttgttaacatgagcatgcttgattttcctaatttcaaaggaaagttatgtaaaaaaggtaaacattattaaataaaaaaacctttagtttttctagttgaggatctctttaccccaagacgattccaagtaataaaaagcaaacattatttcacaatgtgtctgtgtgtatttctaaagtctgctggaatgatatctgtgtctcccgtgctcatttgcaatgtgaacttgctgctttctcatggagaggtggagtctatctctccaccccctagaatgtggcagggggtcacattccagggtgatgctgggccagtgccaggcggggcccttcactggcctgaagcccggtgccaggagaaaggagtgcaaatatcctgagaaggctctgcagcgagaagcccaaggcctgtggggaagccgcagaggataagctgccttgaagggaggcaggctgaggagcccagggtgccgaaaagtgagggaagaaaccatctcacaaatagatcctggcaccctcaccct

SEQ ID NO: 708993 - DNA, 2287 bp, Homo sapiens
tccagtttcctgatcattccaaagtattttttccctttccctttgctgaaaggaaatgcagtcacgttcacgaataaaaacctcctgtgtggttacattttatttctcatcaaggagtctatactcctggaaagcttactgggtcttcaaatcgtttctgtatattaaaaaaaaaaaaaaaccataaaagckggatgcatgaattttgagagtgaaaatactttagttgctcatcatcttcttaattttaacaaggaatgggaagaaaacagccttcagccatttactgctatatattaaataaataggcaactgtgaaatgcatctttctttttcttcttcttcttttttttttggtttgtttgtttgttgcatgaacctgtggaactaagatgctttggtgttaggggaggagagctgggtttttgccttcaaaggtgaatagattcttgcttgtcagctgtgagaaactgaggtgaccttccccctccaaataagggaatcttacacttggaacagtaaaggctgaagagagtgtcagagacggtcttggagtgcctgaatgtgtgtaaaggggattgatctatgtgataatgtctgattgtgtgattgagacaatgttttactgtatgtaaatatatttcagtgtctggatgtgtgcactagcatgtgtgtgagcatgttggcatagacatctgaatgcatgggtgagtgtagtagtatgtgtatggcaggggtgggggtggtagttctgggcatgtctgccttggtgtctatgattagatcctcagataaaatataggttctcttcagcagacagattgctttacatgatcttagctacctttctccgtgcaaaaatcaatacacagggtaattggacacaattgtacccacctgcctccctgaaacgaggcatgtgagcttatgttcccatggttggcatgaaactcatcctgcctatacggtggcagacatgctgatgggagctgcctctttgctttagtattactttttcaagcctccaggactaactctagctgccagcattatctggattttgcatgtgaccagaggcagagccaagcttcctgtcaaaatgcctgatgagacggactaggaaggttgaggagggaggtaatgtcagccccaaaggcggactcatcaccagccatccccagtagagtagaccagacctggagatggagcagctataatatgttgccaatgatctcacctgccttgaagattaaggctgaaattttctcaggggaggctaaggctgaggacacgaggcttagaagatgttagcctggccagataaaaagagcgtcggtaaagctgaagttgtggataagggttggagtgagactctgcagagactttcttcctgaactctaatctaagattttgagatccctgcctgaattccagtggagggagagaacatgctatcatccaagaatcttttaactagaacttgtgcaacctgcattggagtctcagctttgccactagcttactatataacaaccttaaagtgctatctggttccttctgtgtaatgtttggaagttggcacgggtgatatctaacatccttttcagctccacagatgaatggtagagaaatctttgaagaatattgctagaattgacagagtgcccatcccctccccgaccccaaaaaactttggaagaagtgtacacagtatgcccatctttgcccattctcagtttctttgcaaactgagtgttgtctcaccaaactgaaaagctgtggaagggaaagagaagtggttcaggacacttggttgttaactgtaagaaaaacagcttcccttcgccaggcgcagtggctcacgcctgtaatcccaacaatttgggaggccgaggcgggtggatcacctgaggtcaggagttcaagaccagcctggccaacacggcgaaaccccatctctgctaaaaatacaaaaattagtcgggcatagtggtgcgtgcctataatcccagctactagggggactgaggcaggaggattgcttgaacctgggaggtggaggttgcagtgagccaagattgtgccactgcactccagcgtgggcaacagggcgagactccatcaaaaaaaaaagaaagaaaaacagccgcccttcacagatacaatttcatttgatttgcatgcaattccaatattgaacaataatgctgggttagatgtgttcccccttccaaagttgattttttaatatgatgtacaatatgaagggaaagagtctttccattta

SEQ ID NO: 708994 - DNA, 667 bp, Homo sapiens
ggggcacagtttcatgttttctggcttaacctcaaacctttccgttaaaaagcctaatcaacctaagtgcctatcaacgaatgactggatgaataaaatgtggtatatatacacaatggaatactattcagccataaaaagaatgaaatcatgtcattttcagcaacatgtgtggaactggaggccattatcttaagtgaaacaatcagaaacagaaagacgaatgccacatattctcacttataaatgggagctaaataatatatacacatggacattggagactcaatagagtgaaatacttcgaggaggttggacrgtgcgaaattacttggtgggtaaaatgtacattattctgttgatggatacactaaaagcacaggcttcaccactgtggaatatggccatgtgacaaaattgcacttgtacctcttaaatgtatacaaattttttaaaagctgaaatggttaaaagcatttgcctctggaaaggaagggaggattctcaggggaggtggcacaaattgaattttaagggatgtgtctgcagcaaggcagaggttaaaaaaatagaaaataaaatcacgtgcaaaaacctagaagcattttgttaacactgctaagagtaagaagtatcttcagctactcagaaagctttctttcatcta

SEQ ID NO: 708995 - DNA, 940 bp, Homo sapiens
ccttgcaaaccctcccttgacccccgcttttcagcatctgtcattcacccctgccctgagcccccaggaaccatcagaggttgtgggcctcctgcaacatactcaacgaaacagaaattcagagctgctaggaacactgaagcttatctagccccattgctccccactataagtggactaggaggccgaggcccagaggaagcaggcactggcaggtccttgggcacctctcaacaacttgactggaacttgggccttcatgacagcaggaggacccttggctgggggcttcttaggaaaggccagggccctcctattcatcattctggggcaaggcaaggcagggagtctccaggtttctgccctgaccctgggctgtggtttcctggatcttgacacccccaagtgagtcacctccacctcccaggctacatctgactcagtgccaaggccctggggctcctcagctcttacctggctcccaggttggaggagccaagtgggcaggttggggtggcatcttgggcaggactttgtgggagggactagaccttgtgagaggctcatttccccacagtcctcctcaggccctggtaatggtccagtcaagggcagccctcagaaactcccaatgktgcggctgggtgcagtggctcacacctgtaatcccagcaccttgggaggcagaagcggggcagatcacttggggtcaggagttcaagacgagcctggccaacatggtgaaaccccgtctctactaaaaatacaaaagttatctgggtgtggtgacgggagcctgtaatcccagctacttgggaggctgaggcaggagaattgcttgaactcgggaggtggaggttgcagtgagccaagttcgcaccactgcactttagcctgggtgacagagtgagactctgtctcaaaaaaaaaaaaaaaaaaa

SEQ ID NO: 708996 - DNA, 940 bp, Homo sapiens
ccttgcaaaccctcccttgacccccgcttttcagcatctgtcattcacccctgccctgagcccccaggaaccatcagaggttgtgggcctcctgcaacatactcaacgaaacagaaattcagagctgctaggaacactgaagcttatctagccccattgctccccactataagtggactaggaggccgaggcccagaggaagcaggcactggcaggtccttgggcacctctcaacaacttgactggaacttgggccttcatgacagcaggaggacccttggctgggggcttcttaggaaaggccagggccctcctattcatcattctggggcaaggcaaggcagggagtctccaggtttctgccctgaccctgggctgtggtttcctggatcttgacacccccaagtgagtcacctccacctcccaggctacatctgactcagtgccaaggccctggggctcctcagctcttacctggctcccaggttggaggagccaagtgggcaggttggggtggcatcttgggcaggactttgtgggagggactagaccttgtgagaggctcatttccccacagtcctcctcaggccctggtaatggtccagtcaagggcagccctcagaaactcccaatgttgcggctgggtgcagtggctcacacctgtaatcccagcaccttgggaggcagaagcggggcagatcacttggggtcaggagttcaagacgagcctggccaacatggtgaaaccccgtctctactaaaaatacaaaagttatctgggtgtggtgacgggagcctgtaatcccagctacttgggaggctgaggcaggagaattgcttgaactcgggaggtggaggttgcagtgagccaagwtcgcaccactgcactttagcctgggtgacagagtgagactctgtctcaaaaaaaaaaaaaaaaaaa

SEQ ID NO: 708997 - DNA, 991 bp, Homo sapiens
ttgctgtcatcaaagcttgctccagggaaggtctcaggctcggtcctcactcctgatatctgtacagatgtctttgtgggtatggaaatctgctggggattgaaaagtgagaaagtgagagagagagagagagtgtgtgtgtacaatgcctatatgcgatgctcctcaagctttgcctgtgttgagatgggtgggggtttgctgtcagcttaccccacagtgtgggaactgttggtttcagtgtgctyccctccagcccgcaggctccagcagggctcctctctacatctccagcccaagcacagggcccagccctggaacgaaatttcttccccagcacccacagcccaggcctggccacacaggaagcgacctgatgactgaggcccaagagttcaactcatgggacaggactcagggctaggggcccagagggagacagggcaggaggctgggggtgggggaggtttgggctggctgcgggtctgggcctctctgggctctttgtccaaatatggaaggtttttttgtctccatttgagtcacgccggccatggcccaagagatctgctttccagatactgcaaacgggactgcactgcactgcctggcctgcctgtctccccttcacctgcccgtggcccatctctccaccttcccaaactcctgggctgagttctctccgccagcagaaagcccagcacccacctcagctgctttccagcaccaagagaagggtccctgggcccataaagggaggaaacactcattccttctgtgcctgtcacctcctcccactccccaagggcctctcaagtgcaactgagccattcaactaatatttactgagcaactactatgtgctggttcctgggactcagaccatggactgtgaatccagtaggatcactatgtccaaagcaaaatccaccctttctttctgtgcccaccttgatgatggcactgcccccaactcaggcagtcctgaaag

SEQ ID NO: 708998 - DNA, 991 bp, Homo sapiens
ttgctgtcatcaaagcttgctccagggaaggtctcaggctcggtcctcactcctgatatctgtacagatgtctttgtgggtatggaaatctgctggggattgaaaagtgagaaagtgagagagagagagagagtgtgtgtgtacaatgcctatatgcgatgctcctcaagctttgcctgtgttgagatgggtgggggtttgctgtcagcttaccccacagtgtgggaactgttggtttcagtgtgctcccctccagcccgcaggctccagcagggctcctctctacatctccagcccaagcacagggcccagccctggaacgaaatttcttccccagcacccacagcccaggcctggccacacaggaagcgacctgatgactgaggcccaagagttcaactcatgggacaggactcagggctaggggcccagagggagacagggcaggaggctgggggtgggggaggtttgggctggctgcgggtctgggcctctctgggctctttgtccaaatatggaaggtttttttgtctccatttgagtcacgccrgccatggcccaagagatctgctttccagatactgcaaacgggactgcactgcactgcctggcctgcctgtctccccttcacctgcccgtggcccatctctccaccttcccaaactcctgggctgagttctctccgccagcagaaagcccagcacccacctcagctgctttccagcaccaagagaagggtccctgggcccataaagggaggaaacactcattccttctgtgcctgtcacctcctcccactccccaagggcctctcaagtgcaactgagccattcaactaatatttactgagcaactactatgtgctggttcctgggactcagaccatggactgtgaatccagtaggatcactatgtccaaagcaaaatccaccctttctttctgtgcccaccttgatgatggcactgcccccaactcaggcagtcctgaaag

SEQ ID NO: 708999 - DNA, 991 bp, Homo sapiens
ttgctgtcatcaaagcttgctccagggaaggtctcaggctcggtcctcactcctgatatctgtacagatgtctttgtgggtatggaaatctgctggggattgaaaagtgagaaagtgagagagagagagagagtgtgtgtgtacaatgcctatatgcgatgctcctcaagctttgcctgtgttgagatgggtgggggtttgctgtcagcttaccccacagtgtgggaactgttggtttcagtgtgctcccctccagcccgcaggctccagcagggctcctctctacatctccagcccaagcacagggcccagccctggaacgaaatttcttccccagcacccacagcccaggcctggccacacaggaagcgacctgatgactgaggcccaagagttcaactcatgggacaggactcagggctaggggcccagagggagacagggcaggaggctgggggtgggggaggtttgggctggctgcgggtctgggcctctctgggctctttgtccaaatatggaaggtttttttgtctccatttgagtcacgccggccatggcccaagagatctgctttccagatactgcaaacgggactgcactgcactgcctggcctgcctgtctccccttcacctgcccgtggcccatctctccaccttcccaaactcctgggctgagttctctccgccagcagaaagcccagcacccacctcagctgctttccagcaccaagagaagggtccctgggcccataaagggaggaaacactcattccttctgtgcctgtcacctcctcccactccccaagggcctctcaagtgcaactgagccattcaactaatatttactgagcaactactatgtgctggttcctgggactcagaccatggactgtgaatccagtwggatcactatgtccaaagcaaaatccaccctttctttctgtgcccaccttgatgatggcactgcccccaactcaggcagtcctgaaag

SEQ ID NO: 709000 - DNA, 991 bp, Homo sapiens
ttgctgtcatcaaagcttgctccagggaaggtctcaggctcggtcctcactcctgatatctgtacagatgtctttgtgggtatggaaatctgctggggattgaaaagtgagaaagtgagagagagagagagagtgtgtgtgtacaatgcctatatgcgatgctcctcaagctttgcctgtgttgagatgggtgggggtttgctgtcagcttaccccacagtgtgggaactgttggtttcagtgtgctcccctccagcccgcaggctccagcagggctcctctctacatctccagcccaagcacagggcccagccctggaacgaaatttcttccccagcacccacagcccaggcctggccacacaggaagcgacctgatgactgaggcccaagagttcaactcatgggacaggactcagggctaggggcccagagggagacagggcaggaggctgggggtgggggaggtttgggctggctgcgggtctgggcctctctgggctctttgtccaaatatggaaggtttttttgtctccatttgagtcacgccggccatggcccaagagatctgctttccagatactgcaaacgggactgcactgcactgcctggcctgcctgtctccccttcacctgcccgtggcccatctctccaccttcccaaactcctgggctgagttctctccgccagcagaaagcccagcacccacctcagctgctttccagcaccaagagaagggtccctgggcccataaagggaggaaacactcattccttctgtgcctgtcacctcctcccactccccaagggcctctcaagtgcaactgagccattcaactaatatttactgagcaactactatgtgctggttcctgggactcagaccatggactgtgaatccagtaggatcactatgtccaaagcaaaatccrccctttctttctgtgcccaccttgatgatggcactgcccccaactcaggcagtcctgaaag

SEQ ID NO: 709001 - DNA, 1336 bp, Homo sapiens
tgatgaaatatgatattttaaaaaatttcttccgtttgtgtgtttcatcagactagatcctaagctctatcaggacagggattgtggtctttcttatacattgctgtctcccaattcttagaacagtgcctggtacgtagtaagtgctcagtaaatctttgctgagttagtggtgggaggtctttcaaggagccccatcttgctttcctcattccaagctctgtttgttcatacattaaacaaacctcttcctgagcgtccttgctcccatcttgtgccaggccctgggctcagcgatgagggcatgagcttagatcttcccatctccctcctggagctcttggtctcatgagggagatgtggaaggcagggcgctgagctgcaggcccgggtgattctgtgtgcactcacacaggggccctgtgtaggtgtggtgggggcggcatctctgagggagtgtgcaccgaccctgtgggtccttcagggctacatgcagccgctgaagcagccagagaactccgtgctctgtgacccttcactggtggacgagatcttcgaccagatccccgagctcctggagcaccacgagcaattcctggagcaggttcggcactgcatgcagacctggcatgcccagcagaaggtgggagccctgctcgtccagtcggtgagtggccccgctgctgccaattcccacaagcacaggccctcctggaaggggctggatgtggccacggaccccacccccacccatcccacctggatactgactctgtttccagatctgaccatagaacttggctagacattggtacttaccccagcccctgggtggacctgaacttggacactcccctaccccaaagcttggccagactctggcacggactccgaccccagccagacactgactctgatcctggaccctaccccgctcctggctggcactgacgtgactctagtcctgaccccaagctggtgcggacgctgacccagacctcagatggatgctggtactgacctccrccctatctttactggaacccaaaataactgccctggtcctgaccctggacttgggctggatgttgatgctggctgagtcttgactttttctccatcagatattttcatcataatagcatacctgtttgctaggcattgttctaaatgtgttgtatctatcaacagccctggtaggagagtgcgttggttaccctgattctaaagatagtgactgagacatggagagattggtaacctgatgaaagttacagttaggaagtggtggaggactcaactccagaaagcctggttccagtgccccggcttcccc

SEQ ID NO: 709002 - DNA, 621 bp, Homo sapiens
gtcttggggatctgggagtgatgggtctgtgatctaagcctaccaatgagagaagagtgggcccctcaggcctgtaactggctcagggtggaggagtgaccttcactgcatgcctcagagtcaattctggcgcttttactggggcatcaggaaggagacaggtcttccacaatatttgcaaagttagtagaaagtgaggcaggagctgctggagccaagtgaactaagttccaggcaytgtcctgggcgacggagatactgccaccagggaggagactatccacatagaaagccaaggaatggcagagatgagagatggggatgcatcgtttcctgagaacagcattgagtgcctggtttcagctgtgcctgaggttttacctttggtgtcatgagctgataactccctttttgcctcaatccatttaacctaggattctgtcacttgaaactaggagtcctgcctgtagatctgcaccttgtgcccaggaagacaggtgacatttccctacgagaaaactgaggccagagaggttaggaacttgcccaaagtgcactataaatccaccatgataccctgtctctcaggaagagtggcttaagaaaggacaaagaaatgga

SEQ ID NO: 709003 - DNA, 1256 bp, Homo sapiens
gggttggagccacagataacagagccattaatctcggggtctcagcctctcttaacggaccttccaggcactgctgagaaaaccaggttaatggtttcctgcggcagcaatgagcagaagcagggccatctccagactccagagaagccaggagagggctggggtgataatggggaggaggataaaaaacagccacccaatgcgtgccttccctgtgccaggcccttgtcctgaaatgttatctcactccatcctcccaacagtcccttgggctaaattggtgatgctgcttgtttgagtgagcaaacagagggtgaatgaagtgacttgcgggcagctgggtagaggatgagtcagcattggtgtaaaggactggagcttcagggttctcgggattcgagtcctggccctgctgcttgccagctctgtgctgtggcaagttacttcctctccccaggtctctcggtttcctcatctgctgcctctccagacttctgccagaacattgcacgcgacagtttcaggcacagaactgactggcagcaggggctgctccacgagtgggaatttgctccagcacttcacggactgcaagcgaggcacttgctaactcttgggtgagttttctgggtccatgcctggaagggcttgcgcccctcagctcccctaggagcttcctgagtaactgcagtccacttgcagccaccgaggctcatcacaggcaagagtggcagtagggcaggcactggggtcctcctccttcctccgcctggctatgcctggagcctgcagactgcacagcatggagggacgaggcaccgcaggacggggtcagtgggggcggggaggagatggacacattggtgctgcgccgtgccttgctggagaagtggaatagctcagtcaggattcggagccacaaaggtcttggttggagtgcaaatggctggcaagggcacttttcctctctgggcctcaatttcttactctctaaaatgggggcaaccgtggtctctccctgcgtatgtgaacactgctaagtgtagtatctggagaggggtcctcacggaggaggctgggccctgccctcagagctccccaggaactttggttgagggaatgagtaggaaggattrgtgatcaaataattgtccacagaggaggcccttgggaagcctctcacctctgccattccagctaaatcttaagacagcctggagctggccccgtgagagtggtttggaaaaaaaaaaaaa

SEQ ID NO: 709004 - DNA, 583 bp, Homo sapiens
tgcctgtaatcacagccacttgggaggctgaggcaggagaatcgcttgaattcgagaggtggaggttgcagtgagccgagatcatgctgctgcactccagcctgtgtgacagagtgagactctgtctcaaaacaacaacaacaacaaaaattggtcagtagataagctttctgacagctaggattatacactaggtaacaatggcaagtaaatatctttgcattctctagaaatatatagcgggaaaaaaaaaacttgtggacaggaaatggctttccckgtctataaactgcctttgttgttccctgctcttagttcctcctctttgcttgtcgtaagagtggagagggtagacagcaaacaggtgtgaagctagatcagtgattctattccagcagccagaccagtgtgtccctcacagagggttacaatctggtgctgcccccatcctggggtgctcctgggcctcagcagataaaactaggaagcgttggggtgaggggcccattgtggacctcactgatcccttgaaggtccctccagctgtaggagcctgtgactattcctgctgtcttcctgcgag

SEQ ID NO: 709005 - DNA, 2147 bp, Homo sapiens
ctctggtctaaacagaaaagaccttgaaaaggtcaaggggagggtgcctgcgtcccaaccattgggagaaagggctgcaggcttgctcctgtcagcagaagaaatttgtagggccagaaaagagagaagcagggagggggtgtgggaggtgtttagtcttaggcttttaaaaaaattattattaaatagaggcagggtctcgcgatgttgcccaggctggtcttgaactcctaggctcaagcgatcctcccacctcagatcccgaagtgctgggattacaggcatgagccagcacacccagccaggagtttttcttctaggtgatgacagcttttattccttcattctttccacaagtgattgttttgcagttgcttaaatgcctacagaggtaaccggactagctgattctccactccctacccacccccaatcctcacggggcactactttttaatcatggccttgacattatcaatctcctgctccgggtggctcccaaaatcatccctttcccttacccttcttccaaggccagcttttttcatcttggttccaaacttctctaacctgccgagtgctatccaaggcaaaggctagaaatatgaccaccattcaaggtcagctgcagagggaggagaggcaggaggtagaggagcgagggggtctccccggagcacagtgtgctagcaagtaccagagaagaggcaaagatggctttctctagccctgcctgagctcttggctgaggccccggggacagagcaagctccaagtcctcccccagccctctacttcctaaatcaagcaaataactaacaatgcaaggaggtgtgggggagtaaggcccagccactgggtagctattttctcaaaatacatggcaaatctctgcgccaaatgctggctaagccaaagaataaacaaatccttttatttctctgagatgagagctatcaacttcccctttcatcctctccttctgctggccagatccatctgtcccatggccctctccctgtgggataagcagtgtctgtccatatcttcctgaccacagctctggccagctcctacccccgccggaggcactgcggagggaagccagcaggtggagaacaggagcacatggcctgtccacacctcccccagaagctctcagccagttctccatgatgcattgtgccactaattcattcctctgccctcctttctccaagttagagggcactgaattaagtcttgctggacaaggagaccatcatcaccctcaacccagcctgtctctscagcccaccccagggccacccctccgtgatccagagctcagctcaagcagtgctactatagaggagaaaagaaaaggctagggagggaaaagaaggtggcatctctgcagcatgatgtcacactggctgctttcggatccccagaacagaaaacagaagcaaacaacatggactccggatttactctgccttgaaaggtttgtgttcttggcagctctgagcagcctgcgtcagatgagaaaagcacacaaccagaaagacaggtcttcaccacagcccccagggccccattctgaccccaggacagagccaccgcttccaaaaaatcccacgaggaaacaaagatacacacacacacacacacacacacacacacacacacacacacacacacacactccatcgcgtgtcagcacgagttagcactaacctggaagccattaggtaggaacagtagcagagtgcagtgcagagaggaactcattcattcatgcattgggcatgtggggggcggggtgcggtgagcgggggccctgaggaggctggagggcactcacctccatgaccatcccaaagccctgtttctaacgggggaggggactcgggccagtggtctctcagaagctgggggcgcttctttgctctgctgtttcacaccgctgtagcattttaagcatgactcccctttatttccctctcccccacctccctctgctgctgttatttggtgtggtcgtgccgccttacagaagtccctctctctctctgcctggctccctttctctctctccctctgactccctcacagacagctgttctgagctcaggcacgcacgcgcacaggcgcacagacacact

SEQ ID NO: 709006 - DNA, 606 bp, Homo sapiens
cactgggccatctatgggaaagaacacgggtcgagtgcagtcgagttgtctggccatctgtatttggatctataactgtactttgcctggcgctgtgcgcaaggtcagaaaacttactgctagtacctagaaacacacaaggctgcccagccaaatcttaatgtaaagtagctagagccatggaagtacagtatgaattaaaaagaaaaaagtattgaactacaataataaatggtgtgcgtgtttattgcttgatctatgaatgctcgtcacctcagatgtttctggtcttcccaagtaggctcacagcaagtcctgaaggcatgtgtttgtaggcacgcttatasacacacacgcacacacacacgcacacacgcagccatccaccttctcacgggagggagggaggccgcctgatcaactggaatggataaattttggagtcagacctgagtacaaagtatagcatcactgtttaccaactgtgtggccttatgccccatctgtcactccaagcctcagtgtttcagagataatacatttaaaacacacatcgttcttggtatggctgctggtattatactaaaatattttcttttgttttga

SEQ ID NO: 709007 - DNA, 606 bp, Homo sapiens
cactgggccatctatgggaaagaacacgggtcgagtgcagtcgagttgtctggccatctgtatttggatctataactgtactttgcctggcgctgtgcgcaaggtcagaaaacttactgctagtacctagaaacacacaaggctgcccagccaaatcttaatgtaaagtagctagagccatggaagtacagtatgaattaaaaagaaaaaagtattgaactacaataataaatggtgtgcgtgtttattgcttgatctatgaatgctcgtcacctcagatgtttctggtcttcccaagtaggctcacagcaagtcctgaaggcatgtgtttgtaggcacgcttatagacacacacgcacacacacacrcacacacgcagccatccaccttctcacgggagggagggaggccgcctgatcaactggaatggataaattttggagtcagacctgagtacaaagtatagcatcactgtttaccaactgtgtggccttatgccccatctgtcactccaagcctcagtgtttcagagataatacatttaaaacacacatcgttcttggtatggctgctggtattatactaaaatattttcttttgttttga

SEQ ID NO: 709008 - DNA, 951 bp, Homo sapiens
tttcttttttgatccaataattttggggagagaggagggagttgctgtctcytacttcccagcacattcctgctttgaaaagtaactttcctagtaatatttctagttggacatctaaggagaaacctgcaactcagaaggaagtctgggtgtgtgggtgtctgggaatggagaaactaaaaggtcatgccgttaaacaagtggtgagaataaaggctggggtagggacaggcagggagtgtttgggttggggctctgattcaagaccgaggtgacagtgaaggtcagcagggcaaggtgctctcagggccaactggattgagcaatcacattcatggctgtgaagtagtaagaatgggaaaatcagattgagccaagcttggcctttagtgaattgtgttattgaggatcagacatgggaaatatccagcaccaagacaacagatggggtttctaaagtgatattaatagcccttgagaactcttctaagccctttaataagcaacatcatgccagataaagcttccagagaaacagacatctagtctgggtctttcgtaggattatgggaagagacagggaggtgggtggagattggaagtaggctggtgatcacagtaccttattgatttacagtcattatcaaatctcccaggaaggagtttaattgcaattcaggagaaataatgatgtacaaaccaactagaaagagaaccaaaataggactgactctcaaagcacattgctagcatccaccaaaaagcaaagtggtagagaagcagtgagtgggattaggggtgagagaagatggagaacattaggacaggcaagataggcaatggttagatggaagctaaaaaataagaaaaggaagcagctatggtctaagtggaaagagaactgaaagaggagtcagaagacctggattcttgctgtctacctaccagcta

SEQ ID NO: 709009 - DNA, 673 bp, Homo sapiens
tcgcccaggctggagtgcagtggcgggatctcggctcactgcaagctctgcctcctgggttcacgccattctcctgcctcagcctcccaagtagctgggactacaggcacccgccactacgcccrgctaattttttgtatttttagtagagacggggtttcaccgtttttagccgggatggtctcgatctcctgacctcgtgatccgcccgcctcggcctcccaaagtgctgggattacaggcgtgagccactgcgcccggcctattaatctattttaaaggtggcaaaactgatatctagagagagattaagtgacttgtgtactattacacttcattcattcattcagaaaacttttacggagtgcctactgtatgccaggtactgtcttagtctctggctttaattttctttaacaataactgtgaaatagtgtggtaagagctattgtatacaggtgtcctggaagataaagtcatagctttggggcctggggagagtaccgttgtaaaaacttcaaaagaggtaacatttgagaattacctggaaaggataagtagaatttcccaaagagaaggaatggtagattgggagttattggctgttttgagagactcaccttcttgatgcagttggtactctcatgattcttaatttggggcatttttcacc

SEQ ID NO: 709010 - DNA, 673 bp, Homo sapiens
tcgcccaggctggagtgcagtggcgggatctcggctcactgcaagctctgcctcctgggttcacgccattctcctgcctcagcctcccaagtagctgggactacaggcacccgccactacgcccagctaattttttgtatttttagtagagacggggtttcaccgtttttagccgggatggtctcgatctcctgacctcgtgatccgcccgcctcggcctcccaaagtgctgggattacaggcgtgagccacygcgcccggcctattaatctattttaaaggtggcaaaactgatatctagagagagattaagtgacttgtgtactattacacttcattcattcattcagaaaacttttacggagtgcctactgtatgccaggtactgtcttagtctctggctttaattttctttaacaataactgtgaaatagtgtggtaagagctattgtatacaggtgtcctggaagataaagtcatagctttggggcctggggagagtaccgttgtaaaaacttcaaaagaggtaacatttgagaattacctggaaaggataagtagaatttcccaaagagaaggaatggtagattgggagttattggctgttttgagagactcaccttcttgatgcagttggtactctcatgattcttaatttggggcatttttcacc

SEQ ID NO: 709011 - DNA, 673 bp, Homo sapiens
tcgcccaggctggagtgcagtggcgggatctcggctcactgcaagctctgcctcctgggttcacgccattctcctgcctcagcctcccaagtagctgggactacaggcacccgccactacgcccagctaattttttgtatttttagtagagacggggtttcaccgtttttagccgggatggtctcgatctcctgacctcgtgatccgcccgcctcggcctcccaaagtgctgggattacaggcgtgagccactgcrcccggcctattaatctattttaaaggtggcaaaactgatatctagagagagattaagtgacttgtgtactattacacttcattcattcattcagaaaacttttacggagtgcctactgtatgccaggtactgtcttagtctctggctttaattttctttaacaataactgtgaaatagtgtggtaagagctattgtatacaggtgtcctggaagataaagtcatagctttggggcctggggagagtaccgttgtaaaaacttcaaaagaggtaacatttgagaattacctggaaaggataagtagaatttcccaaagagaaggaatggtagattgggagttattggctgttttgagagactcaccttcttgatgcagttggtactctcatgattcttaatttggggcatttttcacc

SEQ ID NO: 709012 - DNA, 819 bp, Homo sapiens
tcatcctttactcaaaactcaagaatctgggagcagagcttcctgaaggtggacaggcaggttggtgtgaatgtgtgctaattcctgatgtttgctgtccccttataaatgaacgtttttttttctcatgatgmaacatcagtgcaaataagcattaagtatttcataacctgcaaatggattctattggtttgccacttcctgagtagcagctggggaatgcatcacgtggaaccaattttcttgacccttctttcacaaagagaaatcagtaatcagtccaggttattatttacaaacacttgttgactgcctttagacttaaagagattgctctgttttctattacctagatgatatgctgtcaatcttgaaatttcacttaaaacttacaccatcctccaaaactgggattgatatgggaggcagcgcctgtgctcatattgcataagggtttttgtagaggccagaattaatatacttctaggtaactaatgcatttaatattattggaattgtggcacagtgatttacagcaacagtattagcacactacttctgtatcatactaaattgttcacagccctcccacctactctccctccctcctccatgtctcttttagatttctctataactctgagagatagatattattatccctgcttttacagatgaaggaactgaagcttacaaagtacagatgactatcccgttgatagcaattgcttgaagttgggcttgaaacttatgtctgtttctttttttggatgtgctaaagaaaaaaagaagataacatccgtcttttttttttttttt

SEQ ID NO: 709013 - DNA, 520 bp, Homo sapiens
tcataaatgaamcatagctaaaatccgacatctgggatattccagggggaaaaaaaagtagtgagtagatagctaaggagaggttggcaaatgtaggtaagtaatattgaagttggtgagggcacgtggggaggtcatatcagcattaactgttctttcgtgtaggttggaaaatgcctataataaagtttacaaagttaatattaattggaagcatttctaggaactctaaaaatatacttatccataaaagcaagaaaaacactgacaaaaatcctcaaaatcaactttttcagaattctgcaaatgaaataaagggttgcaaaaatccaaggcacatttactcaagaacaatggctgaatcttggcaaaaatagccagctttgtgatgttttcatttgccctaatcccatccccctctctctagctctgtggtagccttggaaacccacagcctcacatctacaatagctgtgaaaaacagcagcctggcagccactggagaggacagaataggtct

SEQ ID NO: 709014 - DNA, 652 bp, Homo sapiens
aaatctttgaataacaacatagtagtaaagctgggtctaaaaaaaatagaaaaaaaattctattttgcttttatctttatcaaggaaaataatcttcaaattggacaagaaaaaccatttaagttaaaggaaaatcagtacaaaataaattctaaggaactgaaagacttaaagataggatgattatagcatccttttcaataatctctagaagaattatgaagaacaaagatctcaaaaactagaatagggaaaatacttttatttccttaatgaagaaaaggtggtttcaagaatggattatgaaacagtttatttgagagcactcagacgaaaaggaggtcaaggctaagaacccaaatggtttcacacacaagtcacaacagactaactmcatttcctttcctcgtggtaattcttgatttgaaaaacaggacaatgacacagaacattctttttttcatgaagatctttgtggaccacgcagtcagataaaattcactgatggtaaaataagcacatcccaagagtgctgacgtatggtttgatctcaacccaagataagacttctagttctcacagagctcaacacatctgtcaatgatctggatagggatctggaaggcgaatctgccaaatttgcaaagggtaa

SEQ ID NO: 709015 - DNA, 652 bp, Homo sapiens
aaatctttgaataacaacatagtagtaaagctgggtctaaaaaaaatagaaaaaaaattctattttgcttttatctttatcaaggaaaataatcttcaaattggacaagaaaaaccatttaagttaaaggaaaatcagtacaaaataaattctaaggaactgaaagacttaaagataggatgattatagcatccttttcaataatctctagaagaattatgaagaacaaagatctcaaaaactagaatagggaaaatacttttatttccttaatgaagaaaaggtggtttcaagaatggattatgaaacagtttatttgagagcactcagacgaaaaggaggtcaaggctaagaacccaaatggtttcacacacaagtcacaacagactaactccatttcctttcctcgtggtaattcttgatttgaaaaacaggacaatgacacagaacattcttttyttcatgaagatctttgtggaccacgcagtcagataaaattcactgatggtaaaataagcacatcccaagagtgctgacgtatggtttgatctcaacccaagataagacttctagttctcacagagctcaacacatctgtcaatgatctggatagggatctggaaggcgaatctgccaaatttgcaaagggtaa

SEQ ID NO: 709016 - DNA, 1086 bp, Homo sapiens
tgcaaatttaatattctgatttttctcctaataaaataaaattaagaaagacattagtgtattttrtcaacactagttcaagagagagtcagttttctttccttatggagaagtttctgatgtactcttcctgatggaaactatagaaaaatatcatgtccttctattttaacatgttttatcaaaatcaaaatagttaccaaaatctcaaagcattttgtttcttagtatcaaaatccatggaaaaggggagaaatcaacattaagggataatttgaacctatatataatgtttccttaacaattaaatgttattaccatgcaatagtgcaatcaattctaggaaaacacctccaggaaatatattaacctctgaactaatgttaaagaagctcccatgagagtatgttttcacaaatgagctttctgttgacctttttgtaaaacttcatataacgtatttcagttaaacctatgatgcctttagtgttatctctttcctagaaatgagatgtttggttattttatgtctgtgtgtgtgtatgtgtggctgtgatagcactggtatttatagtttcctgctaaattacgtatttctgaaccttggtaaactgaacagattgaacgtttgggtcccatttattggccatacgcttagtgaagacacttgttttcatccttttattactgctgtcatgtctagaaacatgagtttcaaagaatggcaatgtgcttgttttctgattaatacaattatgaaagtttcaaatttgtaaaacatttacatttttaaacatattattttctttacttattaaaggaccaaattggcttccaagtcaatactaaataagtattttcaaaaagcagaaataaaatatccaccttttaaaagcaaatgtcattgtatttagctctattattggtactttaaaaaaattttaacctgggaatattttaactctcagcattgagatgtataaggaaaagctctctgtgatatttacacaggtccatttacatttttaatgttgactttggagttggcacactggaaaagaattagaggtaagatgacttgataaa

SEQ ID NO: 709017 - DNA, 1594 bp, Homo sapiens
atgtgcctcctgaagagactcggcctctcccatttgtttttgtcagtggctttgaagctatttgggagacactttgagatagcctgggaaacagcaataatccaattgaagcatctgacactctggactggtggcctcttgacggggaggcagtggacacatgggggttgttgctggtttcgtctgtgatatgaattttactggctgtcgatatctacagggaaaacactcgcggtgagattcacagataaaaaccagtggcctctgcttcctccctggagtgttttcacgagaaattggtttctgggcagggaggggagaagactccttctttttcgtcactcacctcgagggaatttggaggggttcgagacaggaaaaggtgaagggaggggaagtaagtcggaggaatcaccggcgtgtgaaaagtctcaaatatctccctgagcgagcgagtcctttcagggtgagggactgagccctccttcctgtcttgatttttccttctgctgttaccctcagtccattttctcactttctctgtttactctggaggtcattgtcactgtcccatctctgggcatctcagggggtcctctgagcccaaacaaagccagaaactgtcccttggaaatcagagcagaagkccccgcaacatcaaagctcacagcaagaacttgctgacagagctgagctggcacccggggatgggatgctgcggctcttccgatctccccgctccaagtggctcctggcacccactaccccattcccatttcggcctccctcgcccaccatccagccaccccagtcaaccccttcccaggtgcacctgagtcatagcatcggctcaagccccccacaccgccccaggccagggccccagcaggctctccccacaccccactccaggctgacttgactgtgtgatagctggaaaaagttaaatgctcttcccttcattatcagaaagagttttattctgactgaagtgaacaatatgaagagacactacagagctctggcgaaggaagaaaagtttcttatatccacagagccacacttcaaagtgtcctgtgaaaaggttccactttaattagggggaggaaattgccatgtaacttaattaatatcaaaaacattttttccttcaatacaagaaagaaagatggctacagagagagggggaaaggaactgacagtgagtgtggacaggcctgctcgtggccagcataatgataaactttgtttctaattactccaaatatgtcctaggttcaattaagaactttaaagccacaacgggttctttgtcacaatggaggtcttcctcctccatccctgatgcactagcctttatacacaataaagtgaaggcctgagatggttatagttcaggagggaacacagaaaccctgttttatttcaattatctaggaagcatttgcaggaagtggtttgggagagtgggatcatcagctccaagtgcctttgatggacatgctccttcctccagggaccccgaccctgtcaagtcaccttcctccctcccagctgctctgggggagactcctgggcatttgcctggtttccc

SEQ ID NO: 709018 - DNA, 1594 bp, Homo sapiens
atgtgcctcctgaagagactcggcctctcccatttgtttttgtcagtggctttgaagctatttgggagacactttgagatagcctgggaaacagcaataatccaattgaagcatctgacactctggactggtggcctcttgacggggaggcagtggacacatgggggttgttgctggtttcgtctgtgatatgaattttactggctgtcgatatctacagggaaaacactcgcggtgagattcacagataaaaaccagtggcctctgcttcctccctggagtgttttcacgagaaattggtttctgggcagggaggggagaagactccttctttttcgtcactcacctcgagggaatttggaggggttcgagacaggaaaaggtgaagggaggggaagtaagtcggaggaatcaccggcgtgtgaaaagtctcaaatatctccctgagcgagcgagtcctttcagggtgagggactgagccctccttcctgtcttgatttttccttctgctgttaccctcagtccattttctcactttctctgtttactctggaggtcattgtcactgtcccatctctgggcatctcagggggtcctctgagcccaaacaaagccagaaactgtcccttggaaatcagagcagaagtccccgcaacatcaaagctcacagcaagaacttgctgacagagctgagctggcacccggggatgggatgctgcggctcttccgatctccccgctccaagtggctcctggcacccactaccccattcccatttcggcctccctcgcccaccatccagccaccccagtcaaccccttcccaggtgcacctgagtcatagcatcggctcaagccccccacaccgccccaggccagggccccagcaggctctccccacaccccactccaggctgacttgactgtgtgatagctggaaaaagttaaatgctcttcccttcattatcagaaagagttttattctgactgaagtgaacaatatgaagagacactacagagctctggcgaaggaagaaaagtttcttatatccacagagccacacttcaaagtgtcctgtgaaaaggttccactttaattagggggaggaaattgccatgtaacttaattaatatcaaaaacattttttccttcaatacaagaaagaaagatggctacagagagagggggaaaggaactgacagtgagtgtggacaggcctgctcgtggccagcataatgataaactttgtttctaattactccaaatatgtcctaggttcaattaagaactttaaagccacaacgggttctttgtcacaatggaggtcttcctcctccatccctgatgcactagcctttatacacaataaagtgaaggcctgagatggttatagttcaggagggaacacagaaaccctgttttatttcaattatctaggaagcatttgcaggaagtggtttgggagagtgggatcatcagctccaagtgcctttgatggacatgctccttcctccagggaccccgaccctgtcawgtcaccttcctccctcccagctgctctgggggagactcctgggcatttgcctggtttccc

SEQ ID NO: 709019 - DNA, 622 bp, Homo sapiens
ttgggaagtaattttattaagaattcttgacacttgggcattaatttctcccttttccttttttgcagagagaagtggtgatgggaatgatcattgctgacatttattaaatccttcctgttttaagcccttcatgtcattcaacacttgcaacaaccctacaaggcagtaactattagcagattcatttgtaaatgaggcaactgaggtatagagaggtaaataactggctaaacatcacagagctagcaagcaaaattcaggaaagtctctctctcattctctccaccctctactaaatattaaggatttatgtatcttaataaytaattataaataaaggagttgtagaaaattgagaaaatacaggtaattataaagaagaaaataaaaattataccattcattacttttaacatttggcattatagctggctcatataggggtgggtgtgtgtgtaagaaagaaagtgagagagataatataaaccaatttttttccagaaagatagaaccatttggtgcatgaatcactggtaattttaaagttatttttaaaccataaaggccttactacactgtcttttaaaatattttgtgattattatttcccagttcatta

SEQ ID NO: 709020 - DNA, 1196 bp, Homo sapiens
ccatccacaggcagctctttctgattccacatctggccagctctgagacaagcctaacaccctgcttttgtctgggtcaagatgggagacagttggtcctggcggtcaggtagagcatctgttctgtatcaagcctcagctagatgagagaggagatgaacagaacaattttcttcttcttaaaattttattcccattgaaagagatatgtaaatgaataattaaataaaacatagaaattcctccagcatgagttcaatgagatgcttgacctttctctgaaacaagtgttctatagtgccttagacaatatatgcccctactgtgggcctccagtttcccatctataagaatagagggctgaattagatgagctcctgctctgaatctaatgttcctacaatccagtgaccccagaagcttctaaaagagtcattcatggccagagcccagacctgaatatttttctccagcttgctcttcccagaacccagtcttctctgtgttctttgctcaaaggtggcttcgagttatagggtttgtcccaggaactgccactaccatatcctgctgtttgtgttagccataaagccccacaccattgcatctaggagctgccccagaagtactcctagcctcagcattcctgctggcctaaaggccaagcaggttcacacaaggccattgtcttcttgctctctgagtccccagcctattattcctccatctgattttcgtttcagcctcttaaaacacagctctcattgtaaaatctccttgaaaacctgtgtctccccaaactctctcaactcagatgtgaactccttagcctggtgcttgtacttctccagaccctgtttccagcccrtgccacctctttttagcattacaacccaatattccccaacaggtcccttatgttcaagcttcagagcaactttcccgttattcttcagaactgacttgccctccccacctgtcaagactcagcttaaatgtggcttccacccagaagcttactctgacctccagcccatagggctcctaaaacactgaagtgttgacaccattcatcctgagcccgagagacttgcttcgttttgtagctgactggtgatctcctatgggtacatcttttctccctgagagggccaaagtcccacaagaatatgcccatattagccagcatctggcac

SEQ ID NO: 709021 - DNA, 609 bp, Homo sapiens
aacaatcacataagtgcctttctcttgaaactgacacgcattctgctttggcatacagtagaagtgcctgaaatgcagttctcatatcactcagaatagttaaaatggcatgtaccaggggtcagartttaatacgcttaataattgttactgcttcatcagatattcctaagtggaattggcatttaaaaatttaagtgtgtggcagtgaagaatacaataactgtaagtacaatttggtgccactgccttgatcatattaaggtgcaattttacttaccattgcttttgcaccattagtgcaaatgtcaataagtggagaaaggtaaataacttcttagtatttttataaaaatagtttcgacctcacagagctcctgaatgtgtcttaggactccccagagatcaggggccctactttgagaatcactgatctagtttaatactaattttatggtgaggaaactgaggccggtgttgaggggaagcaaatgatttttccccaaagcatacagaatgaagactaaatcgcagccttttgcattcagggtcaaagttctgcccattcctcaatatcaggctagttggtcgctaatatcacagaactgg

SEQ ID NO: 709022 - DNA, 609 bp, Homo sapiens
aacaatcacataagtgcctttctcttgaaactgacacgcattctgctttggcatacagtagaagtgcctgaaatgcagttctcatatcactcagaatagttaaaatggcatgtaccaggggtcagagtttaatacrcttaataattgttactgcttcatcagatattcctaagtggaattggcatttaaaaatttaagtgtgtggcagtgaagaatacaataactgtaagtacaatttggtgccactgccttgatcatattaaggtgcaattttacttaccattgcttttgcaccattagtgcaaatgtcaataagtggagaaaggtaaataacttcttagtatttttataaaaatagtttcgacctcacagagctcctgaatgtgtcttaggactccccagagatcaggggccctactttgagaatcactgatctagtttaatactaattttatggtgaggaaactgaggccggtgttgaggggaagcaaatgatttttccccaaagcatacagaatgaagactaaatcgcagccttttgcattcagggtcaaagttctgcccattcctcaatatcaggctagttggtcgctaatatcacagaactgg

SEQ ID NO: 709023 - DNA, 609 bp, Homo sapiens
aacaatcacataagtgcctttctcttgaaactgacacgcattctgctttggcatacagtagaagtgcctgaaatgcagttctcatatcactcagaatagttaaaatggcatgtaccaggggtcagagtttaatacgcttaataattkttactgcttcatcagatattcctaagtggaattggcatttaaaaatttaagtgtgtggcagtgaagaatacaataactgtaagtacaatttggtgccactgccttgatcatattaaggtgcaattttacttaccattgcttttgcaccattagtgcaaatgtcaataagtggagaaaggtaaataacttcttagtatttttataaaaatagtttcgacctcacagagctcctgaatgtgtcttaggactccccagagatcaggggccctactttgagaatcactgatctagtttaatactaattttatggtgaggaaactgaggccggtgttgaggggaagcaaatgatttttccccaaagcatacagaatgaagactaaatcgcagccttttgcattcagggtcaaagttctgcccattcctcaatatcaggctagttggtcgctaatatcacagaactgg

SEQ ID NO: 709024 - DNA, 1118 bp, Homo sapiens
acagagggtccagggttttcagtacttacataggataaagtggtaacatttaaaatgcatatccctgaagggatgagctactagaaaattaattatcctctctttgcccccctcacagcctctctacatcatttattgtagctttggtgtcccactcccaccactaattttctttcttgagctttgtcctcaatttctgttgctacaatgcaatatcaatagaaggaagaatgacaaacacacacacacacacacacacacacacacacacagagagagaaatcctgaaaatgttccattgatctagagcagagaactaactttggatgttgttggcattggagggactgcagaatgctgaaaagacactactctgaaagtcctgtggccatggttcaagacccagctctgctacttactcactggggactcagccaggctcttaacctccatgagctgcagttacctaatttgtaaatggagataacggtcactgcactacagcctcccagggcttgttgtgtgagtcaaaggtgacaaacactgtgccatctctgtaaagtactaaataaatgcctggaatttgtgttatccttttagaacaatctcttagcttgtcacatcgaggaccctctcccctcagggacctttcctccatgactgtcctctccgagtcatctgracatagtctgacttccctgccacctgtatctgcaggaagatgctttatgatcgctgtgttcctatgccactccagtagcaacatcaatctgcttctgctcattgtacaaacatttgctgagtgcctactgtgcctcagacggtgtgctaagtgctgaggttggatataaataaattatgattcttactgttatctacgaatagttaacctcagaacatttacctactctccagccaggaaattcatgctgaatctcaaatatgccctttctggtgttaggttacacctgttccctagttctgcaacatctgtgtaatgtttgtgtgttgtttatctctagacctcgtaagcccaaagctgttctttccgagtggcataggatcgtatctccccaatcactagcatttctccaaactaaaaaatctgggtgatatca

SEQ ID NO: 709025 - DNA, 655 bp, Homo sapiens
aagtaacttgtagtttcccttcataacatttattataatatatagtcatatatattttttgtatttattatctgcccattagtgtattagcactatagatgcaaagacaacgtctgttctattaaccatatgttatgttaggactatttcagtgtcagcacattaaagtgttcaatatttaataaatgaatgaataattgaatgaataaaaagcattcctttcagtgaatatctctggtcctctagatgttaagttgatgagatattatctatttttctagagaaaagacaaagcctcacttcaaaacaatttggaagcatatgctgctccctttttggcttctctggcatcctccmaactgctataagtactagtctgtctcatattcatgtctggaattagatagtcacccactttttcactcctttcaatgcctttaaaagtaattactcatgagtctttttagatttccatataagcctttaataacttaacctttagaaatctagttatctgctgacatcatgtaacacattaatgtattctatgaattcttttgtcctccaaatataaaaagccacatcatgtaaatggctataaaagaaaatctaatataaaattttaactatatatgatccctcccccaagattcca

SEQ ID NO: 709026 - DNA, 636 bp, Homo sapiens
tctttgtaagactgaaaatactttgctggattttccccatcatagtaacttctctcataaaagcactaaagggactctgcttttaggtccagttcttagctttcaatctgcctgtatgcaacttcagagatcaggtcaatcattccaatcaccaaatgagtttcattttgttgcrtattcatggactcttatctgacccattatctgcgacctaaaaacaaaacaaaacaaaacaaaacaaaacaaaacagaacaaaaccttgcccttgatcacaagaaagatctttattgaataaaaacaactcaaagttaatgctcatgctaccttggaaggctgtttggcagtatccattaaagctgaatgtatgtgcatcctaacacaacaattctactccttgatgtgtactcacagaagtgcataggtacgttaactaaaagacaagttcaagaaagttcaaaagattcacacggagcactattcataatggccttctggaaactagaaacaactcaaataaccgtcaacaatagaatgggagaatggaaaactaaactatgcctaaatgcaatgatacggatgaatctcacaaacataatgatgactaaaaaaagttagacagaaaagagttcgtattg

SEQ ID NO: 709027 - DNA, 620 bp, Homo sapiens
tgagatcacgccattacactccagcctcggtgacagtgtgagactctgacttaaaaaaaaatgcagaaggttcaaggacttattgttgaaagctacagaggaagagaaacccaccaaagtgataagcaaagaaaggacctgaagaatacagaattgtactcttattacatttttacccacataggtaccatttgccacgctccccaattcttttgcatagagcagattcatatttctgtgaagtattattttgcttcttccttaggacttcctttaacattttcagtaatccagatctcctagtgatgaattcttttagcttttgtatgtctataaaagcatttcatcttagtttttgagagacatttttgcatttgttttgttttgcttagtatttttaacatgtggtcccactgtcttattgctggcactgtttctaaggagaaatctgctgatatacttttctttgtttctttacrcatattatcttttttcctttggatgctttttaagattttacctttatcactggttttgagcaatttcatcataacacgccttgatgtagttttcttcatatttcttttgcttggaattcactaaacttcttgggtctataa

SEQ ID NO: 709028 - DNA, 922 bp, Homo sapiens
caatttcttcatgcaaatccaggaagcatgatcatgttcctttcaagagcagttgatatttcctactactgtagatattcattcagtcaacatagagttatttaataccttaaagctgccagacactatgtaggcatcaaaggagatatacagatgcatacaatgtaatttttgttaagtttctttcaaatctaataaggagaaacagatataaaagcaactaaatttgtataataagtaacataggaaatgctaagtaaagttgcaaacaagctgctggaaaaatctagctggaaactttgaaacattttattgaagggataagattggaaacggtatctgagtctaattttttacagatgaagttgataccagagattatcctcactctaggcctgcgacaatgtgatatgtgaatgcttttgatgatactgtgatctagagaccagggtagtaaacttttctggtgaacggctagatactaaatactgtaggcttgtaggctctgtagtttctgtcttaactattcagctctactgttgtgttgtcaacgcagccacagacagtacattctatgtgaaaaaactcattcacatagaatgagtgtgacctgtcagaactagtcacatgaccttacctggcacaggggagctgcggagcacgtggtttagacgtttgggaagctataactatctctgtcatattacttttcaaggacagtaaatcccatacccagcacatctaaagagtgggtatttggggttttccttgcaggggcactctacccttttttacccttctttcacattcaytctatgtgaatgagttttttcttagttccaccttctcagattttccttccagatatatctaagttaggataactgtctcttgaaagatagagatcagttagatagcttga

SEQ ID NO: 709029 - DNA, 1460 bp, Homo sapiens
ggctcagcaaaagacagctgctggtattttccctcttgccctttccattctgtaggcatgaatttcttacaaggcccaaacttttattgagatcttcctccagtaagtggaaacacagtagtagacatttcagtcatcattttaaatcaagtaaagacttgaagacaagaaggtttaattatctaagtttgtcactcatcactgttatcaacagatgtctttctaaggcttccaatatgcaagaccaaattgtaagtcttttcacactcttcatctgaaggtgtggaccagctcaccctgtgccttcgcatgtgtcaccaacaagtccatagggttggctggcggcaatgactgatattctagtagggtaagggaaagtgtgaatattaaacactgatttctcaagtcagcttaatgtgaagaaagcagtttcaacttgtcagtgacttagagaaatcctcttctagggaatatgaagggaaagaattgcagttcacacaatcccgtttaaagattctgttatgttttggaaaaaaagacttcaaagaaaacatgagacacaataaagagatgggaaataaaaatgatgacaagaccaatattgataagatataataaatttgtaattggctttgctgttttacagaagacccttcataaagcttatctgatcttcaatgtagccctatgcaataagtattgatattaattattttataaatagaaaaaatgaggttgagagattccttagaaaaatgttggtgtgggactcaaaaacatggatgcatgttcaaactcccatattaccccctacaaattatgtcctcttaagtcttaagtcgttctttaccaaatcatcttttcttcccatagaacttattgtcaactgaaattattttgctgacttattagatttgattttyaaatttccccactctccaagagaatgttagctccagaaaagcaggaaacttgcccagcttgtccactacactgttaaaccatgccttctccatagttggcctcaacaaatcatgatgttgattttgctttctttctccaaccttggaacacaatggggatcagctaatgcagcccatggtccaagtcccaaccacctgcagatctggtaagtgaatttttattgggatgccatgcttattctattgcatggctgagttgagttgttgcagcagtaatagtgtagtccacagagtctacaatatttactaattgtcccttgacagaaaaagtttgctgacccctggttcacaagaatcaagtagaagctatagattaaaaaaagaagtatttggcaagcaggattcttgctaaaaacaggttacagttggaagacagctatttcaacaacacatactcattaagtcagattaatacagctatttagcatgaaatgtatggagtaatcaatactattgtgtctgttgtttaaaaaaaat

SEQ ID NO: 709030 - DNA, 2858 bp, Homo sapiens
agcgcagacaaatggcattatagctaaatctacagcttcgtttaaagaagaaaacccagtcaagactctaaggtgctaatcctgagtctcctgtggagtccacacagcttggctatatagcaaatctcaggcccttttgagacagcaggctaaaactgcactgtggaaacaatattttgatttattttgtttgtttttctttgagacagtctcactcttttgcccaggctggagtaccgtggcataatcttgactcactgcaacctctacctctcaggctcaagtgattctcctgcctcagcctctggagtagctgggactatagacgtgtgtcaccacatctggcaaattttgtatttttagtatagatgagatttcaccacgttgatcaggctggtcttgaactcctgggctcaagagatccgcccaccctggcctcccaaagtgccgggattacagttgtcagccaccgcacccagcgacttttttattgggtgaccactacatctgctactgtaaatagaccctaaggtccagtgatactactctagtggagaattggctgctgatcctggaaggaaacccaccaattagggtaatcagcacaaaaaaataaagaacctacattaagtgccttctgctttagaaaacacctggattcatcacacaagatggaacaaacaagataaatcctctatttgagtatttgaagcaagaattcacttaattttgcaagaaatttatttgagaggttgggtagtagatgaagaaagagtagttcatcctcattttttcatgttatttcaccctgataaggtctgcctcctgtcctcattaatccctctacattccccaatccaaggaaaacacctaacagcttggtatagaatttcagaattcttttcctttgcattatgaaagagactagagagtctctgtagcatgagtttgtttggtgactagatgctcttttctcctagccttggtgaggtaagaagagcagctgtgagaattaacaagaccagagttctgtgcctggatccgttcttcatctatgggtgacctcacaagtcctctgcctcaattctgtcaccgaaagaatgaccattttacctggtcaggccctggcatcgggtaagcctcggatcaaatctcatctccatcacttgtcaggtgggtgaccttggacacattactcaatctctctaagcctgtgtcttcattggtaaaggaggacaatgacagctaccccctgataaggccattgcaagcattatgctgaatcatgcatgcccagggctgagatgctcatcatttttgttgtgatcggtataccacagcaactagtgaggttgatgaaatgcaaggaaaatgcagtggaaagctatcaaacactgtacaaacaagatgggtagcactacaaaagcagtattttgttgttgttgtttcattattgttattctacctcttagtttaggtccattttagagtgacaagagacaccatgagaaaaaaaaatccagggattccttcttttacttatggggagctttgacataattgagaaatatatgtttgtgaaacattactaaaaggttaaatgagcatttacacacacacacacacacacacacacacacagtgagcctggaaaatacgtttgtgaagagataattgattctactattccacttgccccctagaaaaaagaaagggagaatgagggaatccccaaatcaaataacattcccttcaaatacaaaacttggagcgaataagcaattgactttcccatttggtgccttaattcctgtctgttagatttcctgctgtttcttgccggaaaatgttattatctatcactcttctggaatgaacagggtggagtacatctctctgaatctcactctccctcttccttgccctgataagcatggcagagctgggggctgttgacaggattcacattttcaactgataaagtgccatttacactatgaatgccaaaagagtggtgggtagtggtactcaaacatcactgtctaaggggggaaatagaccaggactcccaaacttagagagaatgccggaatgctggtgtccaagaacataaaaaggagsaagggaaaaagggagagttccaattagcattcatgtcagttattcctggtgaaattgtgggatcacagctttgtggattaaggattaagagcaaatttggctttgtaaatctccctccttgggataaatatctgttgaggattttctaaaccagtcacatatttctttaacaccccaatatttttactttcctttaataattagcttctatataaaaggcctgtttgcaattttttttgccctacattttagaggtaaaatgtccactgccaatttaattagttctcttgcctcccacctgtctctgacctggcagatgagcaatggaccaactagtaacatccctcagtgagctcactggtcagtctgggcccattattctgccagcttccacagaactggatccaatcttcagggatcatggtgcaataagcaaccagctttgatgcattctccacagtcttttctgaaatagactcagcacttgataaagctcacatatggctttgttcctcacattccggatcagaactgtagacggagtagttagatgagcagtgaggagtggccagggcttagccagcattctactgacactgctgtctaaggggtcctcctggggaggagggggctcttggcatcctgtgccagtcctgccagcagcttgtcagcctgaccatcattaggggctgctggtccaggcagtcggagcctgggggactggagacacaggaaaa

SEQ ID NO: 709031 - DNA, 665 bp, Homo sapiens
acattttgttagccattaattaactttatgttcttgaaagtaataaaattgcatttcttttaaaggaatttataattagtctgaaccacacaatttaacactgaattatatactgtcttctatcgttctttgatttcttcctctcttccttttccctctttttcctttcttccccgaccctatccaccacataggtttacaaggtgactacrctgttctagtccatcttgaagaatacaaaatgaatcaaagagcatcgcttctgccctcaaggagcttcctatgtggaaaggaagatgtggtacataaaggtacacatgactatattatatggatgaaaacaattaattacattaaagagtttgagataaaaatctaagtgctgtgagaatttgcaataaaagaacaattacttccaaactgagagagaacagggattgggaataaagaaggacaccttctgagatacagaatagggaaaaggtattacaagcttaggaatgagcatgcacagattccaagaagcaggaaaatgtagagcacatgtagaaaccacttgaggtactagagagaacctaaattttggaatcagatgggcttgggttggaataattgctctacagctcacttagctgtgtgacctaggccaacttacttacaccctt

SEQ ID NO: 709032 - DNA, 665 bp, Homo sapiens
acattttgttagccattaattaactttatgttcttgaaagtaataaaattgcatttcttttaaaggaatttataattagtctgaaccacacaatttaacactgaattatatactgtcttctatcgttctttgatttcttcctctcttccttttccctctttttcctttcttccccgaccctatccaccacataggtttacaaggtgactacgctgttctagtccatcttgaagaatacaaaatgaatcaaagagcatcgcttctgccctcaaggagcttcctatgtggaaaggaagatgtggtacataaaggtacacatgactatattatatggatgaaaacaattaattacattaaagagtttgagataaaaatctaagtgctgtgagaatttgcaataaaagaacaattacttccaaactgagagagaacagggattgggaataaagaaggacacyttctgagatacagaatagggaaaaggtattacaagcttaggaatgagcatgcacagattccaagaagcaggaaaatgtagagcacatgtagaaaccacttgaggtactagagagaacctaaattttggaatcagatgggcttgggttggaataattgctctacagctcacttagctgtgtgacctaggccaacttacttacaccctt

SEQ ID NO: 709033 - DNA, 1355 bp, Homo sapiens
ttaattcattgtctggtaatccaataaggggttattgtttgaagctgtttgagagccacttgcctcactattaactcaaaattgcccaaaaggcggtactacaatgtcattctccctgccccaaagaggacatgacattgaaagacatttgacatccacatttgacaacacttgaaatggcaacattatggcttaagcattcacaagtctatggatatgataatggaactagtgacatctaattactaactggcaattaatgataatagccctttgtgaatatgtagggccattctctatagggagctccttgctctttgcacatattaattaatatagataggcaggtaggtgatagaaaggtggctttataacattattgctgctgagtaaactgagtcaggttccaactgcaccttgtagatgcacaacgattccttgctgttttgaaactaaatggattacaattttaagagtaattaaagaggaatgagaactgtagggaagtgaagggaatggatgtcaaaggaaaattcaaggtatcactaactatttgaattcttgatttacttccacccatgtttctggaataggaattggtcatttttcccggattggtagccagatatgaaacattaagtcggctttcagcaaaatgatgtctggtatattcagaataaggccgatttattttctccccacagagccccattgatgctgaatttttattgcccaatagaattcaacctggttgtgattatcccattggtcctgctagataaaacccatgtgtatttgccaaacacccacttggaaatggaaaatttaattaaagacaggaaactgaatttaatgatctctaytgatctcttaaattccccaaattatttcattatggcttacttattgaattttcttaaggaattctaaaataaatgaacaattacctgaattttgcagtgttgtacatagaaatagagtgagttttcaccacactttcaaaaacaagtgagagtctaccccactaattcatatattctttcattcataagcatttattgagcacatacagtgtgccaatgctgtgctgagctctgggtgtactgatagaaaaagctttgatgtggcccttaagatgctcagtgtggtgatagaaaggaagttaaacaaataagtacaatccggagtgaccaattctacaacagaaagatgagcaagttatggggagtaatgagggcaaagaggaatgagagttaactttgtgagtagcccctgcctggctgtgcgataggggttcaaatccgactctatgtttatgggaagtactttgttccatctgcctatccacctgtcat

SEQ ID NO: 709034 - DNA, 1355 bp, Homo sapiens
ttaattcattgtctggtaatccaataaggggttattgtttgaagctgtttgagagccacttgcctcactattaactcaaaattgcccaaaaggcggtactacaatgtcattctccctgccccaaagaggacatgacattgaaagacatttgacatccacatttgacaacacttgaaatggcaacattatggcttaagcattcacaagtctatggatatgataatggaactagtgacatctaattactaactggcaattaatgataatagccctttgtgaatatgtagggccattctctatagggagctccttgctctttgcacatattaattaatatagataggcaggtaggtgatagaaaggtggctttataacattattgctgctgagtaaactgagtcaggttccaactgcaccttgtagatgcacaacgattccttgctgttttgaaactaaatggattacaattttaagagtaattaaagaggaatgagaactgtagggaagtgaagggaatggatgtcaaaggaaaattcaaggtatcactaactatttgaattcttgatttacttccacccatgtttctggaataggaattggtcatttttcccggattggtagccagatatgaaacattaagtcggctttcagcaaaatgatgtctggtatattcagaataaggccgatttattttctccccacagagccccattgatgctgaatttttattgcccaatagaattcaacctggttgtgattatcccattggtcctgctagataaaacccatgtgtatttgccaaacacccacttggaaatggaaaatttaattaaagacaggaaactgaatttaatgatctctactgatctcttaaattccccaaattatttcattatggcttacttattgaattttcttaaggaattctaaaataaatgaacaattacctgaattttgcagtgttgtacatagaaatagagtgagttttcaccacactttcaaaaacaagtgagagtctaccccactaattcatatattctttcattcataagcatttattgagcacatacagtgtgccaatgctgtgctgarctctgggtgtactgatagaaaaagctttgatgtggcccttaagatgctcagtgtggtgatagaaaggaagttaaacaaataagtacaatccggagtgaccaattctacaacagaaagatgagcaagttatggggagtaatgagggcaaagaggaatgagagttaactttgtgagtagcccctgcctggctgtgcgataggggttcaaatccgactctatgtttatgggaagtactttgttccatctgcctatccacctgtcat

SEQ ID NO: 709035 - DNA, 644 bp, Homo sapiens
cactttagctgctggcatgtgacttatttatttggtttgtatttgccttccttattaggaatataacctccatgagggccagagatttttacagttttcatttagggctctattgccactgcctagaagagtgcctgactataaagggggttcaataagtattcattgaatgaaaaaaatgatccttattccttagtcttaaataacttaattcttatgggggaaatctgacacattccaacataattataattccaacacaactccaacataattattaggcaaagaagattatattggttaatttatgatgtgtcagtgttaaccaagagatgaaaggggaaagaagggagaaatggttgttgttgaggatcttttattccaagcaaattttgcttacattatttcatttattttaaccagtgtggtagttctaaaaacaggtggtaaatgtcccatattactaatgaggaaactgatgcactaaaaggcagttatttgtmtaaagttgtataactagcaagtggtggaaacagtattcatcaggtctgtctggctttagtacctgtgccaattatttgcaaagttgttcatactaatccttagaaataagcatattttaactggaacacactccagacaag

SEQ ID NO: 709036 - DNA, 624 bp, Homo sapiens
taatgctcccttctcagggattcccagagccrgcctccagccctgacccacattctccttggggatggagaggaggcaacagtggctttgtttttcccctagactctatcaaacacaaccaggaagctttttgttgttgttgttgttaacaactgttaaataacagaaaaatggtcttccaaaaagccatccggtatcaaagagactgaaccattataactgagtcatataaccataagggcttcggtacaatactcattctggcaaccttcgagcagtaccaatcacttacatgtagataccacgttggagaggacacaaacatttcaccaatcaaatctccctcacactaactatagagataggacagaagtaggctttggagaagtggaaaccacactcctgggtaacaaagaaagactaagacggcttgcctttccattgtcatagttgactaggacgtgcttagccagcaagagtgaagcgactttacagtgaatatctcaaaatactttgcattaactcatcattgggccaattgttccctcctctcctccggtgacttttctgatattaaattctcagggaaactcatctgctacttttggccactggggatcattt

SEQ ID NO: 709037 - DNA, 645 bp, Homo sapiens
attagtccgttaggcagtgctgayaaagacatacccaagactgggtaatttatagagaaaaagaggtttaatggactcacagttccacgtggctggggaggcctcacaatcatggcagaaggcaaaaggcacattttacacggcggcagatgagacaatgaaagccaagagaaaggggaaaccccttataaaatcatcagatcctgtgagactgattcactaccaccagagcagtatggggaaaactgccccgatgattcaattatctcccactgggtccctcccacaacacataggaattatgggagctacaattcaagatgagatttgggtggggacacagccagaccatatcaggcactgagctgggtgtttgggtgtggaaaggcgtacggcctggacttggcttttgggggcttgggtccaactggaaaagctggctgtggacaaagaggtcatggaccttgtgaggcagagtacaccatgaaaacgtgggcgatcacgctgtccgtggctggagcagagcccctctgttggagtgaaggctttctgtgggttggcaggactgcactagctcctagctcctgggtggaagtgagcagacatcagtgaggaatcagagagccccagaagccccaatgcatg

SEQ ID NO: 709038 - DNA, 1175 bp, Homo sapiens
tgccaaggaggggtatcattgtttatgtcactaatgactacatcctgggcctccatgcattttgtaacccctgttcctttattagagcaatcagaaaaaagatcacataattaccaagatgttgctttatgggcaaggggtacggccacatatgccttcattgatgtgaataataccaccctgggcattactatcacccagatttcacagatgctaaacccccagcatrgcagttaggagcatggactgtggatcataggagattggggttgaagcctggcactgctacttattagctcttggttctcaagcaaattgtttattttgtatgggcctcactgtctgcacctataaaacagggacagtgatatttactttcaggatgttgggtaagtatcaaatacccggcatgatgctcactgatagctgttggcttaggctcaattttgaggtcactattatcccacctattcactggtgtgagatcaccttcaccaaggtaatgttccatgaggacggtgatggccagagaaatgttggactgaatcagggcacagctttcttggaggctatgctcaatatttattgtcaatctctctgcctctctctgtctctctttctctctcttaagtcagtctctctgtctctctctatctctctctctttctctctctctctctctttacccaaccacttttcttttgaatagccatcccagacatcaggtaaaccttgccctgactgaaagcattctttgaaccactttcttcaagcaaataggtacatttaattctaagaggaccaagacaccttagaagcaatacatggaaacctccttaattgactcagcaattgcagaatgagtccctgagtgacttttaccccaaatttagaagttggaaaggggtcacttacaacagaaaatatgtattttctagtttttttttgaagtatacttggcctatagtatttcctgaggggatcctaatgcctttctattaaagcatgaacccgaagttgtaaatttagagaaacaatttgaggtgagggtttgacataacagatggccaagggactaatgacaagatcatactcttggctgagcatttggaatgtctcattatttgtaaaacattgtttagaaattgccttcctggcatagaactggttgacac

SEQ ID NO: 709039 - DNA, 1175 bp, Homo sapiens
tgccaaggaggggtatcattgtttatgtcactaatgactacatcctgggcctccatgcattttgtaacccctgttcctttattagagcaatcagaaaaaagatcacataattaccaagatgttgctttatgggcaaggggtacggccacatatgccttcattgatgtgaataataccaccctgggcattactatcacccagatttcacagatgctaaacccccagcatagcagttaggagcatggactgtggatcataggagattggggttgaagcctggcactgctacttattagctcttggttctcaagcaaattgtttattttgtatgggcctcactgtctgcacctataaaacagggacagtgatatttactttcaggatgttgggtaagtatcaaatacccggcatgatgctcactgatagctgttggcttaggytcaattttgaggtcactattatcccacctattcactggtgtgagatcaccttcaccaaggtaatgttccatgaggacggtgatggccagagaaatgttggactgaatcagggcacagctttcttggaggctatgctcaatatttattgtcaatctctctgcctctctctgtctctctttctctctcttaagtcagtctctctgtctctctctatctctctctctttctctctctctctctctttacccaaccacttttcttttgaatagccatcccagacatcaggtaaaccttgccctgactgaaagcattctttgaaccactttcttcaagcaaataggtacatttaattctaagaggaccaagacaccttagaagcaatacatggaaacctccttaattgactcagcaattgcagaatgagtccctgagtgacttttaccccaaatttagaagttggaaaggggtcacttacaacagaaaatatgtattttctagtttttttttgaagtatacttggcctatagtatttcctgaggggatcctaatgcctttctattaaagcatgaacccgaagttgtaaatttagagaaacaatttgaggtgagggtttgacataacagatggccaagggactaatgacaagatcatactcttggctgagcatttggaatgtctcattatttgtaaaacattgtttagaaattgccttcctggcatagaactggttgacac

SEQ ID NO: 709040 - DNA, 1630 bp, Homo sapiens
tctttcttttaattccccagagcccagagatccagacccagcctcaatgctcccacctgcaactgtttaacagcaactaaacctttcctggacacaggttcctcaagggctgaacatttgagaaacctattatcattatcaacctattatcaacaaagatgttatcattgtctactggttgcttctctctctgggcttgttaaggtagagctgtcagagacttgtaaggtgggtgtgggcaaggggttggactcagagacccatctgtaggctcaggggctggccctagcctgggcacattggccttcaggcctaacagcctcaagtcttctatggagtcttgatgcatctggtgggaagacactggggaggggactaagttccctaatttcttaaatcttctcaaacctgagggagacttcataaagcctttaaagtacattaactgaacttcaacacctgggcaacaatgagtggcatctaatgttatmatcgtatctctcctttgcagcaagacacctaagttgatcctggagctgccacttctcctttacttccacgtactgtttctacccattcccccagcccaacacctccaggcgtgactcttttctagccagatcctcagccaaatgctagaaacacaatgctgtaagcagacaaggagggaaaaatcaaagtgcaggcagtaagcctcctaccctgcagcaaatcatacatggacaaacgcagggtccattcatcctttctttcacactgttgttgttgctcatctctatttcatctcaactactccaaagacaggaggaggccaaggtctatagtattttaaaggagagttctcatactctagactaataaagccaaagtaaattgctgttaagaatcatttagtgaggtttaactacagcatctaatagatgtgcctgctaatctctcccccatgggacccaatgatagttgcatctagtagtaactccattgattatgtaagcgtaatttgtgccaagtcatagtatgatattataataaccattttgtactaagcacctattatttgataatccccatagatatacatggggaaggtcattttttctaacttataagtagtgaggctacttgtaggtacaatattataataaccattttgtactaagcacctattatttgataatcccaatagatacacacgggggaaggtcattttctctaacttacaagtagtgaggctgaggcacagatttcttacacagagaggtaggataggaaagcctatattttcttctgaaagggagggctcatctaacgtctgcctttggttcttgcggtagacagaataatggccgccaaagatgcccatgtcctaatccctttacaggacaaaagggattttgcagatgtaattaagttaaggtcttgagagagagagattttcctaaattaccctctgtggtctgatataatcacttggttccttatgagaaagaagcaggtggatcagagtcagtagtaggtgaggtgaagatggaagcaagaggttggagtgaagggaggaaggggccacgagccaaggagtgtaggcactctgcctctagaagccagaaaaggccaagaaattgattttccc

SEQ ID NO: 709041 - DNA, 672 bp, Homo sapiens
tgctccgaccttcagtccccaagtgtttcaccctgcctttgtagaacagacagtgtcraggctcgggctccaagctgaactctagcactgaagaggtttggatggcgtcacgaagaggaagaagagaggagagtctacagaagtcaatctctccaaagggtgtaaagaagaaaacatctatgcctgtccccatggggataatgacttcaagagtaatctatacttatctagggttttgccttctgcaaagcaccttcatgcacgttatcagctcttctcatgttaaccccatgagctacacagagcacacatactgttctcattctctaaatgaaagagctctgatccactgggttagagagacccgcttacgtggatattgccatcagtgcccaaaccagaacgcagctgcctgctcccagtctgggatttcctgcctcacaccagtgtctctacaaaaggagagcccaggtgtgaaggcaacttgaggataaaatacgactgcaggaagagggattattactacaaaattcagatcctctccccttctagtacaggcatgcaacgtcctgaagattcgcatcctggtcatctcaggtacggaagtaccctagagctggcagggacagcagagatggagccaaatctctcgtttcaccataaggagctgaa

SEQ ID NO: 709042 - DNA, 1490 bp, Homo sapiens
ttggtgaaatcatctgtcctcattagagtttaataatatcatgcagttatttctcaaagagcttgtactccttagatttgctggaattcctcaagttaaaaagaccagggcctcaatratgggaggtctcattgccaatagctacaaccggctgtagaatttattaaaaacatgtgagtgcattgtttggggaaagaatcaagaacaaaagcagtgcttgttttgtacttcactgaactacttccatggcctccattcaactttagctgcagttttggtgacttgattcacagactgtcggaaagttatgagctatggaatgtgctctctccaatactaaagaggccagtcatatatatgtagggtgtccttctttatcattgtaggttgtatgaagtcagtgattcccatagaaccttggggtcacagatgccaggcctaatcttcttttattattcattcaatctttattttttcaaacaatggtctcactctcttgcccaggctggagtccaatggtgcgaacacaactcactgcagcctcgaccgccccaggcttaggtgatcctcccacctcagccttccaagtagccgggactacagctgtgtgccaccgcacctggctaatttttgtgttttttgtagagatgggtttttgtcatgttacccaggcttgtcttgaactcctgggctcaagcaatccacccaccttggcctcccaaagttgtggcattacagacatgagccactgcacccagctctaatcttattttaattttagaaatctaacttgacagtttctggtgcctggatccatatttgtctcagaagattgaattgtggactgtgaccttctctcccaaaagtctctttcagggtagaacttctggttatggcaacatgaagagatagaccagcaagttttcctccaacagcaacatgaaaactgtactaaatactaaaaacaaacatttgaagtcactggaaaattaacaaaggcaagcaatatgtgataagagctttcttgtttaagactccttctgtcttaggtaaggactgcaagttggtggcctttccttcttacctatgagtgctcttcagcctcccagcagataactgcagccctagtggctcaatatgggcagtttatagagttcagagcccaaatcagctagaaatgtaaatgagaatgttgaaagagagctgcagaagagttgagatcaacaatgtgaatgcaaattatgctcatccctagttgaacactaaactctgcatgggtgtgggccacttgggaatctggtgaaaaaccagaaagaaactagagggaggtctaccctccaaagagataaatgatcctggtaagatctgcaagtcttcagtaacatggactgagtgcatttgccaacctgcacagagctcagtagaagaaagcaaaaatcttactggcttgagaggtgaaaaggcaggatttgagtctaacaaaacaattg

SEQ ID NO: 709043 - DNA, 1115 bp, Homo sapiens
agggaattttaagggaataataggacattttaataagtatgcatatacaaatacaaaaataatggaagttaagctttttgggcaatgccgaagcacatgattttgttcattttttattttaattttttttccataggccatctaagaccaagaagtacatgatttattttattttatttttgagatggagtgccgctctgtcgcccaggctggggtgcagtggtgcgatcttggctcactacaaccttggcctcccagattccagcgattcttctgcctcagccttccaagtacctgggattacaggcacgtgcagccatgcctggttaatttttgtatttgtagtagagatggggttcaccatgttggccaggctggtctcaagctcctgacctcaagtgatctgcctgcctcggactcccaaagcgttggtattacaggcatcagccactgcacccagccaagaaatacatgattttaaatgaggtgcatttaatatcttcctcactgtaatggtgatgcttgctcattctacaaaatacagaaaaacaaaaacaataagacaagagactttagtccccaacccagagaaacctttagttactgtatggggcattttccctcgtcttttttactacttattttttcaacaagctgcattttgaaatatagattgtttcactattaagaacagtatgtactcaaaatttttagaaaaaaccttcaygcctccggctcacatcacagtgacctttcagggtcacagagcccttgagaatctcgggttttaaaaatcattttaactatgcagacgatactcaaaattacagcttttcttcagattttagagaaacctcttctgtgggggcaagaatgaatttcatccccttggttattaattaatgagcaccttgagcctaagcaggtgttaggtgataatcaaagctcaataaacttattaaaaattggcaatgagatatatttacaaagccatttctttaactgccttaaaccctttctggaacaaagctgagaataaatcatcttttaaaaatatacatacacaatatttctttaccttccaagcgttttcctttgatatcaaacctgtgcag

SEQ ID NO: 709044 - DNA, 1100 bp, Homo sapiens
tctttcagaaacaaatgcctcatccctgcacatggctataactcccgaggaaggattgttcccagaggacgtcggtagcctgctgagaccctgcctagaggaggaaggggaggaaggcagtagattaatcaggttttacatattccgccttttatgatgctttgacaacttggggccttgctggtcctggaggggctgccccttcccaggccagctgattcctcgagacagcaaatacctggggaggatgcagagacggctctggcccagcttccctctcttctctctgcgccccgactacctcagtgctttccatgcatggctctgtgaggcgtggcccctcctctcaggaactgtgagtagtagactctttgttaaggtcctggtctgtgtctgtcaccttgccatatctcattaaaacaaaatcccaggaacgcttgaccacagctgccttccccgaggccagcagaccctctgcgccaggcaggtctgtgtggctgagaggcccaccatgctgggtcggggcaggctttgtgctgcttccgttcaagtgaaaaccaagcccctttagaaaaaatggcaggaccaccggcagtgtttagtgaggaccttccagcaccaccagcccctttggcgtttttcccgctgcagaggctgggactctcactggcctccaaactgcacctgaggcccagcggccagtcctcacctctcgcttggctttcctgagaaacatctggtcggtgcgccggaaggcttctctgagggctccctcagggtctgtgggcagctctggctggcgggcagcrttggtgtgcacgtggacagcggcgtacctcgcagcatccacgcctccgtgaccatcaaacacagcaaagtaggcgcggttcacagggtcctggtggggatgtggtgggagtcacagacccgcgggacccagggtgctcccagtggggcgtggcgccaggcactgatggggtagagtctgggagaatcagtatggccttcgcccggcttatgtgcgtatgagggggtaggtttggaaaaggacagctcgcgggagcctcggtttcaccatctgttatgagttgctacaagca

SEQ ID NO: 709045 - DNA, 1100 bp, Homo sapiens
tctttcagaaacaaatgcctcatccctgcacatggctataactcccgaggaaggattgttcccagaggacgtcggtagcctgctgagaccctgcctagaggaggaaggggaggaaggcagtagattaatcaggttttacatattccgccttttatgatgctttgacaacttggggccttgctggtcctggaggggctgccccttcccaggccagctgattcctcgagacagcaaatacctggggaggatgcagagacggctctggcccagcttccctctcttctctctgcgccccgactacctcagtgctttccatgcatggctctgtgaggcgtggcccctcctctcaggaactgtgagtagtagactctttgttaaggtcctggtctgtgtctgtcaccttgccatatctcattaaaacaaaatcccaggaacgcttgaccacagctgccttccccgaggccagcagaccctctgcgccaggcaggtctgtgtggctgagaggcccaccatgctgggtcggggcaggctttgtgctgcttccgttcaagtgaaaaccaagcccctttagaaaaaatggcaggaccaccggcagtgtttagtgaggaccttccagcaccaccagcccctttggcgtttttcccgctgcagaggctgggactctcactggcctccaaactgcacctgaggcccagcggccagtcctcacctctcgcttggctttcctgagaaacatctggtcggtgcgccggaaggcttctctgagggctccctcagggtctgtgggcagctctggctggcgggcagcgttggtgtgcacgtggacagcggcgtacctcgcagcatccacgcctccgtgaccatcaaacacagcaaagtaggcgcggttcacagggtcctggtggggatgyggtgggagtcacagacccgcgggacccagggtgctcccagtggggcgtggcgccaggcactgatggggtagagtctgggagaatcagtatggccttcgcccggcttatgtgcgtatgagggggtaggtttggaaaaggacagctcgcgggagcctcggtttcaccatctgttatgagttgctacaagca

SEQ ID NO: 709046 - DNA, 1392 bp, Homo sapiens
tctattccgacatcctccaacatggaggaaacgcagcagaaatccgtgagtggatgctgtctcctaggcggggatgggggagacctgtggtcagagcccccgggcagcacagccactgccggtccttcccctgcagaacttagagctgctccacatctccctgctgctcatcgagtcgcggctggagcccgtgcggttcctcaggagtaccttcaccaacaacctggtgtatgacacctcggacagygatgactatcacctcctaaaggacctagaggaaggcatccaaatgctgatgggggtgagggtggcaccaggggtccccaatcctggaagcccactggcttcgagggctgggggagagaaacactgctgccctcttttcagcagtcaggcgctgacccaagagaactcaccatattcttcatttcccctcgtgaatcctccaggcctttctctacacctgaaggggaaggaggaaaatggataaatgagagagggagggaacagtgcccaagcgcttggtctctccttctcttgcttcactttgcagaggctggaagacggcagccacctgactgggcagaccctcaagcagacctacagcaagtttgacacaaactcgcacaaccatgacgcactgctcaagaactacgggctgctccactgcttcaggaaggacatggacaaggtcgagacattcctgcgcatggtgcagtgccgctctgtggagggcagctgtggcttctaggggcccgcgtggcatcctgtgacccctccccagtgcctctcctggccctgaaggtgccactccagtgcccaccagccttgtcttaataaaattaagttgtattgtttcatctgactaggtgtccttctataatattatggggtggaaggtggtggtatggagcaaggggtaggtgggaagacgacctggagggccttcagggtctattgggaactaggccactgaaatataagaggtttggctgttcctgggccagaaaaaggctgacatatcactgctgtctattactcactaaggccattccaccagctcagtggtcccagcttgctggtcatagctcattggtcatcccagagatgacttgaaggcatttcttcctcccccaccatcaccagcaacaccaaacctagccccccaggagcgggaagaaatgaaaacaagatgggctattaagtgcagaggcaaaaactccccaacaggtgaggaaacaatggcatagaattacttgtgttcggaagaattttaagatgaatattccttaagcccaactactctcgggaaatgagaacaatgcaaaaatgagtttgagacatatggttccagagcatttggaatctgaattagggcaagggaagtggaag

SEQ ID NO: 709047 - DNA, 1392 bp, Homo sapiens
tctattccgacatcctccaacatggaggaaacgcagcagaaatccgtgagtggatgctgtctcctaggcggggatgggggagacctgtggtcagagcccccgggcagcacagccactgccggtccttcccctgcagaacttagagctgctccacatctccctgctgctcatcgagtcgcggctggagcccgtgcggttcctcaggagtaccttcaccaacaacctggtgtatgacacctcggacagcgatgactatcacctcctaaaggacctagaggaaggcatccaaatgctgatgggggtgagggtggcaccaggggtccccaatcctggaagcccactggcttcgagggctgggggagagaaacactgctgccctcttttcagcagtcaggcgctgacccaagagaactcaccwtattcttcatttcccctcgtgaatcctccaggcctttctctacacctgaaggggaaggaggaaaatggataaatgagagagggagggaacagtgcccaagcgcttggtctctccttctcttgcttcactttgcagaggctggaagacggcagccacctgactgggcagaccctcaagcagacctacagcaagtttgacacaaactcgcacaaccatgacgcactgctcaagaactacgggctgctccactgcttcaggaaggacatggacaaggtcgagacattcctgcgcatggtgcagtgccgctctgtggagggcagctgtggcttctaggggcccgcgtggcatcctgtgacccctccccagtgcctctcctggccctgaaggtgccactccagtgcccaccagccttgtcttaataaaattaagttgtattgtttcatctgactaggtgtccttctataatattatggggtggaaggtggtggtatggagcaaggggtaggtgggaagacgacctggagggccttcagggtctattgggaactaggccactgaaatataagaggtttggctgttcctgggccagaaaaaggctgacatatcactgctgtctattactcactaaggccattccaccagctcagtggtcccagcttgctggtcatagctcattggtcatcccagagatgacttgaaggcatttcttcctcccccaccatcaccagcaacaccaaacctagccccccaggagcgggaagaaatgaaaacaagatgggctattaagtgcagaggcaaaaactccccaacaggtgaggaaacaatggcatagaattacttgtgttcggaagaattttaagatgaatattccttaagcccaactactctcgggaaatgagaacaatgcaaaaatgagtttgagacatatggttccagagcatttggaatctgaattagggcaagggaagtggaag

SEQ ID NO: 709048 - DNA, 1392 bp, Homo sapiens
tctattccgacatcctccaacatggaggaaacgcagcagaaatccgtgagtggatgctgtctcctaggcggggatgggggagacctgtggtcagagcccccgggcagcacagccactgccggtccttcccctgcagaacttagagctgctccacatctccctgctgctcatcgagtcgcggctggagcccgtgcggttcctcaggagtaccttcaccaacaacctggtgtatgacacctcggacagcgatgactatcacctcctaaaggacctagaggaaggcatccaaatgctgatgggggtgagggtggcaccaggggtccccaatcctggaagcccactggcttcgagggctgggggagagaaacactgctgccctcttttcagcagtcaggcgctgacccaagagaactcaccatattcttcatttcccctcgtgaatcctccaggcctttctctacacctgaaggggaaggaggaaaatggataaatgagagagggagggaacagtgcccaagcgcttggtctctccttctcttgcttcactttgcagaggctggaagacggcagccacctgactgggcagaccctcaagcagacctacagcaagtttgacacaaactcgcacaaccatgacgcactgctcaagaactacgggctgctccactgcttcaggaaggacatggacaaggtcgagacattcctgcgcatggtgcagtgccgctctgtggagggcagctgtggcttctaggggcccgcgtggcatcctgtgacccctccccagtgcctctcctggccctgaaggtgccactccagtgcccaccagccttgtcttaataaaattaagttgtattgtttcatctgactaggtgtccttctataatattatggggtggaaggtggtggtatggagcaaggggtaggtgggaagacgacctggagggccttcagggtctattgggaactaggccactgaaatataagaggtttggctgttcctgggccagaaaaaggctgacatatcactgctgtctattactcactaaggccattccaccagctcagtggtcccagcttgctggtcatagctcattggtcatcccagagatgacttgaaggcatttcttcctcccccaccatcaccagcaacaccaaacctagccccccaggagcgggaagaaatgaaaacaagatgggctattaagtgcagaggcaaaaactccccaacaggtgaggaaacaatggcatagaattacttgtgttcggaagaattttaagatgaatattccttaagcccaactactctcgggaaatgagaacaatgcaaaaatgagtttgagacatatggwtccagagcatttggaatctgaattagggcaagggaagtggaag

SEQ ID NO: 709049 - DNA, 1392 bp, Homo sapiens
tctattccgacatcctccaacatggaggaaacgcagcagaaatccgtgagtggatgctgtctcctaggcggggatgggggagacctgtggtcagagcccccgggcagcacagccactgccggtccttcccctgcagaacttagagctgctccacatctccctgctgctcatcgagtcgcggctggagcccgtgcggttcctcaggagtaccttcaccaacaacctggtgtatgacacctcggacagcgatgactatcacctcctaaaggacctagaggaaggcatccaaatgctgatgggggtgagggtggcaccaggggtccccaatcctggaagcccactggcttcgagggctgggggagagaaacactgctgccctcttttcagcagtcaggcgctgacccaagagaactcaccatattcttcatttcccctcgtgaatcctccaggcctttctctacacctgaaggggaaggaggaaaatggataaatgagagagggagggaacagtgcccaagcgcttggtctctccttctcttgcttcactttgcagaggctggaagacggcagccacctgactgggcagaccctcaagcagacctacagcaagtttgacacaaactcgcacaaccatgacgcactgctcaagaactacgggctgctccactgcttcaggaaggacatggacaaggtcgagacattcctgcgcatggtgcagtgccgctctgtggagggcagctgtggcttctaggggcccgcgtggcatcctgtgacccctccccagtgcctctcctggccctgaaggtgccactccagtgcccaccagccttgtcttaataaaattaagttgtattgtttcatctgactaggtgtccttctataatattatggggtggaaggtggtggtatggagcaaggggtaggtgggaagacgacctggagggccttcagggtctattgggaactaggccactgaaatataagaggtttggctgttcctgggccagaaaaaggctgacatatcactgctgtctattactcactaaggccattccaccagctcagtggtcccagcttgctggtcatagctcattggtcatcccagagatgacttgaaggcatttcttcctcccccaccatcaccagcaacaccaaacctagccccccaggagcgggaagaaatgaaaacaagatgggctattaagtgcagaggcaaaaactccccaacaggtgaggaaacaatggcatagaattacttgtgttcggaagaattttaagatgaatattccttaagcccaactactctcgggaaatgagaacaatgcaaaaatgagtttgagacatatggtwccagagcatttggaatctgaattagggcaagggaagtggaag

SEQ ID NO: 709050 - DNA, 1242 bp, Homo sapiens
cagaatgtgtgctgtaaatgcagttagatttccaggttgagaatccagtgaccacgccccttctttgtggcattctgctgtcgtataccatgtggaacacattaagaacgttatggccaggcgtgttggctcacgcctgtaatcctagcactttgggaggccaaggtggacagatcacctgaggttgggagttcgagaccagcctggccagcatgccgaaaccctgtctctactaaaaatacaaaaattagccaggcatggtggcacacacttgtaatccgagctactcgggaggctgaagaaggagaatcgcttaaacccaggaggcggaggttgcagtgagctgagattgcaccgttgcaatccagcctgggcaacagagtgaaactccatctcagaaaaaaaaaaaaagttacaattgggtgtcacatagacagtgaggagtagtggaaagagtgttagatttggggtaagagaactgtgtctcctgggcttgagtcctgatgccaactctcacaagatgtgtcaccgtacagcacgacgcttatactttttttttttttttttttgagacaggatcttgctctgtctcgagctggagtgcagtggtatgatcacagctcactgcagcctcaaactcccaggctcaggccatcctcccacctcagcctcccaagtagctgggactacaggcatgtaccaccatgcccaaataawtttttgtatttttttgttgagatggggttttgccatgttacccagggaggtctcaaactccaaggatcaagccacccaccctccttggcctcccaaagtgttgggattacagatgtgagccaccacaccttgcaaatttttgtattttttgtacagccgagggtctccctatgttgccgagggtgatcttgaactcctgggctcaaatgattcaccctcctcagcctcccaaagtgttgggattacagacgtgagccaccgctctcagccccttacactttttgaagttcagttctcccatctgtaaaaacgaggtaataatattgcctcaaatgacttaatggatgtgaaagggtttagtaaactctgtgcctggaaaggtagaagctactcaaatatctgttgagtgagtggcattcatccatgtgtacatttctcaggcaacaataatgtcactttcacctaaggccagtaaaatgtgggtaaagtcatataatgatacaatgaaagtttctgatcagtatt

SEQ ID NO: 709051 - DNA, 1242 bp, Homo sapiens
cagaatgtgtgctgtaaatgcagttagatttccaggttgagaatccagtgaccacgccccttctttgtggcattctgctgtcgtataccatgtggaacacattaagaacgttatggccaggcgtgttggctcacgcctgtaatcctagcactttgggaggccaaggtggacagatcacctgaggttgggagttcgagaccagcctggccagcatgccgaaaccctgtctctactaaaaatacaaaaattagccaggcatggtggcacacacttgtaatccgagctactcgggaggctgaagaaggagaatcgcttaaacccaggaggcggaggttgcagtgagctgagattgcaccgttgcaatccagcctgggcaacagagtgaaactccatctcagaaaaaaaaaaaaagttacaattgggtgtcacatagacagtgaggagtagtggaaagagtgttagatttggggtaagagaactgtgtctcctgggcttgagtcctgatgccaactctcacaagatgtgtcaccgtacagcacgacgcttatactttttttttttttttttttgagacaggatcttgctctgtctcgagctggagtgcagtggtatgatcacagctcactgcagcctcaaactcccaggctcaggccatcctcccacctcagcctcccaagtagctgggactacaggcatgtaccaccatgcccaaataattttttgtatttttttgttgagatggggttttgccatgttacccagggaggtctcaaactccaaggatcaagccacccaccctccttggcctcccaaagtgttgggattacagatgtgagccaccacaccttgcaaatttttgtattttttgtacagccgagggtctccctatgttgccgagggtgatcttgaactcctgggctcaaatgatycaccctcctcagcctcccaaagtgttgggattacagacgtgagccaccgctctcagccccttacactttttgaagttcagttctcccatctgtaaaaacgaggtaataatattgcctcaaatgacttaatggatgtgaaagggtttagtaaactctgtgcctggaaaggtagaagctactcaaatatctgttgagtgagtggcattcatccatgtgtacatttctcaggcaacaataatgtcactttcacctaaggccagtaaaatgtgggtaaagtcatataatgatacaatgaaagtttctgatcagtatt

SEQ ID NO: 709052 - DNA, 1242 bp, Homo sapiens
cagaatgtgtgctgtaaatgcagttagatttccaggttgagaatccagtgaccacgccccttctttgtggcattctgctgtcgtataccatgtggaacacattaagaacgttatggccaggcgtgttggctcacgcctgtaatcctagcactttgggaggccaaggtggacagatcacctgaggttgggagttcgagaccagcctggccagcatgccgaaaccctgtctctactaaaaatacaaaaattagccaggcatggtggcacacacttgtaatccgagctactcgggaggctgaagaaggagaatcgcttaaacccaggaggcggaggttgcagtgagctgagattgcaccgttgcaatccagcctgggcaacagagtgaaactccatctcagaaaaaaaaaaaaagttacaattgggtgtcacatagacagtgaggagtagtggaaagagtgttagatttggggtaagagaactgtgtctcctgggcttgagtcctgatgccaactctcacaagatgtgtcaccgtacagcacgacgcttatactttttttttttttttttttgagacaggatcttgctctgtctcgagctggagtgcagtggtatgatcacagctcactgcagcctcaaactcccaggctcaggccatcctcccacctcagcctcccaagtagctgggactacaggcatgtaccaccatgcccaaataattttttgtatttttttgttgagatggggttttgccatgttacccagggaggtctcaaactccaaggatcaagccacccaccctccttggcctcccaaagtgttgggattacagatgtgagccaccacaccttgcaaatttttgtattttttgtacagccgagggtctccctatgttgccgagggtgatcttgaactcctgggctcaaatgattcaccctcctcagcctcccaaagtgttgggattacagacgtgagccacygctctcagccccttacactttttgaagttcagttctcccatctgtaaaaacgaggtaataatattgcctcaaatgacttaatggatgtgaaagggtttagtaaactctgtgcctggaaaggtagaagctactcaaatatctgttgagtgagtggcattcatccatgtgtacatttctcaggcaacaataatgtcactttcacctaaggccagtaaaatgtgggtaaagtcatataatgatacaatgaaagtttctgatcagtatt

SEQ ID NO: 709053 - DNA, 1127 bp, Homo sapiens
tcatacaaaggaaggtcacagcttttgagcaagggtggttattagctaactctctacttcccccacaaacacaaagagtttccttttttgagaggggaggaggttgggggaagggagagtgtcaatgaggacttgactctatatctatgattttttaaaaatttcttttaaaataaactagaaaaaaaatcacaagatttagcagtcattaattcaaggaagtaagaaaatacgtattacacattctttgtacatttttatgacttaatttgctcagaatctcaactttaagaacaattagaaatcaacctgcttggccgggcacagtgactcacgcctgtaatcccagcactttgggaggccgaggagrgcggatcacaaggtcaggagatcgagacgatcctgactagcacggtgaaaccctgtctctactaaaaatacaaaaaaaattagccgggtgtggtagcaggcgcctgtaatcccagctactcaggaggctgaggcaggagaatggcatgaacccgggaggcagagcttgcagtgagcccagatggcgccactgcactccagcctgggcaacaaagcgagactccatctcaaataaaaaaaaaagaaatcaatctgctcaccctccagactgtgacacagcactatacaaggacaatcataggaccgtgagtcaaggagaagcagggtgagccttgtcagggcagtggcctcctcagcccacccagaacactcctaggccctaccaagcctcagggggcttgcacacacgggtcctcattgtcatgccttcactgctcagccctggtgcaggccaccactcgtaactttcggcttctatgagagattttatttttctgtctagggaaaacatatggcaaccaatgtaacttcaagccaatactcaagtgcaaagttgatgcctgctccatgccaggccatgtggtcaagagaaataaaacctactccttgccttcaacaagtcttcagagcgtggaaagatgaacaaggtggcaactatgagtgtggataccactatgttcagcgtgtgtaacaggacagttattacaaacaactacaaaagcaaagccaaatggcactttgagaacaacaaataaact

SEQ ID NO: 709054 - DNA, 1127 bp, Homo sapiens
tcatacaaaggaaggtcacagcttttgagcaagggtggttattagctaactctctacttcccccacaaacacaaagagtttccttttttgagaggggaggaggttgggggaagggagagtgtcaatgaggacttgactctatatctatgattttttaaaaatttcttttaaaataaactagaaaaaaaatcacaagatttagcagtcattaattcaaggaagtaagaaaatacgtattacacattctttgtacatttttatgacttaatttgctcagaatctcaactttaagaacaattagaaatcaacctgcttggccgggcacagtgactcacgcctgtaatcccagcactttgggaggccgaggagagcggatcacaaggtcaggagatcgagacgatcctgactagcacggtgaaaccctgtctctactaaaaatacaaaaaaaattagccgggtgtggtagcaggcgcctgtaatcccagctactcaggaggctgaggcaggagaatggcatgaacccgggaggcrgagcttgcagtgagcccagatggcgccactgcactccagcctgggcaacaaagcgagactccatctcaaataaaaaaaaaagaaatcaatctgctcaccctccagactgtgacacagcactatacaaggacaatcataggaccgtgagtcaaggagaagcagggtgagccttgtcagggcagtggcctcctcagcccacccagaacactcctaggccctaccaagcctcagggggcttgcacacacgggtcctcattgtcatgccttcactgctcagccctggtgcaggccaccactcgtaactttcggcttctatgagagattttatttttctgtctagggaaaacatatggcaaccaatgtaacttcaagccaatactcaagtgcaaagttgatgcctgctccatgccaggccatgtggtcaagagaaataaaacctactccttgccttcaacaagtcttcagagcgtggaaagatgaacaaggtggcaactatgagtgtggataccactatgttcagcgtgtgtaacaggacagttattacaaacaactacaaaagcaaagccaaatggcactttgagaacaacaaataaact

SEQ ID NO: 709055 - DNA, 780 bp, Homo sapiens
tggatagtattgaacccaatatatatactgtttttttttcacctgataaccgagagagctactaagagaccaacaggcaggtatcatggacaacttgggtacaatggacagagggatgattcacatcccaggtaggacaaagcaagatttcatcacactactcagaatggtgcataattkaaaacttatgaattgtttatgtctggaatattccatttaatatttgcaaactgtagttgaccacaggtaactgaaactgaggaacatgaaacttcagatgagggaatactacagtatatatttgggagtcatcgggacatagatgacatttaaacccatgagactaaatgagatcagcatggaaatcggtttaaatggagaaaaagctcaaggagttagcctagagcactcgaatattttagaggtcatggagatgaggaagaaccaacaaaggagaccaagaaggagtggcggtagttatcaagagtcagccttctgagcctgctggctgcagggtatcctgataaagctgaatttctggatctgcagagctaagaaatcaacagcagggaccctcaccaaggtactgctgtctggagaagtctagctaagtagtcagtcagtgttttcctttgatatcttttaaatgcaacaaaatctgatgcaaattataggcaaaaacatcaggacggcaatattgtggtagatatggctagtctcttgtttggggacagacattaaacactacagccatgcatgccacactggcaggaggagctc

SEQ ID NO: 709056 - DNA, 642 bp, Homo sapiens
gtatttttagtagagaccaggtttcactatgtygggcaggctggcctcaaactcctggcctcaaatgatccgcccgccttggcctcccaaagtgctggcattacagacgtgagccaccatactgggccagtcttgcacattttagacactcaataaatgtttgttgaatgaaatacctgtgatgggccgggcgtggtggcccacaccagtaatcccagccctttgagaggccgaggcaggaggatggcttgaacctgggagtttgagaccagcctgggcaacatggtgaaacccccatctctacaaaccccacaaaagttagctgggcatggtagtgtgtgcctgtggttccagctacttgggaagctgaggtgggaggattgcttgagcctgggagacggaggctgcagtgaggcctgactgtgccactgcactccagcctgggcgagagtgaggccctgtctcaaaataactttgatgaaggtggggaatcagaggtagatgggcaggggtctgggtttgcaaggctctgagtttgagctctgttctgtacttttgaggggatgagggaaggagggtgggcacggttcccccgatgtgggtgtctgaggcgaagaagaggatggcggaggttgcagccac

SEQ ID NO: 709057 - DNA, 610 bp, Homo sapiens
aacgygctccacattgccctggcatcagctagttccctaagcaaccacattttcatcgatacataggcgccaggtctcatgactcttgtccattcatttatgtcaaatgcatgaaatgtctactattctatacagtttagttcaaccttgttttactgatctctacattatgcctggcattgtgcaagatcctgaggatgcaggaattcagagtaatgtccctacccttgagactctctcagtcttgcagagaatggatagttaagcaaaatgtgcaaagggtcaatccgaaaaagaatacaaaggccaaaaacagtgcagaaactggagtggttactctggggtgggagatgtcaggaggaggagacgcttaagcaggtgctagagcaggtcttaccaggctgacaattgaaggaaaaaaattcagtctggaaaagcagaatgaagaaagcatatttggtgaaaaggaacaatcagtatgaaggacagagacaaaatattttgtgtattctagaaccatacaaactgcaaaggcactgctagagtacagagtggagggcaggcaagcaggagagtccactggggctgaagcatcctgggccttgaccgc

SEQ ID NO: 709058 - DNA, 610 bp, Homo sapiens
aacgcgctccacattgccctggcatcagctagttccctaagcaaccacattttcatcgatacataggcgccaggtctcatgactcttgtccattcatttatgtcaaatgcatgaaatgtctactattctatacagtttagttcaaccttgttttactgatctctacattatgcctggcattgtgcaagatcctgaggatgcaggaattcagagtaatgtccctacccttgagactctctcagtcttgcagagaatggatagttaagcaaaatgtgcaaagggtcaatccgaaaaagaatacaaaggccmaaaacagtgcagaaactggagtggttactctggggtgggagatgtcaggaggaggagacgcttaagcaggtgctagagcaggtcttaccaggctgacaattgaaggaaaaaaattcagtctggaaaagcagaatgaagaaagcatatttggtgaaaaggaacaatcagtatgaaggacagagacaaaatattttgtgtattctagaaccatacaaactgcaaaggcactgctagagtacagagtggagggcaggcaagcaggagagtccactggggctgaagcatcctgggccttgaccgc

SEQ ID NO: 709059 - DNA, 615 bp, Homo sapiens
tggtcatcacggagtactgttgctatggcgacctgctcaactttctgcgaaggaaggctgaggccatgctgggacccagcctgagccccggccaggaccccgagggaggcgtcgactataagaacatccacctcgagaagaaatatgtccgcaggtagcccctggcaaaggacaagaaaaaggccaggtctgggaggcaggatccgagtctgtcttcaaagccagctcagggttggatggctcatgaatgggtggctatgcagccctcacctgccacctgtgtcatgggaagtagccaccacaggttttatggccatctcttgtttctctactccttttccccttcattcaacaaatatttgaacacctaccrtgttctgggagtgtggagggcaaagatgggcagctcataatctggtggagatatgcatcaatgaaatcaccacccagtgtgtgtaaaagatcaaccaagatctgtgcctggagccctagtaagagatgggcagatgtggccgggtgcagtggctcatgcctgtaatcccagcactttgggaggctgaggcgggcagatcacctgaggatgggagttcgagaccagccttaccaacaaggtga

SEQ ID NO: 709060 - DNA, 615 bp, Homo sapiens
tggtcatcacggagtactgttgctatggcgacctgctcaactttctgcgaaggaaggctgaggccatgctgggacccagcctgagccccggccaggaccccgagggaggcgtcgactataagaacatccacctcgagaagaaatatgtccgcaggtagcccctggcaaaggacaagaaaaaggccaggtctgggaggcaggatccgagtctgtcttcaaagccagctcagggttggatggctcatgaatgggtggctatgcagccctcacctgccacctgtgtcatgggaagtagccaccacaggttttatggccatctcttgtttctctactccttttccccttcattcaacaaatatttgaacacctaccgtgttctgggagtgtggagggcaaagatgggcagctcataatctggtggagatatgcatcaatgaaatcaccacccagtgtgtgtaaaagatcaaccaagatctgtgcctggagccctagtaagagatgggcagatgtggccgggtgcagtggctcatgcctgtaatcccagcactttgggaggctgaggcgggcagatcacctgaggatgggagttcgagamcagccttaccaacaaggtga

SEQ ID NO: 709061 - DNA, 859 bp, Homo sapiens
atgtttaatttccaaatatttgtgatttttccagcttctttctgttgtttatttctaattaaatccctctgtgatgagagaatatactttgaattattttaatcctcctatctgtatgttattatataacatataatctatatggggaaatactctatgagcacttgaaaaagtgtacattctgctgttgctgaatagtgtgttctaaaatcatcaattaagtcaaatagtttagtagtgtttttcaggtctttttacccttatttactttctgtctagttggtgtggtcaatttttcagactggaggatttaagtcaccaactataattttggtatgtttatttttgtttcatttctgtcatttttactttatgtactttgggactctgttgttaggccccaggagttactccacaatgctgtacrggcaaatgctttctatactaaaagtaactaaacttagagatttgtgagtaccatcaagcatacccatatatgtaaaattggagtcttagaaagagagaagtgagaaaaagacaaagaaaaaataatggccacaaacttctcaaatttgttgaaaaacattaatcaaaagaatctagaagcttaacatctctcaaacacagtaaacacaaagatatctatgtctagatacattatagttaaacttcagaaagccaaaatccacaaataatgtattgaaatcaatatattttttcaacaagagaaaaatgactcatcatttgaaagagaagagcaatacaattaatctgactttaaatcagaagtcattgtttctgactttaaatcagaaacaatggagatcagaagataatggagaggcactgaaagaaaaaa

SEQ ID NO: 709062 - DNA, 859 bp, Homo sapiens
atgtttaatttccaaatatttgtgatttttccagcttctttctgttgtttatttctaattaaatccctctgtgatgagagaatatactttgaattattttaatcctcctatctgtatgttattatataacatataatctatatggggaaatactctatgagcacttgaaaaagtgtacattctgctgttgctgaatagtgtgttctaaaatcatcaattaagtcaaatagtttagtagtgtttttcaggtctttttacccttatttactttctgtctagttggtgtggtcaatttttcagactggaggatttaagtcaccaactataattttggtatgtttatttttgtttcatttctgtcatttttactttatgtactttgggactctgttgttaggccccaggagttactccacaatgctgtacgggcaaatgctttctatactaaaagtaactaaacttagagatttgtgagtaccatcaagcatacccatatatgtaaaattggagtcttagaaagagagaagtgagaraaagacaaagaaaaaataatggccacaaacttctcaaatttgttgaaaaacattaatcaaaagaatctagaagcttaacatctctcaaacacagtaaacacaaagatatctatgtctagatacattatagttaaacttcagaaagccaaaatccacaaataatgtattgaaatcaatatattttttcaacaagagaaaaatgactcatcatttgaaagagaagagcaatacaattaatctgactttaaatcagaagtcattgtttctgactttaaatcagaaacaatggagatcagaagataatggagaggcactgaaagaaaaaa

SEQ ID NO: 709063 - DNA, 1245 bp, Homo sapiens
tgaggtgagaattctgcagtctattcctgggctcaaaatcacatagaaaaaaacaaaaaaaggttgctttatatttaaagggacaaggcrtaggttctcttacaggggtttttaggaaatggttcatcagtttagtaggtgttagcttaattgcttttatcgggatactgttgccccggttgggtggatgagcagtccctaaaaagagaaggaagagagcaaagaccgaaaaagtatgaaggagaggaagggatggcatggcgtagaatgaaatgctttttcatcaaaatgcaaagatgaaggagatgtttcagagtgcccggccgtctagagggttctgtttactttccattcccgctgttagggacataggagtctgccctacattagggaaatggaatagaataagtttctagaattcctaaatatggtggaattgggtagaaaagatcagagggaaggttgtaggaaggaagggtgggaaagtaaaacaactggctcctactgtaaggctattggagcctcaggctaacagcatcattttagtaccttggttgaggtagaaaaggaaacgagagcagaatagcctcatagtcaaaggaacacagaaggagaaaccacattgctgaggagagtgaattagctagtagagggacagaatatagaattagctacctcctaaatcttgaattaatctaatatgaaaagacattgggaaaaattataatactctgaagtgtaattatgtacctgttcaactttgaaacaccacggaatgttgggaaatccaatatccactaatagtgagctatgtggacgcgagtaaattctgaaagattttgctatttgggatgtcaaggtttactaagtaacatgaaattatttacttgcagtgggtttttagaatgaaagttgttttccctctcttaagaatacccgaattcacagctaggatatggaggatttgccaggaaaatgcaaacacctgtggctgaagtagagccaagctctctccctacatttttttccagaaagcagtggtgaagaaatagaaaaagagagaatactcctcttagatcagagctaaggtcctgatagcaatcactcctttctcaatgcatggaatggaaactgttagagctgcacctctcaccatgaaggggtctgggggcaaggaactcatctctgaggtttgagagtaggcctgaaaaccgggaagggggccccttcttgtctggagatgat

SEQ ID NO: 709064 - DNA, 1778 bp, Homo sapiens
gcacagaaaatatttttgaaaattatattcagaattaggaacatcgcctatttggctagcatgtcaatttcaaattgttcacaatttgatcttcaaaaataagcctgcttattgtttgatgttttctttgttaactttaggatcccaagagaagccactttgtcttaattgctggggagccattaagagaaccagttatccaacatggtaagaccaaaatgacaatgattttcttggttgattttccttttctttgaaaacagtatacatgtatactattgttgggaagaatagctggttttttttgtcctgtctctccatctataaatctgaggattgtttaatttttctgtcatcagagggaaatatatatgtgatgtttattcatctctttttttttaaagaaacatttcttagatacctattatgtataggatattgagtttggaactgtgggaagaacaaaaatagtatttttgtattatgtcatagggaattttaacttgaaaaaagagtctacagtctactgggaactttaacatcctttttatctttatcaaaaataaaggtgatttcaatactgtcctgtagtctattgcatttttagtaaaaaatatgaaactcttaggaatagtatttttaagaaaatagttgttattttttgtttatttaaaaaaatgagtagaggtaactgatatagccgaaatagtactatacttagaggcagaaaatcctggcttaagtacccataacgattacttcaactctttgggttttgacttcttcatatcattgttgtttgattaaatgaggaacatctaaaagcaattaaaacccattttattatttagataaatgcttacaaaacataygtccacttcaccaattattaaattcaacgtgcattaaaatcccattgcatttccctgccttgcatgaattcccaggtacacacaatgattgcagataaaccccagctgctcatgaatttaaagaacacggattgctttaaaaatattcttttttgttctactaactacttcagggggaacattaaattgtaccctgccttgcctgtagcatttgacaaccattttgtacgcatccgatttccattccaaaggtttgtggttcttgtttccttttctctcaactgaaaagcactgcaatattatagtttgtttttctggaaaaagccttcagacaaactgagtagggtcataatctttattcctagtaactaacatttaggtgggaaaaacatgtgtgagatggaagtcttattttaggcaatctcctctgtaccaataatgaaaagcaagagtctaactgaattaggtgacagatcaaaggagtgggactgctcaaagccaccctacactggggtcatgtggatcctctcccagtggcttggaacacagggacactaggtatgcctgcacatacaaactcggagtaatcagacaaaataaatatgtcccttgaaagttcagttactgagaagcaaagcattttgtttttattttttaacttttaaaaactcagacatttaagtttttcttttacttatgtgtgtttaaaggcagccacaaccatctcttgattgggaacttgcacagatctcatgaattacctaagaccctttctcctcttatcatcgtgtgtccttaattattcatccacagattaagcacaggaaatcatagaatgttaggatagaaaataaccttagccatgatgtagtcatgcctcttttatagatgaggaaaataaaatcc

SEQ ID NO: 709065 - DNA, 1778 bp, Homo sapiens
gcacagaaaatatttttgaaaattatattcagaattaggaacatcgcctatttggctagcatgtcaatttcaaattgttcacaatttgatcttcaaaaataagcctgcttattgtttgatgttttctttgttaactttaggatcccaagagaagccactttgtcttaattgctggggagccattaagagaaccagttatccaacatggtaagaccaaaatgacaatgattttcttggttgattttccttttctttgaaaacagtatacatgtatactattgttgggaagaatagctggttttttttgtcctgtctctccatctataaatctgaggattgtttaatttttctgtcatcagagggaaatatatatgtgatgtttattcatctctttttttttaaagaaacatttcttagatacctattatgtataggatattgagtttggaactgtgggaagaacaaaaatagtatttttgtattatgtcatagggaattttaacttgaaaaaagagtctacagtctactgggaactttaacatcctttttatctttatcaaaaataaaggtgatttcaatactgtcctgtagtctattgcatttttagtaaaaaatatgaaactcttaggaatagtatttttaagaaaatagttgttattttttgtttatttaaaaaaatgagtagaggtaactgatatagccgaaatagtactatacttagaggcagaaaatcctggcttaagtacccataacgattacttcaactctttgggttttgacttcttcatatcattgttgtttgattaaatgaggaacatctaaaagcaattaaaacccattttattatttagataaatgcttacaaaacatatgtccacttcaccaattattaaattcaacgtgcattaaaatcccattgcatttccctgccttgcatgaattcccaggtacacacaatgattgcagataaaccccagctgctcatgaatttaaagaacacggattgctttaaaaatattcttttttgttctactaactacttcagggggaacattaaattgtaccctgccttgcctgtagcatttgacaaccattttgtrcgcatccgatttccattccaaaggtttgtggttcttgtttccttttctctcaactgaaaagcactgcaatattatagtttgtttttctggaaaaagccttcagacaaactgagtagggtcataatctttattcctagtaactaacatttaggtgggaaaaacatgtgtgagatggaagtcttattttaggcaatctcctctgtaccaataatgaaaagcaagagtctaactgaattaggtgacagatcaaaggagtgggactgctcaaagccaccctacactggggtcatgtggatcctctcccagtggcttggaacacagggacactaggtatgcctgcacatacaaactcggagtaatcagacaaaataaatatgtcccttgaaagttcagttactgagaagcaaagcattttgtttttattttttaacttttaaaaactcagacatttaagtttttcttttacttatgtgtgtttaaaggcagccacaaccatctcttgattgggaacttgcacagatctcatgaattacctaagaccctttctcctcttatcatcgtgtgtccttaattattcatccacagattaagcacaggaaatcatagaatgttaggatagaaaataaccttagccatgatgtagtcatgcctcttttatagatgaggaaaataaaatcc

SEQ ID NO: 709066 - DNA, 1162 bp, Homo sapiens
ctttccataatggtaactgccttccccaataatgaaaaaactggatcccattatccacaatgtatttacttatttgcttaaccctagaccgtattgaaagtagtttcagaattgtgaatttatgcctatgccaaaaataagctttctgattagagttcattatttgtttaaagttatttgagggcatgtggtccaaattctaaaagytacttggattaatgccccctttcaaatgtgattatgtttttatttgaaaaatgcatcagttcacttgtttctgtttgtattcaattttaaggtcccctgattgttattttaagccactatggcttatcatgcgacaatggataaccctgacaccattgcatcacatcaggaggcatacgatgtcagttattagtgatggaagttggatcatacagataagctcttatctagccagacctctccattataatttataagtaatctgtggggtgccttactctatttttaaagtaattcttactatatgaacttaaaaccaccataactaccacgattcagggaccctaagtcagatttacatttttctttatggaaatgcctgcctcgatgccataggaatacagacagaaggaagagcatctactgatggattacccagtgggtgggggccacagctggcaagaaggtggatatccagctgtgatgaaaacattggattctacttgtagttcaacagcacttaaaacagaatgctacacactgtgtgtaggtttgccaagttgtgatttggatcccaagtcatgagttaggtaggaaggaatgaaggaaggaagggagaaaggaagaaagaaagaaagagagagagaaagaaaggagagaaagagagagaaaggaaaggaaagaaggaagaaaggaaggagagaaagaaagaaagaaagaaagagagaaaggaaagaggaaaggaaagaaaaggaaaggaaagaaggaaggaaggagagaaagaaagagaaaggaaagaaagaaggaaagaaagaaggaaagaaagaaagaaagaaagaaagaaagaaagaaagaaagaaagaaaatctttttattttaggtttttcatgtggagttagaattgggtgcctgctaagaaaaatgtctgtttgtaaagaatgctgcttctcttttt

SEQ ID NO: 709067 - DNA, 2324 bp, Homo sapiens
  misc_feature 1175, 1958, 1959, 1960, 1961: n = A,T,C or G
gttatgtatagtatattacactatataatatgttatatgtagtatatatactatatattatataaacgatataatagttatgttatatattatcttacattatgtatatattatatagaataattatatatactatatatactatatatactacatgtaatatataatatatagtatagtatattatatatagtatagtaattatataatatagtatattatacataatatatattataatatataatgtagtatatactatatattataatatataatatagtatatactatatataatatatagcatatattatatatgtaattccaggctaatacataatatatatgttatatatattatatataattctagactaatatatgtttgtataatatatacaaatgtttgttctgttttttctatatataatatatattctaggctgaaatatatatttgtgatatataatattttatatatgtatatattatatatttatagtatataatttatttacatattatatatttataacacataatttatttaatttgtaatataatatatttaatttacaatatatagtatatttaatttctaacatatcttatatatttacatattaaatatatttattatatatgtatttatatgtatatatttcagcctagaggacaattatctgaggacgcccaggttactgacaagtctctgaagatgtttcatatatatatagatttatctgtgatttgagacagggtctcactgtcccccaggctggagtgcaataccacaatcacagctctctgcagcctcgacctcccaaagctcaggtgatcctcctgcctcagcacctccgagtagctgggattacaggcacccgccaccacacctggctaatttttgtatttttagtagagacagggtttcaccatgttgcctaggctggtctcgaactcctgacctcaggtgatccgcccgcctcggcctcccaaagtgctgggatgacaggcgtgagccgcctctcctggcctgggctgaactatattatagggtctctgcagttctgccaraggatcaggaagacggcccagctcagaagccacaggccagcgagcatctctccggattcccaagacttgggtcaaacctctgcagaaatgtttgtctgntttttttttttttctggaatcttctttttcagctgctgtccccaatctcaggcctgatttcatgcacttttatgcactttcagaagtgcacgaaagggaccaagagaagtctcatttgcagctgaggacagccctcagcagcagctcattaaacagccatttaatgcccagtgtttccaaacttgatcatggctcgaagtggggggatttacgctgtggaggcagcatctttcttaatccaaagctgtcacctcggatgccacgacggtgtgtgaaaatctcttgggagcgccagaacccagggccacacggtcggcagaaacgaaatgaagaaattacagtaattttctagtttaacgaggtcgcgttccttctgttgtcattcaccagctacaacgagaggagcccaaattttctgcccctggcatttttttttaaacagaatttcacatgcaaacaaaaatagattgctctaaaaatgagtgttttggaggttttcagtacaggcaggtgggaggggaagagagattttcaataaggagagaaggctcactttggagaccttgtttctgcgtctcgtgaatagactcttgttttattactacttttcaatttttatggttttagagacagggtctggctctgttgcccaggctgcagtgcagtggtgcaatcatagctcactgcagcctcgactttctgggttcatgcgatcctcctgcctcagcctcccgagtagctgggagcacaggtgcccaccaccacacccagctaatgttttgnnnntttttttttgtagagatggggactctctatgttgcccagggtggtcttaaactcctggtcttaaacgatcctcttacctcagcctcccaagatgctgggattactatctctggcctggttatcatctttgtttatcaatggaaaggtatgcattttgcagatacctggcttgtagctttttggggttattttgacacggagtctcactctgttactgaggctggagtgcagtgatgcaatctcagctcactgcagcctccacctcctgggttcaagcgattctcttgcctcagtctcccgagtagctgggattacaggtgcctgccaccacgcccggctaatttttgtatttttagtagagac

SEQ ID NO: 709068 - DNA, 2324 bp, Homo sapiens
  misc_feature 1175, 1958, 1959, 1960, 1961: n = A,T,C or G
gttatgtatagtatattacactatataatatgttatatgtagtatatatactatatattatataaacgatataatagttatgttatatattatcttacattatgtatatattatatagaataattatatatactatatatactatatatactacatgtaatatataatatatagtatagtatattatatatagtatagtaattatataatatagtatattatacataatatatattataatatataatgtagtatatactatatattataatatataatatagtatatactatatataatatatagcatatattatatatgtaattccaggctaatacataatatatatgttatatatattatatataattctagactaatatatgtttgtataatatatacaaatgtttgttctgttttttctatatataatatatattctaggctgaaatatatatttgtgatatataatattttatatatgtatatattatatatttatagtatataatttatttacatattatatatttataacacataatttatttaatttgtaatataatatatttaatttacaatatatagtatatttaatttctaacatatcttatatatttacatattaaatatatttattatatatgtatttatatgtatatatttcagcctagaggacaattatctgaggacgcccaggttactgacaagtctctgaagatgtttcatatatatatagatttatctgtgatttgagacagggtctcactgtcccccaggctggagtgcaataccacaatcacagctctctgcagcctcgacctcccaaagctcaggtgatcctcctgcctcagcacctccgagtagctgggattacaggcacccgccaccacacctggctaatttttgtatttttagtagagacagggtttcaccatgttgcctaggctggtctcgaactcctgacctcaggtgatccgcccgcctcggcctcccaaagtgctgggatgacaggcgtgagccgcctctcctggcctgggctgaactatattatagggtctctgcagttctgccaaaggatcaggaagacggcccagctcagaagccacaggccagcgagcatctctccggattcccaagacttgggtcaaacctctgcagaaatgtttgtctgntttttttttttttctggaatcttctttttcagctgctgtccccaatctcaggcctgatttcatgcacttttatgcactttcagaagtgcacgaaagggaccaagagaagtctcatttgcagctgaggacagccctcagcagcagctcattaaacagccatttaatgcccagtgtttccaaacttgatcatggctcgaagtggggggatttacgctgtggaggcagcatctttcttaatccaaagctgtcacctcggatgccacgacggtgtgtgaaaatctcttgggagcgccagaacccagggccacacggtcggcagaaacgaaatgaagaaattacagtaattttctagtttaacgaggtcgcgttccttctgttgtcattcaccagctacaacgagagragcccaaattttctgcccctggcatttttttttaaacagaatttcacatgcaaacaaaaatagattgctctaaaaatgagtgttttggaggttttcagtacaggcaggtgggaggggaagagagattttcaataaggagagaaggctcactttggagaccttgtttctgcgtctcgtgaatagactcttgttttattactacttttcaatttttatggttttagagacagggtctggctctgttgcccaggctgcagtgcagtggtgcaatcatagctcactgcagcctcgactttctgggttcatgcgatcctcctgcctcagcctcccgagtagctgggagcacaggtgcccaccaccacacccagctaatgttttgnnnntttttttttgtagagatggggactctctatgttgcccagggtggtcttaaactcctggtcttaaacgatcctcttacctcagcctcccaagatgctgggattactatctctggcctggttatcatctttgtttatcaatggaaaggtatgcattttgcagatacctggcttgtagctttttggggttattttgacacggagtctcactctgttactgaggctggagtgcagtgatgcaatctcagctcactgcagcctccacctcctgggttcaagcgattctcttgcctcagtctcccgagtagctgggattacaggtgcctgccaccacgcccggctaatttttgtatttttagtagagac

SEQ ID NO: 709069 - DNA, 2324 bp, Homo sapiens
  misc_feature 1175, 1958, 1959, 1960, 1961: n = A,T,C or G
gttatgtatagtatattacactatataatatgttatatgtagtatatatactatatattatataaacgatataatagttatgttatatattatcttacattatgtatatattatatagaataattatatatactatatatactatatatactacatgtaatatataatatatagtatagtatattatatatagtatagtaattatataatatagtatattatacataatatatattataatatataatgtagtatatactatatattataatatataatatagtatatactatatataatatatagcatatattatatatgtaattccaggctaatacataatatatatgttatatatattatatataattctagactaatatatgtttgtataatatatacaaatgtttgttctgttttttctatatataatatatattctaggctgaaatatatatttgtgatatataatattttatatatgtatatattatatatttatagtatataatttatttacatattatatatttataacacataatttatttaatttgtaatataatatatttaatttacaatatatagtatatttaatttctaacatatcttatatatttacatattaaatatatttattatatatgtatttatatgtatatatttcagcctagaggacaattatctgaggacgcccaggttactgacaagtctctgaagatgtttcatatatatatagatttatctgtgatttgagacagggtctcactgtcccccaggctggagtgcaataccacaatcacagctctctgcagcctcgacctcccaaagctcaggtgatcctcctgcctcagcacctccgagtagctgggattacaggcacccgccaccacacctggctaatttttgtatttttagtagagacagggtttcaccatgttgcctaggctggtctcgaactcctgacctcaggtgatccgcccgcctcggcctcccaaagtgctgggatgacaggcgtgagccgcctctcctggcctgggctgaactatattatagggtctctgcagttctgccaaaggatcaggaagacggcccagctcagaagccacaggccagcgagcatctctccggattcccaagacttgggtcaaacctctgcagaaatgtttgtctgntttttttttttttctggaatcttctttttcagctgctgtccccaatctcaggcctgatttcatgcacttttatgcactttcagaagtgcacgaaagggaccaagagaagtctcatttgcagctgaggacagccctcagcagcagctcattaaacagccatttaatgcccagtgtttccaaacttgatcatggctcgaagtggggggatttacgctgtggaggcagcatctttcttaatccaaagctgtcacctcggatgccacgacggtgtgtgaaaatctcttgggagcgccagaacccagggccacacggtcggcagaaacgaaatgaagaaattacagtaattttctagtttaacgaggtcgcgttccttctgttgtcattcaccagctacaacgagaggagcccaaattttctgcccctggcatttttttttaaacagaatttcacatgcaaacaaaaatagattgctctaaaaatgagtgttttggaggttttcagtacaggcaggtgggaggggaagagagattttcaataaggagagaaggctcactttggagaccttgtttctgcgtctcgtgaatagactcttkttttattactacttttcaatttttatggttttagagacagggtctggctctgttgcccaggctgcagtgcagtggtgcaatcatagctcactgcagcctcgactttctgggttcatgcgatcctcctgcctcagcctcccgagtagctgggagcacaggtgcccaccaccacacccagctaatgttttgnnnntttttttttgtagagatggggactctctatgttgcccagggtggtcttaaactcctggtcttaaacgatcctcttacctcagcctcccaagatgctgggattactatctctggcctggttatcatctttgtttatcaatggaaaggtatgcattttgcagatacctggcttgtagctttttggggttattttgacacggagtctcactctgttactgaggctggagtgcagtgatgcaatctcagctcactgcagcctccacctcctgggttcaagcgattctcttgcctcagtctcccgagtagctgggattacaggtgcctgccaccacgcccggctaatttttgtatttttagtagagac

SEQ ID NO: 709070 - DNA, 597 bp, Homo sapiens
tttggattttgattgcattgaatctatcaaaaaagttgaggaaaaataaatgacatcttaatattcagtyttctgactcatgaataaagtttgtatctctatttacatatatcctcattgaatttatctttgtaatgctttatagttttcaatggacagatcttctacatcttctgtcatatttatccctttcaatttatattttctaatgttaatttaaattgtactatgtttgtctcaattgccaattgtttattgctattattaaaatacaagtataatggtcttaaatccaacaacattgctaaagttgtattcattctagaagcatttttacattgataggattgtctgcatatactcttatattatgtaaatgaggaggttttttttgtatttgttcctttccaattgtaaggtcttttgaaaaaactttgttacactggagagaacctcaggcacagtgatgaactatcctacacaatcccaccctgctccatgaactcatcagtgttaggttgtagtttcctacatgtaaacatcctgcgtgatttctggcatgagaaaatctgcctcatcctccctacactgctaaaa

SEQ ID NO: 709071 - DNA, 1186 bp, Homo sapiens
atggacggaactagaggccattatcgtcagtgaaataaagtaggcataaaaagacaaatatcacatgtcctctattatatgtgggagctaaaacatctgatcgcgtggagctagagaatggagaggtagagaatggagactgggaagagtgagtcagcaggagaaggatgcagagaagtgcgttgaagggaacaaacctacagtgagatagaagcaatcaattccgtgtttgagagcagagtagggtgacggtccttcacaaaaatgtgttgtactcaggcgacggacaccctaaatatcctgacttaatcactacacattgtatacatgtaacaaaatttcacatgtacccataaatttatatacaaaatacaaaaattaaaattaataacaaataaagaaatactataatatgaggctctctaaggtaacttaaattctactttcaagtctgtgttctagttaaaaatgtaatacatcttcactgtaaaatgttatgaaaatataatttataaaggaaatgaaatkcacacataattccaccaagcagatataatattccatttaaaatcccgggtattatttcctttcatccttttctctctctagatagatagaggcgtgggtatacataaagacatagctatggactcaaatagatacagctatagattgtctttacgtcttctaaaattatctttaactttcgtacctgtctttgtttgctaccagctctgcaagtttctttctgtttgtaatcatgcattttccttctttcatctacatttagcaaagtcttcaagactgtattcactctcatcgtgctttcccactgcctgtgcgagtaacaggttaaaggtaaggctactgtatcctattccctttgaattcacttgcttgtgaccatcagcatttcactggctcatagcaagccaccaacgtgttgggtgaggaacaatgggcaaaggctgccagagcccttgctgtactacagactctttgtgagatcatataattgaatgtggtttcctacagtaactttactgaaaattatctctcgtttcacttactcatgttaaacattgcctcagattgatctccgtcacaatggcacgttactactggaaaaggcatatagtagtctgaaaatatctggagatttcaccatgtgctccaagaggtaata

SEQ ID NO: 709072 - DNA, 601 bp, Homo sapiens
tctaggtattaactgcccctctaagccttgtgacaactacagatttcatgagctcgagcagcttcatcaaacttcacgcttgaacagaagacctagatgcacaggactgctcaatgtaacggaaacttcaagctgcagtttgttacatgtggaacattttttagttattcccaggtaggaacctggctgtgactatcagagaccaaaggtgtttaatctggaattgtaaggagattttgacagttgaagacatattccaagaagaaataatcacacacacacasagagagacaaaactctagtgaatgtgttagccgtgagtgtcatttcctgcttcctcatatcttagaaggtttcatatactgctttactttaagtacctgcctgcatgtcacttacctacaaggtaagtatcattgctcctgttttacaaatcgagagagagagagagagagagacgtagaaaggttaagtggcccagggaaccagctactgagagattctaccagattgcactttgcttctcactgccccaagctttctccaaatggggtcccagttcaactctgtttctgaagagatgaaatctcggccaggcaca

SEQ ID NO: 709073 - DNA, 601 bp, Homo sapiens
tctaggtattaactgcccctctaagccttgtgacaactacagatttcatgagctcgagcagcttcatcaaacttcacgcttgaacagaagacctagatgcacaggactgctcaatgtaacggaaacttcaagctgcagtttgttacatgtggaacattttttagttattcccaggtaggaacctggctgtgactatcagagaccaaaggtgtttaatctggaattgtaaggagattttgacagttgaagacatattccaagaagaaataatcacacacacacacagagagacaaaactctagtgaatgtgttagccgtgagtgtcatttcctgcttcctcatatcttagaagktttcatatactgctttactttaagtacctgcctgcatgtcacttacctacaaggtaagtatcattgctcctgttttacaaatcgagagagagagagagagagagacgtagaaaggttaagtggcccagggaaccagctactgagagattctaccagattgcactttgcttctcactgccccaagctttctccaaatggggtcccagttcaactctgtttctgaagagatgaaatctcggccaggcaca

SEQ ID NO: 709074 - DNA, 2459 bp, Homo sapiens
gcctcagtttcctcatccttaaaacagggataataactcagaacctgaagggtggtttataaggggtataaataattgaggtaggtgcctggtaccccatcggtagtccacagattatagccattattacccttgactgcttcctctccctcaygtcccctacccaatcctgaacaagtcctggcaatcccacctcctaaataggactagaacacaatcatttgtctccaggcccactaccctgaaacacagacaagtcattgtagattcttgcaatcaccccaaggaactccccagaatccaccctctcctgtaccaatcctatcttccacccgaccaccacactgagctttcagaaaagcaaaccttgctgacatacaactgcttcaaagccttccaaacatctgcagtgcctacgggacacaagtccaaaatctttaacgtagtctccatagttctttgtgatttggcacagcactcctccaaagctatccccagaagcttctatgctctgtcactcctgtgaacctctgaaaatgagctacccctcatcctatccattcatttcacaaagctctactgagcacttactatgtgacaggcagtgtgccaagtgccatcctaaagagtttaccatctgctggtataggcagtgctctgcaaaggacaggatgccaggggggcacagaacaagaggtcatgggtacaccttcagcagtgagccaaaaaaagagaggatggcaggaacaagcagacgtggtcaaccgggacatccttgacatttctctcttgtcgtagccttgtgaagtcatccttgaatgtcaagttaatcatttgtttctcttggctcccacagaccaactgaacagccctctccaggttttcacatctgccttcccactagctggtgggctctttgggagaagccatcgtgtttttccagaagtggagactttaggacctgagggtgctcagtgaatggataaaaagaagttggttctagctttacatgcatgcaccatacatgtgtgtacaaaatctgcccggaggagccttccagactgcccacactaggccaggtgtgggaggtctggaaggctccccaggcagattcatgcacccccattgtctgagaagctctcgatttcacagtctcagctgtcaatcacatgccgtggttattggagtaatgtgtctcactgccattagcctgcaggctgcatgaggcaaaggactgtgtgggccatactcactgcagtgcccggcacacgggagtgctcaataagaaatccttgctggtaattgaaagtgagcaggctgcatcatctctttgttttatatctcccacagcaccaagaaccagaataagcccctcagtaaccagatactcgtggagttggacttattaaatcacatatattctcaaatgactccactgcaaatgatctcaacaagtcaggtcagcaaaggaaagtgatggtgatccaccacgtgtgaggagaaagtggatttgaattcctggccctaccagagagcagctatgtggccttggcaagtcacctagcctgtccatctctgtttcttcacctgaaaaaaaatggtcacactggattcccatgaggtgtctatgaaataaccaacacagaatgtttaatacatgcgtcatgatcactcagcatctgcttcagttattgtaattactgtgagtgtagtcatggaattcagtctcctcctggcccatgtcaccagggcccgcccttgcccccaagccaccttattgactaacttctcccctcttcccccacatagtcagtagcaatgagttcaccatccaatgaccctttcatctgagttcctcctcatccacctactcattcacagcctgggacattcagcctaggcgctaaaccccacacattcacaccaggtgtcctgagcagctagttattgagaatggcatctagttattgggccactaagcacaacacttacagatttttcactccgaaggattggaatacaatggaaaactgaaattatgctcaaagttatactcaaaaccttggagtcctggtcaattccgaagctgcctggatctttcaacagccttaatcttgcgtggtcccctgtccctgatcctggaatggcagcattgccaccccagtttcagacatgtttctcagcatcatcctggccatgtgactaaaatgcggactccaaggccccaccctaagactgattccgagaacaggaccgaagccctagcatttgcatttccctaggctccctgaggacccggatgctggggaggggctgctgcgtggaagtccaggcctgcggtgcatctgagcagagcctaggtgcctgcagggtgcagggtgcaaggtgctcactgtgcctgtggaacacctgtaactgtgctgctcagtggctccagagccccgccttctggcctttgc

SEQ ID NO: 709075 - DNA, 1504 bp, Homo sapiens
gggattacaggcgcccaccaccacccatgactaatttttatattcttagtagagacagggtttcaccatgttggccaggctagtcttgaactcctgacctcaagtgatccacccgcctcggcctcccaaagtgctcggattacaggcatgagccaccgttgccaccgcgcccggcccatgacacttttaaagtcacctcggtcttgtgcatcttttgttgctgacaggaagtctactctcaagccggtcgttgttcgtttgtaggttgtctggctttccctcttatggtttttaggattttattttttatcatttatagtctatagagaatatatctgggcmtgagttttagttttgattttaaatcttaacacctggtaggcctgtgcaatctgaagatgaatgtctttcctcatttctggaaaattcttcaaagattaactctaccccttttctctcttttctctctttctagaagccgtgctggacatatggtggtctttcattgtatcatctgtctcttatcctctctttcttgcattccttctctttctctttttgtactatttcataggagatttcctcctccctgcctctgctcatggccaatcgtgtttcacctatattcctcctcagattatgttgaagtcaatcctagacatcatatcattttatctgcaaatatttcagtatttgtctctaaaagataaggattatttttaaaaacattgacagtagttccttagtatctagccagcgttcagatatccctgaatgtcttataaatgtttttgtattattgtttttccaaataaggaaccaagcaagatcaagactatggatttggttgaaatatttagctctcttttaatttacgattcccttcatttttttaaacttcagtctatttattgaataactgatgtttagtagaaaccatgtttatggtgctgtagtatttcccacagtctgggttttgccgattacatccccattgcgtttaacatgcccttctgtcctccagtattttctgtatactggtagatctgggatggcgctgtccattaaggcagccattagccacgtgcaactattgggcacttaaaatgtggcaagtcagaattgagaagcactgtaagtgtgaagtccacaccagatttcaaaaactacctacagaaaaaaggaatgtaactgtctcattaaagttaatttcacctttttctttttactttttaatgtcattactataaactttaaagtcactgtgacttttattatgtttctactggactaaagacttgatcggactctggttcagtttttccctctggggtattattacttctgatactccaatagtaataagcatgcctagtgctcagatttgggtttctatataccatttcccataaaaagaactagggcttcttgggaaaattgctcattctaggaccctagggcaagggcagtacaaaatgagtctgggacattttcttagcacaaa

SEQ ID NO: 709076 - DNA, 1005 bp, Homo sapiens
ttttactgtccatgaaaacaccattgtgagcagtttgttcatctaatgaatctctttcaatttctctattgacaaatgtgttcttttgaaggttgtatcccttgcttaaagtcacctccagctataaattattttttaaaacatcaagaactcagttgtgtctgaacagatgactttttggattttcctttacctgattgcttaacatcacccaggtttaggtattatttttagcatattgcctataccagttgttttcaaattagcataagcagtctactgaaatggttatgtgcacacacacacatacacatacagagtactgtttctatgttccagattgaattgttcatggaactacgatatagaaatcacgggagaggtcctcttgtacttccttttgaacttttctgagacctcagagcaattaaggttcctcacacaacagtttgaaaacttcctttatcattatactgtttggtaaaaattcttttgaaagaaataaaatggtarccatatttttacatacaatagttccagaatattctgccaaacttctaagaataatttaaaagtagatttaaatcctattccttctttttaacaccctgactttgttttgctctcaattaagattttttagagtttctccaaaactccttttagaaataagcgaaatcctattagaagcatgtgaaatatttatatggggtcattattataggtcaaaaccacccagttttcctgaaaagaagtacacaagcactccagcaatttccactgttattttatctaactcctctcagctcccttttcccctgtcttcttttttcttatgctatattaagtaccttaccttttctgcaagtctctcaccaggatgctttgcagataaaatttcccttttgggtaaaatgggacagatgagaagtaggttttggtggtacataactttaatagacactaggactttttacatagtgccctcttatcattcttcttttt

SEQ ID NO: 709077 - DNA, 649 bp, Homo sapiens
tgcatgtgtgttcgtatatatgtgtgtgtgtgtttcataaaaccagatataaacygaactaagtatgccaaattaaagttatttttataaattcaaaccttattctctttatatagaaataaatagtattcaactattttgaagaaaatgtgattattttcatatagaaactaaaaatagcaacagggaacatttgtggtaaaccttctgcaataacagttcatgcattatttgaagaataatgtattttacataaatacattcaaattgtttttaagatatcttgttgtctcttgtaagaaaatcatcccagatgtggacataaactcggatataacttatggtgatattggaggacattcgtaatatttttgagtcctttgagacaataactttacaaaaatttaagaaattactggtgttctcagttattcatgtggcctttttaggaaataatactttttgtactcagtttttccttcctttggcatgtgatactatcaattgaaaatttgacttttataaatagttctccattatgatattatgaaaacttctggtaagttatcgttttcaatctgaaattactacaaactatttttttagaatgagtatcaataaataaatcaatattattactggaaatggt

SEQ ID NO: 709078 - DNA, 649 bp, Homo sapiens
tgcatgtgtgttcgtatatatgtgtgtgtgtgtttcataaaaccagatataaaccgaactaagtatgccaaattaaagttatttttataaattcaaaccttattctctttatatagaaataaatagtattcaactattttgaagaaaatgtgattattttcatatagaaactaaaaatagcaacagggaacatttgtggtaaaccttctgcaataacagttcatgcattatttgaagaataatgtattttacataaatacattcaaattgtttttaagatatcttgttgtctcttgtaagaaaatcatcccagatgtggacataaactcggatataacttatggtgatattggaggacattcgtaatatttttgagtcctttgagacaatarctttacaaaaatttaagaaattactggtgttctcagttattcatgtggcctttttaggaaataatactttttgtactcagtttttccttcctttggcatgtgatactatcaattgaaaatttgacttttataaatagttctccattatgatattatgaaaacttctggtaagttatcgttttcaatctgaaattactacaaactatttttttagaatgagtatcaataaataaatcaatattattactggaaatggt

SEQ ID NO: 709079 - DNA, 645 bp, Homo sapiens
ttgttgttgagagagggtcttgctctgttacccaggctagagtgcagtggtgtgatctcagcccactgcagcggcagcctcccaagtggggggactacacatggttgggagtgcaggtgtgtgccactgcacctggccattttttgtattttttgtagagatgggggtcctactatgttgtccaggctgatctggaactcttgagctcaaccggtctgcccgcctcagcttcccaaagtgctgggattacaggaatcagccaccattcctggcccctggaagaagttctttttttgttttttggttggttgttttttttttttttttttttttttttttgagatggagtcttactctgttgccaaggccagagtgcaggggcccgatctcagctcactgcaacttctgcctcctgggttcaagtgattctcctgccttagcctcccgagtagctgggactacaggcatgcgccaccatgcctagctaatttttgtgttattagtagagatggggttttgccatgttggccagggtggtcttgaactcctgacctcaactgatccacccgcctcagcctccccaagtgctgggattacaggtgtgagccacygcacctggcctggaagaaatttgaataagttgca

SEQ ID NO: 709080 - DNA, 1365 bp, Homo sapiens
acctggtggttcagtctcaaatttcctattttggaattggcttgagagagcctwttgagttgctaaaagcttttatttattttttattttttgagacggagtttcattcttcttgcccaggctggagtacaatggcgcagccttggctcactgcaacctctgcctcccgggttccagcaattctcttgtcctggcctcccaagtagctgggactgccaccatgcatggctaatttttctatttttagtagagacaagatttcactttgttggccaggttggtctcggactcctgatctcagatgatctgcctgcctcggtctcccaaagtgttgggattacaggcgtgagccactgcgcctggccacttttattttttaaaagagtttcaaacctgaattaaattattaaaaggagaaaatgtgctcagttgaataaaacttcaaaatgctgaaaagagtatagtgtaaaatttcccctctgtctcgtctcctagccacccaagttcctcttctgggagacaaccagtacttccagtttttctgaatgctcccagctgtagatagatagatacacatgagtgtctggcaaggcacagtggctcacacctataatcccagcacttttggaggctgaagtgggaagttctcttgagtctggaagttcaagaccagcctaggcaacatagcaagaccccgtctctacaaaaaaataaaaatacaaaataaaaaagatacacatctatagatagagagatgcatacatatatacatgtatacacacagatacacacatatgtgtattttttgtagacttatacagaatcactttagaggaagagtaattggaaagattgggtttagaaaaatggaccattttctactgaatatatggagtgaaagaggaagtgagttatttccatgttattgaaagctccattatttcaaataaagcctagaaagaataaaataaagctttagccttcttaaattacaattttccagagcatccctcaaaatgtatgagaaaagaaattgatggcagcttatccctccggcaggaaggtgtggtttgaaagtgggccggccacaccgagttgcctgggtcattgaggcacagttctcccctgaactattttgccccataattgttggtaaacgggaaacacttgggtccttcagataaccatgagaatatctcattcgtgcctgttcttgccatactagttgctatggcacagtgtcttccttaaacggagagcccgaacaaggggttgccatggaagcggtgggccagaacgactgcagcatttacggagaagacaccgtgacagacgaagagggcaagttcagattacgtggattgc

SEQ ID NO: 709081 - DNA, 1365 bp, Homo sapiens
acctggtggttcagtctcaaatttcctattttggaattggcttgagagagccttttgagttgctaaaagcttttatttattttttattttttgagacggagtttcattcttcttgcccaggctggagtacaatggcgcagccttggctcactgcaacctctgcctcccgggttccagcaattctcttgtcctggcctcccaagtagctgggactgccaccatgcatggctaatttttctatttttagtagagacaagatttcactttgttggccaggttggtctcggactcctgatctcagatgatctgcctgcctcggtctcccaaagtgttgggattacaggcgtgagccactgcgcctggccacttttattttttaaaagagtttcaaacctgaattamattattaaaaggagaaaatgtgctcagttgaataaaacttcaaaatgctgaaaagagtatagtgtaaaatttcccctctgtctcgtctcctagccacccaagttcctcttctgggagacaaccagtacttccagtttttctgaatgctcccagctgtagatagatagatacacatgagtgtctggcaaggcacagtggctcacacctataatcccagcacttttggaggctgaagtgggaagttctcttgagtctggaagttcaagaccagcctaggcaacatagcaagaccccgtctctacaaaaaaataaaaatacaaaataaaaaagatacacatctatagatagagagatgcatacatatatacatgtatacacacagatacacacatatgtgtattttttgtagacttatacagaatcactttagaggaagagtaattggaaagattgggtttagaaaaatggaccattttctactgaatatatggagtgaaagaggaagtgagttatttccatgttattgaaagctccattatttcaaataaagcctagaaagaataaaataaagctttagccttcttaaattacaattttccagagcatccctcaaaatgtatgagaaaagaaattgatggcagcttatccctccggcaggaaggtgtggtttgaaagtgggccggccacaccgagttgcctgggtcattgaggcacagttctcccctgaactattttgccccataattgttggtaaacgggaaacacttgggtccttcagataaccatgagaatatctcattcgtgcctgttcttgccatactagttgctatggcacagtgtcttccttaaacggagagcccgaacaaggggttgccatggaagcggtgggccagaacgactgcagcatttacggagaagacaccgtgacagacgaagagggcaagttcagattacgtggattgc

SEQ ID NO: 709082 - DNA, 1365 bp, Homo sapiens
acctggtggttcagtctcaaatttcctattttggaattggcttgagagagccttttgagttgctaaaagcttttatttattttttattttttgagacggagtttcattcttcttgcccaggctggagtacaatggcgcagccttggctcactgcaacctctgcctcccgggttccagcaattctcttgtcctggcctcccaagtagctgggactgccaccatgcatggctaatttttctatttttagtagagacaagatttcactttgttggccaggttggtctcggactcctgatctcagatgatctgcctgcctcggtctcccaaagtgttgggattacaggcgtgagccactgcgcctggccacttttattttttaaaagagtttcaaacctgaattaaatyattaaaaggagaaaatgtgctcagttgaataaaacttcaaaatgctgaaaagagtatagtgtaaaatttcccctctgtctcgtctcctagccacccaagttcctcttctgggagacaaccagtacttccagtttttctgaatgctcccagctgtagatagatagatacacatgagtgtctggcaaggcacagtggctcacacctataatcccagcacttttggaggctgaagtgggaagttctcttgagtctggaagttcaagaccagcctaggcaacatagcaagaccccgtctctacaaaaaaataaaaatacaaaataaaaaagatacacatctatagatagagagatgcatacatatatacatgtatacacacagatacacacatatgtgtattttttgtagacttatacagaatcactttagaggaagagtaattggaaagattgggtttagaaaaatggaccattttctactgaatatatggagtgaaagaggaagtgagttatttccatgttattgaaagctccattatttcaaataaagcctagaaagaataaaataaagctttagccttcttaaattacaattttccagagcatccctcaaaatgtatgagaaaagaaattgatggcagcttatccctccggcaggaaggtgtggtttgaaagtgggccggccacaccgagttgcctgggtcattgaggcacagttctcccctgaactattttgccccataattgttggtaaacgggaaacacttgggtccttcagataaccatgagaatatctcattcgtgcctgttcttgccatactagttgctatggcacagtgtcttccttaaacggagagcccgaacaaggggttgccatggaagcggtgggccagaacgactgcagcatttacggagaagacaccgtgacagacgaagagggcaagttcagattacgtggattgc

SEQ ID NO: 709083 - DNA, 943 bp, Homo sapiens
catttctggagcactttctatgagctaagcatgttctatgtattaactcaaacttcacaacaactcagagatcagtattaccagtcccaatttacagatgggaaaactgagactgagctatgaagtgcttttcccaatgtctcccagctgaaagcaaatatcccatttgtgcaaactggaaaatgtacctggagcatttaacacactgcccagcacatattaggtgctgggttaatgttaaaggaagaaggaagtcacggagttgcttcctcatctggggacaccaaggtggatgaggaagtcaccagatggaagcaggtttggggaaggtgaggagttcattttagggggtaatgggtctgaaagctaggggacctgaggtggggacactgtggaggtagctggtgcccagggtttagggccttgtccctggagtcctttggcctaaactccatgaagaagacattgtgagagaaccactcaccttctctcctgcgtggatcttgaaggacacgccctgcacagccagcgggagctcaggtcggtatcttagcccaaagtcccggaactcgatctgcccgccctgaggccaggggggctgagctgcacatgtgggcagcctccagggagcctggagcaggaggggaaactgagtcagaggagccttcctctaagacttcacacaagatggcccacctctatcagcttcagttttctcttccgcaaaatggacgtatttattgctgttttacagggttgttatgggaattcaacaagagagggcatggactatgtcaatgctaaaaacagatggtggtggctacttttagtctattttattgttattattagccactgtttatkataaaataatctctttttctatagtgggagcagacatttctctttgtctttgtgaaaggacatgactgtgcagtgggaa

SEQ ID NO: 709084 - DNA, 1285 bp, Homo sapiens
cacaaagaaatttgatttgaccttctggtttggcctccctttctccctctagctgctaaacaaagtcaaggcaaattagcagggtccctgaggagcgatcaccatgaggtggagaggggactgattttgaagtcagagatgtatgagcaatctcaagtaagatgcgtaatcccaccgggactgaattgcttacctgtgaaatggtggggcggtgtggggggcagggaatactcacctcttaaaattattataaggatttagaacaattcatgttcagtgtgtggcacagggcctaaatgaaagctattaaagatgaattatcacagtactcgagcactttcatacctttctcccatttaccagctgccttctttgtctcatttagtgatgacacgaagaagaagaaatacttaaggagattgaatgccaaccaaatcggcagttaacacttgaatttaaatccccttttctgcctcccctctaaggagtctgatgataactcccttccagggyttcatttcataacctgggccaatttgactcattatctccctgtcagcacgaagagaatgaaaaccagttgtcattaccaacttatccctgctctgaatagaatatgggatggaggagaagtgaatgccctgtataggttgttaacccccaagaacaaattcaaggattctgggacaagcccagccctagatcaggctgcaaatgtccagaggcttctgggtaacctcaggtgataaccttggaaggagggggatacagggataagagcagaggaaacacagctggaggaagtaaactttggcaaaaatgaatggagcatggtgttgagagccacaaatcacatcaaaccagagcagaggttccagactcagactgacctgggcttgaatccaagctgctgccctgtggccgtgggcaggttgatctcactaagcctaagttttcttgccagtatgatggaataatactatgtgcgtgtgtgtatgtgtgtgtgtgtgtgtgtgtgtgtgtgaacgctaactaaaatatgactatcctctgagagcagttattgtttttacctcatgtgccaaaagttgggaaagtgtcccccttgcttcacatggctgccttctgacaatttcttttccttcctgcttccaacatttcagtttctttcaaggccatgccaaaccttcaccatccacagatcctgctttcaaagtcttctgctgatttcccagacactcactctttcattccctgaagattccagcacctggatcactgtctt

SEQ ID NO: 709085 - DNA, 861 bp, Homo sapiens
accagttacagtgttcataaataaagtcttattgagatacagctacactcattcatttatgtgttttctgtggctgctttcacattgtaatggcagaattgacagcgacagagcctgtatggcccacgaagcctaaaatatgtattatctgtctccttactcaaaaagtgtgctggcctctgttctaggataatgacatgtcaataatctttgaggttattatcttctctactggacagaaatcagttgcacccctacaggacaaaaatcatttgcaacctcaattttctacaatttaacatcaaatgttatagaatccaagccctaatcaataataaaatcaacattacatcctctagagaatcagataacccttaggcagacagttttctaatttgatttggaagttacgcagctatcttttttactttattccaaactttcagataattggtcttcacacttgaaaccaaaagatcagtaatatagactcgatggtctacaatttgtgatctagaaggccacttcctccacgggacttctctgaattgaagctctgaaagcccttttaggaaattagaatgttgaggcttctcactgagcggaggacaatcaggtctgttgaaaacaggagggatcgcggaaagaaggtggcttgaaggttgaaatttgtgagccttgatgcatggtgccaccctcaacaggtggctagggccagtggctgactggtgtggaggtacaagagctctgttctcttgcctcaaatcacartaaactctggggtgcaatttagactctagagctcaccatggcttcaggttgagggtagatttccctttcttacttaatttattccaggct

SEQ ID NO: 709086 - DNA, 861 bp, Homo sapiens
accagttacagtgttcataaataaagtcttattgagatacagctacactcattcatttatgtgttttctgtggctgctttcacattgtaatggcagaattgacagcgacagagcctgtatggcccacgaagcctaaaatatgtattatctgtctccttactcaaaaagtgtgctggcctctgttctaggataatgacatgtcaataatctttgaggttattatcttctctactggacagaaatcagttgcacccctacaggacaaaaatcatttgcaacctcaattttctacaatttaacatcaaatgttatagaatccaagccctaatcaataataaaatcaacattacatcctctagagaatcagataacccttaggcagacagttttctaatttgatttggaagttacgcagctatcttttttactttattccaaactttcagataattggtcttcacacttgaaaccaaaagatcagtaatatagactcgatggtctacaatttgtgatctagaaggccacttcctccacgggacttctctgaattgaagctctgaaagcccttttaggaaattagaatgttgaggcttctcactgagcggaggacaatcaggtctgttgaaaacaggagggatcgcggaaagaaggtggcttgaaggttgaaatttgtgagccttgatgcatggtgccaccctcaacaggtggctagggccagtggctgactggtgtggaggtacaagagctctgttctcttgcctcaaatcacagtaaactctggggtgcaatttagactctagagctcaccatggcwtcaggttgagggtagatttccctttcttacttaatttattccaggct

SEQ ID NO: 709087 - DNA, 602 bp, Homo sapiens
tgaatccttttctcatttccatcttagagcatgctcagatatcataggaaggtcttcttcttcttttttcttttttgagacagagtctcactgtgtcactctggctggagcgcagtggcacgatatcggttcactgcaacatccgtctccggagttcaagtgattctcctgcctcagcctcccgagtagctgaggttacaggcatgcaccactatgcctggctaatttttttttttttttttaagtagagatgggtttctccatgttgctcagctggtctcgaactcctgacytcaaatgattttcccagcttggcctcccaaagtgctgagattacaggtgtgagctactgcacttggccaggaaggacttctttaaacattctccttttccaacatggagtcctcaccttcccagcagaattgactgtcagaagctccgaagcattagaacaattcactttgagtggaatcccatttattggtagaggtcttctactctttagttattcataaaatttatttatttatctattctcacatagttttggttcccgaaaaactctgggcaggcagaaaaccccacaaaccatatactttctt

SEQ ID NO: 709088 - DNA, 1087 bp, Homo sapiens
tgggaaagaaaatctgggggcaggataagatggtctccgaagccttaaaattatatgccattatttacctctttgatctactactcaatatcaaacaactaattcagaagaaaattgattgttttctaaaagtagtttttctacatttcccattaagaagcagtggtatttaaaacttataatggctattatgtgagattatcactatcatagtttttctctatacaaattttctgtaacattttatttgctaataaaaattagatagatggattgactaattgataatctaagaaagattatatttgaagaagccatagtaagggacagattaaattatcatcagtctaaacattctaatacctatttctctttttttgaaattttccaaatttgttattatgcatttaaacaataattttttgaacttttattttaggttctggggtacatgtgaaagcttgttacrtaggtaaccttttgtcatgagggtttgttgtacaaattatttcatcactcagctatcaagcccagtactcaataggtatcttttctgctcctctccctcctcccaccctccagtctcaagtagacctcggtgtctgttgttcccttctttgagttcatgtgttctcatcatttagctcccacttataagtgagaatacaaggtatttggttttctgttcctgtgttagtttgctaagggtaatagcctccagctccattcgtgtttccacaaaaaaacatgatctcgttcttttcatggctgcatagtattccatggtgtatatgtaccacactttctttatctaatctgtcattgatgggcatttaggtttattccatgtctttgctactgtgaatagtgctgcaatgaacattcacatgcgtgtgtcttcatggtagaatgatttatattcctctgggtgtatacccagtaatgggatttctgtttttagctctttgatctaatacctatttctcaagatcaagttagatctctaaaaaaggcatcatcctagcatttccccatcccttccctgaactaaatttaatgttgtgtgtatcaatcagcatacagtcaa

SEQ ID NO: 709089 - DNA, 464 bp, Homo sapiens
gtggcgatttcaggggaaagcagttcaccctcctgaaagacgggggatgttttctagcattactctccactcccctgttgacttcctgcccagagtagggccagtgctctctccctaggcctggcgaacagaatggtggtgaggacacaggcttttcagggcagaggtgaatttgtaatcgcttgctcaatcacggagatgygggcaggcagaaaaatgaacagaaaccctgaggagtgccaagtgactgtgtaaattagtgtacggttatctgcagagatcaggccaagggagctctagaaggttgttggggagcactaaactggagaataagagaagatagtttaatgccgtaccatggagtctggtatgtagtccctcagtctgtgctggtaccagtaccaacaggaagctgggtgggatgtcctgtgctttctcaccaagttattccttttagagctcca

SEQ ID NO: 709090 - DNA, 1454 bp, Homo sapiens
ccaaggttatttagctagcagctagagtctggtttcgtgacattgaaccaactgggttttggaataccgtgtcaacactgagaaggatgaactgatatcaaatatcttgcgtatgtttccgagggtggtttaccggatggtggtctgctacaactcagccatttattgtggtctgttttttcagtgagtcaaggtctcttaagtctccaagctaaacaggagtactgcctgaagccagaatgcatcgaagcgggtaagtcacagttttccatcctgtgtcaagttataattatggtaccttgggaagtggaagagaagacaggtggtatttttagtattctgtttgcttgaggtttaccaagtacgaaatgcaattttgaagaaattttaagtttattttcaagttttggtgtgaaacagtggagcttaggtttcctgttttctttttccttgcaaaaactgtggtattctaagcgttgttacaaggaaatcaggaaggggcttggaaggctgaatggcctctcttaagacccacaggcagagaacattggtcttcctatggctccgctggctatgaattcctctttaccttaagcagttgcctatyttctggtctgtgggtctgacttgcctgcctctaagcaaggctcctttgcaaataaatccacgcttccattgtcagtgggagtcccttttctcttttttaaaaattgagacggagtcttgctctgtcgcccaggctggcacgatctcagctcactgcatcctccacctcctgggctcaagtgattctcctgcctcagcctccctagtagctgggattacaagtgcccaccaccacgcccggctgatttttgtatttctagtagagacggagtttcaccttgttggccacactgatctcgaactcctgacctcaagtgatccacccgccttggcctcccaaagtgctgggattacaggcaagagccactgtgcccggctgggaatctcttttttctgtcacacgttgcaagtcaaacttctcttgaggtgaccaggctgtgtatcagtggatatcccagggtgaagatgagtgtttaaagtggccgcagttttgccacagtgtcttatcccatcaaactcatggctggagttgccccaaaagcagcaacagggaaattcccatgagggaatatcccatcccgagatggggccagttgggattccaaagaaagaagcactaaataaatgccagggcggccggtcagtccaaagcatttattagtgcaacttatgttgaaagtgctgcagtgtatcctcaagacagtgagagaaaaggggtgttctacttagggcattagggtgtggagactatatgcgggtttaaggaatttggctcagagccggtactagtttctttcagtgttttgtgcatcaacctagatacctttatcagtgcctgggaatgttca

SEQ ID NO: 709091 - DNA, 1454 bp, Homo sapiens
ccaaggttatttagctagcagctagagtctggtttcgtgacattgaaccaactgggttttggaataccgtgtcaacactgagaaggatgaactgatatcaaatatcttgcgtatgtttccgagggtggtttaccggatggtggtctgctacaactcagccatttattgtggtctgttttttcagtgagtcaaggtctcttaagtctccaagctaaacaggagtactgcctgaagccagaatgcatcgaagcgggtaagtcacagttttccatcctgtgtcaagttataattatggtaccttgggaagtggaagagaagacaggtggtatttttagtattctgtttgcttgaggtttaccaagtacgaaatgcaattttgaagaaattttaagtttattttcaagttttggtgtgaaacagtggagcttaggtttcctgttttctttttccttgcaaaaactgtggtattctaagcgttgttacaaggaaatcaggaaggggcttggaaggctgaatggcctctcttaagacccacaggcagagaacattggtcttcctatggctccgctggctatgaattcctctttaccttaagcagttgcctatcttctggtctgtgrgtctgacttgcctgcctctaagcaaggctcctttgcaaataaatccacgcttccattgtcagtgggagtcccttttctcttttttaaaaattgagacggagtcttgctctgtcgcccaggctggcacgatctcagctcactgcatcctccacctcctgggctcaagtgattctcctgcctcagcctccctagtagctgggattacaagtgcccaccaccacgcccggctgatttttgtatttctagtagagacggagtttcaccttgttggccacactgatctcgaactcctgacctcaagtgatccacccgccttggcctcccaaagtgctgggattacaggcaagagccactgtgcccggctgggaatctcttttttctgtcacacgttgcaagtcaaacttctcttgaggtgaccaggctgtgtatcagtggatatcccagggtgaagatgagtgtttaaagtggccgcagttttgccacagtgtcttatcccatcaaactcatggctggagttgccccaaaagcagcaacagggaaattcccatgagggaatatcccatcccgagatggggccagttgggattccaaagaaagaagcactaaataaatgccagggcggccggtcagtccaaagcatttattagtgcaacttatgttgaaagtgctgcagtgtatcctcaagacagtgagagaaaaggggtgttctacttagggcattagggtgtggagactatatgcgggtttaaggaatttggctcagagccggtactagtttctttcagtgttttgtgcatcaacctagatacctttatcagtgcctgggaatgttca

SEQ ID NO: 709092 - DNA, 1454 bp, Homo sapiens
ccaaggttatttagctagcagctagagtctggtttcgtgacattgaaccaactgggttttggaataccgtgtcaacactgagaaggatgaactgatatcaaatatcttgcgtatgtttccgagggtggtttaccggatggtggtctgctacaactcagccatttattgtggtctgttttttcagtgagtcaaggtctcttaagtctccaagctaaacaggagtactgcctgaagccagaatgcatcgaagcgggtaagtcacagttttccatcctgtgtcaagttataattatggtaccttgggaagtggaagagaagacaggtggtatttttagtattctgtttgcttgaggtttaccaagtacgaaatgcaattttgaagaaattttaagtttattttcaagttttggtgtgaaacagtggagcttaggtttcctgttttctttttccttgcaaaaactgtggtattctaagcgttgttacaaggaaatcaggaaggggcttggaaggctgaatggcctctcttaagacccacaggcagagaacattggtcttcctatggctccgctggctatgaattcctctttaccttaagcagttgcctatcttctggtctgtgggtctgacttgcctgcctctaagcaaggctcctttgcaaataaatccacrcttccattgtcagtgggagtcccttttctcttttttaaaaattgagacggagtcttgctctgtcgcccaggctggcacgatctcagctcactgcatcctccacctcctgggctcaagtgattctcctgcctcagcctccctagtagctgggattacaagtgcccaccaccacgcccggctgatttttgtatttctagtagagacggagtttcaccttgttggccacactgatctcgaactcctgacctcaagtgatccacccgccttggcctcccaaagtgctgggattacaggcaagagccactgtgcccggctgggaatctcttttttctgtcacacgttgcaagtcaaacttctcttgaggtgaccaggctgtgtatcagtggatatcccagggtgaagatgagtgtttaaagtggccgcagttttgccacagtgtcttatcccatcaaactcatggctggagttgccccaaaagcagcaacagggaaattcccatgagggaatatcccatcccgagatggggccagttgggattccaaagaaagaagcactaaataaatgccagggcggccggtcagtccaaagcatttattagtgcaacttatgttgaaagtgctgcagtgtatcctcaagacagtgagagaaaaggggtgttctacttagggcattagggtgtggagactatatgcgggtttaaggaatttggctcagagccggtactagtttctttcagtgttttgtgcatcaacctagatacctttatcagtgcctgggaatgttca

SEQ ID NO: 709093 - DNA, 1454 bp, Homo sapiens
ccaaggttatttagctagcagctagagtctggtttcgtgacattgaaccaactgggttttggaataccgtgtcaacactgagaaggatgaactgatatcaaatatcttgcgtatgtttccgagggtggtttaccggatggtggtctgctacaactcagccatttattgtggtctgttttttcagtgagtcaaggtctcttaagtctccaagctaaacaggagtactgcctgaagccagaatgcatcgaagcgggtaagtcacagttttccatcctgtgtcaagttataattatggtaccttgggaagtggaagagaagacaggtggtatttttagtattctgtttgcttgaggtttaccaagtacgaaatgcaattttgaagaaattttaagtttattttcaagttttggtgtgaaacagtggagcttaggtttcctgttttctttttccttgcaaaaactgtggtattctaagcgttgttacaaggaaatcaggaaggggcttggaaggctgaatggcctctcttaagacccacaggcagagaacattggtcttcctatggctccgctggctatgaattcctctttaccttaagcagttgcctatcttctggtctgtgggtctgacttgcctgcctctaagcaaggctcctttgcaaataaatccacgcttccattgtcagtgggagtcccttttctcttttttaaaaattgagacggagtcttgctctgtcgcccaggctgkcacgatctcagctcactgcatcctccacctcctgggctcaagtgattctcctgcctcagcctccctagtagctgggattacaagtgcccaccaccacgcccggctgatttttgtatttctagtagagacggagtttcaccttgttggccacactgatctcgaactcctgacctcaagtgatccacccgccttggcctcccaaagtgctgggattacaggcaagagccactgtgcccggctgggaatctcttttttctgtcacacgttgcaagtcaaacttctcttgaggtgaccaggctgtgtatcagtggatatcccagggtgaagatgagtgtttaaagtggccgcagttttgccacagtgtcttatcccatcaaactcatggctggagttgccccaaaagcagcaacagggaaattcccatgagggaatatcccatcccgagatggggccagttgggattccaaagaaagaagcactaaataaatgccagggcggccggtcagtccaaagcatttattagtgcaacttatgttgaaagtgctgcagtgtatcctcaagacagtgagagaaaaggggtgttctacttagggcattagggtgtggagactatatgcgggtttaaggaatttggctcagagccggtactagtttctttcagtgttttgtgcatcaacctagatacctttatcagtgcctgggaatgttca

SEQ ID NO: 709094 - DNA, 1495 bp, Homo sapiens
ggaattccaattcaatagtttgttaagccattgtgttgggcaagcaaaacagttttctgggaagattcagcccattgggttggacttagtctgtggatagccaacttttcagcattccatttatctattgctgtgtgataaacctcccccaaatttagagtactgaaacaacagtcattatttttctctctcatggttctgggggtcactaggctcagctgcatggttctcgtttgtggtttttttttttttttttggacacagagtctcactctgtcaccaggctggagtacattggcgtgatctcggctcactgcaacctccgtctcccaggttcaagcgattctcctgcctcagcctcctgagtagctgagattacaggtgcccgccaccacgctgagctaatttttgtagttttagtacagacagcatttcaccatgttggccaggctggtttcgaactcctgacttcaggtgatctgcccacctcagcctcccaaagtgctgggattacaggcatgagccactgcacctgaccatttgtggtctttcatgtagttacagtcagatagtggctggggctagagtcatatggaaggctacctctctcacatgtctaatggttgatgctgactgttgactagaacatctacatatggcctcttcatgtatgttgggtttccttacagcatgttgattgatatagaaagttcaaagagcagcttttctgagaaagaagaagggagggagggtgtgtttgtatgcatcagggggaagttgtatcacctttaattacctagccttggaagtcacactgtcatttctgctgcgtattattctttagaagtgagtcactaaggctaacccataatcaaggggagaggaatttagattccatctcttaatgggaggagtgtaaaaaagttcacaaacacatattaaaactagcacatgtagccttacattagagaatagtaaaactaaatatataataaacttggatgtaatacgggagatatacaaaatgtttaacagctggtttggcatgggccctgaacaaatagaagaaataacagcatcaacaactggtaggatctactggtgcagctgcttaatatcagctctgggtattatcaagtctccatacgtgccctagagtcaataagagccctgggaggtcaggaatggtaagatcatgtgtctgaaataagatgttttcgttattcttgttgaagcttcagaagccccattaaggtctagtttcagagactggttgtttggtttgctttgtctacctttgtctaccagcagttaggaacattttccctgcatggcccttacctgaatattttaaaagtttgttattttaaagagaggggagttgggaagaacaaaaagagaagggacaagctctaggaatacacgttatcttttgtatrtattatgattcattccagtgttatttagaagccaaggcacccacctggattttccc

SEQ ID NO: 709095 - DNA, 788 bp, Homo sapiens
aaatccttcccagttcactacttacgctaccgacacacagggaaaaggaaggcttttatttctcccaagatgtcagtttaaaatacatctccaggccgggtgcggtggcttaggtctgtaatcccaacactctgaggccaagacaggaggattgcttgagcccagaagttcaagatcaacctgtgcaacatagcaagaccccgtctcttaaaaacaattttaatttaatttaaaaaataaataaaataaatctccagggtggccccacattgttctggcatttctgctcagaggtctgtgctgatgacggcaaaacatgatgatgacggccatggtgtcaaattccactggacatgaatccagctgcacggtccccacactatgagcccttgcctggggcttcagccttcacatccgttcctgggtagagctgacgccagaggagagagagatcacatactgaggacagtcctggtctcttgtagtcctgtctgggccttgcagtgaacaccctgcacaccaactggcttattcgtcaccaaaggaatccctatttgcagtaaaaatcaagtcaatagcaaaattagtaccaaaggctcaaagagaaaagttctccctctcacctctttgtatccttacttcccagaggtggtcattcctaccackgcttgcctatcttgcagaagggccctgtgtataaatcacatgtgtgggctgggcacagtggcttacacctgtaatcccagaactttgggaggctgaggcgggtggatcacctggggtaagga

SEQ ID NO: 709096 - DNA, 788 bp, Homo sapiens
aaatccttcccagttcactacttacgctaccgacacacagggaaaaggaaggcttttatttctcccaagatgtcagtttaaaatacatctccaggccgggtgcggtggcttaggtctgtaatcccaacactctgaggccaagacaggaggattgcttgagcccagaagttcaagatcaacctgtgcaacatagcaagaccccgtctcttaaaaacaattttaatttaatttaaaaaataaataaaataaatctccagggtggccccacattgttctggcatttctgctcagaggtctgtgctgatgacggcaaaacatgatgatgacggccatggtgtcaaattccactggacatgaatccagctgcacggtccccacactatgagcccttgcctggggcttcagccttcacatccgttcctgggtagagctgacgccagaggagagagagatcacatactgaggacagtcctggtctcttgtagtcctgtctgggccttgcagtgaacaccctgcacaccaactggcttattcgtcaccaaaggaatccctatttgcagtaaaaatcaagtcaatagcaaaattagtaccaaaggctcaaagagaaaagttctccctctcacctctttgtatccttacttcccagaggtggtcattcctaccactgcttgcctatcttgcagaagggccctgtgtataaatcacatgtgtgggctgggcacagtggcttacacctgtaatcccagaactttgggaggctgaggcrggtggatcacctggggtaagga

SEQ ID NO: 709097 - DNA, 1093 bp, Homo sapiens
aactgtgcttggctaataatcctctctctctctctgtctctctctctttaaatggagaccctatsgaagtggcatttactcattgcatctagacgcagagtagctggagagggtttctgaatgtcagtcaaagtcattgcttggaaagaaggtctgaatattaggccttcaagatggaccaaggctgttagctagaaaatggataatgggattggaagtctgaggaattgggaccaggtgagaatgtaatttgctgagtggtcctgggaaagagggtcagaccaggtgacactgggtatttgaagtccaggtttatgaatcagagagacaggctcttgcagggctgaacaccaatggccttttgcacctagaaatgttcttcttcacatcttaggacattgataaggtgctttcatgcagccaacacagccttgtctgctaacctttgtaggtttcgcttcaccacaaaactaacagcagaagacaatttggtgcctgcttcgttatcaccagttatgtgtcttggttgcgtttagaataaaacaaaaatttgtctgatatgtgcaacaccttgctttggggggctattttctctctgaagggcaaatataccctcaaacacatttctgccaattcttccaatctcctgtattctataaacactatgctagctagttgttagccaaacatggatatcgcaaaggttgaaatttagggtaacaaagtaggacatttcaaaatcaggcatctaccgaattaataacctatttttagtgatgaatttttatggtgacctctctaagctcatgttatattttttattttaaagcagaggctttggggaaagtggaacgttcacatttagtacagcccatggccttgaacttcccaataaacagggagaacacaggactctccatgacgataaaccaagaatttaggaggaacttaagattgttacgtgggggctgggtgtggtggctcacacctgtaatcccagcattttgggatgctgaggcgggcagatcatgagatcaggagttcgagaccatcctgaccaacatggtgaaacaccgtctctattaaaaattca

SEQ ID NO: 709098 - DNA, 1541 bp, Homo sapiens
ttttaatgttaaaattgcactggtgttagatattaacgaagatgattggaaaaaagtctgaaagatacatcatttctatattccttgcttaatttttataaaatattgggttttcccttaagatagttgaagtatttttcttgccatgcctatttatttttgcaaaaaaattatctgctatatagaaccaaagatagattcgctttgctatatattataactatacttgcttttgcaataaaacaacttgtaattcaaaaatgaagattatctgcatatagtatttatgtgtgtgaataacatcttggcatgcagaaaataattttggctgctttgaacaggattgttcattctacacttccctgaaattccatttttgggagtgtctatccttcaatggctgaatagttccttaaatcagacaagctcctggctatcttcataaccagcagtgagtagatcttcttaatatagctgtctgaccacatgtggaaggcagctagacttattgtatttacagcctggccactctagacatatgaatccaggctgactgcttaagtgcccatctcgtttgatataaactgtagaaaaggcaagcactttgttctgagtcttttatctccaaatacatagttgtctcaaaccaagcaagctttatcaaaatggcttatttgcagaatagttccaatgatataaatgccaactggcaagtcattccaaactgcttgaaggagtagatgaaccagaatctgagaatttggaaataggtcacagaaaaagcctccatttggctaaatatgacaattatctgagtatggttaaatacatacaattaaatgtctgaagccaatgagttgtttattctaacttgaaatatatttttgtgagaataaatgttagaaaagttagtttattttggaaacctgccgtgaaaggaaattctaaaggcttaacatgaaactgtctgcatttctacctgttagacaatggttgctcttgggctcttgttatacagtcatatggctacacgtttatgtaaagtttgcaaaagtttggtgttttgatttataataaaactgttatattattcaccttggatttttacttcatcctacttgaaattgtgcagctacataagtggtgtttctccaaatttaatacacacacacacacacacacacacaatgtatatatatgatttgtttggaatttttggttcttgtagttaccatcattttaacacytgctataagttgtcattctaaataagtattccctttcatgttgattttgtattactttaatagaaagcctaccgaattttataagctgcatgtcccacaaaaccttctttggaccctgactaaaaaagaccaagacttcttggacatacagcctctatcaatccacataccttccccattgccctaagaagtaatttacaacaaaccatcatcacactgtatgtggattttataccctcgataaaacacactttatttgctctataattagtccattttcacactgctgataaa

SEQ ID NO: 709099 - DNA, 1072 bp, Homo sapiens
tcaaaaaaaaaaaaaaaaaaaagaaaaaaaaaatccctggctgggcgtggtggctcaagcctgtaatcccaacactttgggaggctgaggtgggtggatcacgaggtcaggagatcgagactatcctggctaacatggtgaaaccccatctctacaaaaaaaaaaaaattagccgggtgtcatggmacgtgcctgtagtcccagctactcaggaggctgaggcaggagagttgtttgaacccaggaggcggaggttgcggtgagctgagatcgctccgctacactccagcctgggcgacagagcgagcctacgtctcaaaaataaaaaaaaaataccatcctggctaacacagtgaaaccccgtctctactaaaaaatacaaaaaattagccgggcatagtggcgggcacctgtagtcccagctactcgggaggctgaggcaggagaatggcgtgaacccgggaggcggggcttgcagtgagccgagatcacgccactacactcgagcactccagcctgggcgacagagcgagactccgtctcaaaaaaaagcaaacataatgaaaattaaaaaatttttaaaaaaaccctgcaaacttggtgaattttttaccgactcgtgctttgcaaaattcttcatggaacttagattatatcagaatgtaaaaaaaaaaaaaaaaaaaaaagaatgctgactcctaaccaaataactatgaagcagatgctgagagatcaaaggagcaaatctaaaaatcatcagagatggggcctgggggagaagtatgctggcttatagatgaaaatgactggctctgtgttgataactgttgataactgttggacctgggtaatgggtttatgaggctggtgttctctacttttgttaatgtttgagcatttacataataaaggttttttttttttcattgtatatagaaatgaggactcactatgttgcccaggctggcctcaaattcccgggctcaagtagtcctccctcctctgcctcttgaagtgctgagattataggcatgagacaccacacctggatcaaaggttaaaaaaataatga

SEQ ID NO: 709100 - DNA, 1124 bp, Homo sapiens
cacacgtactgacataaaaatatggccatgagkgaaaaagtagttgtaggacaataaaaaatgatcttttataaagaatttatctaaatatttgtatatgcaaagagaaaggtctagaacaaaagccactatcattggtttcccttggggagtagaattgggaaggggcaactttcactttttacttcacatagttctaatttgtttttacatatatcttccatttatatctcaaaaaagaaaacaatacaaatgaggcagagatattattacaatactgcagcaaaagacaatctagatttactaactgtgcctctaaacaattagaccagtcattttatttttcatttcattttatttttcatttttagagacagagtttcactatgttgcccagcctggactcaaattcctgggctcaagtgatcttcctgcctcagcctcccaagtagctggaactatagacagagccaccgtgcccagcagaagtcattttatttctgactctttggtttctcatctacaaaacgacccacctcaaacgttgtttaaaaaattaaataatgtgtgttaaagggccaatcacaatgtttggagtacaaatacttgctgaatcttctaaaatgataaaggcctgagccaggcagcaagaaaaaacagaataggtttgagaagtagaattgacagaatagggagactgactgagcagagaggatgaagaaggtgaagtcaaagatgcctagttcacagtcaagattaaacaactgactggctagtgacagccctcatagcaatagaagatgtaaggaaagaaacaggtttggaagtaaggcaaaaagttttgttttaaccctattaagttagtgttgcatacttgatatccaggtaactgggcccaggaaatagttggagacacagggctggacctcaggaagaaaaaatgtatctgataatatacacttggtagtcatgggagtcaaagagcccaaggtagacagagagtgaaaaaggaaatgagaatcacacttaccttctctcctctcctttgaaactagacaacacgcctctttcactttattttttctttttctttttttactagttccctacaaaacagtggagaa

SEQ ID NO: 709101 - DNA, 1124 bp, Homo sapiens
cacacgtactgacataaaaatatggccatgagtgaaaaagtagttgtaggacaataaaaaatgatcttttataaagaatttatctaaatatttgtatatgcaaagagaaaggtctagaacaaaagccactatcattggtttcccttggggagtagaattgggaaggggcaactttcactttttacttcacatagttctaatttgtttttacatatatcttccatttatatctcaaaaaagaaaacaatacaaatgaggcagagatattattacaatactgcagcaaaagacaatctagatttactaactgtgcmtctaaacaattagaccagtcattttatttttcatttcattttatttttcatttttagagacagagtttcactatgttgcccagcctggactcaaattcctgggctcaagtgatcttcctgcctcagcctcccaagtagctggaactatagacagagccaccgtgcccagcagaagtcattttatttctgactctttggtttctcatctacaaaacgacccacctcaaacgttgtttaaaaaattaaataatgtgtgttaaagggccaatcacaatgtttggagtacaaatacttgctgaatcttctaaaatgataaaggcctgagccaggcagcaagaaaaaacagaataggtttgagaagtagaattgacagaatagggagactgactgagcagagaggatgaagaaggtgaagtcaaagatgcctagttcacagtcaagattaaacaactgactggctagtgacagccctcatagcaatagaagatgtaaggaaagaaacaggtttggaagtaaggcaaaaagttttgttttaaccctattaagttagtgttgcatacttgatatccaggtaactgggcccaggaaatagttggagacacagggctggacctcaggaagaaaaaatgtatctgataatatacacttggtagtcatgggagtcaaagagcccaaggtagacagagagtgaaaaaggaaatgagaatcacacttaccttctctcctctcctttgaaactagacaacacgcctctttcactttattttttctttttctttttttactagttccctacaaaacagtggagaa

SEQ ID NO: 709102 - DNA, 639 bp, Homo sapiens
ccagacttcttcctcctctggattcagacgcagcaaactgagtctcttctgcaggatgggctgaggctcagatctgatgccatctccagggcgattccctgacacccctcccctgagatggacttcatctcttcttggctctgtcctggctttccgtccttgcttatattgctgagcctgccttacttgagtgtcattgctggtctctctcacctctggcccttgagttcctaggagccttatgtatctctctatccctgtatacgtcttcacaatactgaaacaccttcctggttgctgaagagttgtgtatctgaccctgtgaaccgagaattgctgttacccccttttgattgaataagacttagaaagactggtcatttgacagagcttgcacaggaattatttatctgtttttaaatcactctgtgtgtggcactttatacaagaaatcacacgtagcttcccatattcagcaaatacatatgaggtgcctgttatgtgccaggcactcttcgggcagctttggctacagcartaggtaaagcaaagaacctgctgcccggggaggcttacattttaatggggagagatgatcagtaaagaagcaagttaatgtataatgtcagatggtggcca

SEQ ID NO: 709103 - DNA, 1697 bp, Homo sapiens
aaagtggctgtctacaagccatgaaaagagccatcaccagacgctgactctactgacacttggtcttggactttccagcctccagaactatcagaaataaatgtctgtcatttaagtcacccagactgtggcattttgttatagcagcctgaacagacagcatgtatatacacatattcttcatgaaaatgggatgactgcaaactttgtcatgcaatttaccttccctagctgagaataagggtacctgaatttttagttgtgtattcattgctattggatatcttctcataagtttaattgcattcctctaattttctatgagattttaaattttcatttgtttctcttctggttaaagagagttcctggcatgtaaagtggtttctgaggtatatgtggataatttcccctccaatttttaatgcaactttaaatgttaaaatctcatggattttaatgatgaagaaatcaatacagttcattgtaaaagtttttaagattcacaggagtgtaaagattgccactttatgagaagattttagatagaaaccattcaaagcccaggaagacatcatagtgagaaaggcttgggttttagagtccctggcctgtgttttacagacttggcactaagggtaacttacttagcctcttaagtcttggctttcctcatttctcgtaagcgatccttattacctaccttgaatttattatcatatttagaagagatacaatataaaattccttagatgtaactcaagctttgataaacaagaatttccttcctccatgtcactttcccaatgtctaaaacttgtactttcatctgatttattcgctacttcaggaactgccaatcaacatgcctcctagcctaggacaggatttcttctccacaaacatcatcactaaggggagttgtctaagtattttcccatgtgggcatgccaaagttcagcacaataccagaaaagtttacaactatcatttcttacccacattgcattgtagaagcccacatctacaatagaagctgctgggtatactctgggcatgttcggtggctgaatttcattgttgccacttatctggatatgtggtttatctttggcaagcctggagctgatcatcagtaaaatgaaaataatgatgctttcttttcagagttgttttagggaaatgagaaacccatgggaggctttagtgcttactatcttagcctcaccttgccttctctgcagaagagatgtctgtgatagaaactaaatgcataactctaagagagaacagttgggaccctaagtgtacagagggaaatgtgatgtattagccatggtgactgtccagtattgtaggatgagttacctgaggggctttggaagggaacagaaaaatcctcatgccatttcctaccatcatatgtgctttcctgtccttagtactttgtcttttatgttgtaagggaagaaagactctaagaggtgcaagataaagagatttcctttgagtcttggaatgaagaaacagtgcagaggaaccaatcctaataacagatctgctgtacagaaggctgcagtcaaaggaactgtgtcctgatagcagtcctgtcacttccccccaaacagatgtctyttctccagaaatgctactatctatctttgtgggcatatattaaagtagagaaaaaatactat

SEQ ID NO: 709104 - DNA, 515 bp, Homo sapiens
ctccttttaggggatttgcttgaaggcctccactgggatcttgccctcagtctagatgaagtgaagaaaaggagttgggatgttagtagagccaggtgccctgggttccatccccacactaccccgcctccatcttcttggccctcctgaaggcccagagacagctgtcttttacccccttgatwtccagacctcacctggagcatagtgaagacctgaccagctctaatgtagttccacttattgtcctgaaggcacctggggtgggagaataggtgctctccattactaccccaggacagacatgctgactatgcaatgccacacttagtctatgctacctgtttgctgggacacatgtaccaatatgagcactattgtaaggatgaaaaaaggcctagggaaaatgaaaacacctatccctgacattcattcccactagaattcaaatcagaaacatagggttattcaaatgaagaagggagcttaatccatatgggtaaaaaagatgttca

SEQ ID NO: 709105 - DNA, 515 bp, Homo sapiens
ctccttttaggggatttgcttgaaggcctccactgggatcttgccctcagtctagatgaagtgaagaaaaggagttgggatgttagtagagccaggtgccctgggttccatccccacactaccccgcctccatcttcttggccctcctgaaggcccagagacagctgtcttttacccccttgatayccagacctcacctggagcatagtgaagacctgaccagctctaatgtagttccacttattgtcctgaaggcacctggggtgggagaataggtgctctccattactaccccaggacagacatgctgactatgcaatgccacacttagtctatgctacctgtttgctgggacacatgtaccaatatgagcactattgtaaggatgaaaaaaggcctagggaaaatgaaaacacctatccctgacattcattcccactagaattcaaatcagaaacatagggttattcaaatgaagaagggagcttaatccatatgggtaaaaaagatgttca

SEQ ID NO: 709106 - DNA, 515 bp, Homo sapiens
ctccttttaggggatttgcttgaaggcctccactgggatcttgccctcagtctagatgaagtgaagaaaaggagttgggatgttagtagagccaggtgccctgggttccatccccacactaccccgcctccatcttcttggccctcctgaaggcccagagacagctgtcttttacccccttgatatccagacctcacctggagcatagtgaagacctgaccagctctaatgtagttccacttattgtcctgaaggcacctggggtgggagaataggtgctctccattactaccccaggacagacaygctgactatgcaatgccacacttagtctatgctacctgtttgctgggacacatgtaccaatatgagcactattgtaaggatgaaaaaaggcctagggaaaatgaaaacacctatccctgacattcattcccactagaattcaaatcagaaacatagggttattcaaatgaagaagggagcttaatccatatgggtaaaaaagatgttca

SEQ ID NO: 709107 - DNA, 1221 bp, Homo sapiens
cttgaaggcacagccagcaggacttactggaagataaatgtagggtatgaggacaagagaggtaccaaagatgcccgcttttatatggttctggctttgcccctgacagtgtgaatttgcatcagatccatagacctgaaagagacactgggcccacctactcaaatccatttatkttactaatcattcatgctttctatagtcactcagtgaagcacttactgaacagatagcttaggatcagaaaggtagagggactcgcctacagctagtaaagatgaaacacagacttctgtccaagcgaagttctcttgaaattgcatcatccaagtcaaagaccttagaaccttcttgacctttgcaacaaaaggcactgagctaactcatgacctctaagatcccttccagtccttctttcctacatgtgtgcatgtaagtaaagctacaaaatgctctgtttcccgctgcttctgtacaagactggaaagaaaatttatctttcgacacatccctttccactttgacactaatttattttttaattgatctcccagtaaggcacacacctaattggcttgaatggtgacacagttaattaggccaaaaaagaaaaaaagaaaaaaaaaaaggcccaggatggtgagcccaagtagtactacttaataagagcggtggccaatttctcagtgaagaggaatttgtaaaagggaagatcaaagagataattcagcttggtcagaattttaatttaggtcactttcatggataaataggctgcagataccaccttttccatctaaacagattaatcctctaaacggctacagaaaactcatccacgcatcaaaagtttacaaatgcctatgataagctgggtactatgctaggctatgggggtaaaggccctgtcaataaggaggctctgacaatttaagaagggaaacaatgatggtagtaagtggaaaagaagtcagaagaaaacattttatttacttagcatgggttctgtcagccagcatgcttcttaaggtcgcaagtgacagagactttactgagacttaagcagtttttaaaaagagaaattttgcttcaggcatggctggaactagagactccaacacaatgtaatctaaaatctgtcttctcttttcaagctctcagatctgtttgccctctcagacaaactgactgtctaggaaagaggtaacacggcaggcttga

SEQ ID NO: 709108 - DNA, 587 bp, Homo sapiens
agagaaattgagcatagcagctgctggcccaggtgctaagcccctcattgcccagggcagcagcgctggccggctgctacgagtgtggggcccaccgagcccacgcccacccagaactccagctggcccgcaagcgccacgcgcagccccggttaccgctagcgcttctccctctacacctccccgcaagctgagggagccagctctggcctcrgccagcccaggaaggggctcccacagtgcagtggcgggctgaagggctcctcaagtgccgccaaagtgggagcccaggcagaggaggtgccgagagcgagcgagggctgtgagagctgccagcaagctgtcacctctcactagtttattccctctctctggcctgagactttaagagctacatttctggctctaatcattaggagtatccatctacattgactatactttattttgtctttaagacaatacttgattcttttctactttcattacagtgacacactaaacttttactttatattttcctggtctgttttttgtattctctctctaggatgggctgtagttaattccagtcacacgagtatttg

SEQ ID NO: 709109 - DNA, 587 bp, Homo sapiens
agagaaattgagcatagcagctgctggcccaggtgctaagcccctcattgcccagggcagcagcgctggccggctgctacgagtgtggggcccaccgagcccacgcccacccagaactccagctggcccgcaagcgccacgcgcagccccggttaccgctagcgcttctccctctacacctccccgcaagctgagggagccagctctggcctcggccagcccaggaaggggctcccacagtgcagtggcgggctgaagggctcctcaagtgccgccaaagtgggagcccaggcagaggaggtgccgagagcgagcgagggctgtgagagctgccagcamgctgtcacctctcactagtttattccctctctctggcctgagactttaagagctacatttctggctctaatcattaggagtatccatctacattgactatactttattttgtctttaagacaatacttgattcttttctactttcattacagtgacacactaaacttttactttatattttcctggtctgttttttgtattctctctctaggatgggctgtagttaattccagtcacacgagtatttg

SEQ ID NO: 709110 - DNA, 1555 bp, Homo sapiens
tattttaacaaaatattacattatattatgccctcaccaataaaattgccmacatgatgactttcaccatagctgcaaaatttaggatttttagaatgacaaattaaaaatcaacaataacattgactaaacggcatcatttttgagttaagattaaatttaaaaataaaatattgtgtattacttgatgtggaaatattttctataatatcactgaggcattcaagcaccaatttgtacacagtggccctcagtaatatgttactgagactctcctattatggtaacaaagagtagaaaatgatcataccatgctcactgtagttatttgagacacagggagcgttaaagtaagacaatgttaaatgatcaaatagcacaaattaattaatcaaggtttatcttgaagctgaacaggtaaaatttaaattctgctacaatatatgcctgatttgtagaaagtctaaaaaattattgtaacattgtttgaaacattactaaataactataatagacaaatgttgctgattcgaagtgaatatctctagtgtttcaccaataatctgagtttttcctggcgtgtatgtttatgtgtgtatgtcgcaaacatacatgctttcatttgaagtagccatagctatcaaaattttgatgtcagagtcacaaaatcttcatagaaaaatttggattgcttttcatgttatgcaataatatgcatttatatacatatctgtatatacacatatataacaaaatagaatggcactaggtaccaaaaattcaaataatacattgcagcattaaattaaaattacagataaaattcctcattcatgcttactacagaacagtgaacaagatattctgaagataagaaaggaaaacccccagagaaaaacatacaaatgttgcataaagtattaaaagtcaacttttaagtacattcatgattccttaagaaaggaaatgaaatggccaagggccataaaaattaaacaaagagttgaaataataatggtaagtgaaacttgggctgttcataccgtgaagctggagcttcatgaataaatagccagcgttttcagaactgaggaattagattttagacacagacaagatgaggcaaagcagaaatgtaaactccagcatataagagccaaagcaagaaagtgatcccatttactacagccacaaaaagaataagatacctacggctacagcaaaccaaaaagttgaacaatcactacaaggagaaaacactgctgaacaaagtcaaagatgacacaaatgatggaaaaacattccattgtcatggattggaagaatcaacatcattgaaatggccgtacttcccaaagcaatgaacagattcaacactattcctatcaaactaccaatatcatttttcacagaattaaaaaaaattctaaaattcatatagaaccaaaaaagagcccaaataaacatagcaatcctaagccaaaagaacaaagccagaagcatcacattactcaacttgaaaatatgctacaaggcagacagacacatagaccaa

SEQ ID NO: 709111 - DNA, 1555 bp, Homo sapiens
tattttaacaaaatattacattatattatgccctcaccaataaaattgccaacatgatgactttcaccatagctgcaaaatttaggatttttagaatgacaaattaaaaatcaacaataacattgactaaacggcatcatttttgagttaagattaaatttaaaaataaaatattgtgtattacttgatgtggaaatattttctataatatcactgaggcattcaagcaccaatttgtacacagtggccctcagtaatatgttactgagactctcctattatggtaacaaagagtagaaaatgatcataccatgctcactgtagttatttgagacacagggagcgttaaagtaagacaatgttaaatgatcaaatagcacaaattaattaatcaaggtttatcttgaagctgaacaggtaaaatttaaattctgctacaatatatgcctgatttgtagaaagtctaaaaaattattgtaacattgtttgaaacattactaaataactataatagacaaatgttgctgattcgaagtgaatatctctagtgtttcaccaataatctgagtttttcctggcgtgtatgtttatgtgtgtatgtcgcaaacatacatgctttcatttgaagtagccatagctatcaaaattttgatgtcagagtcacaaaatcttcatagaaaaatttggattgcttttcatgttatgcaataatatgcatttatatacatatctgtatatacacatatataacaaaatagaatggcactaggtaccaaaaattcaaataatacattgcagcattaaattaaaattacagataaaattcctcattcatgcttactacagaacagtgaacaagatattctgaagataagaaaggaaaacccccagagaaaaacatacaaatgttgcataaagtattaaaagtcaacttttaagtacattcatgattccttaagaaaggaaatgaaatggccaagggccataaaaattaaacaaagagttgaaataataatggtaagtgaaacttgggctgttcataccgtgaagctggagcttcatgaataaatagccagcgttttcagaactgaggaattagattttagacacagacaagatgaggcaaagcagaaatgtaaactccagcatataagagccaaagcaagaaagtgatcccatttactacagccacaaaaagaataagatacctasggctacagcaaaccaaaaagttgaacaatcactacaaggagaaaacactgctgaacaaagtcaaagatgacacaaatgatggaaaaacattccattgtcatggattggaagaatcaacatcattgaaatggccgtacttcccaaagcaatgaacagattcaacactattcctatcaaactaccaatatcatttttcacagaattaaaaaaaattctaaaattcatatagaaccaaaaaagagcccaaataaacatagcaatcctaagccaaaagaacaaagccagaagcatcacattactcaacttgaaaatatgctacaaggcagacagacacatagaccaa

SEQ ID NO: 709112 - DNA, 1555 bp, Homo sapiens
tattttaacaaaatattacattatattatgccctcaccaataaaattgccaacatgatgactttcaccatagctgcaaaatttaggatttttagaatgacaaattaaaaatcaacaataacattgactaaacggcatcatttttgagttaagattaaatttaaaaataaaatattgtgtattacttgatgtggaaatattttctataatatcactgaggcattcaagcaccaatttgtacacagtggccctcagtaatatgttactgagactctcctattatggtaacaaagagtagaaaatgatcataccatgctcactgtagttatttgagacacagggagcgttaaagtaagacaatgttaaatgatcaaatagcacaaattaattaatcaaggtttatcttgaagctgaacaggtaaaatttaaattctgctacaatatatgcctgatttgtagaaagtctaaaaaattattgtaacattgtttgaaacattactaaataactataatagacaaatgttgctgattcgaagtgaatatctctagtgtttcaccaataatctgagtttttcctggcgtgtatgtttatgtgtgtatgtcgcaaacatacatgctttcatttgaagtagccatagctatcaaaattttgatgtcagagtcacaaaatcttcatagaaaaatttggattgcttttcatgttatgcaataatatgcatttatatacatatctgtatatacacatatataacaaaatagaatggcactaggtaccaaaaattcaaataatacattgcagcattaaattaaaattacagataaaattcctcattcatgcttactacagaacagtgaacaagatattctgaagataagaaaggaaaacccccagagaaaaacatacaaatgttgcataaagtattaaaagtcaacttttaagtacattcatgattccttaagaaaggaaatgaaatggccaagggccataaaaattaaacaaagagttgaaataataatggtaagtgaaacttgggctgttcataccgtgaagctggagcttcatgaataaatagccagcgttttcagaactgaggaattagattttagacacagacaagatgaggcaaagcagaaatgtaaactccagcatataagagccaaagcaagaaagtgatcccatttactacagccacaaaaagaataagatacctacggctacagcaaaccaaaaagttgaasaatcactacaaggagaaaacactgctgaacaaagtcaaagatgacacaaatgatggaaaaacattccattgtcatggattggaagaatcaacatcattgaaatggccgtacttcccaaagcaatgaacagattcaacactattcctatcaaactaccaatatcatttttcacagaattaaaaaaaattctaaaattcatatagaaccaaaaaagagcccaaataaacatagcaatcctaagccaaaagaacaaagccagaagcatcacattactcaacttgaaaatatgctacaaggcagacagacacatagaccaa

SEQ ID NO: 709113 - DNA, 1161 bp, Homo sapiens
tgcctgccttggcctcccaaagtgctgggattacaggcgtgagccaccacacttgtttttctttttttattttattttattttattttattttattttattttattttattattatactttaagttttaaggtacatgtgcacattgtgcaggctagttacatatgtatacatgtgcatgtttttcttaatctaggagctagcttcctcactaataagatctgagttattatggaaagatattctgggctttataaaattcaagttgacagtagatttgaaaactggtaaaagacagcctcccaatttccaatttggatatgaatttacactcagtctcgaatcagatttgcactgcagttagctatgtcctcaaaacagttatcaatacaaaacatgatgaccaaaatcaatctttccttcagggggtgattttacataatacttcaggaaatgggaaatttatgcaatttagatttgtcgtatgtcagtgtgcactctgtttcattcatgtataatctcactctcactatgtaaatttttgactacccaagtgtcctagttaaaactgtgytggggaagaaaaactttttctgtcctgcaaattcaacagacaaacaacatattaacaagagaaaaaaggtttatttgtatgcacattggagctacagaagaagtaactaactcaataaatggctacagttgaagacttacatacttaatttagaaaaaagggaggggagagaaaagcttctttgactaaaaggaacatatttgtttctgaaagacaaatgggattttaagaaattttgtgataatgttggtttgtacaggttccagtgagtggtctttcagttttctttatggccatgaaactatcccagagaaggtatttatggtaggtttactactggtatgtttcctgagagtagacccaccctgaagggggaatttatggcagcctcgtttccccgaagtttctggttttagttagataaagacaatttagagaaggttcccttttgcttgcactgattctcaaatgtcttcagcttaaaacagtcttaccagctctgggattctgggtggttcttcttcacactagttattgagagtgtgagttctacacctaacaaacatagtatggctagatttgtttttc

SEQ ID NO: 709114 - DNA, 665 bp, Homo sapiens
tttcagccactcctggcatactctcccagataaataaaaggtacttcacctgcaatggcccctaagtggaatccatcctctaccctcagacctcctcttccgcctctactgtccatccaagtaatggcttcgtcacgcacctacatcccttctccctcaaacaccctcccttgtgaagctcttccctctcccctccattctatctcgatctctatctctaactctatctctgtctctgtctctgtgtcatagtctaagcttctagtatgtcctgcctagaccatttcattgtgtcctgcctggaccatcatgtcctgcttggaccttcattgaatgtcaatacatgttccatccagcctttctgtgcrtgccgacatggctttccaaaaatctttatgttactcctttgcttaaaacccttcagtgccttccctgctgcccccaccacccccaataatctgcttggcatggactgaaggctctttattatctggccccgccccatccctgtttagctgatactgtaggcatttcagatgattctgttgcctaagtgagtcgtgttcttctagcattctgaggctttgctatttcctcttcctggaatgcctttcccctggccctagtggtgagctcctgcttatccctagcgagccttgtcaagc

SEQ ID NO: 709115 - DNA, 607 bp, Homo sapiens
caacagatgtttcagccctgtctagggctccatcattctaggtgcagaacatctaggccctctccagccagggttttttcctggactgagagctgattattttattttattttattattttatttttttgaggcagagtctcactctgttgcccagtctggagtgcaatggtgcgatctcggctcactgcagcctctgcctccctggttcaagtgatactcctgcctcagcctcctgagtagctgggattacaggcacctgccaccacgcctggctaatttttttgtatttttagtagagacggggtttcaccatgttggtcaggctggtctcgaactcctgacttcaggtgatctgcccatcttggtctcccaaagtgctgggattacaggcatgasccactgtgcctggactgcttatttctaaacctaaatttaagctttcattctctccctccatttcactctctgccctgagtgtgggtcatggtcgtcttaagattaaaaaccaatgatcgagtggatgagtcaaaaatgctggactgatgtcttgatttgacttcccactctgccaccagtggtaagtcaggtttctcatctgagcctct

SEQ ID NO: 709116 - DNA, 950 bp, Homo sapiens
tcactcacctcccactccgtccctccaaacctgttcccatgattcactcacctcccactcagtccctccaaacccattcctgtgattcactcacctcccactcagtccctccaaacctgttcccgtgattcactcacctcccactgggtccctccaaacccgttcccatgattcactcacctcccaccgggccactcccacaacacgtggggattatgggagctacaacccaagatgagatttgggtggggacacagccacaccatatcatacctctttgagttctgagattctgtgcattgacctcagaccgaagcttctccctgcatgacaggtacctgcaaccacagctgcccggagacctgggttcttcccatgcagcctcacatgtgagattctccagctcccagccctttgtttaaccgtgggatattggctcagggctgaacatcatggggaatggccagcacgtggatgatggagcaagccctctgttttctgctgctctggatgcactcctcagacactcagtggctccttccagccacgcaaagccatgcgtcctgcagaacccatcaagggacgaggttctaaggatgctgacggggctgccgtggcctgtggacaggacttaccaaggacagatgtgagtcatggagataaagagttgcgtccttcagtagaaatcagaacttctacccagtggcatttatcagaaatcaaagacatctaggttgactcggcacagcgtaatgtgctggagtcagagaggggaaaacataagaagctgtcagggcctacagggctgggcagaaagcaaagagacagtctcaattaaattcttcaaattaggtcactacctggttctcacattaacaagaacaaaggtgggcgcctcaaaccatcaaagttacgtcatccttgggatggcayggattcggagggaatgc

SEQ ID NO: 709117 - DNA, 950 bp, Homo sapiens
tcactcacctcccactccgtccctccaaacctgttcccatgattcactcacctcccactcagtccctccaaacccattcctgtgattcactcacctcccactcagtccctccaaacctgttcccgtgattcactcacctcccactgggtccctccaaacccgttcccatgattcactcacctcccaccgggccactcccacaacacgtggggattatgggagctacaacccaagatgagatttgggtggggacacagccacaccatatcatacctctttgagttctgagattctgtgcattgacctcagaccgaagcttctccctgcatgacaggtacctgcaaccacagctgcccggagacctgggttcttcccatgcagcctcacatgtgagattctccagctcccagccctttgtttaaccgtgggatattggctcagggctgaacatcatggggaatggccagcacgtggatgatggagcaagccctctgttttctgctgctctggatgcactcctcagacactcagtggctccttccagccacgcaaagccatgcgtcctgcagaacccatcaagggacgaggttctaaggatgctgacggggctgccgtggcctgtggacaggacttaccaaggacagatgtgagtcatggagataaagagttgcgtccttcagtagaaatcagaacttctacccagtggcatttatcagaaatcaaagacatctaggttgactcggcacagcgtaatgtgctggagtcagagaggggaaaacataagaagctgtcagggcctacagggctgggcagaaagcaaagagacagtctcaattaaattcttcaaattaggtcactacctggttctcacattaacaagaacaaaggtgggcgcctcaaaccatcaaagttacgtcatccttgggatggcacggatkcggagggaatgc

SEQ ID NO: 709118 - DNA, 621 bp, Homo sapiens
gtggagggtattatcaaagcctctcttctttgccaagaggtaaaggggatttgtcctgtagcctttcttcaggcagaacttacgacaccctcagatctctcgatcatcacctttgacggtgtccctgagtccactgtacttagtctcaggaggtgtcacatccccacctctcccctagatgggactcaccgcgcagatctccagagaaatcttctacaaaaaccctcatgggtcatctgctccagcccctctcactgctctcagggttgggagatagaaccatgtggtaggtggaattgacagcacagctctctccaaagaaatggaacgcgccttacagttacaccctccactgaggaatgacaaaacgctctaaacatcttgttttgtttctcagccagctgtgctttactgacaatgcaccactcaggccttgaccgtgtacttcctcagcagggacaggcrctccttcctccttcctcagcggggacagccactccttccactgctgcttcttgcccttcaggttctcctcgtgcttgttgagacagtggctcatggcgcatgtcttcttaggctgcaggtccacgggctggtacttcttgcccttgtagaatttcc

SEQ ID NO: 709119 - DNA, 1041 bp, Homo sapiens
ttgctcatcagcctccattcagaaggaagcgggaaagtcacccaaaccacctacaaggaatgagggctcttagcggccaggtaaagaggacaagaaccaaactgtccacattatggaggggagggggaaagagagctcaacccccctcagcctctggtgctgccagggggagcccctccgcatgtgtccccacgggccctaktttctacctgacagcatttcagcaccagaggagggttgagccagctcctctcaccagccacagaaccagcagccaacaaacacattgtccccgagtttggctgcaacactctatgtgacttgggaacttgaagcttccagagaaaagccaggtcctgttggaccagttgttgggttttcctaaccacttgctgtgcctcaccgcatttcaaatatctggcacctgccactgcccacccacttttagatggccctagggtgatctaaccatggtgcttctcaaaatttaaagtgcctacgaattgcctggggaccgtgttgaaatgcagcttccaacttggtcctgaatttctaacaagctactgggtgctgttgctaggtccacatgttaaggagcaaaggcaaagaacttagcagtgagcacaactctaattgggctcttcttctgaggatattcggccattttttcttcgctgctaacgaataggtcactttggctttgggacagatgcaattcagaacggtcattatgacgtcattcatatttggctacccaggtgacttattattttagcatccttatctctagaattaaaaaaatgtaatgtgagaggaattcagatgaaatgcaaacaggaatttcctataataattactatttcctaatagtaattattttaaacatcagcagagattgcagaagttgtaaaagctttgtcaggaaatcttcagtcataaaattgactctggtcagatgtggccctggttgaggcaggggactgtgctcccagctaacctaaaacacaacagcccacactcgggacagattagcatggccaa

SEQ ID NO: 709120 - DNA, 2788 bp, Homo sapiens
aggggaagggacgtgcaagacctcctaagccaccaccgcacccttgaacaaaccgagttcacttcaggcatgtcatgtgcaccccacacaaggcatgggtcaggtggcatgactgttcccattttacagatgaggaaactgaggctgcgatgggggaggggcttggccaggtcactcaagggtggagtgggggtgagtgaggctcctgactcccaaatccagtgggagttgggcagtgggacaggcacttgggtgaacgcggtgcctcaggcctccccatcctccgtcccccaatctctgcaggccttggtggatctcctgctggtcagtggggcggcggcagccactaccgtggcctggtaccaggtgagcccgctggccgcccgcctgctctacccctacctggcctggctggccttcacgaccacactcaactactgcgtatggcgggacaaccatggctggcgtgggggacggcggctgccagagtgagtgcccggcccaccagggactgcagctgcaccagcaggtgccatcacgcttgtgatgtggtggccgtcacgctttcatgaccactgggcctgctagtctgtcagggccttggcccaggggtcagcagagcttcagaggtggccccacctgagcccccacccgggagcagtgtcctgtgctttctgcatgcttagagcatgttcttggaacatggaattttataagctgaataaagtttttgacttcctttaccatggcctttttgcttgggtgggacccctggccacagggaagagggggagctggggctgcactggagctcgtctctgcaggatctgcctgggctgccttctccagacagggctggatccagctggggctgccccacgcttcctgggacgctcccgaagccctgcaggagatgaacagagcagccctgggtgccaccctggggcccacactggcgcagacccagctggggccgtgggcttcagcagagggagggggtcctgtccgcttcccatggcttccgggatgctcagcccgggccctttaatggccgggcccacaaccactgttcgacgcctggtcctgcccagtgcgtggccctcagctgcttttacccaggacagagttgggggtgctgactgccctgtcccccgggggcccaggcttatggcagcctcactgcaccagggatagccccgcaaacacccagttggctcgagggggagtcagaggcaggaaaggttaggtcccgactccagcagacagggcctccttgctggcccagagcggccaggattggaggtgtcacagccactcactccctcaccccggcttcgaactgggtgacccatggcctctccaggcagctgtttggagtaaatgagccgagtcccatacgcagcactcctccgtcttgctctcggtcaccacacccatgcagcactcagcaacacagcccgcggctccctcccctcggccaggcctgacctgccgggctttttgttttttgtttttggcagctaagttcattcaaattggcaaaatgttcatagacagctcgtcatcactcaacagcccgcggctgctgcttcctcttttctccccckgctcctgtgtcctctcccgacctgtacgctcagacacaacctgacgttcacaaaagcttggacacagtggctcacacctgtaatcccagcactttgggaggctgaggcgggaggattgcttgaggccaggtgtttgagaccagcctgggcaacatagggagactcttgtctataccatccactctggtgcacgcacaacacacacacacacacacacacacacacacacacacacgaaagaacgaacagctcagggaaatgggtagacagtcgactgcattcttctgacagaagggatggctcccgcccaggggctgcgctactccaccctgaccctcagcctcccgctcccttgactctggcagagtttgatgcccaacagatcacgctctgcaggatccaaaaactctgcggccacgggcactcagctgagccctcagccctcatggctttcccgatgctcaccggtgcagaggagccagctggggagcctctgtgtatcctttttattaacttatttctgaagttctccaagacgcccagagttgaattcctccagagctctgtgcagacagtccaagcagcggatggcagagaggtccttgctagcaagaaacttacaggccaggctgtctcctgctccagcatgccggtgagcatgcaccgtccccgcagggcacaggggtatcctttgaagtgtcaagggacacctgagtccgtgccagacacttagggattggagaaagtgcaacccagacttctgccatctccgcaactcgtggggttgttcatctgtaacaaatgtcccacatagctcctgctggccacaaaacacgcactgccacaaaacgccttggaaaaatgggcgagaggagaacgcatttagcatttcgtctgccggcttccttttaacagcctggcgacgtttccccaggaaatgctcgtaacagacagcattctctccttttctaagctgctgtcatccactgggaacttaaggttttgatgctttctgagtgggtttatttattatttttttttgagacagtcttgctctatcgcccaggctggagtgcagtgacgccatcttggctcactgcaacctctgcctcccaggttcaagtgattctcctgcctcagcttccagagtagctgggattacaggtgtgtaccaccatgcc

SEQ ID NO: 709121 - DNA, 623 bp, Homo sapiens
tgacgactattcagaaaaaacaaacaaacaaacaaacaacatccagaaggctggacacggtggctcatgcctgtaatccstgcactttgggaggctgaggtagtcggatcacctgaggttagcagttctagaccagcctggccaacatggtgaaactccgtttctactaaaaatacaaaaattagcctgatgtggtggtgggtgcctgtaatcccagctactcaggaggttgaggcagcagaattgcttgaacccaggaggcggaggttgcagtgagtggagatcacgccactgcactccagcctgggtgacagggcaaaactctgtctcaaaaaaacaaaaaacaaaaaacaaaaaacaaaaaaaagagagaacccacatctttttatttaatacatgatacatttttaacaagtttgacttcaaaggaaatttctgtgtcatgaattctatttcctcactgaatttcatctggtattaaaataatatattttaaaatagcatttttaccgaaaacaaaatgtgtttcagtagacttgatatttttgcgagaaacaatggttccttttgtttaagctgttttgcagcaactgctttctcccttcactgaatcatagactgct

SEQ ID NO: 709122 - DNA, 1052 bp, Homo sapiens
tcctgcctgctcccagcccccaaaacatagggagtcctgggtccacagccacaacttgggtggctgcagctgtgcctaggagggcagggctcctgcctgctcctggctcctgctggctccatggagcacacagccctggccacaactcccccactgcagctggtatcatggcagtggctgctccatatggctgtcactgacatcaattacacatagtgggcaagctaatctcctgatggatattgcccaaggaacatacgtctttagctattttacaactgtggcctccagaaccctgatataagttataagccagcctaaactcagyacatggtatgtcaacatcagcaactctctataacatccaaatagacactcgtcaacataaacagacattatcttccttccagataaaagatcttaccttctaaaaggtcagaaaagcccatctctaaaagcagaaacctaatagtgccctttaaagagctcctcttaacaaacgccccacatctgtttgctccaatgaaggaataagtggttgaagaaataatcatttagaaagatgtaggcactggccccagattttgaagcagtgtagtaaagagaatgattttacatagaaaacgcaacagaaaataaaacaacatttatatacaggctagcaattgcttttgtttttcttttttcttttcttttcttttttcttttttttttttttttttgggacagattgtcactctgtcacccaggctggagtgcagtggcatgatctcagctcactgcaacccccacctccagggttcaagcaattattctgcctcagcctccagagtagctggtattacaggtgcatgccaccacgcacagctaatttttgtatttttagtagggatagggtttcaccatgttggccagtctggtctctggtctcaaactcctggcctcaaatgatccacccacctcagcttcccaaagcattgggactacaggcattagccactgcacccaggcagaaattgcttttaagtagttataattacaagcacatagcc

SEQ ID NO: 709123 - DNA, 1905 bp, Homo sapiens
tgaatgaatgagcacacccaagagacgaacactcaataatgaaactcccaatgctttcaacgtggagccatactttgactcaaaaatttctttgtatcacccctcaaatcacctgcctacgtggcccctgagtaaagcagtcctagccccgaacatttaattcagctgttggtgctttcaaaaaatgtgttaagttcaacatctcccttctaagtgcagctttctggtgcttgrttagaaaactggcaggaggtgccaggctataaggacagcattcttagagtaatgtcatgtggggtttcctgagggcttgcagaaagctatccagaagtgccactaatgtgaacaaagaagtttgaggtaagattgaagaaagaaaaaaaaaataataaaaacacctctctgtaacacctttccaaggagaatgaatacatgagcatttacagaacacctgctctacaggttcctggcactctgagggttctctcttaatcctcttatccttcaaggttagacctattagtcccattttcatgtgcaaaaaaaaaaaaaaaaaaaaaaggaaccaacacagagaggttaggtaacatgaccgatgtcacacagcgatgtctggcattttgaactcaggtctgtgttgccttcaactccattctttttccactttggactttagaagcaatattcaggggcatgagaatgaatactgtccggaggaggcaggcagaacatgccaacctcaagtagaaaacaccgaccaacacctggacactagtggccagtttcttctctaaaatgtttcaaagaccagcatggaccagtctgctgaagcaatatgctgattaccttccagcaaatattactgaacacctaccatacagcaacatttcctgggctggaggtttccacatatattatctcatttaattttcattattgttaaaaaaaaaactattaacgtgatataatttggatgtttgccttctccaaatagcatgagggtatggcaacactgcatcttattcattctttaggttctaaacccatagtatggtgtgaaaatcatgtgtagctaaaaataccctcaaaaatatttttgaaatgtgatccccagtattgaaggtggggcctgctgggaggtgttttggtgatgggggtggatccctcatgaatggcttggtgtcctccccttggtgatgagtgagttcttgccctattagttcacacaagagttggttgttaataggagcctggcacgtactcctctctctgttgctctctctctcaccatgtgatatgcctgttaccccttcgccttctgccatgagttaaagcttcctgaggcctcaccagaagctgagcagatgctggtgccatgcttgtacagcctgcagaaccttgagccaaataaacctcttttctttataaattacccagtctcaggtattccttaatggcaatgcaaaatggactgaaacaacatgtatgaaggtattagaggctgtttatccaaactgaatgacggaaaccttgcaagcaaatacatactcctaagaattccctctccttcaccccatgccctagagatttgacagttaccttaaaaacagagcagcatgaagatgcagacaacttcttttttgaccttctttttctacttcttttgctgtaggccagagttttgcacactggatagcacagggaattactattcagggtttcatacacaaaaaccatgtataatgcaactttctgaccattaaaatatatttagggtatttttggctacacatgattttcacaccatacaatgggtttagagcctaaaaaatgagtaagacacagtgttgctgtacccttagcttcctctaatttactcccgcttgatagataatcaagaaatgt

SEQ ID NO: 709124 - DNA, 1905 bp, Homo sapiens
tgaatgaatgagcacacccaagagacgaacactcaataatgaaactcccaatgctttcaacgtggagccatactttgactcaaaaatttctttgtatcacccctcaaatcacctgcctacgtggcccctgagtaaagcagtcctagccccgaacatttaattcagctgttggtgctttcaaaaaatgtgttaagttcaacatctcccttctaagtgcagctttctggtgcttgattagaaaactggcaggaggtgccaggctataaggacagcattcttagagtaatgtcatgtggggtttcctgagggcttgcagaaagctatccagaagtgccactaatgtgaacaaagaagtttgaggtaagattgaagaaagaaaaaaaaaataataaaaacacctctctgtaacacctttccaaggagaatgaatacatgagcatttacagaacacctgctctacaggttcctggcactctgagggttctctcttaatcctcttatccttcaaggttagacctattagtcccattttcaygtgcaaaaaaaaaaaaaaaaaaaaaaggaaccaacacagagaggttaggtaacatgaccgatgtcacacagcgatgtctggcattttgaactcaggtctgtgttgccttcaactccattctttttccactttggactttagaagcaatattcaggggcatgagaatgaatactgtccggaggaggcaggcagaacatgccaacctcaagtagaaaacaccgaccaacacctggacactagtggccagtttcttctctaaaatgtttcaaagaccagcatggaccagtctgctgaagcaatatgctgattaccttccagcaaatattactgaacacctaccatacagcaacatttcctgggctggaggtttccacatatattatctcatttaattttcattattgttaaaaaaaaaactattaacgtgatataatttggatgtttgccttctccaaatagcatgagggtatggcaacactgcatcttattcattctttaggttctaaacccatagtatggtgtgaaaatcatgtgtagctaaaaataccctcaaaaatatttttgaaatgtgatccccagtattgaaggtggggcctgctgggaggtgttttggtgatgggggtggatccctcatgaatggcttggtgtcctccccttggtgatgagtgagttcttgccctattagttcacacaagagttggttgttaataggagcctggcacgtactcctctctctgttgctctctctctcaccatgtgatatgcctgttaccccttcgccttctgccatgagttaaagcttcctgaggcctcaccagaagctgagcagatgctggtgccatgcttgtacagcctgcagaaccttgagccaaataaacctcttttctttataaattacccagtctcaggtattccttaatggcaatgcaaaatggactgaaacaacatgtatgaaggtattagaggctgtttatccaaactgaatgacggaaaccttgcaagcaaatacatactcctaagaattccctctccttcaccccatgccctagagatttgacagttaccttaaaaacagagcagcatgaagatgcagacaacttcttttttgaccttctttttctacttcttttgctgtaggccagagttttgcacactggatagcacagggaattactattcagggtttcatacacaaaaaccatgtataatgcaactttctgaccattaaaatatatttagggtatttttggctacacatgattttcacaccatacaatgggtttagagcctaaaaaatgagtaagacacagtgttgctgtacccttagcttcctctaatttactcccgcttgatagataatcaagaaatgt

SEQ ID NO: 709125 - DNA, 1905 bp, Homo sapiens
tgaatgaatgagcacacccaagagacgaacactcaataatgaaactcccaatgctttcaacgtggagccatactttgactcaaaaatttctttgtatcacccctcaaatcacctgcctacgtggcccctgagtaaagcagtcctagccccgaacatttaattcagctgttggtgctttcaaaaaatgtgttaagttcaacatctcccttctaagtgcagctttctggtgcttgattagaaaactggcaggaggtgccaggctataaggacagcattcttagagtaatgtcatgtggggtttcctgagggcttgcagaaagctatccagaagtgccactaatgtgaacaaagaagtttgaggtaagattgaagaaagaaaaaaaaaataataaaaacacctctctgtaacacctttccaaggagaatgaatacatgagcatttacagaacacctgctctacaggttcctggcactctgagggttctctcttaatcctcttatccttcaaggttagacctattagtcccattttcatgtgcaaaaaaaaaaaaaaaaaaaaaaggaaccaacacagagaggttaggtaacatgamcgatgtcacacagcgatgtctggcattttgaactcaggtctgtgttgccttcaactccattctttttccactttggactttagaagcaatattcaggggcatgagaatgaatactgtccggaggaggcaggcagaacatgccaacctcaagtagaaaacaccgaccaacacctggacactagtggccagtttcttctctaaaatgtttcaaagaccagcatggaccagtctgctgaagcaatatgctgattaccttccagcaaatattactgaacacctaccatacagcaacatttcctgggctggaggtttccacatatattatctcatttaattttcattattgttaaaaaaaaaactattaacgtgatataatttggatgtttgccttctccaaatagcatgagggtatggcaacactgcatcttattcattctttaggttctaaacccatagtatggtgtgaaaatcatgtgtagctaaaaataccctcaaaaatatttttgaaatgtgatccccagtattgaaggtggggcctgctgggaggtgttttggtgatgggggtggatccctcatgaatggcttggtgtcctccccttggtgatgagtgagttcttgccctattagttcacacaagagttggttgttaataggagcctggcacgtactcctctctctgttgctctctctctcaccatgtgatatgcctgttaccccttcgccttctgccatgagttaaagcttcctgaggcctcaccagaagctgagcagatgctggtgccatgcttgtacagcctgcagaaccttgagccaaataaacctcttttctttataaattacccagtctcaggtattccttaatggcaatgcaaaatggactgaaacaacatgtatgaaggtattagaggctgtttatccaaactgaatgacggaaaccttgcaagcaaatacatactcctaagaattccctctccttcaccccatgccctagagatttgacagttaccttaaaaacagagcagcatgaagatgcagacaacttcttttttgaccttctttttctacttcttttgctgtaggccagagttttgcacactggatagcacagggaattactattcagggtttcatacacaaaaaccatgtataatgcaactttctgaccattaaaatatatttagggtatttttggctacacatgattttcacaccatacaatgggtttagagcctaaaaaatgagtaagacacagtgttgctgtacccttagcttcctctaatttactcccgcttgatagataatcaagaaatgt

SEQ ID NO: 709126 - DNA, 1919 bp, Homo sapiens
ataacgggtataatatcacagctctctcagggttgttgaggaaattaaatggtatgtttgtccagtcctttgaatggttctggcacacatcaagaacttaattatatggtagccattactatataactggatacatgaaacccttggaatgtccatttttctatctcatacacttagcatttgccttcataaaacttttattgaaatgaggccatacaaataagctagtaaaatatataagccaggcacagtggcttacacctgcaatcccaacaatttgggaggccaaggcaggaagatctcttgagctcagaagtttgacaccagcctgggaacatggtgagaccttgtttttaccaaaagtcaaaaaaaattagccgggcatggtggcacatgactgtagtcccagctactttggtggctgaggtgggaggatcacttgaggcttgaggctgcagtgagctatgatcacactccactacacatcagtctgggtgacagaggaagacccggtctcaaaaattaaataaataaacttaaaaaataaaaataggccgggcgcagtggctcaagcctgtaatcccagcactttgggaggctgaggcgggcagatcacgaggtcaggagatggagaccatcctggctaacacggtgaaaccccgtctctactaaaaatacaaaaaaaattagcggggtatggtggcgggcgcctgtagtcccagctactcgggaggctgaggcaggagaatggcgtgaacccaggaggcggagcttacagtgagcctagatcgtgccactgcactccagcctgggctacagagcaagactccgtctcaaaaaaataaataaataaaaataaaaaatatagtatgtttttggcacaaatcttactttgagctggaggcatttgtgattcaatagatgcagaaagaaaccttcctagagctggcrttctctaactaaaagtggaaagttctgaggaatgaggactgttataaatcccaccccacaccgcaccttctccagggaagtttcatggccgtgaagaggacagaaagtgagaaccaagatggaactgaataaacaagcttcacactgttagtttccccatatgcttaccttcccacagatgccaaccttggaggcctaagaggcctagaatattatcctttgtctgatcatttctctacaaatttattgttctttgttaagatgctacataagcccaaattctaaccacccctttgagttacccatcatcaagtttctcccatgtgttaatcaactctgtttctctcctcttaatctagtttgtgtcagtctaatttgcagggtcccagccagagagcctaggagggtagaggaaaaaggttttttatccctccgaatatgtgtgaaatgatacagagcaaaataaggcgtggaagatagctatggagtgtggaagaggaggatgctaagttaattaattaattaatttttcttgagagggagttttgctcttgttgcccaggctggagtgcaatggcgtgatctcagctcaccacaacctctgcctcctgggtttaagcgattctccggcctcagcctcccaagtagctgggattacagacatgcgccaccaagcccggctaattgtgtatttttagtagagacagggtttctccatgtgggcaggctggtctcaaactcctgacctcaggtgatctacctgccttggcctcccaaagtgctgggattacagtcttgagccaccgcgcccggcgaggatgctaatttaaaataagaaggtgggcaaggcgtgttcccagtgaacatttctttcctcttacttatggctgagggcatcctgaaggttatattatgtttcctaataaggtttgattgtgggcttggacagcttgaagttggcattaaat

SEQ ID NO: 709127 - DNA, 821 bp, Homo sapiens
tcagggacatgacattcaaaagtggaaaccatcttccaatcatactgatatcaaatgttccaatgaatttctactctttcctatagaacagcttacatatgcatactgcaataatgatattttccctagtagttttaattccccactatgaaacaccagataataagccacggatataccagctaactcatgttatagttcatcttcctgctgggtcacgcatattacccaaaaagcaaacattgctcttacrcagaaagtactgattgtgtttgtcgccatgagaaccttttcacccataccacatgtaccaagggtattacaggactttcaacagcctaaccaataatcaaaaactatccagtgcaatgtgaccaaattatgctctactaactataaataccttgatttcagtatactgtattctttttcttctttttttggacaggatcttgctctgtctcccaggctggagtacaatggcaacaacatggctcactgtagcctcaacctctcaggttcaaatgatcctcacacctcagcctcctgaatagtctggactacaggcacccacgtcacatctggccttttttattttgcagagaccaggtctcactatgttgcccaggcttactgtatttcaaaggtatcactgtcatgtaccgttttacttcaatggttttattgttttgctttatcttgttacttttttacctccacaaaaagaaaatgaagacagcagagacaaagccccagacagaatgaatgagtactaaggtgccttgaacacaaagtccccatgagtaagaaggcttaaggca

SEQ ID NO: 709128 - DNA, 627 bp, Homo sapiens
aattttcatgagtgttctgtgtatacatataaagaatatcctgcaattttgaggtacaggattctatagtttatattttcatctgatytatttgttaattgtgttgtttccatttttatatgcttataaatagttttgctgtcttgatttactgagaaagctgtatgaaaatcttccagtatggggatggatttatctacttctccttgcagttctattaactttggcattataaaatttgggactacaccatgtgcatgcaaagtgttctcctgatggatttgacttttttattgtaaaatagccttcctcacccctagaactttcattttgctttgaatatagctacaccaaggcagctttgattttcatttgcttccaaggctctgtcctctttactttcaatatttttttgttatattttaggtatgttacatacttagtatatgaccattttttaaaaatgaaatctttacacttgctataactagttatatttgaatattatctatgtatacacaactttatgatattttttctgccttatctgagtttctttgctttctccacctcctttcttgctttttatcaaaagcaagttttctctctctctgtcttcctctctct

SEQ ID NO: 709129 - DNA, 719 bp, Homo sapiens
cagttatcactccataaccatcattttcacagtcttagctttagtattaacttacaagtcttcatacaaacctcactaccaatttattttccatagactatttcttaagctcttagctggatgacttttgtctgttagcaatgtcttcaataaagtttatgggacttcttgcatatatatatatctttatactggaataatagtttagcaaggtataaaattattgaatgacttttttttaatgaagtctttacrgaaactgcttcacacacttctgaaatctcctatggaaaagtcctttgacagctttagggggtgtgaattccctcagtattatttctgtatctttcaagaccagtaatttcatttcctcttcttcagggctaaccgttatatatattttggaaatcttccttgtcttttattgctattgtatttttcttatatttaaaaactaaaattatttcatttgctcaagttttttaagcctattttcccctgggtatggctgttccagccttatgatgcttcaaatatagccttctctgtgatggctttcttgatctttgtcatttcctcccaaggtctgccaaattatttttatacttttcttctgttttattattgcctccatgagctcttgtgtctctgcttttaaggcttttatttcctgacttattataacttaaaaaaaaaaccatcatctttaaatccatgtg

SEQ ID NO: 709130 - DNA, 1063 bp, Homo sapiens
gcttcacagaaaccctatgagggaggtactattatttgatccattttacagaggaggaaacaggaacgtaggtaaggatgtgatgatgstaggattcaaacccaggaagtgtggctccagcttgcaccctcaaacactgatagtgttttgaggtgaatgataactagcttttttttttttaaacacttactatgaagtgagggctttaaaggtgctacctcatttaatctcccaaccagtcagtgagacaaatagcattttattttaaatgaagaaataggtttagatagcttgtccaaagtcatacagtgacaaacaactgtgaccccatgccagccctcttaaccatctcaccagtctgccttcaggaatgtattgcaggaagaaaaattttactttggttttcaggagcattttgtggtttagtttaactgttatttgaaactgtatagggttgagatttagctgttggcttcattatttttattcatcctcttttctatactttattttttagtcagtaatgctacaaaagtgttttcatggttaaagctattgctgagagagccatagcttgtccttcagaccattacagaaaatcttttactctttagagaaagtttttaaaaatatattgcaaattttctttagtggccaagttcaataggttaaataaattgttttggactaagggagactgactattcatctttattttcaggcagagtaatacagtactacagttttttaaaaaaaaaaacctcagagacatcattttcttatatttttgtttatagttatttagggaaggtatagattttcttgcccactttgtattttcaatgcctaacatagttccaggattttattttattttattattttttttttgagactgtcacccagactggagtgcagtggggtgatcttggctcactgcaacttctgccacccagcttcaagcgatcctcccacctcagcctcccaagtagctgggaccccaggtacatgccacaacacccaaataatttttgtatttttttgtagagacagggtttcacca

SEQ ID NO: 709131 - DNA, 1063 bp, Homo sapiens
gcttcacagaaaccctatgagggaggtactattatttgatccattttacagaggaggaaacaggaacgtaggtaaggatgtgatgatgctaggattcaaacccaggaagtgtggctccagcttgcaccctcaaacactgatagtgttttgaggtgaatgataactagcttttttttttttaaacacttactatgaagtgagggctttaaaggtgctacctcatttaatctcccaaccagtcagtgagacaaatagcattttattttaaatgaagaaataggtttagatagcttgtccaaagtcatacagtgacaaacaactgtgaccccatgccagccctcttaaccatctcaccagtctgccttcaggaatgtattgcaggaagaaaaattttactttggttttcaggagcattttgtggtttagtttaactgttatttgaaactgtatagggttgagatttagctgttggcttcattatttttattcatcctcttttctatactttattttttagtcagtaatgctacaaaagtgttttcatggttaaagctattgctgagagagccatagcttgtccttcagaccattacagaaaatcttttactctttagagaaagtttttaaaaatatattgcaaattttctttagtggccaagttcaataggttaaataaattgttttggactaagggagactgactattcatctttattttcaggcagagtaatacagtactacagtttttwaaaaaaaaaaacctcagagacatcattttcttatatttttgtttatagttatttagggaaggtatagattttcttgcccactttgtattttcaatgcctaacatagttccaggattttattttattttattattttttttttgagactgtcacccagactggagtgcagtggggtgatcttggctcactgcaacttctgccacccagcttcaagcgatcctcccacctcagcctcccaagtagctgggaccccaggtacatgccacaacacccaaataatttttgtatttttttgtagagacagggtttcacca

SEQ ID NO: 709132 - DNA, 3186 bp, Homo sapiens
gggaggagaacaacacacactggggcctgtgggtgacaggggagggagagcatcaggaaacacagctaatggatgctgggcttaatacctaggtgatgggttgataggtgcagcaaaccaccatggcacacatttacctatgtcacaaaacacatcctgcacatgtaccctggaacttaaaatttttaaaaattttgaaaaaggtaaggaatatttatctgcatctgcatctggaaaaaaagtcatatcttgacatgtattttaatatttcatttgtaatttcctggtaattttacttattgaaacatggggaaaatattcaaaagctagtttttaaaagacttgaaaataaaggtsacaccattatccctctttaaatagagcatgaatatttgaatgaatttaccaatttagtgttaactctcagtccctttgtaacattagtgtggatacttaatatgtacataaatttggaaaaggtcgccacgttggccgcatcataattctaataaagtcagatgctcaaataccacttttaataactttcctattaagccccagcactttaaagatgatagttaattttgattcttcagttacttattcctctgtgatgaatttgacatttttaatttttttttaatgccttgcatgccttggggagaaaagaaaaactatgagttgagttttctgcttttatgtgctaatatttgtgctgactgcatgacaattaaattcactggtcagagttctgatgatttgggatacattttttaagatgccattttttacagctattattgtaaaatttgaggaaaatgacatctataatttttatcatagagccatttatattctaatattaaaagagattttaaaattatgtaactgaagttttttgttttgtttttgttttttttgagatggagtctcgctctgttgcccaggctggagtggcgtgatctcggctgaccacaacctccgcttcctgggttcaggcgattcttctgccttagcctccccagtagctgcgattacaggtgtacgccaccacgcctgggtaactttttctacttttagtagaggtggggtttcaccatgttgggcaggctggtgtcaaactcctgaccttgtgatctgcctgcctcagcctcccaaagtgctgggattacaggtgtgagccactgcacccggccgaatataagttttaacatcaagaaatacccatagcttcttagtttatatggcttaatgagcttttttgagatttacaaaataatcagattgttttccagaattattcctggactcacaatttgtaagattcttttaaaatatctcaagagagctgggtgtgatggtgcacatctacagtcccagctgctcaggaggctaaggtgagagtatcacttgagcccaggagtttgaggttgtagtgagctatgatcctgccactgtactccagcctgggcaacagagcaagaccccatctctggaaagaaaaatttgtgtgtgtgtgtatctcataagcctctggctgctctccaaactcttatttagtcttatccagtagaaacacattaaccatcaaataaatccttgatttttactgaaaaataaagaagcttatatttagcaaatgtactatcacaatagtacttctcaaaaagttcctgtttaatgcattatgtcatcaactgattaatgaaaagggactcacaacaaacgtgagtcgtatctgaagctacaaaatagagctattctatcatcctccttctgatgaaaattatctagactatgtattgtattatatacatattttgtatatgtcattatattaaaatatataccgttttagactgtaaagaccctcagagatattctgcaccagtggttctcagatgggattcactttcaaaagctgtaaaacttgtttagactatgcatcctgcaacaggtaaactggaatctctgtgatagggccccaggtatcaaaggtttataaattccctaagtgattccaatatacagtctaagtgttaagaactattggcttaggccagtggtcttcaaactcaaaggtacataagaatcacctgcagagttttttaaaacatggattcctggccctcacccctagagaatctaattaagtagatctgggattggtctgaaaattttcaagatctcaagtgctatggactgaattttgttccccaaaattcatatgtaagccccaacccccaatgtgaccatatttggaaatagagcttttaggattaaagaaaggcaaaatgaggtcataagggtggtgccttataagagggagaaagagaaatcactctatctccatgtgcaggccacgtgagaacataggctactgtctgcaagcaaggaagagaaccctcatcagaaacagaattggttagcaccttgatcttgaacttcctagcctccagcaccgtgagaaataaatttctattgttttagccatccagtctatggtattttgtcatggcatcccaggctgactaatgaatcagtgatgctaatagcagtggtccatggaccatatttttgagcacctctagcctaggccacatcccccagaaatttcgctttaatttgtctggaggtagtacagggcatcatttattttcccaaagtttcctgggtggtcctaaagtataaccatacttgagaacaaatgaagtagaatggtttcttctatttatagctaaggacactaagactcaaaagaagttaagtgattttcccaagttatcatggtttatgctactgctgatttttccaaatgtacaggggaagtaaaaacagaatttcttctagggtcaatttagtcctagaacctagaactttcagtttccagaattaacccattaatttccccccagacaacattaaaatttgtcaatttcaggcagattcatttaaagtaacttttccattatactacaatccaagattgttgtatcctatatctatttctactttgtaacagttgcttttttttgccacgtttaatgactgatcagaaagtgagatatttaaatatatatatacacacacacatatatgcatatatgtgtgtgcttgtgtgtgtgtgtctatatgatagatacttgccacatgtttaatgactgatcagaaagtgagattttaaaa

SEQ ID NO: 709133 - DNA, 1359 bp, Homo sapiens
atcatcattataattatgtttgaagacaaatagactttctaatttcttatgtgttgctggtgggagtgtatgattctacaaatacctgataatttggcaatttcttaaaaagtttaacatatgtttgccctatgacccaccaatttcactccttggaatctacctaagagacagaaaaacatatgtcctcacraagatatgtgttcaagtgttcagaacagccttagccgtagtaggcccaaactgaaaacaatccaaatttccatcaactagtaaacagataaacaaaattcaactacatccaggcaaggcaatatcattcaacaataaaaggggacaaaactagacttatctggcaggggagacaccatgaacatgaggatagttttcccaaggcaagtttcaacccttgcactctagatgatgagattacttaatgggtacaatgcatgtgatttgggtaatggatactgtagaaacactgacgtcaccactatgcaatttatgcatgtaccaaaactacactttaccttatgcatttacacaaatgaaaaaagacaaaaagaaatgaaaacaaacaaaatgatgatacataccacaaaacttgtgaacttcaataatgttaactaagtgaaggaaattggatacaaaagattacatgttgtgtgatttcatttacttgaaatatctagaaaaggtaaatttatgtacacaaaaggcagatcattgggtgcctagggtttggggtctcagtgggacttaaatataaatagagaaatttgggacatgacagaaatgttctaaaactggattgttgtgataattgctcaaatctattaatttactcaaatcattaaattttacatatacagtgagtgaattttgtagtatgaaaattatgtttcagtaaatctgttaaaataattcttttttaaaaaataagacttcgtaagcaagacaaaatccagaagacacaaatgaaaaaatatttgaagaaaattactgatttcattgcatgaagaaaataacaaaattaaaagaagtatatgacgctcaggaaaaattttgatcacgtaaggcagacaatgggctaactttcttatgaaaaattgttaactatcaataaataaattcatggaaatgccatagacaattgggcaaaggatatagactcactatagaagagaatttcctaatagtcgataaatataaatatttgctcaaactcaccaatgaacagaaaaatccaaattcgaacagcaatgtaataaactagttctcctactccaaaattaacaagtacaatagtttgttttaaactcaaggatttagaagattctaagggaatagactctctca

SEQ ID NO: 709134 - DNA, 1359 bp, Homo sapiens
atcatcattataattatgtttgaagacaaatagactttctaatttcttatgtgttgctggtgggagtgtatgattctacaaatacctgataatttggcaatttcttaaaaagtttaacatatgtttgccctatgacccaccaatttcactccttggaatctacctaagagacagaaaaacatatgtcctcacgaagatatgtgttcaagtgttcagaacagccttagccgtagtaggcccaaactgaaaacaatccaaatwtccatcaactagtaaacagataaacaaaattcaactacatccaggcaaggcaatatcattcaacaataaaaggggacaaaactagacttatctggcaggggagacaccatgaacatgaggatagttttcccaaggcaagtttcaacccttgcactctagatgatgagattacttaatgggtacaatgcatgtgatttgggtaatggatactgtagaaacactgacgtcaccactatgcaatttatgcatgtaccaaaactacactttaccttatgcatttacacaaatgaaaaaagacaaaaagaaatgaaaacaaacaaaatgatgatacataccacaaaacttgtgaacttcaataatgttaactaagtgaaggaaattggatacaaaagattacatgttgtgtgatttcatttacttgaaatatctagaaaaggtaaatttatgtacacaaaaggcagatcattgggtgcctagggtttggggtctcagtgggacttaaatataaatagagaaatttgggacatgacagaaatgttctaaaactggattgttgtgataattgctcaaatctattaatttactcaaatcattaaattttacatatacagtgagtgaattttgtagtatgaaaattatgtttcagtaaatctgttaaaataattcttttttaaaaaataagacttcgtaagcaagacaaaatccagaagacacaaatgaaaaaatatttgaagaaaattactgatttcattgcatgaagaaaataacaaaattaaaagaagtatatgacgctcaggaaaaattttgatcacgtaaggcagacaatgggctaactttcttatgaaaaattgttaactatcaataaataaattcatggaaatgccatagacaattgggcaaaggatatagactcactatagaagagaatttcctaatagtcgataaatataaatatttgctcaaactcaccaatgaacagaaaaatccaaattcgaacagcaatgtaataaactagttctcctactccaaaattaacaagtacaatagtttgttttaaactcaaggatttagaagattctaagggaatagactctctca

SEQ ID NO: 709135 - DNA, 1436 bp, Homo sapiens
cccttggacttctgaggagagacagtttcaggcagagggaacagcatgtgccgaagcctgtgcagggactataggggcatgttcaggccacaccgaggggtgaggtcagggaagctactgggggtgcggccactgggtggacttgggttttctcttagtgcgacggagttgacagaggagggacatgacagcagggcactccagccgtgtgtagaggggaacagactgggaaggcaggtgccaggcagaaggtggaagccggtgagtgagctggcagctgcagaggtgcaggaaccctgatgggtgcccggccaaggaggcagtcggcagtgggtggattcaggcctattgcaaaggtggaacctgtagcacttgctgatagattggatgtgggtgtgagagaaagcgggttctaggtcacccagagtctttgacctgaactgagggagctgccatcagcagaggcagggagtggggagaagaggtggagacgatcccaagggaccgtcaggatctcggatctcgtttcggacactttcagtttgagaggccccttagccacacccgcagctgggcattgaagactgatgttctgagttgaggtatgtgcggcctgacgggtgtttgtgacctctgtgacctggagcacatctctcaattgctctgtgcctcggtttccctctgaggattgcggatagtgatctggctgctatgcagatgaattaaggcagtgcagtgagatccctggcctgtcaccactggctcaggcctcaggcagggagggcccccatcagaccccttgagatatggatccctaaatggtccatggaggcctcasgctaccactccttggttagagagggaaactgagacccgcagaggccaagaagcagagccgagtgggccacctgggtattgctgggtattgctgctacctggctccaggctgtgctgcttccctccactccccccaacccagcaggctgctatgagtaaatattgggctggacctggtgccctaattaatgccggatgatggctcactgttagtctgagggggaggcacagactgctgcctcccagcagagcaccaattagaaggaaaagctcttctcggcaaagaaagggaagggatagccccgtaattaataacctcatgaaggaccaggaagtatctgggcagggtcccaaggcacacatggtcgagagagatggctttggacccattcatgctttggcaacacctgcccctccccagctcctcagggtctccaaggtccctgtgctaactgggctgccttggttcctgtgtgcatgcaatgagtgggtgagatggggacggtgctcctggaggcatcatgctgctcattctagggtcccttcaactgaatcacaaatagattgaagatgggccagccccccttgagttctgtgcc

SEQ ID NO: 709136 - DNA, 1175 bp, Homo sapiens
aagccctgcttcagctgctttctgagcttggagtgactgctgggggaagcacgccttctccaggctgggatgggggagtggcctgcttgcctctccaccctgtctttccccttcagaagactgcagaggtgctgaggtgggaggtaacaggccagtggaaataaccagaataattaagtagcactttatattttatagtttttatttttattttttgagacagtctcgctctgtcacccacgctggartacagtggcatggccttggctcagtgcagccttgacctcccaggctcagcgatcctccaacctcagcctcccgggtagctgggactacaggtgtacgataccacacccagataatttttgtattttttgtagagacagggtttcaccgtgttgcccagcctggtctcaaatttctgggctcaagcaaactgcccgcctggggcttccaaagtgctggggttacaggggtgagccaccatgcccagcctgcactttattttaaattgttgccttccccagagctgggagaataattggccagcctatcatgagagaagcaagagacgtggggccccgccattgccaagtttgcttcaccgtgcacttggcagcagtggccttcactgtgcctgctccctcacactgctcacctgccccagcctcctgctgtcctgtcatccagccctcctgcttcccctgctgcccacccctagtatccacccctcactccctcacgaagcgcagcggctgaactgccaagctgaagggaaggccacagactgattataggtgcccagtggaacagggttgatccagacaggccatctgggagaggcagcagggctttgatgacaaaaaatgcctccgtgtgagtggtaagaaggcccacagaggcagagctcgggtgttccgagccccttgctccctaccaggccttgacccttccggggcctgcccctgtctgctcttgaacagagcccctcccccatcctttctcgcccctctgctgggtccagctgcccacacccacccgtgccctctgagggtgaacctgctgtgtcacctgtctctggttttttgatttgtttaattatagatgagttttctgcataatttattccaaaagcctggattatactgtacaattaaatcacattctgatcaaca

SEQ ID NO: 709137 - DNA, 1175 bp, Homo sapiens
aagccctgcttcagctgctttctgagcttggagtgactgctgggggaagcacgccttctccaggctgggatgggggagtggcctgcttgcctctccaccctgtctttccccttcagaagactgcagaggtgctgaggtgggaggtaacaggccagtggaaataaccagaataattaagtagcactttatattttatagtttttatttttattttttgagacagtctcgctctgtcacccacgctggaatacagtggcatggccttggctcagtgcagccttgacctcccaggctcagcgatcctccaacctcagcctcccgggtagctgggactacaggtgtacgataccacacccagataakttttgtattttttgtagagacagggtttcaccgtgttgcccagcctggtctcaaatttctgggctcaagcaaactgcccgcctggggcttccaaagtgctggggttacaggggtgagccaccatgcccagcctgcactttattttaaattgttgccttccccagagctgggagaataattggccagcctatcatgagagaagcaagagacgtggggccccgccattgccaagtttgcttcaccgtgcacttggcagcagtggccttcactgtgcctgctccctcacactgctcacctgccccagcctcctgctgtcctgtcatccagccctcctgcttcccctgctgcccacccctagtatccacccctcactccctcacgaagcgcagcggctgaactgccaagctgaagggaaggccacagactgattataggtgcccagtggaacagggttgatccagacaggccatctgggagaggcagcagggctttgatgacaaaaaatgcctccgtgtgagtggtaagaaggcccacagaggcagagctcgggtgttccgagccccttgctccctaccaggccttgacccttccggggcctgcccctgtctgctcttgaacagagcccctcccccatcctttctcgcccctctgctgggtccagctgcccacacccacccgtgccctctgagggtgaacctgctgtgtcacctgtctctggttttttgatttgtttaattatagatgagttttctgcataatttattccaaaagcctggattatactgtacaattaaatcacattctgatcaaca

SEQ ID NO: 709138 - DNA, 536 bp, Homo sapiens
tgctgtctcttcagggaccctcttccaagggaaggggaaaagcttcagaaataaggagtgaggaagatttggtttaatggaggtcctggtgtggtgggacctgatgggcccgtgggggcaggtgggacatgactggatgggcagcactcctctggggcctggcctgctcttcctgaggcaacgatcggagccaccacccggcttggacgatgaccctgttgctgaaagggatttggagctttttgggctttcaggagggagaggtctgtgtctgagggacacctggggtgggagcccaggcccaggaggggtcagtggacgcaggggtgcacaggagctgaagggatccaggaaacaacgggatggccggtccayaccagcccgaaagcggtgcttgaggtgctgtagcaggagacagtggaaatcccatgcctggtgggatgagggatcaaggtgtgggaggggtgattgattaggcaccagccaccacatccatcctgggagattatgttaatgtttgaaatagtgatgtgaag

SEQ ID NO: 709139 - DNA, 940 bp, Homo sapiens
tcatttctgcatgtttgatgcaaggggaagcatcctatgtcaattcattttggcttattgactataatttataagaaatatacctgatgcatttagctggtaagagtgctaacaaaactagcaatggccatttgatgtatgcatcaccctcgtgtttgaagctcctttgttggctgttatatagattagtcctcacaaccgttctgtgggttagatattcttatccccattttatacataaagaattatggttcatagaatagaatcagaactcagaatgaacacttgcttgcttttcaaaaaggaaagggcataattggctctgttccatccacaactgtagagaagcttctggaacycagggcttccaggaagaccagcaatagtgagatgcaggctacttatgcagcttacaaaatacaggatggggttaaagatggcaggcagtgagcaagcatggcagagacaaatgcaattgtgccacgtcttttgtgagcccactcagttaaatagtctttagggaaatctgagggtttctgtgtctaaggtaaggcctgctaagaacaacttgaggctgttataaaccaaggaagtgacactgcttagaaagcgtcactgccagtcccaagtaaagcactcaggagtggagggaaaaggagagagtgtggctttttgaaggaagatgtccatcacggcattatttataacagaactacagcaatgccgacaacatcccaggccccccatgccaggactctgaggaccacaaggctgcaaggatgtgtctccatcatggaagagcctcctggccccttatggggcagaatgcagtgggctcaggaccttggcagacacactcagggcaacaggcagtagcccaatcccccctctcccccgccaccaaataggcacatggccaatctctgcagtaatttaaaac

SEQ ID NO: 709140 - DNA, 1567 bp, Homo sapiens
gaatagggaatgattttactcaatcatccatgtaaaacagagaccagaaacttcatttagacattatgttctgttgcatgagtaaactatggaatctcatcaaggtcagaatgattttatagaattcagatgtgtttgtatgcatacgtgtgtgtgtgtgtgtgtgtgtgtgtgtgtgtctgtgtgttgaaggaggagaattaggaaagtatcaatttcaatcaatctaattcatataattttttaatttactcaattgtttaaatactatttgatcctattctttatttaaggtactttcttttgtttatttttttaaaaacatctgaagcatacaaatgtaattgctaggttggataagcactaaatggaatctttaatcaaacaaaaactcattgtgcctgctcttgcctctttagagaatttcattagagatgctattcccctgcgcttgggtaggaattatagcatacttcatgaattattttcttgattctaattaatatgctattctacaattcccttaaattgcacaagtatatcttagttcagcaattagattgtttggtactatataataattgaaagtcccaacttgatttaatataaatctctttctatccctgtgtaaattgttgaaggcaggaatgagtgtggttctccttccttcttacgttctactggcactttgaggccatagctcatctagggtaggttcagggaaggggaggaagagaaaaagaccagaaacgtcttactggaaatgaaatatttgtgttctctgagcctggatgatgttccaagtaaagcttttctcttgtgcaaggtttggtaggctcttcagattccttcatggcycgtgtctggtgtgtagggaacactaaaacattctttgtgtccacaaactctgggagtgtgaccattcccaatgcatcacagtttccaagatccaataccaactagtccatataccctgccctttaggattctgatggaagcagaagccaatcctatcatcttcaaccacccaacttcatatcaagtagaggaaactcttggtccccctagaaaacaatttcactaaattccaggcaagtaagttggtccctttcccacatacgctgggagtagatgatagaattcatagtaaagagcagatctattcaaggatatcacaaatctgcttcatcctatactctctgaccaccctttggtcagtagagagacaataacagaaacttgtttgtcccatcattccttatttacttatttattttattctactttaagttctgggatacatgtgcagaacatgcaggtttgttacataggtatacatgtgccgtggtggttttctgctcccatcaacccgtcatctaggttttaagctcctcaagcactaggtatttgtcctaatgctctcctccccttgccccccacccccccaacaggcccctgtgtccatgtgttctcattgttcaactcccacttatgagtgagaaaattcagtgtttggttttctgttcctgtgttattttgctgagaatgatggtttccagcttcatcc

SEQ ID NO: 709141 - DNA, 1156 bp, Homo sapiens
cgcctggcgaatttttataaatttagtagagacggggttttgccatgttggccaggctggtcttgaagtcaggtgatctgcccccctcggcctcctaaagtattgggattacaggcatgaaccaccacgcccagcctcaccaagggctttgaatgtcaggctaaagggctaggtctttaccctgcaggcacaggggagccattgacagatttgagcagaggagtgacagtaaactgtgtgagaaagctccttctggcagctaggatggaataagggttggagattggagcccggcccctgaaaggcatgtggatgcctgagctgggacaggggccatagatctccgtgagcaccaaaacttggtcatgaagagagagcctcttaggaaaacacgacttggttggccagccatatggacctccttcagaagcacctctgctcctctagcacaggctgatctgagtggggagatccagcacatacagaatggggtacacaaagactgtggccaggccttaagcatgggtgggatttattagtgtgtggagatgtacagggactcatttcagctttttctttttttttttttgatgatacctggtcactataggaaatatggaaattacagaaaaagatgaaagaagtaggaaaaaaatcccctgttatctgagcccccagagaataagcacaatgaacattgtgacataaattcttcctggtgttttttagacatgtatacttgtaaaagtaagatcattctatataaacatgtttgtatccttttcttaaaacaccctgagcatttcccagattattaaaagacctacatgaggatcatttgtaaaggttgtttwatgttccattatatgaagacaccataatgtatttaactgaacccctacagttggccattttttttggcagggaagaggtacaggtgaaggtgtgctcccctacagatggacatttttgtttcccacttggaactgttgtaaataccaatatgacaaaaatgtgtttgtgtatagaatgtgtattttcctagaatagatacccagaatcagaatcattgagacaaagaacaggatcatctcattgtttctttatatggctttttctgattataaaagtaatacatgttctttgtcaaaaatac

SEQ ID NO: 709142 - DNA, 1416 bp, Homo sapiens
tttcaaagcctatctttggtcctcattattgatttacaatctaggaatcattatcctcactrattagaagctcagctaagctatttctattccaccacctgaaataactcttatcccctgtagctttggcttgcaccgcctggctccaggtctcccagaggccggagaaaccttggtgaaacctgaaaagttccctttggcctgacttaatctggggctctgcactttatgcgcagtaagaaggatggagccttgggagcttccccttctgccgctggcaaagccggttacccccacactggatttgtatgtatttattctggtccgttagcaacggccagtctgggcgtttgcttctggggaagcaccttttcagccctaactgtgcctctgcttttctccagagttttctctcccagtcggagtagctgacccaccagtcagcagactgttaattcattatgcacaggcactgcagcctctgtcaaagaacgcagaaaggcaattttagaaaagaaatcctggtttcttgcttggtggctttcattgtgggagaaagtgacagttatgaatgacatcagagctgtgctggagcactgggctgggagaggaggggactgatctcggcgctccaagcaggcgctggctttctgggtggcaggcctaggttcacttctctccccaatcctacccccaccagggaagagggtcccgctccacgcgccactcaggacccaagggccgaatgatccgggtgtgtgcgagcctcactggatcctgggaggccagaaaagcccttaggagtattcagaaatccttccactaaaaaccaggaacctaggaggccccggaagaggagggacctgcctgagttcacacagcaagacaggtgagggcctggggctgggaccctcctctcagggggctaggctctgtccccttcgccaaatgtcccttagtccctgaggtttggatgaggggcagcatcttaggttgggttccccagaaactgagacgggaatttggagcaggaggccatggtgaggagggggctcttggactctgctgtaggttgagtggtgagccccagaaagatctatccaggccgggcacagtggctcacacctgtaatcccaacactttgggaggccgaggcgggtggatcgcctgaggtcaggagttcgagaccagcctggtcaacgtgacaaaaccccgtctaaattagccgggtgtggtggcacatgcctgcaatcccagctactcgggaggctggggtaggagactcgcttgaacctggaaggtggaagtttcggtgagccgagatcgcaccattgcaatccagcctgggcaacaggagtgaaactccgtctcaaaaaaaaaaaatctatacatattctaacccctggaactggtgaa

SEQ ID NO: 709143 - DNA, 1416 bp, Homo sapiens
tttcaaagcctatctttggtcctcattattgatttacaatctaggaatcattatcctcactgattagaagctcagctaagctatttctattccaccacctgaaataactcttatcccctgtagctttggcttgcaccgcctggctccaggtctcccagaggccggagaaaccttggtgaaacctgaaaagttccctttggcctgacttaatctggggctctgcactttatgcgcagtaagaaggatggagccttgggagcttccccttctgccrctggcaaagccggttacccccacactggatttgtatgtatttattctggtccgttagcaacggccagtctgggcgtttgcttctggggaagcaccttttcagccctaactgtgcctctgcttttctccagagttttctctcccagtcggagtagctgacccaccagtcagcagactgttaattcattatgcacaggcactgcagcctctgtcaaagaacgcagaaaggcaattttagaaaagaaatcctggtttcttgcttggtggctttcattgtgggagaaagtgacagttatgaatgacatcagagctgtgctggagcactgggctgggagaggaggggactgatctcggcgctccaagcaggcgctggctttctgggtggcaggcctaggttcacttctctccccaatcctacccccaccagggaagagggtcccgctccacgcgccactcaggacccaagggccgaatgatccgggtgtgtgcgagcctcactggatcctgggaggccagaaaagcccttaggagtattcagaaatccttccactaaaaaccaggaacctaggaggccccggaagaggagggacctgcctgagttcacacagcaagacaggtgagggcctggggctgggaccctcctctcagggggctaggctctgtccccttcgccaaatgtcccttagtccctgaggtttggatgaggggcagcatcttaggttgggttccccagaaactgagacgggaatttggagcaggaggccatggtgaggagggggctcttggactctgctgtaggttgagtggtgagccccagaaagatctatccaggccgggcacagtggctcacacctgtaatcccaacactttgggaggccgaggcgggtggatcgcctgaggtcaggagttcgagaccagcctggtcaacgtgacaaaaccccgtctaaattagccgggtgtggtggcacatgcctgcaatcccagctactcgggaggctggggtaggagactcgcttgaacctggaaggtggaagtttcggtgagccgagatcgcaccattgcaatccagcctgggcaacaggagtgaaactccgtctcaaaaaaaaaaaatctatacatattctaacccctggaactggtgaa

SEQ ID NO: 709144 - DNA, 1416 bp, Homo sapiens
tttcaaagcctatctttggtcctcattattgatttacaatctaggaatcattatcctcactgattagaagctcagctaagctatttctattccaccacctgaaataactcttatcccctgtagctttggcttgcaccgcctggctccaggtctcccagaggccggagaaaccttggtgaaacctgaaaagttccctttggcctgacttaatctggggctctgcactttatgcgcagtaagaaggatggagccttgggagcttccccttctgccgctggcaaagccggttacccccacactggatttgtatgtatttattctggtccgttagcaacggccagtctgggcgtttgcttctggggaagcaccttttcagccctaactgtgcctctgcttttctccagagttttctctcccagtcggagtagctgacccaccagtcagcagactgttaattcattatgcacaggcactgcagcctctgtcaaagaacgcagaaaggcaattttagaaaagaaatcctggtttcttgcttggtggctttcattgtgggagaaagtgacagttatgaatgacatcagagctgtgctggagcactgggctgggagaggaggggactgatctcggcgctccaagcaggcgctggctttctgggtggcaggcctaggttcacttctctccccaatcctacccccaccagggaagagggtcccgctccacgcgccactcaggacccaagggccgaatgatccgggtgtgtgcgagcctcactggatcctgggaggccagaaaagcccttaggagtattcagaaatccttccactaaaaaccaggaacctaggaggccccggaagaggagggacctgcctgagttcacacagcaagacaggtgagggcctggggctgggaccctcctctcagggggctaggctctgtccccttcgccaaatgtcccttagtccctgaggtttggatgaggggcagcatcttaggttgggttccccagaaactgagacgggaatttggagcaggaggccatggtgaggagggggctcttggactctgctgtaggttgagtggtgagccccagaaagatctatccaggccgggcrcagtggctcacacctgtaatcccaacactttgggaggccgaggcgggtggatcgcctgaggtcaggagttcgagaccagcctggtcaacgtgacaaaaccccgtctaaattagccgggtgtggtggcacatgcctgcaatcccagctactcgggaggctggggtaggagactcgcttgaacctggaaggtggaagtttcggtgagccgagatcgcaccattgcaatccagcctgggcaacaggagtgaaactccgtctcaaaaaaaaaaaatctatacatattctaacccctggaactggtgaa

SEQ ID NO: 709145 - DNA, 1416 bp, Homo sapiens
tttcaaagcctatctttggtcctcattattgatttacaatctaggaatcattatcctcactgattagaagctcagctaagctatttctattccaccacctgaaataactcttatcccctgtagctttggcttgcaccgcctggctccaggtctcccagaggccggagaaaccttggtgaaacctgaaaagttccctttggcctgacttaatctggggctctgcactttatgcgcagtaagaaggatggagccttgggagcttccccttctgccgctggcaaagccggttacccccacactggatttgtatgtatttattctggtccgttagcaacggccagtctgggcgtttgcttctggggaagcaccttttcagccctaactgtgcctctgcttttctccagagttttctctcccagtcggagtagctgacccaccagtcagcagactgttaattcattatgcacaggcactgcagcctctgtcaaagaacgcagaaaggcaattttagaaaagaaatcctggtttcttgcttggtggctttcattgtgggagaaagtgacagttatgaatgacatcagagctgtgctggagcactgggctgggagaggaggggactgatctcggcgctccaagcaggcgctggctttctgggtggcaggcctaggttcacttctctccccaatcctacccccaccagggaagagggtcccgctccacgcgccactcaggacccaagggccgaatgatccgggtgtgtgcgagcctcactggatcctgggaggccagaaaagcccttaggagtattcagaaatccttccactaaaaaccaggaacctaggaggccccggaagaggagggacctgcctgagttcacacagcaagacaggtgagggcctggggctgggaccctcctctcagggggctaggctctgtccccttcgccaaatgtcccttagtccctgaggtttggatgaggggcagcatcttaggttgggttccccagaaactgagacgggaatttggagcaggaggccatggtgaggagggggctcttggactctgctgtaggttgagtggtgagccccagaaagatctatccaggccgggcacagtggctcacacctgtaatcccaacactttgggaggccgaggcgggtggatcgcctgaggtcaggagttcgagaccagcctggtcaacgtgacaaaaccccgtctaaattagccrggtgtggtggcacatgcctgcaatcccagctactcgggaggctggggtaggagactcgcttgaacctggaaggtggaagtttcggtgagccgagatcgcaccattgcaatccagcctgggcaacaggagtgaaactccgtctcaaaaaaaaaaaatctatacatattctaacccctggaactggtgaa

SEQ ID NO: 709146 - DNA, 1416 bp, Homo sapiens
tttcaaagcctatctttggtcctcattattgatttacaatctaggaatcattatcctcactgattagaagctcagctaagctatttctattccaccacctgaaataactcttatcccctgtagctttggcttgcaccgcctggctccaggtctcccagaggccggagaaaccttggtgaaacctgaaaagttccctttggcctgacttaatctggggctctgcactttatgcgcagtaagaaggatggagccttgggagcttccccttctgccgctggcaaagccggttacccccacactggatttgtatgtatttattctggtccgttagcaacggccagtctgggcgtttgcttctggggaagcaccttttcagccctaactgtgcctctgcttttctccagagttttctctcccagtcggagtagctgacccaccagtcagcagactgttaattcattatgcacaggcactgcagcctctgtcaaagaacgcagaaaggcaattttagaaaagaaatcctggtttcttgcttggtggctttcattgtgggagaaagtgacagttatgaatgacatcagagctgtgctggagcactgggctgggagaggaggggactgatctcggcgctccaagcaggcgctggctttctgggtggcaggcctaggttcacttctctccccaatcctacccccaccagggaagagggtcccgctccacgcgccactcaggacccaagggccgaatgatccgggtgtgtgcgagcctcactggatcctgggaggccagaaaagcccttaggagtattcagaaatccttccactaaaaaccaggaacctaggaggccccggaagaggagggacctgcctgagttcacacagcaagacaggtgagggcctggggctgggaccctcctctcagggggctaggctctgtccccttcgccaaatgtcccttagtccctgaggtttggatgaggggcagcatcttaggttgggttccccagaaactgagacgggaatttggagcaggaggccatggtgaggagggggctcttggactctgctgtaggttgagtggtgagccccagaaagatctatccaggccgggcacagtggctcacacctgtaatcccaacactttgggaggccgaggcgggtggatcgcctgaggtcaggagttcgagaccagcctggtcaacgtgacaaaaccccgtctaaattagccgggtgtggtggcacatgcctgcaatcccagctactcgggaggctgrggtaggagactcgcttgaacctggaaggtggaagtttcggtgagccgagatcgcaccattgcaatccagcctgggcaacaggagtgaaactccgtctcaaaaaaaaaaaatctatacatattctaacccctggaactggtgaa

SEQ ID NO: 709147 - DNA, 591 bp, Homo sapiens
catttaagtttctgcagtatttgcttttcttaaagactgtatttactcttcctatttattgataccttcaatcttgattgttgattacattcctccttttagtgggaattatctctaatagtgtattaggcagttgcaaacaaataatctacttcggttgttttaactgtaacagatttaaaggtaaaaataaaggtattaggtaactaaaataattatttccttgagaaatggtaaaaaaatatatcccagaattggcctgagaataaaccacctctactgcccctgctaagcactaaaatgccaaaagtttgactttacttctaccattactgcggccagccacagtgctacttccacatcaggcactcaaggttgcaagtgccctggctattatctgtgctggcacaaacagaaacttcatgccaagattgtttcacttttttgtttatttcaaaatttaaatctgtcatagatatatctgattcatggagtctaagtcacattgcttgctgtaaaggaggctggtaatttgaattcggacttctacacacaggaatcacaggtgggggtttcctcaaatgtaraaaa

SEQ ID NO: 709148 - DNA, 913 bp, Homo sapiens
gaacaaatataagggagctgttattcagctcttatttaaattatgctgcagtacattaagctttacttctaaatgcagctctccacaacagtttgcactgccaacaaaaacaagcaaagaagaaaaatcaaaagaaagagaagagaaaaagacatccaaaaaatccctctcacatagaaatggctccttaaggatttataacctttagttactactatttactgatctatttctgggctctctgaagctgatacctttgcatagtaaatcagcagccaggatgataacctgaattagctcagctaacatatcctgacccatttcttcattaaaagccgtctttgtgaggttttgttccctccatctcttatggtccaaaccttcttgcattccccatgcgcgcacgcgcgcrcacacacacacacacacacacacacacacacacacacacacacacctcttttgctgtgaggaaactcaacagtctaaggatttgtttttttaaatcatcacccaactctgtctactttcttctatttactaaactgaatgctttctggtttagcatgagatgtcttttcaatataaaataaacatacaaggcagtccccagttctgcacttaaatggatccaccttctataccaactgtaaagctggaattgccagtctttatcccataggtttgtttttgtaaacacagagggcaaaccatggtgcttgttagtttctctctccataatcacattatcaacattacatgcagtcccatcacaactagaatgatgagaggggaggtgaggaactcaaactcttgtctgcaccatggatttttcaaagtgagctttgcctcagaaagtcacaatgccgtgctttggaatttggtcacctcatcatttatcctgattgttaag

SEQ ID NO: 709149 - DNA, 636 bp, Homo sapiens
ttactatctgtaaagtaagaatagtaatattacctacctcacagaatcattggaagaattaaattagttaatacacaaaaagcacttacaacagtatttggcacataaattaatgtacaacatatttttgtgattactattattcctagaaaccagcaactacatcttctatttgacaccattccctacccaacatcctaccatgaacacaacttggtccaaatccactctttcctcaatcagggctttgtattcaggaacatttttgatatagtatttacatcttgactaatggccctacctgccggctggggacatctgtgcaaaatgtaataaaagccctctttttctccaagtgacttgaaagaattttaccaatgggccattcattcccatctcagtagtgcaactatatccaaaaaattttttcaattgaaacaaaaacaagaatggctctatttagatacccagaattttaaacttaatgtttacaccaattaaatttgttaaaacaatatttcctttatatttttctccctttcttttttgtggaaggtaagagggactctacatagctaacttccattcaccrtttaaatctcaacttagactttacttactccagggagtccttat

SEQ ID NO: 709150 - DNA, 778 bp, Homo sapiens
tctgcctaaaataatttcttaataactcctacaacaattccaccgactcttagtaaccttatctataaaatagaaacaatagtaacaccaatctcataaagttactgtgaagattaaataaggcaaggtacaggaagtacatagcacaggatgcactcaatgaaaatggcccatcagacttgtgataaacattacatgtgattatatatgmctgggtaaaccatataacacacttctcagcacatggaaaatgctcaatatgtggtatttattatttttaaaagggagggctagagttaccaaagataaatgtagtcacttcccaaattatctcagagacagcactgggaagagtatgtcatctcaccacaatgcagaaactaaatgaatgtgcctatagagttgctggactgttagaaatatttctctgagaccctcagcttataagtatcagtcacagtttctccctatctctgatgtacaggaccctgacatcctccatctactagtgtcagagaggaatataaatgatctgcattctgtaggggtggcaggaaagcttcctcttcactcactgaaggtttgttgaaaatgaactgacaaaaagcagattaataggagagaaatgcatacaaaatttatttaaagtgcatagcatggaggaatcacgggagaatgattactcaataacccaaggaggtccacatgcttatatacccttcttcataggggaaggggagagggagatgtagaaggaaatgattttcaggggaaatga

SEQ ID NO: 709151 - DNA, 778 bp, Homo sapiens
tctgcctaaaataatttcttaataactcctacaacaattccaccgactcttagtaaccttatctataaaatagaaacaatagtaacaccaatctcataaagttactgtgaagattaaataaggcaaggtacaggaagtacatagcacaggatgcactcaatgaaaatggcccatcagacttgtgataaacattacatgtgattatatatgactgggtaaascatataacacacttctcagcacatggaaaatgctcaatatgtggtatttattatttttaaaagggagggctagagttaccaaagataaatgtagtcacttcccaaattatctcagagacagcactgggaagagtatgtcatctcaccacaatgcagaaactaaatgaatgtgcctatagagttgctggactgttagaaatatttctctgagaccctcagcttataagtatcagtcacagtttctccctatctctgatgtacaggaccctgacatcctccatctactagtgtcagagaggaatataaatgatctgcattctgtaggggtggcaggaaagcttcctcttcactcactgaaggtttgttgaaaatgaactgacaaaaagcagattaataggagagaaatgcatacaaaatttatttaaagtgcatagcatggaggaatcacgggagaatgattactcaataacccaaggaggtccacatgcttatatacccttcttcataggggaaggggagagggagatgtagaaggaaatgattttcaggggaaatga

SEQ ID NO: 709152 - DNA, 778 bp, Homo sapiens
tctgcctaaaataatttcttaataactcctacaacaattccaccgactcttagtaaccttatctataaaatagaaacaatagtaacaccaatctcataaagttactgtgaagattaaataaggcaaggtacaggaagtacatagcacaggatgcactcaatgaaaatggcccatcagacttgtgataaacattacatgtgattatatatgactgggtaaaccatataacacacttctcagcacatggaaaatgctcaatatgtggtatttattatttttaaaagggagggctagagttaccaaagataaatgtagtcacttcccaaattatctcagagacagcactggkaagagtatgtcatctcaccacaatgcagaaactaaatgaatgtgcctatagagttgctggactgttagaaatatttctctgagaccctcagcttataagtatcagtcacagtttctccctatctctgatgtacaggaccctgacatcctccatctactagtgtcagagaggaatataaatgatctgcattctgtaggggtggcaggaaagcttcctcttcactcactgaaggtttgttgaaaatgaactgacaaaaagcagattaataggagagaaatgcatacaaaatttatttaaagtgcatagcatggaggaatcacgggagaatgattactcaataacccaaggaggtccacatgcttatatacccttcttcataggggaaggggagagggagatgtagaaggaaatgattttcaggggaaatga

SEQ ID NO: 709153 - DNA, 1419 bp, Homo sapiens
gggtatgaaggcaggaaccctaaggccaattagtgtcaacttcctaaagttaaaccaaaagaaaaaaccccatctccccatgcctagtaacaaaggttcaaagcctgctctccctacaactccccgccatccaccacatctcagatggaaagggaaagtgtcctggattggccaccctaagcaccggccatcccttcgtctgcattcaattcaccccagcctttagttagccacaaaccaaagccttcattcagataaggggtagccgatagagatctcaaaaggagtacttaaaacccaggaaactttgtaagcaggcccttgagccacttgcccaggtgcactctcaccttgtggagtgctttcttgctttaataaatccctgctttctctgcttcattcctgcgtttcattcctgtgttactttgtttgtgcattttgtccaattcgttgttcaaaaacgccaaaaacctggacatcttgtactcgaggcctgccttccagtaacaccatgggttgaaggtgacattgtgaatgttacagcaggaccttacatattactatatacagaacttgctctggcctattttaaattgtgttgtcccaaatgttttcagaaaatctaattttaattttccttttcataaccataggggagggataggatatagtgctcacatggcatcatacatttaacaaatactgattgagcacctactttgggtcagacactgttctaagtgctgagtgatgaataaggtaagagccagatgattatactgtcatggaacttacattcaaggggatgaggcagtgggaattgaccaaaagctaagtaaataaataaacagagtaatggaatagggacagtgtaaagagctgacttctaggacagcacctatagtaggaagtctttcttgattatcacttgccacttcctccaccgatcccagaccctggtctcaactagggtcgtcagaacaggtgtctctttacctgagacctgtgagccaagacttgaataatgagagtgaatccacaaagaagagcattccaggcctagggaygagtaattactacaccctgagggaggagtaagtttggccttttccatctgttacaagaaagctaatgaggctgaagaatagtgaaagtggggaggagtgcaggacagagacggagcgtacagggctttgtaggccatggtagggattctggattttattctaattgcaataaagaagccattgaagggttttgggcaagtaaaagataggatgaaatcagatcacattcacactataaaaaggtcactctggctaaagtgtggagaatgaatgcaggtgggaccagaatggcagcagggagaccagtaggaagtgtcatcaggacccagccctcccttgccatgttgaatca

SEQ ID NO: 709154 - DNA, 1896 bp, Homo sapiens
gtcaaacagcctttgacttataatcaaggtaaagctctaagtctcaaatgggacaggaaagccaaaagatctggatgaccttcagccaatcatttcacctctcttggactttagcttcctcttccgcaaaacagacactggcctgagtaaccactaaattcccttcagtctctgcaattgtttgattctaaatcacggcatactcaagtagagatcagatgtcacagcaaagcaaggggactctagttcagtaagcagataaaaattaggactcagagaaattaccagcaacacaagatgaatggttcaaagtttgggcaggtagatcaaaattggagagtcccagggcatggctaatcatgacaagcaggcaagaaaatgtatataagaaaatatcggccaggcacagtggctcacgcctgtaatcccagcactttgagaggctgaggcgggcagatcacgaggtcaggagatcgagaccatcctggctaacacggtgaaaccccatctttactaaaaatacaaaaaatgagctgggcatggtggcgtgtgcctgtagtcccagctacttgggaggttgaggcaggagaatggtgtgaacctgggaggtggagcttgcagtgagccgagattgtgccactccactccagcctgggcaacagagagagattccgtcgaaggaaagaaagaaaggaaggaagggagggagggagggagggaaggaggggaggcaggaaagaaggaaggaaggaaggaaggaaggaaggaaggaaggaaggaaggaaggaaggaaggaaagaaaaagaaagaaaggaagaaagaaagaaaagaaagaaagaaagaaaagaaagagagagagaaagaaagaaagaaagaaagaaggaaagaaagaaagaaagaaagaaagaaagaaagaaagaaagaaagaaagaaagaaagaaagaaagaaagaaagaaagaatcaccaagagggatctggactctgcctaacctggggacttacaaaggtttgcaccttaaaagaatatattagaccaaggcctgggaagtttagaggcaaaggaagaagcagatgaatgagggtaactggctgaaaaggccagtggaaaggtagcagtgcaaatgtagcaggcagattagagagaaagggactggagtcaggaggcagagaataatattctatgacctggctatggagccccaggaagcctaggctgaaggcaggagaggcagtgtaaggaaagttcgacagagcccttcctacatgctactaggagatgttaagatgttccagatgctctgaactcctctaatcaatgttttcacctcttgctttcgatcactcatgcccaagggctcacatccatgtaatacctcttgtaattttcttctagtaccatggtttggcagaggaggtgagaggggacagggccaggaatcctgaggctcagggcttgtcagttactgggtcaagaggaggtattagaacccctgagtttcctgtgttggaaacccatcagcagacctggactgtcctctttgcaggaagaaattcagtctggcagggtccatttgataacaacctgtgaagcaccaagagcaaaagcaatctggagtcccctcctcttccctgtaacatgttttgaagccacagacgcatttccctcccattttccaaagctgctgggggccagtctcagtgcattttctgctcttctccacagggctggacaatatacacaggatcacatcccagggccgctatgagctgcgcgtggacatgcgggatggccargaggccgccttcgcctcctacgacaggttctctgtcgaggacagcagaaacctgtacaaactccgcataggaagctacaacggcactgcgggtacctatgg

SEQ ID NO: 709155 - DNA, 649 bp, Homo sapiens
ccaggcctcctcaaccttcacctcctttcccaccaaggaggagaagtaggaagttttcttaaagggccaattcaaagccaagtcgtggggtgcagattgttatggtgacaggcacacacatttttctacccttcttctgagatgtcctctgccttccaggtatttgtgattttgtcacagcctgacatggccaggttctcacactggcccagagaaaagagcctcagcaagagagttttgccaacaattccccttaaaaggaaacagatcaactacaccgcatcccaacaacccaggttcttttccttccttccttccttcctcccttccttctttcctgccttccctccttccctcctttctttcttgacagtatctcactcttgctcagtctggagtgcagtggtgcaatctcagctcactacagcctcgacttcctgagcttaagtgatcctctcrtctcagcctcttgagtagctgggactacaggcatgagccaccatacctggctgatttttcttttattttttgtagagatgggggtctcactgtgttgtccaggctggtcacaaactcctggccttgaacaatcctcccacctcagcctcccaaaatgctgggattacaggctacagccactgcatccagc

SEQ ID NO: 709156 - DNA, 1079 bp, Homo sapiens
tgaagttaggaggcacagtatctcagatactgtcagataacaagagccaccttttcagtctctgtaacttcatctatctcgagggttgggaggcagacagctatgaaagaagacccaaaagcagcagaatctgggcatcccaagtgtacccgaagcacgccagtctaggtggcccctctgtcacctggtttaagaacagacatcttagaaggaaggagctctgaccagctagtggcatgtctcctttcaagctgtgctttgtgtctcttcaacagaaaggcagacatcagagaactgcctctcttcctcgccctcccccagtggcttcccctggatcaccttggcagggcctcatcctgaggagggtgggtggaggagggaggagggcgggtggcggctgcagtggcggctcctttgatcacctcccgcccggttccagtccctgctgccagcaggccagccaaaggcccgactctactgatctgatgaggtgctgaataggacccgaagggcagggacagagcaagaagaaagcttcgggaatgaaaaggaaaccccgtgaacctgctcggcttcattggccggattttcctaccagggagccgctcagttcctgccagccagggactgcctgcccctcactctggcccctcttgtctccgcttttcagacctttgtgtgtgttttgtgtttgaatcacggctgctctccctggttctcaggctgggaacccactgcgcctgtttccatggtcactgggaagctcttagcgccatgtgcttcaaagggaacctttcccctcccagcactcgctgctgcctgccccagccaggctcacaataagcggctcctccaagccaggcctctgaccctcacttgccaggaggaaaaccttgcctttgccaagcaaggctgtgcagcctcacagaaatattcctcagcagagcatgtggatgcacacacacttgtggcacatcagtcctcacrtgcctacttgtagatttttatgagatatagagcttatagattggtgagagagtgttaactttcctcacatccctctgtttaggaacctttct

SEQ ID NO: 709157 - DNA, 1304 bp, Homo sapiens
tcttccttctctccactctcctctcagcttttactaactgcttcacttgctggcctcacaggactgtgcagtgcgggagaagaaacatgcttggttgggacccctgaaactgaagtcaataccttccacccccccaatctctaatcatatccttgggattgaggctagccaggtttaactgttgtgccacctttccaactgtccactgaatttgcttagttgattaccttctaaaaatactggagtaggagaaggtggtttccagtatgtctgattacaagcacaagagaaaattttcactggcccctatatcagaagattggatccaattggaaagcaaccaaatcctaaagttcactggccatttactaagcatctaccacatgccaggcaccatgtttggcacagtatttaggtacggcagtaaagaggtggcatgagcgtgaactcatgaagttcagtagagcagataggcaagcaaccagattaagtgcaagacagagggataactgctatgatagggggtaccaaggtgaggctggtatagtctgtgctcacagcgagttcagggcctagtgggagatatatactagcaaataaacaattacaatacagagtgatagtctatgggagaagggagctcagggactgtgggagcacagaagagaagatgactccttcctctatttgtgggggatgggaaagggcttcacataggaggtatcattaaaccagatcctgaaaaatgaaatggctcaggaagtaggaagtttaggactacagcatactagcaatcacaattttctaccttcaagtgactgtgacctttgagtaatggctgatgtaatcttcacacaaagagcagtaaagagttaaatctcacttctgccagtccttttaaggttcttgcaatcccaggggaggaaggactctaatcctgcctcatagcagtagtaggaatgcttcaaagggaggaaactaagaaacatcaaagacagggtgtgtttctggrtaaggggaaagagccctgggtttgagttccagctccaccactaaataactaaataattaaataaataactccatgatcttcaagaaaactttggactttctctcagactcagtttcttgatctgtagaatggtaataatcttgtctgcctctcaatatgtttatgaggatcaagtggaatgatacagggaaggggctttgtaaactataaagcctcatacgaatgttagctattgtttcctagaaggggagtggtggccagaggtcaggggagcaattggggtttattcctg

SEQ ID NO: 709158 - DNA, 656 bp, Homo sapiens
accgtgtctctccaaaaaaaaaaaaaaaaaaaaaacaacaactccccccaaaaatattagctgggcatggtkgcacgtgcctgtaatcccagccactcgggaggctgaggcatgagaattgcttgaactcaggaggcagaggttacagtgagctgagatcatgccactgcactccagcctgggcaacagagtgaggctctgtctttttttttttaaaaaaagtgatataacatacccgagaaagtctgaaagttgcatgaacatcatgggatgaatgaaaccacaaaatccaatctacatattagggttcataggcaatgaagtacagtgattccctgaaaagcaggttttggaggcagatacttgcactttgaagcctgacacaacttcacagcatatgaacgtgcttattacttcacttctgtaatactcagtttatttatacataaactgaggctattagaattatacttcatttggttgtttttagcattgaaataatatatctaaaataataaccaccatatatacgacatgataagctctcaataaatggcaacgttattaatatgtaccaactgttgattttatagatgttgcctagtcagtgattatttgtctgtgctatatgcttacttagtaagcataataatggc

SEQ ID NO: 709159 - DNA, 656 bp, Homo sapiens
accgtgtctctccaaaaaaaaaaaaaaaaaaaaaacaacaactccccccaaaaatattagctgggcatggtggcacgtgcctgtaatcccagccactcgggaggctgaggcatgagaattgcttgaactcaggaggcagaggttacagtgagctgagatcatgccactgcactccagcctgggcaacagagtgaggctctgtctttttttttttwaaaaaagtgatataacatacccgagaaagtctgaaagttgcatgaacatcatgggatgaatgaaaccacaaaatccaatctacatattagggttcataggcaatgaagtacagtgattccctgaaaagcaggttttggaggcagatacttgcactttgaagcctgacacaacttcacagcatatgaacgtgcttattacttcacttctgtaatactcagtttatttatacataaactgaggctattagaattatacttcatttggttgtttttagcattgaaataatatatctaaaataataaccaccatatatacgacatgataagctctcaataaatggcaacgttattaatatgtaccaactgttgattttatagatgttgcctagtcagtgattatttgtctgtgctatatgcttacttagtaagcataataatggc

SEQ ID NO: 709160 - DNA, 807 bp, Homo sapiens
cagattgacaaactccctcctaatatagcctgttttcttggatgttttctgataagcatctgtgttttctgagaactaataaaaattcttgttaaaccacaaattaccacagcctcttccttacctatagagagccgctttcccagtaaagctccggtcctaccttcccatcaccatcaaagtggcattgaaacagatcagatctgctccttttgagggagttagttgaagcccagtcttgcttcaggccacacaggatttgggtagcaaagcaaggaaagcagcctctctgacctagtggcctgagtgtttcctttcccaggctggctgcggcaaccactttgagaaatggcattggcattggcatgtgtgtggcatgtgtgctgacctagttaggagttgaggcttcatttctaattctgtccctttcgttttgagctgtgtgaccttgggcatgtcacctaacttctctgtatatgtctycttatccaggaaggagagattaataatgtagcctcatagcacttatctgattctcctaaggatgttatgagaatcaaatgagattatgtacaacgagagcaaacatttattcaatacttagtatgtaccaaatactttcagtttccttacatgtgttttttaattctcacaatcctaaaacagaggcactagtatcccacttgacagttaaaaaaactgaagttcagagaaattaagtcagacaggactcagatccacatctgtggctcccaaatgatgttcctaaccactatgcatgtcactcgctccccattgtacacgaaa

SEQ ID NO: 709161 - DNA, 3533 bp, Homo sapiens
tagtaggtgtatatatttatgggatacgtgagatgttttgatacaggcatgcaatgtgaaataagcacatcatggagaatgaggtatccatccccttgagcatttatccaatcacactctttaagttatgttaaaatgtacaattaagttattattgactatagtcaccctattgtgctatcaaataggtctcactcattctttctattcttttgtacccattaaccccacttaaacttttctttctgaaagagacaaacttgctaaattatcatgagagaaccaaagaattctaatgaatcattttatttaaaaaataactacagttatcctttaccaaactaaaattccaggtctgcaacaacttcgatttggcacagagttgctgcaaagcttaatgtgtatatttacacacttcagccctcttaaaagccatcctactattgatgtccccatcgagtccttagtttcctatgtttctatgtttctaagtggaacagcaagtctcacctacctttagagtccacgctctaattgctttcattcctttataatatgctgagctcacttaaaagctggtttcggccggctgtggtggctcacgcctgtaatcccagcactttgggaggctgaggcaggtagatcacctgaggtcaggagttcgagaccagcctggccaacatggtgaaaccctgtctctactaaaaatataaaaattagccaggtgtggtggcggatgcctgtaatcccagctacttgggagactgagggaggacaatcacttaacccaggaggcagaggctgcagtgagccaagattgtgccattgcactccagcttgggcaatggagcaagactccatctcaaaaagaaaaagaagtaaaaaaaaaaaagctggttcctactctgccaaggtgaaactgttggttgctaacttttgaggagaatgggctctgtttggcatgatttggctgagagaggcaaaagcatgcagcctcccacaggaaacggtgggagaaacaccagcagcagatgtaggcagatgtttatggaaaatggtgcacaacatattcagaagtaaaaatttcatattygtgaatacaaatttcatttaccattatgaaaataaacatttcagtaaatcatttcataactagagggatcccagaggcaggagtcatctcaccttccaaaataatagcagccagccagggtatggcagtggcagcaatgacacttctacctctagctgccagtcataggcatcctagcaacctccgtcaggagaagagtgggagggaaaatgtttttttttcctccaagcattatgaaacaactagggaggctagtctctgaggatttgatctaaggcttgcccaaattactttctctcaggaacttttgccttgaaccaattttaggcaccaaactagttctctcttgctggaagaacgtgattgtattgtctgaaattgtgcatgcttccttgtaggatgccagtggaaaaccccaaccatgccctttcccactaaattattaggatttcactttccagtaaatgcaaaaagaacatgcaagcatggctaagaggtttttttctaattaaaaagctacactttttatcttaacatttctacttctgtaagctttatgtgggcatgagaccataccatttgtctttacatccccacaatacccagtaatatttatgtacataattggagatgaataatgattctcttagataaagaaacttgtccacccacctctaccacaaatgaaaatcctttttcttatagaactttttggccaagcaaaggctcatgatatctgtaatatctgtgatagagaagcagtgaggatagttcttattccacagtccagcatgaaattctagaatgatgattggccttttctgttcactttcactctcttggagggaaggaggaatgtgaataattgaaaaacgagttacaactcaaacaaaacacatatgaatttggctttgctctgtggtgaatcccacaactcgatagtgccctccactcttttctgtctatccttaactcaaacctctgtctagttgaccaagacccagctgggaggaggatccaggaaaaggttccagagtggggatgggagaaggtgctggaatgaaggactcaagagacgcatatgaagctcattttgacgctttatcactttgtattgttgagaaatgcttgttctgtcttcatgcctgaggtttcttcttgtcaacttggatgaatggactatagaatgtacacatttcctgcttgcactgtgattgaaagtcccatataaataaaaattagttgacctttgcattgttgcggtattatgccaaatgcagaaaagcttaagggtataataataaaagctaaaatggataaactaagtctgacttagagaattatcaaaatctcaaagcatttcagggacaaaaaatgatttttaaaaagtaaacatttatatacttttaactctatattttatcactgtttcctcctacagcttatttaaatgcacattccagttataataattttgagtaaatcccccagttgacttgaatgtgtacaaacttgctcctggccatttgaatctgatgcaattcagcaaattttgaaatttgtattccagttattcaagtaaatgaatagtgtcatttgattatttgacgtgatttttttttaaaagcagttttgaaaaactgcttctgggtatcaatactaaaatgaaaacactggctaaaatcataaaagcaggaaaattaatttcagggcattttaagcctcctctgcttcctgggctcacagggcttcagaagtggagaatcattctctgatgtcactgttctctgaaagctgatccattcaaacccatatggtggacatctttgaatcacacactggttacatttttcagtgcctcagaaagcagaatttccccccttttaattctcaaaagcaaatttgaatgaactgttttacccacctgcagcttcctctgaggaatataactctttaattcaattcataatgtcctcatattctacaacctccaaattatcctaaattattaaatcttaattatttgggtttaaaattaaaataaacagttttagttttaaatctaaaccattgttactgattctgaggtgggaaaatggaggacttttttacagaagcatcataaagatattacacaaagccagaaaatgtcccatttctttctttctctttttttttctttttttttttttttttctgagatggagtttcaccgttgttgcccaggctggagtacaatggcacgatcttggctcactgcaacctccacctcccaggttcaagtgattcttctgcctctgcctcccgagtagctgggattacaggcatgtgccgtcacgcctggctaattttgtatttttagtagagacggggtttctccatgttggtcaggctggtctcgaactcccgaactcaggttatccgcccaccttggcctccc

SEQ ID NO: 709162 - DNA, 3533 bp, Homo sapiens
tagtaggtgtatatatttatgggatacgtgagatgttttgatacaggcatgcaatgtgaaataagcacatcatggagaatgaggtatccatccccttgagcatttatccaatcacactctttaagttatgttaaaatgtacaattaagttattattgactatagtcaccctattgtgctatcaaataggtctcactcattctttctattcttttgtacccattaaccccacttaaacttttctttctgaaagagacaaacttgctaaattatcatgagagaaccaaagaattctaatgaatcattttatttaaaaaataactacagttatcctttaccaaactaaaattccaggtctgcaacaacttcgatttggcacagagttgctgcaaagcttaatgtgtatatttacacacttcagccctcttaaaagccatcctactattgatgtccccatcgagtccttagtttcctatgtttctatgtttctaagtggaacagcaagtctcacctacctttagagtccacgctctaattgctttcattcctttataatatgctgagctcacttaaaagctggtttcggccggctgtggtggctcacgcctgtaatcccagcactttgggaggctgaggcaggtagatcacctgaggtcaggagttcgagaccagcctggccaacatggtgaaaccctgtctctactaaaaatataaaaattagccaggtgtggtggcggatgcctgtaatcccagctacttgggagactgagggaggacaatcacttaacccaggaggcagaggctgcagtgagccaagattgtgccattgcactccagcttgggcaatggagcaagactccatctcaaaaagaaaaagaagtaaaaaaaaaaaagctggttcctactctgccaaggtgaaactgttggttgctaacttttgaggagaatgggctctgtttggcatgatttggctgagagaggcaaaagcatgcagcctcccacaggaaacggtgggagaaacaccagcagcagatgtaggcagatgtttatggaaaatggtgcacaacatattcagaagtaaaaatttcatattcgtgaatacaaatttcatttaccattatgaaaataaacatttcagtaaatcatttcataactagagggatcccagaggcaggagtcatctcaccttccaaaataatagcagccagccagggtatggcagtggcagcaatgacacttctacctctagctgccagtcataggcatcctagcaacctcygtcaggagaagagtgggagggaaaatgtttttttttcctccaagcattatgaaacaactagggaggctagtctctgaggatttgatctaaggcttgcccaaattactttctctcaggaacttttgccttgaaccaattttaggcaccaaactagttctctcttgctggaagaacgtgattgtattgtctgaaattgtgcatgcttccttgtaggatgccagtggaaaaccccaaccatgccctttcccactaaattattaggatttcactttccagtaaatgcaaaaagaacatgcaagcatggctaagaggtttttttctaattaaaaagctacactttttatcttaacatttctacttctgtaagctttatgtgggcatgagaccataccatttgtctttacatccccacaatacccagtaatatttatgtacataattggagatgaataatgattctcttagataaagaaacttgtccacccacctctaccacaaatgaaaatcctttttcttatagaactttttggccaagcaaaggctcatgatatctgtaatatctgtgatagagaagcagtgaggatagttcttattccacagtccagcatgaaattctagaatgatgattggccttttctgttcactttcactctcttggagggaaggaggaatgtgaataattgaaaaacgagttacaactcaaacaaaacacatatgaatttggctttgctctgtggtgaatcccacaactcgatagtgccctccactcttttctgtctatccttaactcaaacctctgtctagttgaccaagacccagctgggaggaggatccaggaaaaggttccagagtggggatgggagaaggtgctggaatgaaggactcaagagacgcatatgaagctcattttgacgctttatcactttgtattgttgagaaatgcttgttctgtcttcatgcctgaggtttcttcttgtcaacttggatgaatggactatagaatgtacacatttcctgcttgcactgtgattgaaagtcccatataaataaaaattagttgacctttgcattgttgcggtattatgccaaatgcagaaaagcttaagggtataataataaaagctaaaatggataaactaagtctgacttagagaattatcaaaatctcaaagcatttcagggacaaaaaatgatttttaaaaagtaaacatttatatacttttaactctatattttatcactgtttcctcctacagcttatttaaatgcacattccagttataataattttgagtaaatcccccagttgacttgaatgtgtacaaacttgctcctggccatttgaatctgatgcaattcagcaaattttgaaatttgtattccagttattcaagtaaatgaatagtgtcatttgattatttgacgtgatttttttttaaaagcagttttgaaaaactgcttctgggtatcaatactaaaatgaaaacactggctaaaatcataaaagcaggaaaattaatttcagggcattttaagcctcctctgcttcctgggctcacagggcttcagaagtggagaatcattctctgatgtcactgttctctgaaagctgatccattcaaacccatatggtggacatctttgaatcacacactggttacatttttcagtgcctcagaaagcagaatttccccccttttaattctcaaaagcaaatttgaatgaactgttttacccacctgcagcttcctctgaggaatataactctttaattcaattcataatgtcctcatattctacaacctccaaattatcctaaattattaaatcttaattatttgggtttaaaattaaaataaacagttttagttttaaatctaaaccattgttactgattctgaggtgggaaaatggaggacttttttacagaagcatcataaagatattacacaaagccagaaaatgtcccatttctttctttctctttttttttctttttttttttttttttctgagatggagtttcaccgttgttgcccaggctggagtacaatggcacgatcttggctcactgcaacctccacctcccaggttcaagtgattcttctgcctctgcctcccgagtagctgggattacaggcatgtgccgtcacgcctggctaattttgtatttttagtagagacggggtttctccatgttggtcaggctggtctcgaactcccgaactcaggttatccgcccaccttggcctccc

SEQ ID NO: 709163 - DNA, 1348 bp, Homo sapiens
ctgatcattccctctcctttatttctgtataaactgtttacagaaaactatgcggcagagtgtctgagaatagtgactttctaatccctagtaattcctaggaaatgtaattgtaggaacaaatttcataaagtatcttcagtcttacataaatctgtgtaaatcacagatccctttaaatgccgtttggatagcagagctctagctggaactgcaacctgacttccctctggagcttcctgaaggcagcttgctgattccctggtggaacccttgccttcccagactgaccaacccttgccaacagccatcagttctttccagataattcgggacaatgtcaccccctttgctgtgtcaagaacttgccccttgaattttaaaagcatctgcctttcataagaaaactcaattttctgctgctgacttatttacacacagagttgcagatgcctaaattgaagtgacttgttgctattcttggctgtgaacaggctctctctgttgaaaactgaaaacctgtgtggtggatggcacgagtcctgttgaatggtgcaaacgtcccctgcacaaaagcactattaggatgaatgagaaatgacaaagtgagaactggacataatttgttaacagcttccgaagttgatgaggatcaatgaagatcctcttggaatgcagggtatccatgttcttctttcaacttgcacatcataataaaataatagtttgtgtttgtacaaatgtataaaataagtaagtatcatgttaaagacatagatctgtgaacacagagctggtaaagttttctttctgctgttcacatggggaaaatcagatggcccartgtagaaatggacactgaatttggttgtcatccaaatgggtccatgtcactcttcaaaatgtatctccagtcctgcccccttctccatttgtgctgtcactgacccaccctaggcctctaggatctctcacctggatgatgtctgtaccctgctaaattgtccctctcattggcttccattaatttatctttttggaccattgtcaaattgtgatccatatattacccatacctattatgtcattcccgtttataaccttttggagttttttctcaccttacagaatgaagtccaactaagactctcagtgtcacctctgcctgttgctccaggctcagtcccacgcttctgtgggcatcctatgctaataggtttgcattcctcatgctaaatgatctctgtcacctctgtgccttcgtttctgttgccctctctacctgagacattttcccctttctcttggctggcctaactattgattatccattaaaattcaactccta

SEQ ID NO: 709164 - DNA, 637 bp, Homo sapiens
agcacacaccagcctcagtccccagggtggtcgtcatctcgcgagaaagggttggcggggagggtatccaggacgaggagagggaggagtcgccatcgcctccgcctccgcctcctcctgttggaggggggctgagggaggagactgttgctgatctttggatgttctggttagtctaagaaggagagtatgaggcgagctccggcccgggtgcggccgggcttcaggggcccaggcgccgctgctgccaccgccatctaacgctgcgccctggaggcccggcgcgcggatggtgccggtgcggctcgggtgttgaaacgggtgtcccctccccctcctcccctcccccacgcggtggtctcccctcccacccggctcaggcagagccatgtctcggggtggctcctacccacacctgttgtgggacgtgaggaaaaggtccctcgggctggaggacccgtcccggctgcggagtcgmtacctgggtgagcgggggccccggggcggaggcgctgaggtcgccgcctagagtgggggagggggcacgctgccgggtctgttggaggtgggacggcgtctcggtgggggcgcccggagactctggggtgttgggtggggccttggttgccgaattccg

SEQ ID NO: 709165 - DNA, 956 bp, Homo sapiens
cggcctaaagatgtattcctcaaactgcttttcatgacaccctcctcataaatcttaaagaatttctcactggctaactctcatgaccctcamggcctctcataaccttgttctaacttagccctttaatagccctactttcatagactactgaatactctccgaataccacataatcattatcactttcaccccatgatcatttaattcttctattttcgaatcctcttctcttcctcaatatagggcttagttcatatcctgcttccttcatgaactctttcctaatttctcaaaactacattgatatcttcctgaaccgaactgttccacacattgaacactcatacaggctctactgtattgatttttaaaatagccagtcacccacttatgaagattcaacttaaccaactaatgacacttatccaactaaacctacttagagcacttcaggttggcagcatggtagctaggtgaaatagcatatatcagtcactgtgtgccagacagtgtgctgagtgattaatgtatgctatttcatttaatacagtaactgtaggacccctgattttgaaactgaaccttagcgaggttgggtcagctgcccaaggtcactagctagtgacccaggcttgtattaatacaatattattacttctacttaagaagtgataataggccaggcatggtggctcatgcctgtaatcccagcactttgggaggccgaggcaggtggatcgtctgaggtcaggagttcgagaccagtcaggccaacatggtgaaaccccgtctgtactaaaaataaaaattagccaagcatggtggcatgtgcctgtagtcccagctgctcgggcggctaaggcaggaggatcgcttgaacccaggaggcagatgttgcagtgagctgagattgcgtcactgcactccagcctgggcgatagagtgagactcca

SEQ ID NO: 709166 - DNA, 956 bp, Homo sapiens
cggcctaaagatgtattcctcaaactgcttttcatgacaccctcctcataaatcttaaagaatttctcactggctaactctcatgaccctcacggcctctcataaccttgttctaacttagccctttaatagccctactttcatagactactgaatactctccgaataccacataatcattatcactttyaccccatgatcatttaattcttctattttcgaatcctcttctcttcctcaatatagggcttagttcatatcctgcttccttcatgaactctttcctaatttctcaaaactacattgatatcttcctgaaccgaactgttccacacattgaacactcatacaggctctactgtattgatttttaaaatagccagtcacccacttatgaagattcaacttaaccaactaatgacacttatccaactaaacctacttagagcacttcaggttggcagcatggtagctaggtgaaatagcatatatcagtcactgtgtgccagacagtgtgctgagtgattaatgtatgctatttcatttaatacagtaactgtaggacccctgattttgaaactgaaccttagcgaggttgggtcagctgcccaaggtcactagctagtgacccaggcttgtattaatacaatattattacttctacttaagaagtgataataggccaggcatggtggctcatgcctgtaatcccagcactttgggaggccgaggcaggtggatcgtctgaggtcaggagttcgagaccagtcaggccaacatggtgaaaccccgtctgtactaaaaataaaaattagccaagcatggtggcatgtgcctgtagtcccagctgctcgggcggctaaggcaggaggatcgcttgaacccaggaggcagatgttgcagtgagctgagattgcgtcactgcactccagcctgggcgatagagtgagactcca

SEQ ID NO: 709167 - DNA, 956 bp, Homo sapiens
cggcctaaagatgtattcctcaaactgcttttcatgacaccctcctcataaatcttaaagaatttctcactggctaactctcatgaccctcacggcctctcataaccttgttctaacttagccctttaatagccctactttcatagactactgaatactctccgaataccacataatcattatcactttcaccccatgatcatttaattcttctattttcgaatcctcttctcttcctcaatatagggcttagttcatatcctgcttccttcatgaactctttcctaatttctcaaaactacattgatatcttcctgaaccgaactgttccacacattgaacactcatacaggctctactgtattgatttttaaaatagccagtcaccyacttatgaagattcaacttaaccaactaatgacacttatccaactaaacctacttagagcacttcaggttggcagcatggtagctaggtgaaatagcatatatcagtcactgtgtgccagacagtgtgctgagtgattaatgtatgctatttcatttaatacagtaactgtaggacccctgattttgaaactgaaccttagcgaggttgggtcagctgcccaaggtcactagctagtgacccaggcttgtattaatacaatattattacttctacttaagaagtgataataggccaggcatggtggctcatgcctgtaatcccagcactttgggaggccgaggcaggtggatcgtctgaggtcaggagttcgagaccagtcaggccaacatggtgaaaccccgtctgtactaaaaataaaaattagccaagcatggtggcatgtgcctgtagtcccagctgctcgggcggctaaggcaggaggatcgcttgaacccaggaggcagatgttgcagtgagctgagattgcgtcactgcactccagcctgggcgatagagtgagactcca

SEQ ID NO: 709168 - DNA, 956 bp, Homo sapiens
cggcctaaagatgtattcctcaaactgcttttcatgacaccctcctcataaatcttaaagaatttctcactggctaactctcatgaccctcacggcctctcataaccttgttctaacttagccctttaatagccctactttcatagactactgaatactctccgaataccacataatcattatcactttcaccccatgatcatttaattcttctattttcgaatcctcttctcttcctcaatatagggcttagttcatatcctgcttccttcatgaactctttcctaatttctcaaaactacattgatatcttcctgaaccgaactgttccacacattgaacactcatacaggctctactgtattgatttttaaaatagccagtcacccacttatgaagattcaacttaaccaactaatgacacttatccaactaaacctacttagagcacttcaggttggcagcatggtagctaggtgaaatagcatatatcagtcactgtgtgccagacagtgtgctgagtgattaatgtatgctatttcatttaatacagtaactgtaggacccctgattttgaaactgaaccttagcgaggttgggtcagctgcccaaggtcactagctagtgacccaggcttgtattaatacaatattattacttctacttaagaagtgataataggccaggcatggtggctcatgcctgtaatcccagcactttgggaggccgaggcaggtggatcgtctgaggtcaggagttcgagaccagtcaggccaacatggtgaaaccccgtctgtactaaaaataaaaattagccaagcatggtggcaygtgcctgtagtcccagctgctcgggcggctaaggcaggaggatcgcttgaacccaggaggcagatgttgcagtgagctgagattgcgtcactgcactccagcctgggcgatagagtgagactcca

SEQ ID NO: 709169 - DNA, 956 bp, Homo sapiens
cggcctaaagatgtattcctcaaactgcttttcatgacaccctcctcataaatcttaaagaatttctcactggctaactctcatgaccctcacggcctctcataaccttgttctaacttagccctttaatagccctactttcatagactactgaatactctccgaataccacataatcattatcactttcaccccatgatcatttaattcttctattttcgaatcctcttctcttcctcaatatagggcttagttcatatcctgcttccttcatgaactctttcctaatttctcaaaactacattgatatcttcctgaaccgaactgttccacacattgaacactcatacaggctctactgtattgatttttaaaatagccagtcacccacttatgaagattcaacttaaccaactaatgacacttatccaactaaacctacttagagcacttcaggttggcagcatggtagctaggtgaaatagcatatatcagtcactgtgtgccagacagtgtgctgagtgattaatgtatgctatttcatttaatacagtaactgtaggacccctgattttgaaactgaaccttagcgaggttgggtcagctgcccaaggtcactagctagtgacccaggcttgtattaatacaatattattacttctacttaagaagtgataataggccaggcatggtggctcatgcctgtaatcccagcactttgggaggccgaggcaggtggatcgtctgaggtcaggagttcgagaccagtcaggccaacatggtgaaaccccgtctgtactaaaaataaaaattagccaagcatggtggcatgtgcctgtagtcccagctgctcgggcggctaaggcaggaggatcgcttgaacccaggaggcagatgttgcagtgagctgagattgcgtcrctgcactccagcctgggcgatagagtgagactcca

SEQ ID NO: 709170 - DNA, 643 bp, Homo sapiens
cccgtcatcctgacctgacattgacatgatgcctccacctgtggcagtcaagttgggacagcaagatggttcatcttatgtgtcaacttgactgggctacaggtgtttaaacatctgattaaacgttattctgggtatgactgtaagggtgtttctggatgagatttgcatttggatctatagactgagtaacacaggttgcctgagccattgtgggtgggcttcatcagatctgctggaggcctgcatagaataaaaagctgagtaagggagaattcgctctccctgcctgcctgttgaagtaggagttgtgagtaggaggataatgccaatatttcaggtttctagaaatgtaaatgatccatagtataaacctccaccaacatgtaagaagaggcagatgaaaaatattgaagcatcgttagcatgaaaatagcggaccattcagccgtagtttacatctcagctgatatgagtgactgaagagaaggcagttgaagtgtctgatgtgtagtgcatggctaagaataatcctgtaatgatctgaaggattaggcaggcaccaaggagtgagccgaagtttcatcatatggaaatgtwagatagtgtgggaaatcagtgaatgagtaattaataattttta

SEQ ID NO: 709171 - DNA, 585 bp, Homo sapiens
ctacccccgtcctccgccctgccccgtgaaccctctccgctgccgcctcccctcgcccacctcgacggccatgttcgtgggtggggagaggccagcccgaccctcggacggcgggactcgcgggctactttaggtgggcgcggacctggggctctagcactgactaagtcactgcacctgcgcaagagtctccgccactcttgtccgggtgggaatcaaactctagcgccgcccttcagggcgctgaggatttgtttctagatctcactcccgaggctacccagggcctttctctctaaccctcaggaggaagagcaagctccataacagacagaagtttaaattgtcmttcccaactgctaatcaggaagcggaagttaaactcttagcaaaatggcagcacctggaaagacaaatggagccaaactacctgggttcaaatcctgactccaccacacgctacgtaggcgaccttgtcctttattatagtttcttcatctattaatatgaggtttgaatgtataaatagttgtaaatcaactgtaccagaataatgcctggcatacagtaagcattatataagtg

SEQ ID NO: 709172 - DNA, 2168 bp, Homo sapiens
ttcacctcgcagagttccggtttcccaggctctcaaaaggatataaaaatatctaccacacagggttgttgtgggcaccagctgatgcctcagtgttctctcagatgattggttgtcatttctcctcctccctcgtttctaagaccagcaaagccaagttctgcagcggggctgtgtgactgctctccatcttcctgcgtacatttcactcagatgaagtcctttctcgccctctaaacagctggccgaggatgagtcaccaccacaggagagccatatcctagagaatgaaaggggaggggcattgcaggcagtaaaaaagccattttgtagaagggcacggagatataacagagtatggaatatgtggaatggtaaattgtctggagctctaaagcatgcagaatgtcttaatcccaaaaactgaggctgaaagattacatggtaatcggagtttgaaagttctcactgttgtctggagaactcctactcattttccaagatccatcccaaagaaggaaaaatagagctagttataggtggatgcaaagcattcagagtggggtaattccaggagctggggccaacagggtgtttggggaccagctttccaaaggccaagcccttgctctgtttccctgaacattcctgtcccattgtcatccatcgcaaacgtcatcttctttgtgatagctattccagctcccccaggtaatctacttaatttcacctactcacttttctgtgctctgtcactcttctaatgttatctatgttgtactgtaaaaggttggtcccatgactggctcctctacaaggcattatgctccatggtggaagcggggtgcatatatattagtcatctgtatattctgctcacctagcacagagcctagatgacaggtattgccagtgacctgcccaatatccatccttcccatcttcctttccaatagaatcccagatgggcaacatgctttattaaagatattcgtgtcccaggctcccttgaagctccratgccatacgacccagtttggaccagtgagatgcaagttgaactctatagggtgtgcttctagcaaagctgttgttttcctgataaaaggtcagccccagggggctctttacctttggccttcatttctaaccacctttaccccatcttcccacctagaagcttagactccacacatagaggtggaacagtcatcttgagaccatgaggatgcaagacacactggggatagctgcgcaggtgcctgaagggatcctgagtcctcaggatctccttgagcagctgcagcagcctaggacttccttcgtctcaatggtcattagatgcaaaaaccaattcccagtttggttaatccactggctgggcttctgctttgtgtagctaaatgctacaacttggcacataacctatgcttagggaattttgatgacccagttgaatggtcagctctccctctgtgcagcttaggccactcagcctccagtgatgcaataaagagccataagggatctgcaactttgatagactccttgggttaaaaattctcaggtattctctctctctttttttttcccaagacagagttccgctcatgttgcccaggctggagtgcaatggtgcggtcttggctcactgcaacctccacctcctgggttcaagtgattctcttgcctcagcctcccaagtagctgggactacaggcatgtgccaccacatctgactaatttttgtatttttagtggagatggggtttcatcacgttggccaggctggtctcgaactgctgacctcaggtgatccgcccacctcagcctcccaaagtgctgtgattacaggcgtaagccaccacgtccagtatctctctatcctcaatgcagcaaggactccagggctttctccttctgggaacccttctttcttagaagaggctaattttggagaccatttctaactagttgatatacattttggggaaatctgtgaaactgtggcgtgggtagaagcattgactttggaattggttggaccatttgccttttctttctttcagcggatacatattgatgggatggagatgtgtgggcaaaaacagtcctccttaaggaacttagtctagtggaagagcagagctacactgatgagtgactga

SEQ ID NO: 709173 - DNA, 627 bp, Homo sapiens
ccacgaagtttacccgctctctttgtagattggtgcaagggacggaggaaggcacttgtctaacatgaagctagttagtgacacaactagatcaggaacccagctggcctgactttcatgccctgtgatgggaatggatgctgttaaaatacctatccagagaaggatctgcttgtcacagagaaatctcgaggcggcagcctggcactgccactgagtgtccagctctggattgcagttgccttgtctgcctgttgccagctgggtggcctcatggaacttcagttacctcatctgaaaaagaagggtgatggtgcccacctcatagggtcattgtaaggatttaaatgatgtggttcgtrtacagggctcagaacaatgcctggttggtaggcatggtgtttggaggagcatagtaaatgctattgctatcaatatgtcaaaataatgtcaatattaacatagtagagaagtagctagaaaaactgaacttcatacctggaaacaattttaaagataatcagttctgcttccacggacttgccttttataggaagatgagctactctaatcccctccttcagggcccttctatatcctagaataggaaaattatcgttatttaaa

SEQ ID NO: 709174 - DNA, 1038 bp, Homo sapiens
cgctgatgaatggacaagcaaactgtggaagccccatgcaacgcagtgtcgttcagccacggggagacgtgaagctctgacacctgatacagccaacgcgctgtaaaccattgcaccaggtgtgggaagtcaggtacaagaggaccggtacggtatgattccactcacaggaaatgtccagaacgggcagctccacacactcaaagccaatcagtgttgccaggggctgggggaagaggaaggaggagggactgctgatgggaacgggtgtcctttggaggtgattgaaagattccaaaattgactgygatgatggttacacagctctgagaatgtactaaaaaccagtgaattgtgtgccttagatgggtgaattttctcgtgccaatgatatctcagtaaggctggaaggacacagacctggtcagcgaggagggcctgggccttgctaaagtgggcagagtctgtggggtccattggctcagccccagcctctctgtgcagccctggggcctggcttcttctgccgcaccccacaagctgccccctctccccagccggggccccaggcctgctcctctctgggctgagcatcacctttgccagaggaaggtcaaagcacctggaccccaacaccccaaggacccttgcaggcctcttccgggatccacttctcagtgagcgctgccgtgcgcacccctgggcctgagggctgggcatctcccaggtatgcaaggggctctccgtgcagggctgtgagcaacgtgggggcagccggccgcagtctccagccccggggcctgctggcatccccaccagcccccagcctgggcaccccacccaaggaacccggctcccagagtccggggcactgattaatattcacacaggcagcagagagctgctgaaccctgaacgcgaggcagggaagaaagttgaagcatctgctatctataaatcaaaatgaatttactcttcctctaaggacagccgctgtaataggccgcagccaacaggtcccatggtgtgatttctgcg

SEQ ID NO: 709175 - DNA, 1004 bp, Homo sapiens
cgggcataagcctctcagaccccgtcaatgtatcagtcaggatcctagaattccagtccctggaacttgtcacatattccaaatggcaaaatggttatctaatccaaaccagctactctaagaaactaaaacctagttaagtctgcaagaacaattccgcaatattttgcccacctggccacctgctatgtcaatcaaaggtttctgtatcgaagccacaagacgctttggaaaatcacagcgtaacacaggcagacatttcagctcacgagcagcaaccacactgtccctccaacaaccctgcctcaagcctccgtcctctgcaatcctgaagggacaaagctgcgtactccgcaccttctaccccgaggaacatgcatccttcctttcctgagggccacagtkctccacgtgctcagcgcccgtgcacggcagggggacttccacacgtgcacttcaagggaccacagctgccctggactaaaggggacgccccggagcctctggcaagggcatcactgtgactggaaatcccaaggactcgaaatgcaagcccctttcaccagctcacggtgcggaccctgctcctcctgactgcactgacctgcctcaccatgtcagcagacaccaacctcagcacagggtggagacaagccctctgccagctgcagatccgtcccacaggctcatcagacaggctggaatcccagctgtggcgtggcccccacccagctgacacgcagccccggggaagtcagccctggcagggccagctcacagcaacagcccgaacctctgcactcggcagactgagtcgcggctacggcagagcctgcgggagggcctgtacaaggggcagaccggggccaacagtgcagcccaggaggcatctccttccttcagacactaaagtctcaggggcctggcactcaacggctacagccttgttcaagctgcttcaagtggaagcaaaatataaacacaacacacagactgttaaatta

SEQ ID NO: 709176 - DNA, 1072 bp, Homo sapiens
cgggagctgctggggtcaccctctctgggggaaaattgcgttgctggcttgaaggagaggctctggaagttggaatccagcgcccttgagcaacagaaaatccagagccagcaggaaaacaccatcaagcagctggagcaggtaggaaagccctgtctcagggcaacaccctgtcccatgtctccaatgcagagtgatgttattaaaatacaatgtgggtgcctcacttggctgctcctcatccttcaatggctccctattatcccagggaacctttaagctcctaagtctgacattcagatccttcctgatccagctctcccctgcaaggttcagtgtcacctcctcagagaagcctgccttaatcatcttgcaaatagctcccactaggttgcattcatttcccatctccttagctgggttgctttactctctggtacctgccatcgtattagatagtattttttaaaagtttgctttatgcctttctctctcattaacatataagcttcatgaagtcagattgtttttctctttctcttgcttcttagtgcaatcctagagcctagaatgaggccaggtacatagctgatgctcaataaatagctgttgaccaaatatctaacattcattgagtactgtctgtatactaacctcagccctaagctctccccacacatctcacgaatctccacatgaaccttatgtagggagatcttagtattatccccactttacggatgtagaagttgagactcagagacatggagaaagtatcagggatgggatttggaacctgtgtcatctgaccccacactgcctygaatgtctgctatgtgctaggcattgtgcacagcttcggggcagattgaagtgctactctttggggaaaataaaataacaaagggaataagacaaaaatatcaaatactcttgtaccagtaccctctgcaaagtaccagatgaatactttatttgtctgcttgcttatttatgtacttacttatttacctcattctataaataatttgaggcagcttacaagatacatgtataatagaacacaaaaatt

SEQ ID NO: 709177 - DNA, 2242 bp, Homo sapiens
tttgtgaacagaaggcccaatatgataagactggaaaaatcacagactcacggagcaaacccagacaaccgcttcctgactcaaaacgtgtttgctttgatgcaggggttgtctttacaaaaagaagggagtgggagtttatgctaaacttttgggcatatttggcaaatggcaaatgtctggtgcatgtctgcagataatcttaggctgaaagacttgatgtagaaaatatcaaagacaggctccaagaatgggttgcttctggggagctaattaaagcaagattatctgattactgctcttaattaaaaacaaaggcctgtatgaagaagggaattgtgtcctctgtgaactccaaactatgaggactttatctcttctgaaaactaaatacctttgcgttagcctgtctgccagtggcagcaggagaattggaggcagccagagaagaatgtgaatgctcattaacataataaccaagtttcataattctaattatattagggtggataataaggatcctaacagatgaattgcagcctaacctaagttgtttggcacctgtttgaatgggagatggtagggtattacggtttcggtgcaggatctgaagtcagagctggattccaattctttttttttttcatttgctgtacatgtttaagatataattggcaatatcaatattgccaaaacaaaaagtaggcactttttacattgtaatggcctgttgaaaagttttagaattgttattctatacagagattcatctttaatcagtgttctggctgcttccaaattcactgaattctctagcactggattagaaagcataatctataggaaaacgtatacaatgtatagtttttaaagtcaacgtttttagaacaacaagacaaaccagtacatataactttcaataagcatttatcaaatgcttactatgtatggacccggacatagattaaaaaataatattccaattctttatttgcatatctgcagctgtgagattttggacaagctgcttaacttctctgttcatgtttcctcccgagtaaatcatgattgttgtcaggggtaatgtggtgatgcacaagccactctttactcagagcctggcacctagaaagagccacaaaaaattagccatttttatcagcagcagtaactatttgatgcccggaggaatcccrggagatagacttcactgtctatcttcatgttacagaagagaaatctgagactcagagaagggggagcaactgatccatgcatagatggtcttacagctcctgcagtggcccctcaggcaaggtgggtcttcagcatctcccagagagccctatccagagtctctttcccttttcttttccctttccccttccaagttcttgggcatgttcagctgctgtttggagtgaaagtgcttgcaccaagaacagggagggggcaggaggcaagggagatacttacacatctgtaagaagggatttcttgtctgtcttcctcatggccacatccccagggctggctcacagttggtgctcaataaatgtttgttgaatgaataactgaccagagcatcaaggctggaccagaaatattaattgtatttggtcacagctcagcattgattgtggcacagagagggttggtagtttactaatagcacaaagtaggtaagtggaagagccagaatttgaacctaggttggaatcccaccaaagcctctattttatttgccatgctaccacagctctctgacattcatccaggaggtagaccactcacctggtaaagtttactggaaaaatctgatctctgtttattagtactaaaactgcctaaggattattatgcaaccttcaatgttcagccaagacaaagtgctactgagcaccagatcctacgacattaagccctaaaaattatgaaccccttcctttgaatatgtttatagcttgaggactcaaggcattctgagttgcaaaggaccaccgggattatccagcccaacttgctcagtttatagatgggaaaacctgaggtctgcagagggaaatatcttatccaaatttatggtatgaactgacacagagtacaggtgtcttgacttctagctctttttaattgcacaagcaatctatgaatacttctctcaaagaacttaaaatatatcagaaggctgaaatgcccttggccaccactgcagtcttaagcttccttctcagaaggatcc

SEQ ID NO: 709178 - DNA, 2242 bp, Homo sapiens
tttgtgaacagaaggcccaatatgataagactggaaaaatcacagactcacggagcaaacccagacaaccgcttcctgactcaaaacgtgtttgctttgatgcaggggttgtctttacaaaaagaagggagtgggagtttatgctaaacttttgggcatatttggcaaatggcaaatgtctggtgcatgtctgcagataatcttaggctgaaagacttgatgtagaaaatatcaaagacaggctccaagaatgggttgcttctggggagctaattaaagcaagattatctgattactgctcttaattaaaaacaaaggcctgtatgaagaagggaattgtgtcctctgtgaactccaaactatgaggactttatctcttctgaaaactaaatacctttgcgttagcctgtctgccagtggcagcaggagaattggaggcagccagagaagaatgtgaatgctcattaacataataaccaagtttcataattctaattatattagggtggataataaggatcctaacagatgaattgcagcctaacctaagttgtttggcacctgtttgaatgggagatggtagggtattacggtttcggtgcaggatctgaagtcagagctggattccaattctttttttttttcatttgctgtacatgtttaagatataattggcaatatcaatattgccaaaacaaaaagtaggcactttttacattgtaatggcctgttgaaaagttttagaattgttattctatacagagattcatctttaatcagtgttctggctgcttccaaattcactgaattctctagcactggattagaaagcataatctataggaaaacgtatacaatgtatagtttttaaagtcaacgtttttagaacaacaagacaaaccagtacatataactttcaataagcatttatcaaatgcttactatgtatggacccggacatagattaaaaaataatattccaattctttatttgcatatctgcagctgtgagattttggacaagctgcttaacttctctgttcatgtttcctcccgagtaaatcatgattgttgtcaggggtaatgtggtgatgcacaagccactctttactcagagcctggcacctagaaagagccacaaaaaattagccatttttatcagcagcagtaactatttgatgcccggaggaatcccgggagatagacttcactgtctatcttcatgttacagaagagaaatctgagactcagagaagggggagcaactgatccatgcatagatggtcttacagctcctgcagtggcccctcaggcaaggtgggtcttcagcatctcccagagagccctatccagagtctctttcccttttcttttccctttccccttccaagttcttgggcatgttcagctgctgtttggagtgaaagtgcttgcaccaagaacagggagggggcaggaggcaagggagatacttacacatctgtaagaagggatttcttgtctgtcttcctcatggccacatccccagggctggctcacagttggtgctcaataaatgtttgttgaatgaataactgaccagagcatcaaggctggaccagaaatattarttgtatttggtcacagctcagcattgattgtggcacagagagggttggtagtttactaatagcacaaagtaggtaagtggaagagccagaatttgaacctaggttggaatcccaccaaagcctctattttatttgccatgctaccacagctctctgacattcatccaggaggtagaccactcacctggtaaagtttactggaaaaatctgatctctgtttattagtactaaaactgcctaaggattattatgcaaccttcaatgttcagccaagacaaagtgctactgagcaccagatcctacgacattaagccctaaaaattatgaaccccttcctttgaatatgtttatagcttgaggactcaaggcattctgagttgcaaaggaccaccgggattatccagcccaacttgctcagtttatagatgggaaaacctgaggtctgcagagggaaatatcttatccaaatttatggtatgaactgacacagagtacaggtgtcttgacttctagctctttttaattgcacaagcaatctatgaatacttctctcaaagaacttaaaatatatcagaaggctgaaatgcccttggccaccactgcagtcttaagcttccttctcagaaggatcc

SEQ ID NO: 709179 - DNA, 611 bp, Homo sapiens
aggacagaaagtggaaaaagagaaagaaaggagagaagccagttctgggggaagaaaaggggagaaagcagaattgaagaggacaaaaataagcgagatcaagaccatgtggagaatgaggcagaaaaagacttccagtgtcatgcccctatgagattagacttgcctcctgagaagcctctcacaagctgtttatccaaacaagaagaagtagaacagatgtcccttcaagatgtttgtttgtttgagacagggtattgctctgttgcttaggctggcatgcagttgcacaatcatatgtgcaattgtagcttgttgagcacccgattttgttgctgtttggggcagtacttgtagcctgcatggaccttgggagactgaacaaagggggtgaacgygggaataaaagacaaagacaaaagagtataattggaagaaggggtcgggggcaccttgcctctagtggacagggtccttgagctttttcagccctctgaatgtattaggtaaaagagataacgagaaagagagggtgattgttgagtaattatcagtcagcctgtttggttcacagcaggcttgtgagactgcatccttcgaacaataggtgc

SEQ ID NO: 709180 - DNA, 670 bp, Homo sapiens
aaaacaaaaacctggagatctggttaacaacaggaccaaactcctgcacagaattttgttggatctggatcttagctgcccttttctgctttctgatgatcagttcttactggaccaattttgttcactgaactacttatctggctactataggcatctgagtttgtgaactttgcrctagcataaagtggactttgttgtgtcttcccccaacacaccccaaaggatagcttgacactaataactaatatttactctaggctgtactttcactttgataataaaactgtcaagagctgagaaatgataaaagcttaagtcacttcctgtaagttataacataattctagtctataaaagaaaaaaagtttatggagaaagtctccactaataagcaggaagcattatctgtgaaagattacaaaagagctttggtaacaaagcacaaacaggactgataaggagagttgccctctcaggtcagaacttgtctattaactgaaattagcatggctagttgatgagctgcaccatctaccttgaatcaagcatgacagcccttcttcaatgcttcttgctacatggcctcataaagttgaaaaatgatgtttctggacaggcagcttccactgtttcaactgttaaaacatcacatggggtttctatagta

SEQ ID NO: 709181 - DNA, 2613 bp, Homo sapiens
tgaggtgatgttgtgtatctcagtccctggggatggagcttttggggtagttggtaatactaataaattcagagctatatttagttccggtctttaatgttctctacagctctctacagctcacatgactgtctccctgtccatggctgtgttacggctcactagaaggcagcttttccaaacttatcaaatgggtcatgtccagctcatctctgtaagaatggaaagcctcctgagaatgtgctctatgaccttccactcacccctagattaggatatgtgggatgcccataagcccccaaatccaaaatactctactcttgcagagtaaaaaccaaacaaacaaacaaacaaacaaaaaaaaacaccagctgggcgcagtggctcacacctgtaatcccagcactttgggaggctgaggcaggtgggtcacgaggtcaggagttcgagagcagcctggccaatatggtgaaaccccgtctctactaaggatacaaaaattagctgggcgtggtggtgcacacctgtagtcccagctactcgggaggctgaagcaggagaatcactttcccccgggaggtggaggttggagtgagccgagattgcgtcattgcactccagcctgggcgacagggcgagactgtctcaaaaaaaaaaaacctatattctgtagcagactggctaaccgattctgtaacagaacaattcttcctccttccaagtatccatatcctttgccaggtaactgccccacacccttgactctgggctctgtgacggggctttgtccagaagcatgagaacgcacctgctcattttgttctcacgcttccatttgctgtcatgagaaggacatgcctgagacagcccgccattcatgacagcatagatttttctatttattacaaccacttcctggcagatggcaacaaagtttctaattttctcaaaggtgggttagcagatgtcctaataccattcttccccacatcccagtattgacttcacttcctgtgtatttctcaaagcagtcccccttctctgcttgcatggtttgtctttttaatccctgtctagcagcaaggtttgtgctttctttttttctttttctttttttgagatggaatctcactctatcgcccaggctggagtgcaatggcgcaatctcggctcactacaacctccgcttcccaggttcaagtgattctcctgcctcagcctactgagtagctgggattacaggcatgtgccaccatgcttggctgttttttgtatttttagttgagacagggtttcgccaagttgaccaggctggtctcgaactcctgacctcaagtgatccgcctgcctcagtctcccaaagtgctgggattacaggtgtgaaaaactgcacccagtgctttgtgctttataaatatgttctgaatgaatgaaggaagcatcagcaatagagacattagcagaaaatagtaagataagaatatgagaaaatattaaatatgtttttgttgttgttttagaaagtgtctgactctgtcacccaggctggagtgcagtggcacgatcttggttcactgcaacctccacctcccaggttcaagcgattctcatgcctcaccctcccaaatagccgggattacaagcacgtgccaccacaccagggtaattttttgtttttgtttttgagacggagtttcgctctgttgcccaggctggagtgcagtggcgcgatctcagctcactgcaacctccgcctcccgggttcaagcgattttcctgcctcagtctcccgagtagctaggactacaggcgcgtgccaccacgcccagctaattttttatatttttagtagacatagggtttcaccatgttggccaggctggtctcaaattcctgacctcaagtgatccgcccaccttgccctcccaaagtgctaggattacaggcatgagccaccacacctggcctaaatatgtttttaaatttgggactgcctgtccatgagaaaggtagggagaagagaattcacctggcaccccaaggcagtagcaaggggagaggagagagaactagaaagaagacttacacctttggataaggagctgcaagtgggagagttaaggggagcctccaggggaagtgctgcaaagagaattctttgctgtgcaggggcctgcacgagggccttggatcggggtcctgtggggcgagggtgggctgggtggaaasgtgggtaagcaggcctgaccctgaggccagggcaggtaaagtatggttgctgctcctctgcctgcattgccagagagctgcatggttaagatgcaacattcagcaccgtcaggaagctgggctccaaagactcccagagccctttccttcccctacaccttctactcccacaggggtaaagagcaggccattctgcctcctaagcctccatggatgggggactaagtggagttgcctaggccttcccttttctgaaacaagagcatcataaagtttctacagccatccctgtccctgactgcccatagcgctcgtcctgggccatctccagtcccattctgtgcccacgttgtgcccagctcctgactctcccaggtccaggga

SEQ ID NO: 709182 - DNA, 2613 bp, Homo sapiens
tgaggtgatgttgtgtatctcagtccctggggatggagcttttggggtagttggtaatactaataaattcagagctatatttagttccggtctttaatgttctctacagctctctacagctcacatgactgtctccctgtccatggctgtgttacggctcactagaaggcagcttttccaaacttatcaaatgggtcatgtccagctcatctctgtaagaatggaaagcctcctgagaatgtgctctatgaccttccactcacccctagattaggatatgtgggatgcccataagcccccaaatccaaaatactctactcttgcagagtaaaaaccaaacaaacaaacaaacaaacaaaaaaaaacaccagctgggcgcagtggctcacacctgtaatcccagcactttgggaggctgaggcaggtgggtcacgaggtcaggagttcgagagcagcctggccaatatggtgaaaccccgtctctactaaggatacaaaaattagctgggcgtggtggtgcacacctgtagtcccagctactcgggaggctgaagcaggagaatcactttcccccgggaggtggaggttggagtgagccgagattgcgtcattgcactccagcctgggcgacagggcgagactgtctcaaaaaaaaaaaacctatattctgtagcagactggctaaccgattctgtaacagaacaattcttcctccttccaagtatccatatcctttgccaggtaactgccccacacccttgactctgggctctgtgacggggctttgtccagaagcatgagaacgcacctgctcattttgttctcacgcttccatttgctgtcatgagaaggacatgcctgagacagcccgccattcatgacagcatagatttttctatttattacaaccacttcctggcagatggcaacaaagtttctaattttctcaaaggtgggttagcagatgtcctaataccattcttccccacatcccagtattgacttcacttcctgtgtatttctcaaagcagtcccccttctctgcttgcatggtttgtctttttaatccctgtctagcagcaaggtttgtgctttctttttttctttttctttttttgagatggaatctcactctatcgcccaggctggagtgcaatggcgcaatctcggctcactacaacctccgcttcccaggttcaagtgattctcctgcctcagcctactgagtagctgggattacaggcatgtgccaccatgcttggctgttttttgtatttttagttgagacagggtttcgccaagttgaccaggctggtctcgaactcctgacctcaagtgatccgcctgcctcagtctcccaaagtgctgggattacaggtgtgaaaaactgcacccagtgctttgtgctttataaatatgttctgaatgaatgaaggaagcatcagcaatagagacattagcagaaaatagtaagataagaatatgagaaaatattaaatatgtttttgttgttgttttagaaagtgtctgactctgtcacccaggctggagtgcagtggcacgatcttggttcactgcaacctccacctcccaggttcaagcgattctcatgcctcaccctcccaaatagccgggattacaagcacgtgccaccacaccagggtaattttttgtttttgtttttgagacggagtttcgctctgttgcccaggctggagtgcagtggcgcgatctcagctcactgcaacctccgcctcccgggttcaagcgattttcctgcctcagtctcccgagtagctaggactacaggcgcgtgccaccacgcccagctaattttttatatttttagtagacatagggtttcaccatgttggccaggctggtctcaaattcctgacctcaagtgatccgcccaccttgccctcccaaagtgctaggattacaggcatgagccaccacacctggcctaaatatgtttttaaatttgggactgcctgtccatgagaaaggtagggagaagagaattcacctggcaccccaaggcagtagcaaggggagaggagagagaactagaaagaagacttacacctttggataaggagctgcaagtgggagagttaaggggagcctccaggggaagtgctgcaaagagaattctttgctgtgcaggggcctgcacgagggccttggatcggggtcctgtggggcgagggtgggctgggtggaaaggtgggtaagcaggcctgaccctgaggccagggcaggtaaagtatggttgctgctcctctgcctgcattgccagagagctgcatggttaagatgcaacattcagcaccgtcaggaagctgggctccaaagactcccmgagccctttccttcccctacaccttctactcccacaggggtaaagagcaggccattctgcctcctaagcctccatggatgggggactaagtggagttgcctaggccttcccttttctgaaacaagagcatcataaagtttctacagccatccctgtccctgactgcccatagcgctcgtcctgggccatctccagtcccattctgtgcccacgttgtgcccagctcctgactctcccaggtccaggga

SEQ ID NO: 709183 - DNA, 2613 bp, Homo sapiens
tgaggtgatgttgtgtatctcagtccctggggatggagcttttggggtagttggtaatactaataaattcagagctatatttagttccggtctttaatgttctctacagctctctacagctcacatgactgtctccctgtccatggctgtgttacggctcactagaaggcagcttttccaaacttatcaaatgggtcatgtccagctcatctctgtaagaatggaaagcctcctgagaatgtgctctatgaccttccactcacccctagattaggatatgtgggatgcccataagcccccaaatccaaaatactctactcttgcagagtaaaaaccaaacaaacaaacaaacaaacaaaaaaaaacaccagctgggcgcagtggctcacacctgtaatcccagcactttgggaggctgaggcaggtgggtcacgaggtcaggagttcgagagcagcctggccaatatggtgaaaccccgtctctactaaggatacaaaaattagctgggcgtggtggtgcacacctgtagtcccagctactcgggaggctgaagcaggagaatcactttcccccgggaggtggaggttggagtgagccgagattgcgtcattgcactccagcctgggcgacagggcgagactgtctcaaaaaaaaaaaacctatattctgtagcagactggctaaccgattctgtaacagaacaattcttcctccttccaagtatccatatcctttgccaggtaactgccccacacccttgactctgggctctgtgacggggctttgtccagaagcatgagaacgcacctgctcattttgttctcacgcttccatttgctgtcatgagaaggacatgcctgagacagcccgccattcatgacagcatagatttttctatttattacaaccacttcctggcagatggcaacaaagtttctaattttctcaaaggtgggttagcagatgtcctaataccattcttccccacatcccagtattgacttcacttcctgtgtatttctcaaagcagtcccccttctctgcttgcatggtttgtctttttaatccctgtctagcagcaaggtttgtgctttctttttttctttttctttttttgagatggaatctcactctatcgcccaggctggagtgcaatggcgcaatctcggctcactacaacctccgcttcccaggttcaagtgattctcctgcctcagcctactgagtagctgggattacaggcatgtgccaccatgcttggctgttttttgtatttttagttgagacagggtttcgccaagttgaccaggctggtctcgaactcctgacctcaagtgatccgcctgcctcagtctcccaaagtgctgggattacaggtgtgaaaaactgcacccagtgctttgtgctttataaatatgttctgaatgaatgaaggaagcatcagcaatagagacattagcagaaaatagtaagataagaatatgagaaaatattaaatatgtttttgttgttgttttagaaagtgtctgactctgtcacccaggctggagtgcagtggcacgatcttggttcactgcaacctccacctcccaggttcaagcgattctcatgcctcaccctcccaaatagccgggattacaagcacgtgccaccacaccagggtaattttttgtttttgtttttgagacggagtttcgctctgttgcccaggctggagtgcagtggcgcgatctcagctcactgcaacctccgcctcccgggttcaagcgattttcctgcctcagtctcccgagtagctaggactacaggcgcgtgccaccacgcccagctaattttttatatttttagtagacatagggtttcaccatgttggccaggctggtctcaaattcctgacctcaagtgatccgcccaccttgccctcccaaagtgctaggattacaggcatgagccaccacacctggcctaaatatgtttttaaatttgggactgcctgtccatgagaaaggtagggagaagagaattcacctggcaccccaaggcagtagcaaggggagaggagagagaactagaaagaagacttacacctttggataaggagctgcaagtgggagagttaaggggagcctccaggggaagtgctgcaaagagaattctttgctgtgcaggggcctgcacgagggccttggatcggggtcctgtggggcgagggtgggctgggtggaaaggtgggtaagcaggcctgaccctgaggccagggcaggtaaagtatggttgctgctcctctgcctgcattgccagagagctgcatggttaagatgcaacattcagcaccgtcaggaagctgggctccaaagactcccagagccctttccttcccctacaccttctactcccacaggggtaaagagcaggccattctgcctcctaagcctccatggatgggggactaagtggagttgcctaggccttcccttttctgaaacaagagcatcataaagtttctacagccatccctgtccctgactgcccatagcsctcgtcctgggccatctccagtcccattctgtgcccacgttgtgcccagctcctgactctcccaggtccaggga

SEQ ID NO: 709184 - DNA, 2613 bp, Homo sapiens
tgaggtgatgttgtgtatctcagtccctggggatggagcttttggggtagttggtaatactaataaattcagagctatatttagttccggtctttaatgttctctacagctctctacagctcacatgactgtctccctgtccatggctgtgttacggctcactagaaggcagcttttccaaacttatcaaatgggtcatgtccagctcatctctgtaagaatggaaagcctcctgagaatgtgctctatgaccttccactcacccctagattaggatatgtgggatgcccataagcccccaaatccaaaatactctactcttgcagagtaaaaaccaaacaaacaaacaaacaaacaaaaaaaaacaccagctgggcgcagtggctcacacctgtaatcccagcactttgggaggctgaggcaggtgggtcacgaggtcaggagttcgagagcagcctggccaatatggtgaaaccccgtctctactaaggatacaaaaattagctgggcgtggtggtgcacacctgtagtcccagctactcgggaggctgaagcaggagaatcactttcccccgggaggtggaggttggagtgagccgagattgcgtcattgcactccagcctgggcgacagggcgagactgtctcaaaaaaaaaaaacctatattctgtagcagactggctaaccgattctgtaacagaacaattcttcctccttccaagtatccatatcctttgccaggtaactgccccacacccttgactctgggctctgtgacggggctttgtccagaagcatgagaacgcacctgctcattttgttctcacgcttccatttgctgtcatgagaaggacatgcctgagacagcccgccattcatgacagcatagatttttctatttattacaaccacttcctggcagatggcaacaaagtttctaattttctcaaaggtgggttagcagatgtcctaataccattcttccccacatcccagtattgacttcacttcctgtgtatttctcaaagcagtcccccttctctgcttgcatggtttgtctttttaatccctgtctagcagcaaggtttgtgctttctttttttctttttctttttttgagatggaatctcactctatcgcccaggctggagtgcaatggcgcaatctcggctcactacaacctccgcttcccaggttcaagtgattctcctgcctcagcctactgagtagctgggattacaggcatgtgccaccatgcttggctgttttttgtatttttagttgagacagggtttcgccaagttgaccaggctggtctcgaactcctgacctcaagtgatccgcctgcctcagtctcccaaagtgctgggattacaggtgtgaaaaactgcacccagtgctttgtgctttataaatatgttctgaatgaatgaaggaagcatcagcaatagagacattagcagaaaatagtaagataagaatatgagaaaatattaaatatgtttttgttgttgttttagaaagtgtctgactctgtcacccaggctggagtgcagtggcacgatcttggttcactgcaacctccacctcccaggttcaagcgattctcatgcctcaccctcccaaatagccgggattacaagcacgtgccaccacaccagggtaattttttgtttttgtttttgagacggagtttcgctctgttgcccaggctggagtgcagtggcgcgatctcagctcactgcaacctccgcctcccgggttcaagcgattttcctgcctcagtctcccgagtagctaggactacaggcgcgtgccaccacgcccagctaattttttatatttttagtagacatagggtttcaccatgttggccaggctggtctcaaattcctgacctcaagtgatccgcccaccttgccctcccaaagtgctaggattacaggcatgagccaccacacctggcctaaatatgtttttaaatttgggactgcctgtccatgagaaaggtagggagaagagaattcacctggcaccccaaggcagtagcaaggggagaggagagagaactagaaagaagacttacacctttggataaggagctgcaagtgggagagttaaggggagcctccaggggaagtgctgcaaagagaattctttgctgtgcaggggcctgcacgagggccttggatcggggtcctgtggggcgagggtgggctgggtggaaaggtgggtaagcaggcctgaccctgaggccagggcaggtaaagtatggttgctgctcctctgcctgcattgccagagagctgcatggttaagatgcaacattcagcaccgtcaggaagctgggctccaaagactcccagagccctttccttcccctacaccttctactcccacaggggtaaagagcaggccattctgcctcctaagcctccatggatgggggactaagtggagttgcctaggccttcccttttctgaaacaagagcatcataaagtttctacagccatccctgtccctgactgcccatagcgctcgtcctgggccatctccagtcccattctgtgcccacrttgtgcccagctcctgactctcccaggtccaggga

SEQ ID NO: 709185 - DNA, 659 bp, Homo sapiens
aaagaattatatacttacatataattatacattttcaaaatgtactttttatatcactagccacaaatgttacaaaatacaaaaagaggtagaataaaaaaaagtcatctctcctcgtcctctagtcacgcaattcctctcctagagacaagtatgattgcagttttcttgtgtccttaggtattctgtgcgttttggtctttacttttttccccctcacgaatggcagggtctgccacctgttactttgcaccttgctttactcactagacagtgaatcttggaggtcgttccatgtcagtaaacttatgtctgcctcattctttttaactattctttctaacaattaaatagagttctacattataattgttctatamtttaggttaaatacattttttaaaactccagattctcttttcccttgactcatcgtaaccttagaactgtagagcttatattaacagaaattctgagttaaaaagaacatcaaatttgtctatctccatgcaagagtgccacagtacttctagaatgttctgtgcccctcccctctcccctgattattttgggcatttttcttctccctcaggatcagtctctcctattttgcacctaaatgtatcacacaggccaccccagtttcactgtcagcacac

SEQ ID NO: 709186 - DNA, 659 bp, Homo sapiens
aaagaattatatacttacatataattatacattttcaaaatgtactttttatatcactagccacaaatgttacaaaatacaaaaagaggtagaataaaaaaaagtcatctctcctcgtcctctagtcacgcaattcctctcctagagacaagtatgattgcagttttcttgtgtccttaggtattctgtgcgttttggtctttacttttttccccctcacgaatggcagggtctgccacctgttactttgcaccttgctttactcactagacagtgaatcttggaggtcgttccatgtcagtaaacttatgtctgcctcattctttttaactattctttctaacaattaaatagagttctacattataattgttctatactttaggttaaatacattttttaaaactccagattctcttttcccttgactcatcgtamccttagaactgtagagcttatattaacagaaattctgagttaaaaagaacatcaaatttgtctatctccatgcaagagtgccacagtacttctagaatgttctgtgcccctcccctctcccctgattattttgggcatttttcttctccctcaggatcagtctctcctattttgcacctaaatgtatcacacaggccaccccagtttcactgtcagcacac

SEQ ID NO: 709187 - DNA, 656 bp, Homo sapiens
tatgtgttcttccatttaaaaacgtttgaacaggctgggcatggtggctcacacctgtactcccagcactttgggaggctgaggtgggcggatcacaagatcaggagatcaagaccatcctggctaacgcagtgaaaccccatctctactaaaaatacaaaaaaattagccggatgtggtggcgggcgcctgtagtcccagctactcgggaggctgaggcaggagaatggcgtgaacccaggaggcagagcttgcagtaagccgagatggcgccactgcactgcagcctgggcgacagagagagactccgtctcaaaacaaacaaamaaacagtttaaacaaatctcacctccccaaaacaattattgttgacctttgataaacaaaaggcagctctgtatgctgtatgtcttatgggcattgtattgttcagagttctccagagaaacagagccaatcgggtgtgtgtgtgtgtgtgtgtgtgtgtgtgtgtgtgtgtgtgtgtgtaaataatacagttgatccctgaacaaggcagagattaggggtactgacttcctacttagtcaaaaatctgcatgtagcttttgactttctaaaatttaactactaatagcctagtgttgaccagaagcctcactcataaccacatacgt

SEQ ID NO: 709188 - DNA, 899 bp, Homo sapiens
tttggagccaggcccgacccaggccacttcctcactgtgtgcttgaggaagtggcctcactttgctgagcctcagagttcccctctgtacaatggggctcctgatcccactgtctcagtccacgtggcccatggcaggtgctcaatggatgtttgctgaatgactgaatgtcgatcataagttacagccacgccccatgggcagcaaggctctgtagctcatcctggactccagtcacatcaacacctggcttctcccgggtggatccagtgaaccattttcttttggtttgaagccagaggtgttcctggggagatggcggaacagcacggagcacccgaacaggctgcagctggcaagagccatggagaccttgggggcagctacaaggtactgggcagggagggggtcagagggcccaggctactcctgggcctcagggtcatcttcccagccaagcagcacctctgcaggaaggaagagccatccttccaaccacccaggccaggacaaaacgctccgggtgggtcctctcactgccaccctcccgttagaaacttgcttcatgactttgctgyatcttccctcgtctgcaaaacagaaatggtcacccacatcctgcctgcaccaatggatcagagaggcccgggggtttctggaaacggctctgagctctgactctcctgtctgacctcagcctggtgtcttgcccactctggggaaaagggcacagggtttggaggctctctgggcctcaacagccccatgtttgaaatgaggatggtgcccagatattgtgcccagagttggtgtaaaggctgaaagacatgagtgaagccagctagcagagggaggcacactagaaatctgagagaaggtttgaatgtgttggctctgcc

SEQ ID NO: 709189 - DNA, 1861 bp, Homo sapiens
  misc_feature 553, 870: n = A,T,C or G
tgtcacattctgagcagccacaacctactgcatcccatgtagaagtggaagtgacctgattttttcctgcttttcaaggctgtatgtttacatttgcctccaatcattcctatgggaattccttgggagtctaacttggagattttgtttcttctgcctttgctcctgggggcttaatcacttctgtgcctctggttatctgtggcacatttgtatttgtcattagtcaaccggagactcggggtctgagtggagggtatgtccccctccagtgatggtttctgttggcttcccagggtgaggatgactcatgaccacttgcaagtggtttttgtgtctggggtttatgatcacacagtcatacacgttctaactccagactgactgttgagaaagcctctgggtaagggaattcctgggaaacacactgttttcatgcatcctctggaagatgaggcctgaagttaccagggtctctgtttgctgatgctgatgatccacattttctagcccactctgcttctctgacacctttagtcttgaggatccatgntctgtgaaggaatccaagctctcatttcgcactcaccttggccctggctctgtctccaggacctcttctactacaaaatcctaaagctctgggagctgggtgtcaacctgtgcccgaggaaatcatacagttactgtggactttccagtttgctgtcttctagtattccattgtagctcttgggtattttcccatccaccccaagatccagctggaaatcagtgaacacacttgatgggagttttcctgcatgtgctctgggcattgacagtagaagggtgttcagaatgtctgctgtgccctcatggaggaagagngctcagtgtacatgctctgggtcagtaggtgcccttgagcccagctttgggagcaatgttggatgagtgaaggaggsatccagggcaaagcaggcacgacagagtggagacggcgctgctggctctcaggggaatgggcatggagtgggtaggagatccacctaaggaggctggctggctggacgagtcaggagccccttccaagggtggacactgacaggcccccagtcttggtctcctgcatgccagaggtaccagcccatcttttttcctaaacttgatgacctagggctaggggcatgttgaatctcagcctcgcccactggcgctggacttggtacacagggtggggcaaagtgggtactggatcctgatcatccctatccctggggtgtggcttcttgctgcacagtcagcttctagttctgtagccccagctgctcctgcggtggagggagctacacatcaggctctgaccccctccaggtggggccttcgcgtgaggggagtcagcacgcatcagcagctgggcccagggagttgccccactgagcactgcgggctgacctgctcccaaccagggagatggagcttcccccttgagtcgggctgctgaaggggggtaggggatggaaacagtgcgtttgcaggagtaagggtgcagttgggtccctgcgagaaaatgtctcagttgtggcaactgattggtgacctggggggcgtttctgagcccacagtgctggcatcaggactcaggtgtgaggtgccccagaccctccccttgccagtaattagctgatggctcggtgatgcccagggtgaaggaagacttgattttgggaggggagttctctcgtaatgacactgaggatgccttcaagttgggcttctggcatgttctgccctcgctccccttctgtagtcaccttggccctcgtgttgctgagctgtgtgtgggagcgggaagcgcgtcagtgggcggagggagcgg

SEQ ID NO: 709190 - DNA, 1861 bp, Homo sapiens
  misc_feature 553, 870: n = A,T,C or G
tgtcacattctgagcagccacaacctactgcatcccatgtagaagtggaagtgacctgattttttcctgcttttcaaggctgtatgtttacatttgcctccaatcattcctatgggaattccttgggagtctaacttggagattttgtttcttctgcctttgctcctgggggcttaatcacttctgtgcctctggttatctgtggcacatttgtatttgtcattagtcaaccggagactcggggtctgagtggagggtatgtccccctccagtgatggtttctgttggcttcccagggtgaggatgactcatgaccacttgcaagtggtttttgtgtctggggtttatgatcacacagtcatacacgttctaactccagactgactgttgagaaagcctctgggtaagggaattcctgggaaacacactgttttcatgcatcctctggaagatgaggcctgaagttaccagggtctctgtttgctgatgctgatgatccacattttctagcccactctgcttctctgacacctttagtcttgaggatccatgntctgtgaaggaatccaagctctcatttcgcactcaccttggccctggctctgtctccaggacctcttctactacaaaatcctaaagctctgggagctgggtgtcaacctgtgcccgaggaaatcatacagttactgtggactttccagtttgctgtcttctagtattccattgtagctcttgggtattttcccatccaccccaagatccagctggaaatcagtgaacacacttgatgggagttttcctgcatgtgctctgggcattgacagtagaagggtgttcagaatgtctgctgtgccctcatggaggaagagngctcagtgtacatgctctgggtcagtaggtgcccttgagcccagctttgggagcaatgttggatgagtgaaggagggatccagggcaaagcaggcacgacagagtggagacggsgctgctggctctcaggggaatgggcatggagtgggtaggagatccacctaaggaggctggctggctggacgagtcaggagccccttccaagggtggacactgacaggcccccagtcttggtctcctgcatgccagaggtaccagcccatcttttttcctaaacttgatgacctagggctaggggcatgttgaatctcagcctcgcccactggcgctggacttggtacacagggtggggcaaagtgggtactggatcctgatcatccctatccctggggtgtggcttcttgctgcacagtcagcttctagttctgtagccccagctgctcctgcggtggagggagctacacatcaggctctgaccccctccaggtggggccttcgcgtgaggggagtcagcacgcatcagcagctgggcccagggagttgccccactgagcactgcgggctgacctgctcccaaccagggagatggagcttcccccttgagtcgggctgctgaaggggggtaggggatggaaacagtgcgtttgcaggagtaagggtgcagttgggtccctgcgagaaaatgtctcagttgtggcaactgattggtgacctggggggcgtttctgagcccacagtgctggcatcaggactcaggtgtgaggtgccccagaccctccccttgccagtaattagctgatggctcggtgatgcccagggtgaaggaagacttgattttgggaggggagttctctcgtaatgacactgaggatgccttcaagttgggcttctggcatgttctgccctcgctccccttctgtagtcaccttggccctcgtgttgctgagctgtgtgtgggagcgggaagcgcgtcagtgggcggagggagcgg

SEQ ID NO: 709191 - DNA, 1861 bp, Homo sapiens
  misc_feature 553, 870: n = A,T,C or G
tgtcacattctgagcagccacaacctactgcatcccatgtagaagtggaagtgacctgattttttcctgcttttcaaggctgtatgtttacatttgcctccaatcattcctatgggaattccttgggagtctaacttggagattttgtttcttctgcctttgctcctgggggcttaatcacttctgtgcctctggttatctgtggcacatttgtatttgtcattagtcaaccggagactcggggtctgagtggagggtatgtccccctccagtgatggtttctgttggcttcccagggtgaggatgactcatgaccacttgcaagtggtttttgtgtctggggtttatgatcacacagtcatacacgttctaactccagactgactgttgagaaagcctctgggtaagggaattcctgggaaacacactgttttcatgcatcctctggaagatgaggcctgaagttaccagggtctctgtttgctgatgctgatgatccacattttctagcccactctgcttctctgacacctttagtcttgaggatccatgntctgtgaaggaatccaagctctcatttcgcactcaccttggccctggctctgtctccaggacctcttctactacaaaatcctaaagctctgggagctgggtgtcaacctgtgcccgaggaaatcatacagttactgtggactttccagtttgctgtcttctagtattccattgtagctcttgggtattttcccatccaccccaagatccagctggaaatcagtgaacacacttgatgggagttttcctgcatgtgctctgggcattgacagtagaagggtgttcagaatgtctgctgtgccctcatggaggaagagngctcagtgtacatgctctgggtcagtaggtgcccttgagcccagctttgggagcaatgttggatgagtgaaggagggatccagggcaaagcaggcacgacagagtggagacggcgctgctggstctcaggggaatgggcatggagtgggtaggagatccacctaaggaggctggctggctggacgagtcaggagccccttccaagggtggacactgacaggcccccagtcttggtctcctgcatgccagaggtaccagcccatcttttttcctaaacttgatgacctagggctaggggcatgttgaatctcagcctcgcccactggcgctggacttggtacacagggtggggcaaagtgggtactggatcctgatcatccctatccctggggtgtggcttcttgctgcacagtcagcttctagttctgtagccccagctgctcctgcggtggagggagctacacatcaggctctgaccccctccaggtggggccttcgcgtgaggggagtcagcacgcatcagcagctgggcccagggagttgccccactgagcactgcgggctgacctgctcccaaccagggagatggagcttcccccttgagtcgggctgctgaaggggggtaggggatggaaacagtgcgtttgcaggagtaagggtgcagttgggtccctgcgagaaaatgtctcagttgtggcaactgattggtgacctggggggcgtttctgagcccacagtgctggcatcaggactcaggtgtgaggtgccccagaccctccccttgccagtaattagctgatggctcggtgatgcccagggtgaaggaagacttgattttgggaggggagttctctcgtaatgacactgaggatgccttcaagttgggcttctggcatgttctgccctcgctccccttctgtagtcaccttggccctcgtgttgctgagctgtgtgtgggagcgggaagcgcgtcagtgggcggagggagcgg

SEQ ID NO: 709192 - DNA, 612 bp, Homo sapiens
tgggcactagggcagtccaggagtagtcatgagcaaggagagggttaggatgaaggagcagctgaccagggaccaagggggaaccttgatgtggcccttccccatcagcgccaggcaggaggggctctgtccagggaaacccaggaggatggcggacccctgtgagtatccagtcttccttggcgaggtgagccaggtctgcagagcatagcaatcccgtatgtgaccaccaagtggcgctctctggagcctgcgttggagagcagggaaagctctccttgtgcctggcctccctcccaggagctagcctgggccagactcagactgcatagagagctgagctgtgcaggctaggagaagtccttggaagcagaggggaagggctggccgctgaagaagggtggagtgagctggtaatgggtggaaaaggcgtagtggagcagaagcctgaagcctgctttctcccctctcagggacttacagtttgagatgccatgactgtgcggtcataaatgacttcaactgtcccaacattagagtatgtccgtatcatattaggcgctgtatgacaatctccattcgtaagtacctcttkgtcatttggacacattg

SEQ ID NO: 709193 - DNA, 612 bp, Homo sapiens
tgggcactagggcagtccaggagtagtcatgagcaaggagagggttaggatgaaggagcagctgaccagggaccaagggggaaccttgatgtggcccttccccatcagcgccaggcaggaggggctctgtccagggaaacccaggaggatggcggacccctgtgagtatccagtcttccttggcgaggtgagccaggtctgcagagcatagcaatcccgtatgtgaccaccaagtggcgctctctggagcctgcgttggagagcagggaaagctctccttgtgcctggcctccctcccaggagctagcctgggccagactcagactgcatagagagctgagctgtgcaggctaggagaagtccttggaagcagaggggaagggctggccgctgaagaagggtggagtgagctggtaatgggtggaaaaggcgtagtggagcagaagcctgaagcctgctttctcccctctcagggacttacagtttgagatgccatgactgtgcggtcataaatgacttcaactgtcccaacattagagtatgtccgtatcatattaggcgctgtatgacaatctccattcgtaagtacctcttggtcatttkgacacattg

SEQ ID NO: 709194 - DNA, 431 bp, Homo sapiens
aatgacttctgcctttacagtaagaaaccagaaaaagagcaaataaaatccagtaagcagaagaaaggaaacaaagatcagaacagaaattaatataatcaggaaaagagagagagagagaatcattgtaaccagaagtttgaggaaaatcaaatcaattggtaaacctctagccagacagatcagaaaaaaacacgaaagacacaaaccagtctcagaaatgacaggtagcatcattaccaacattaaaaggataagggcatgttaaaaggataagggtatcaatagaatcaacaccttagatgaaatatataaaaaatttgagctctttctcagtgaccagggcctgtgcttaggcatagacgggcaagtggagccaacatgccagcggcccagagctgggtttgtygccaaacttatgtgaccctgca

SEQ ID NO: 709195 - DNA, 1813 bp, Homo sapiens
tcattctgttgaaaaaaagagatgttttcctttcccccataattttccctttgttcactctcttcaggccacattttccatgtggttgtttatcagtatgtgctatggtctgaatgtgtcccccagaaagcaggtgttggaatttaatccccaatgcaacagtgttgggagagaagcctaatgggaggtttggatcatgagggcttggctctcaagaatggattaacgctgattataaaggtggtttgccagattccagcccctcaatcttgaacttcccagcctccagaaccatgagtccgtcaatttctgttcattttaaattacctagttcaagatattctgttataagcatcacaaaatggactaaaacagcctttaagtatgcagtttcagaatacgctataccagtggtcttcaaatgttgacagctacgcctcacctccagagtttctgttttagtaggtctgatgtggcagattaaaatgaccaactatcccacgtttcctgggactatcaagttttagcactaaaagtcttttctctctccagcctcccctctttttttttttggatacagagtcttattctgttgcccaacctgaagtgtagtgacatgattatggctcactgcaagcttcaaactcttggactcaagggaacctctcagctcagcctcccaagtagctgggactacaggtgcacaccacaatgcctggctatttttttaaaaaaaawtttgtagagataggggtcttgctattttgctcaggctggggctggtgctgagctcctaggctcaagcaatcttcctgccttggtctcccaaagtgctgggattatacatgtgtgccaccttgcccagcttttttatctcaagaaactcttcagtctcaggtaagccagtctagttgttcacccaaggtacagcataagaatttgcatttttaacaagttcccaaatgatacatatactgctgatccaggggccacatattgagaactactgctctatacctatggttctcatccttggctgtccattagaattatttgaggagtgtaaaaacaatatttattctgatctaactgatctcaggtgcagccaggtaattgtcctttttaaaagcttctcaggtgattctagagtacagccaaatttaagaaccactgctctagatccatgaagctaatcactgaacactttgactctgtcctgttaacatcctgtaattgcatcgtcttgtcatctttactgcccttgctctgattcaagacatcgtttcctgcttgcacggttgcactgatcacatgactgacttccctcccttcaagtttctcacaccatctctacttcatgctttccgcagctgctggaggaatcttactaacataaaaacttgattatattactcccttgctgaggatctgatggactttcttgtattaacgtaattcatgttatctgctctaaaaagcaattgccaaatcccagccacttaccacaacagagatttctttggcatgccatagtccaatggctgttctcctgaacaattcttcttccagaactgtggtgacagcaattctcccattctgtagcttcatgatccctagggcttccttggagtcctcccttgcatcacttctatttagttaactgagagatgaatggacagaatgtggagcatgacacaggatatttagaggctgggctctgaggtcatatacatcacttctgcacatattccgttggcagaaaaaaaccttgtggccccagctagatgccaggtgatctggagaatgtcttgtt

SEQ ID NO: 709196 - DNA, 617 bp, Homo sapiens
gaaatgtttgctatgattacggtaagatggaagaggaaagtatcttgaggcttaaaagctgtgtaattccattcgtaggaaccagtatggcttactaaatacagtgttgtcatttcctgtgaaagagagagcgagagataggatgggggtggggatagktgatattagagagtgagagagagggttaccaggtttgtagttcagggaagtgccttagtcataatgtatctggactatatcaaggacttcaataatgtttttcaccacgttattgtgtttaagggctggatctaaaataattagatgaagtagaaaccagttgattagttgtactcaaagactgtttaacagatttttgccaagcaggagaaatgttacttggtaaactaacatgaaaatgacttgggaattttaattttactggctagatagttccctgtcactagatttttttcagggggttcttaagttgaagtctatgagtatcattcatggggcctttgaacttggatgagagggggattacatttgtatttccaataaatacatccttattaatgataatgtagcattttcttcactcatgagtttattatactcattacttcaaaatccga

SEQ ID NO: 709197 - DNA, 617 bp, Homo sapiens
gaaatgtttgctatgattacggtaagatggaagaggaaagtatcttgaggcttaaaagctgtgtaattccattcgtaggaaccagtatggcttactaaatacagtgttgtcatttcctgtgaaagagagagcgagagataggatgggggtggggatagtkgatattagagagtgagagagagggttaccaggtttgtagttcagggaagtgccttagtcataatgtatctggactatatcaaggacttcaataatgtttttcaccacgttattgtgtttaagggctggatctaaaataattagatgaagtagaaaccagttgattagttgtactcaaagactgtttaacagatttttgccaagcaggagaaatgttacttggtaaactaacatgaaaatgacttgggaattttaattttactggctagatagttccctgtcactagatttttttcagggggttcttaagttgaagtctatgagtatcattcatggggcctttgaacttggatgagagggggattacatttgtatttccaataaatacatccttattaatgataatgtagcattttcttcactcatgagtttattatactcattacttcaaaatccga

SEQ ID NO: 709198 - DNA, 320 bp, Homo sapiens
gatcacartacaaggaccgcaagcaacaaaaacttcaaagtgtctaccaaggatttgcaaatttcaatgctcaagtcccattgccccagtggcattagtgagatctttatccagccagaagttcctgaacttggtatgaggtggtgagaagagaatgcgccaaatattttacacaactgatgcaaccaaattcacatgattctccttttatctccccttttcgggaagcttatcaacaagaagatattacaggacagacacgtttagacaagtaccccaaagagataagtgtcacatcataactcatctttagaggggct

SEQ ID NO: 709199 - DNA, 567 bp, Homo sapiens
tgatagttaaaggagaaatatccagcaaacaaagatatgacattgaagtttgggactgcgattagtaccagagattggattggaggtgatttgtatagaatggataggtgattttactcttgcaatttggattgagggtgggaaaccagagagggcgggggtaaattagtagaggtcaacttgaattctgtgtccatatcaatgctgaactgattgtgaacatttttacatcttgagtcacattgtaaggagaccagaagtgaattgagcatagtaagcatttggaagtaggtgagtgtttggggttctctgtctacaacttttaaattttaacaaagctccacgatactctatttaaactcttaaatattaccttgtttattaattaccaaattttagtactgacttgagcaasaggtctcttgtctgctattttgagattatatagaatattgacactaagaagaaactcaatcgtaactcctattagagaagaaaaataactcagaagcgttaaagttttgcccaatatcacagagataataggtagcatggttgggcctgaga

SEQ ID NO: 709200 - DNA, 1469 bp, Homo sapiens
ggccctgccaaactgagaggcatctttgaagtcaaattttgtagtgctcatagcacgttagcattatggtccctcaggggccccttcatcatctggtatctgggacagtctcccatttggatggcataaaaataatctaggttctttcctagggatgagagatttctacagagttaagctaagtacacaggtgatcctgtgtgcatgatgaactctttgaatgtcatgaaccaatggtacaaatggaatgcatgtaccttaaatcatttctttaaaaaagaaatacgggacagaaggagaataaaatgctatgtagcaactaaaatcttttggactatgtttaaataatatgtaaaattaggaaattagctacagtgagtcttttttaaaaaaagttggaattacagggtttaggatttttttcttgccctcttcttccatgtttgaacttaatagagagttttaatatccttccccttattaaaataaaccattaaagtaggcaaggttaagcaagttcacatttcaaacatctccgattgctggcgatttgtcactagaaagctgtggtagtcaccttggaatctgcatacctttttttgtgtttatgagaataatctgtcttctgctctctcacccaaatccttcttaaaggactggggctctgctgtagaaactcatgtcagcataatatgccatgtacctctataatgattttttttcagcattttgttgagccagcttcagaaacagcagtgagtatgtgtgtaaatgatttgctttaaaaagcagatgtagattaatgcattggtttagtaattttttcccaactctttccttttccctttatctttttctcccccttcagttctctgggataatcccaatgagaaatctgaaagaaggtagaagaatttgtttgttttctgtactttacgtcaatgattcccaaacttggagagcatcaagaaatcctgaatgcctgctgtcacccccaaagattgtgatctaattgtttgggggtgtggtttgggctttggcatttaaaaaatatctttaagtgattctaatatacagacaagtttgctttctgctttctatatatgaatagctgaaaattgaactatcaaaggcaagtctaaatatcacacgtgtatttgatttttataaatctgttgtgccccttcctactttatgccaagtctcatttcctctgtataagaacatgctataaaagtaatcaatctctgacccacgaatttttccctttcttttggaatgaataatggatgaacattaattatctctagcgttttgktttgtttttttattttctactttttaaaaaaattggcttcaaaattttaggaaattttgcatcaagactataaaacaaagtcatgtggctcgtagggaaatcaacagagctcctgtttcagaaacttgattagcactggaaattgaacttt

SEQ ID NO: 709201 - DNA, 1469 bp, Homo sapiens
ggccctgccaaactgagaggcatctttgaagtcaaattttgtagtgctcatagcacgttagcattatggtccctcaggggccccttcatcatctggtatctgggacagtctcccatttggatggcataaaaataatctaggttctttcctagggatgagagatttctacagagttaagctaagtacacaggtgatcctgtgtgcatgatgaactctttgaatgtcatgaaccaatggtacaaatggaatgcatgtaccttaaatcatttctttaaaaaagaaatacgggacagaaggagaataaaatgctatgtagcaactaaaatcttttggactatgtttaaataatatgtaaaattaggaaattagctacagtgagtcttttttaaaaaaagttggaattacagggtttaggatttttttcttgccctcttcttccatgtttgaacttaatagagagttttaatatccttccccttattaaaataaaccattaaagtaggcaaggttaagcaagttcacatttcaaacatctccgattgctggcgatttgtcactagaaagctgtggtagtcaccttggaatctgcatacctttttttgtgtttatgagaataatctgtcttctgctctctcacccaaatccttcttaaaggactggggctctgctgtagaaactcatgtcagcataatatgccatgtacctctataatgattttttttcagcattttgttgagccagcttcagaaacagcagtgagtatgtgtgtaaatgatttgctttaaaaagcagatgtagattaatgcattggtttagtaattttttcccaactctttccttttccctttatctttttctcccccttcagttctctgggataatcccaatgagaaatctgaaagaaggtagaagaatttgtttgttttctgtactttacgtcaatgattcccaaacttggagagcatcaagaaatcctgaatgcctgctgtcacccccaaagattgtgatctaattgtttgggggtgtggtttgggctttggcatttaaaaaatatctttaagtgattctaatatacagacaagtttgctttctgctttctatatatgaatagctgaaaattgaactatcaaaggcaagtctaaatatcacacgtgtatttgatttttataaatctgttgtgccccttcctactttatgccaagtctcatttcctctgtataagaacatgctataaaagtaatcaatctctgacccacgaatttttccctttcttttggaatgaataatggatgaacattaattatctctagcgttttgttttgkttttttattttctactttttaaaaaaattggcttcaaaattttaggaaattttgcatcaagactataaaacaaagtcatgtggctcgtagggaaatcaacagagctcctgtttcagaaacttgattagcactggaaattgaacttt

SEQ ID NO: 709202 - DNA, 943 bp, Homo sapiens
cagcaggagatgctcagaactcacccaaggcagaaccccagggaagagcaggtgcggagaggaaccagccagggaacctctgaccaccatctagggttgccttcttttccttcacagcatggagccctcaggagaccacccactaggttgtctgtaactcacgtccttcttgtcttgaagcaaaacagacataaatatgaatttgcagttagccccttgaacctgggtcaattttttctgagaatgccaacttaatcgtcaacatcatgggcattatatcaaaatcgagatggatatttagtcaccaggaagacagtttgtctcatggtagaagtgcttattcaattaaaaattacattttaatgaaaaggtctctaagtgaggactgttcaaataataaagtattagtgaagtatsagaaaaataaatggcaccattatctttggtatccagttaatctataaagcatatcaatattcatgttgtaagtggcctaggacaagttatggcagtatttaggctataaggagacattgctttccttcttagataggaatgtccttttttatcatactttaagttctggggtacatgtgcagaatgtgcatgtttgttacataggtatacaagtgccatggtggtttgctgcactcatcaacccgtcatcgacattaggtattactcctaatgctatccctcccctagccccccaccccccaacaggccccagtgtgtgatgttcccctccctgtgtccatgtgttctcattcttcaactcccacttatgagtgagaacatgcagtgtttggttttctgttcctgtgttagtttgctgagaatgatggtttccagcttcatcaatgtccctgcaaaggacatgaacaggaaattccttctaaatgaactgtgttttgacaaatattatccagtgactcttcctaca

SEQ ID NO: 709203 - DNA, 943 bp, Homo sapiens
cagcaggagatgctcagaactcacccaaggcagaaccccagggaagagcaggtgcggagaggaaccagccagggaacctctgaccaccatctagggttgccttcttttccttcacagcatggagccctcaggagaccacccactaggttgtctgtaactcacgtccttcttgtcttgaagcaaaacagacataaatatgaatttgcagttagccccttgaacctgggtcaattttttctgagaatgccaacttaatcgtcaacatcatgggcattatatcaaaatcgagatggatatttagtcaccaggaagacagtttgtctcatggtagaagtgcttattcaattaaaaattacattttaatgaaaaggtctctaagtgaggactgttcaaataataaagtattagtgaagtatcagaaaartaaatggcaccattatctttggtatccagttaatctataaagcatatcaatattcatgttgtaagtggcctaggacaagttatggcagtatttaggctataaggagacattgctttccttcttagataggaatgtccttttttatcatactttaagttctggggtacatgtgcagaatgtgcatgtttgttacataggtatacaagtgccatggtggtttgctgcactcatcaacccgtcatcgacattaggtattactcctaatgctatccctcccctagccccccaccccccaacaggccccagtgtgtgatgttcccctccctgtgtccatgtgttctcattcttcaactcccacttatgagtgagaacatgcagtgtttggttttctgttcctgtgttagtttgctgagaatgatggtttccagcttcatcaatgtccctgcaaaggacatgaacaggaaattccttctaaatgaactgtgttttgacaaatattatccagtgactcttcctaca

SEQ ID NO: 709204 - DNA, 943 bp, Homo sapiens
cagcaggagatgctcagaactcacccaaggcagaaccccagggaagagcaggtgcggagaggaaccagccagggaacctctgaccaccatctagggttgccttcttttccttcacagcatggagccctcaggagaccacccactaggttgtctgtaactcacgtccttcttgtcttgaagcaaaacagacataaatatgaatttgcagttagccccttgaacctgggtcaattttttctgagaatgccaacttaatcgtcaacatcatgggcattatatcaaaatcgagatggatatttagtcaccaggaagacagtttgtctcatggtagaagtgcttattcaattaaaaattacattttaatgaaaaggtctctaagtgaggactgttcaaataataaagtattagtgaagtatcagaaaaataaatggcaccattatctttggtatccagttaatctataaagcatatcaatattcatgttgtaagtggcctaggacaagttatggcagtatttaggctataaggagacaktgctttccttcttagataggaatgtccttttttatcatactttaagttctggggtacatgtgcagaatgtgcatgtttgttacataggtatacaagtgccatggtggtttgctgcactcatcaacccgtcatcgacattaggtattactcctaatgctatccctcccctagccccccaccccccaacaggccccagtgtgtgatgttcccctccctgtgtccatgtgttctcattcttcaactcccacttatgagtgagaacatgcagtgtttggttttctgttcctgtgttagtttgctgagaatgatggtttccagcttcatcaatgtccctgcaaaggacatgaacaggaaattccttctaaatgaactgtgttttgacaaatattatccagtgactcttcctaca

SEQ ID NO: 709205 - DNA, 653 bp, Homo sapiens
aaatatttaagaaaaaaaatagttgggttatggtggtgggcgcctgtaatcccagctactcaggaggctgaggcaggagaatagcttgatcccagggggcgtaggttgtagtgagctgagatcacaccactgcactgcagcctgggtgacagagcaagactccgtctcaaaaaaaaaaaaagagtaaaaaaatatcagcccaagatgggtggacaacaaccaggcctacaaaaaaggagaagactccttataagaataagcaaatcataatgaaaattaggaggaaaacaaggagagtgaggtgaaaggcatggggcaggggattagacaagggtcctgttccaatgtcttgtgtggagacttttcactatctaaaatcatccacctattctgaatgtcttaggtgaactgtctgctccaaaacatcagaaccaccagaggatttttgaggatactcagtttaatatcttatatttgaggtgccttacaactgtgtaaaatgcttagttattatcagtrtaattagagatagggcctcactgtgtcacacaggttggggttcagtggcacaatcatagctcactgttaccttgaacttctggcccacataatccttctgtctcagcctcctgagtagcatggactagagaggt

SEQ ID NO: 709206 - DNA, 1347 bp, Homo sapiens
ttcaacagcagagtgttctcctgatgtttcctccaatagtgataatttcatggttgaagatcacaaamtactattaaaagatgacataaaaaggcaaccttaaacttttggtgatggagtgagtataataaaaaattactttcaatattgtgtaacacacgcctgcagtaggaggaaggtgagcaatgagggtaaaatttctaaacgtatgaatcttccagctccccagtcatagggcagtaactgatgagtcctgagagagggaacgtaatgccgtagtgcttgtgggataactcttggccaagagagtttccatattttattaaagtggttataatttttaaatttaaagatgccattttttcaacatatccagaatattgtgagcgggattgattctgtatgatacgagcaatggcgatgccttctgtttggataatattacaaaccaggttaagactgagtggtgtaacgatgcaccagaacattattctagcttccatactagattttgtttttctctttgtttgcattagtttcaaatttatatgtaaggtctctagaatgtaggagtttatttgaaagtgtcttttcttgttggccattttgatggggcttccaggagatttaaaaacctcctctgcctgcagcacagtttaaaattctgcgttacagtagaacatctgtatttaatcctggtctttggttgattgacaagctctaatacatgcaataacttctgccttctgggctggttttacatcaggtagaggaatatatactaagtgaaaatttgcactagtaatatatattattaataaccaccacttgtattatttaagtgttattaatcaagaattaatgttaaatcaagggtctcaatggcaatattacctaagggatatacaagatattttgctaatctaggtaaaatagatgtgaacacactcttagtatccagccatgtctcctgtctatcacattattaaccacacagtaaattcacttgggacttgttctaattatctaattagtcacttacttatctcaaagcctctggattattatgtgtgactattttagcagagagtgaagaaagacaacccaggctgaccaaacaatgaggaaaatcacaacctgatgaaaccagaaacctggatgtgagtggctccaggattgaataatttgacagctcatgtgcccaggctgtttcttgtctcagttttccacactgatacatccagaaaggcagcttcaccccccagaggactcccatcatgctgtgacatggtgacaacattcccaaagctcacacacatatgttaaatattggctggaaaaggggca

SEQ ID NO: 709207 - DNA, 1347 bp, Homo sapiens
ttcaacagcagagtgttctcctgatgtttcctccaatagtgataatttcatggttgaagatcacaaactactattaaaagatgacataaaaaggcaaccttaaacttttggtgatggagtgagtataataaaaaattactttcaatattgtgtaacacacgcctgcagtaggaggaaggtgagcaatgagggtaaaatttctaaacgtatgaatcttccagctccccagtcatagggcagtaactgatgagtcctgagagagggaacgtaatgccgtagtgcttgtgggataactcttggccaagagagtttccatattttattaaagtggttataatttttaaatttaaagatgccattttttcaacatatccagaatattgtgagcgggattgattctgtatgatacgagcaatggcgatgccttctgtttggwtaatattacaaaccaggttaagactgagtggtgtaacgatgcaccagaacattattctagcttccatactagattttgtttttctctttgtttgcattagtttcaaatttatatgtaaggtctctagaatgtaggagtttatttgaaagtgtcttttcttgttggccattttgatggggcttccaggagatttaaaaacctcctctgcctgcagcacagtttaaaattctgcgttacagtagaacatctgtatttaatcctggtctttggttgattgacaagctctaatacatgcaataacttctgccttctgggctggttttacatcaggtagaggaatatatactaagtgaaaatttgcactagtaatatatattattaataaccaccacttgtattatttaagtgttattaatcaagaattaatgttaaatcaagggtctcaatggcaatattacctaagggatatacaagatattttgctaatctaggtaaaatagatgtgaacacactcttagtatccagccatgtctcctgtctatcacattattaaccacacagtaaattcacttgggacttgttctaattatctaattagtcacttacttatctcaaagcctctggattattatgtgtgactattttagcagagagtgaagaaagacaacccaggctgaccaaacaatgaggaaaatcacaacctgatgaaaccagaaacctggatgtgagtggctccaggattgaataatttgacagctcatgtgcccaggctgtttcttgtctcagttttccacactgatacatccagaaaggcagcttcaccccccagaggactcccatcatgctgtgacatggtgacaacattcccaaagctcacacacatatgttaaatattggctggaaaaggggca

SEQ ID NO: 709208 - DNA, 1974 bp, Homo sapiens
tcgtggctaaaattgtaaattttatgtcatgtgtatctcaacacaatagaaatgagcaccacattttgtttagtgactcaacaacaataacatttaggtttaaattctggattccccaacagaaccagtgcttcctgctggagctggatccatcagcccccagggaagggatggagtgggtcaggtgcacaggtcatgaagggagcacaaattctaacccactcctcaagagtccagtcaccacctccagatctatgtccaaaaacagctcttcgtatggctgagtgacattagcaacaagcacacagccatgtttgtttttttgttttgttttggtgtgtgtgtgtgtgtttttgatagagtcttgtgtcacccaggctggagtgcagtggggcaatcaatcttggctcactacgagctccacctcctgggttcaagtgattctccagcctcagcctccaagtagcttggactgcaggcactcaccaccacacctggctaatttttgtatttttagtagagacagggtttcactatgttggccaggctggtcttgaactcctgaccttctgatccacccgactcggcctccaaaagtgctgggattacaggtataagccactgtgcccagccacaaacaagtatttttaagcaaaagacacagtgaagagacttcagtatgagcccacacacaaaccttcctgtgggagtttacagaacagcagtgggtgctgaggacagaagccagcacccaggaaccagcagggaaacccagggggcatttggcaccgcctgaaggctcaggaccattgtggggctcagtggtcaggcaggctcaaggttcagcctcagagcaggtgtagcaggcggsgaaaggctctgaagacggagtttagtgtcaccttctcatttccactactaaacaccctccagcacatctattctaatgtgtatgggtgttcatgtgtttagagaatattatttatgttatgaatctatagccatcttgtgggtgcatcaagttaacctcttcaacctatgtggaccctgttcattaggaataagtccctgtatttgaggacctcacaaattaataattatgtagaatcactttctttttcagtctcctttccttcctctttctttctttctcactcacacactgacaaacacacggggtgccataacattaattacctgatgtattaaagaatattgattcatttgcaacttgaccagtttagctgttgttcatgttgttgtaagatcaggaacatgtttctcagctgtgtactcctctaagctgagcagcagctttatttgaaatacacagaaactgaaaacaatccaaatattaatcagcaccttcataagtaaacaaattgtggaaaagtcgtttattgggatagtacccactactacaatcagtaaatgttggatacgatcaacagcatggttcaattcacaagtacatatgatgagtatagtgagccaaagcacatacatatgattccgttttataaactgtacaaagtgaatactcattggaaattacataacaaagatcactaactgacttctccatagtaagagaagcgaaggtataggagggagaaattgtgagagacaaagagaaaattgagaggcgaattgatttgttttctctgtgaatggtcattaggtcaatgtttgtcaaatggtgaacatattgtgtgaagattatatgtctgtattacttcattaaagctattataaataaaagtctaatgtggtagaaaaagatgaagagagaaataaaaataatacaagaaaagtcatgaactcctgaatgaattaacccttagtttttctctattacttataaaaacaccaagatacagccaaataatatcacgatatcattataagaagagtgttttgtaaacctcactgggaatttatagctctttcctagagttaattttgggaacagtt

SEQ ID NO: 709209 - DNA, 1974 bp, Homo sapiens
tcgtggctaaaattgtaaattttatgtcatgtgtatctcaacacaatagaaatgagcaccacattttgtttagtgactcaacaacaataacatttaggtttaaattctggattccccaacagaaccagtgcttcctgctggagctggatccatcagcccccagggaagggatggagtgggtcaggtgcacaggtcatgaagggagcacaaattctaacccactcctcaagagtccagtcaccacctccagatctatgtccaaaaacagctcttcgtatggctgagtgacattagcaacaagcacacagccatgtttgtttttttgttttgttttggtgtgtgtgtgtgtgtttttgatagagtcttgtgtcacccaggctggagtgcagtggggcaatcaatcttggctcactacgagctccacctcctgggttcaagtgattctccagcctcagcctccaagtagcttggactgcaggcactcaccaccacacctggctaatttttgtatttttagtagagacagggtttcactatgttggccaggctggtcttgaactcctgaccttctgatccacccgactcggcctccaaaagtgctgggattacaggtataagccactgtgcccagccacaaacaagtatttttaagcaaaagacacagtgaagagacttcagtatgagcccacacacaaaccttcctgtgggagtttacagaacagcagtgggtgctgaggacagaagccagcacccaggaaccagcagggaaacccagggggcatttggcaccgcctgaaggctcaggaccattgtggggctcagtggtcaggcaggctcaaggttcagcctcagagcaggtgtagcaggcggcgaaaggctctgaagacggagtttagtgtcaccttctcatttccactactaaacaccctccagcacatctattctaatgtgtatgggtgttcatgtgtttagagaatattatttatgttatgaatctatagccatcttgtgggtgcatcaagttaaccwcttcaacctatgtggaccctgttcattaggaataagtccctgtatttgaggacctcacaaattaataattatgtagaatcactttctttttcagtctcctttccttcctctttctttctttctcactcacacactgacaaacacacggggtgccataacattaattacctgatgtattaaagaatattgattcatttgcaacttgaccagtttagctgttgttcatgttgttgtaagatcaggaacatgtttctcagctgtgtactcctctaagctgagcagcagctttatttgaaatacacagaaactgaaaacaatccaaatattaatcagcaccttcataagtaaacaaattgtggaaaagtcgtttattgggatagtacccactactacaatcagtaaatgttggatacgatcaacagcatggttcaattcacaagtacatatgatgagtatagtgagccaaagcacatacatatgattccgttttataaactgtacaaagtgaatactcattggaaattacataacaaagatcactaactgacttctccatagtaagagaagcgaaggtataggagggagaaattgtgagagacaaagagaaaattgagaggcgaattgatttgttttctctgtgaatggtcattaggtcaatgtttgtcaaatggtgaacatattgtgtgaagattatatgtctgtattacttcattaaagctattataaataaaagtctaatgtggtagaaaaagatgaagagagaaataaaaataatacaagaaaagtcatgaactcctgaatgaattaacccttagtttttctctattacttataaaaacaccaagatacagccaaataatatcacgatatcattataagaagagtgttttgtaaacctcactgggaatttatagctctttcctagagttaattttgggaacagtt

SEQ ID NO: 709210 - DNA, 1302 bp, Homo sapiens
tgtcttcccactgatgtcttcagcttcctcttttctgcccttcccagcaggatgaggcttttattcctgaagaaagagagaggaggtgggagatgaggctgttattcctgagagaatgaacagggctttggagcttttctttcttctatcccagtttctatgagttcctccagtaccagtaacacaaaggtgttactggctttgcccctgcatgttaattctytagcaatgtagtggtgacagtggaggtgggtctggatgcatttcagctgcagttgctgtttttctttccagcacagaaccaacttgggagctacagggcaagagctttttgtaatgtgtcctcaatcctgggagaaaagttttcaatagcaataggaatctctcagttgtatgttctctgagaatttaaacaataacttatttattatactcaattttaaacaatgtaataaatatgtctaatttaatcttgcattagcttatgtgacatttgctggccattgccccagataaggccattttctcttcctgtttatccctgcaagtgactgacttttgcaagatgtaaggtttcttgtttgccctataacatcaataatctgaaatattaaagaaaatgtgctaatttgcagatcagtaaggttagttgtttctgtaaaaatatatatgtttttttgagatggagtcttgctctgtcaccatgctggagtgcagtcgtgtgaacttggctcactgcaacctccgcccccttggttcaagcgattctcctgcatcagcctccatagtagctgggactacaggagtcttggcctccaaaagtgctgggatttctggcataagccatcacacccagccaaaaataatatattttaaggggtgcatacatctccaggctgagtaggagctttatttgtagtactcagtaactggaattaacacaactattaaggagcattataaataaatagtaagggtgcactcattaactggaatactgttcctcattagaatcaacacatcctttagttcatgtcctttgcagggacatggatgaagctggaaaccatcatagtcagaaaactatcacagggacaggaaaccaaacaccgcatgttctcactcataagtgggatcttaacagtgagaacacatggacacagggaggggaatgtcacacaccagggcctgtcggggtggggagcaaggggagggacagcattaggagaaatacctaatgtagatgacaggttgatgagtgcagcaaaccagcatggcacatgtatatctatgtaacaaacc

SEQ ID NO: 709211 - DNA, 2736 bp, Homo sapiens
gaatatagaaaaataatggcataattttatgtcactaaaaaagtttatcgaactccaccagtcatgtggtattagttcattttcacactggtataaagaactacctgcgactgggtagtttacaaggaaaagagatttagttggctcaccgttcttcatggctggggaggccacaggaaacttacaatcatggtggaaggtgaaggggaaacaaggcacatctcccagggcagcaggagagagagagaggggggaagtgacacatacttttaaacaatcagtggttgttagaactcactcactaccatgagaacaacatggggaaactggacccatgatccaatcacctctcacctggtccctcccctgacatgtggggattacaatttgagatgatactttgatggggatacgaaatcaatctatatcacatgtccagctctgtcctggagttgtttcagggatccagggtgtccggctgatagaaccagtgacaccaagctcacaccctcagctgtagttgacaccacgcaaagccaagagattacaactaagatttagtttgaatgtcgtgtctgatgaagtcacacactcagagaaagtgaatatggaaaagtttattatttgcactctataggtgtctggtgagtgcagggcaggtctcccaggaaaatctgaaacagcttgaaagaagaggaaaggagactggctcagcatttttatgatggtttggtcctgggggcagagtgaggcttcccactcacagaaaggggtttgcagggtttgaaactccccctggcatcgaatgaagaagctcctgtgatttcaaactagagccaccttgtgtggcaaaaaaggagatgatggaggaatatgctttaaatcatcagcagtcacgcacccaaaaatagtgtgacaacttattctatgcagcaggaataaaaataattaataagaaagaagataagggttcagtgtgggtggacaacacgcaggtctacagaaatgagatgactttagaaatataagcaaaggataatgaaaaaaaggaggggaaggggaattaaacagggtcctggtctgatgtcttgggtagaagcttctcacaatcaaggactaccagctcattctgcaggtcttaggtcagccatctgcttaaaaacatcagaaacgccagagaatctatgaacatggtcagtttaacatttcctatttgagtagctttacagttgtgtggaattcttaactggttcttgttttttcttttagatacaggctctcaccctgtcacacagtttaaagtgcagtggtgtgatcatagctcgctgtaattttgaactcctgactcatattcttcccatcttagcctcttgaatatctagaactagaggggcatgccactcatcccctccttattttttattttattttttcatataaataaggtctctttgtgttgcccaggctggttttgattgcctggtctcatgggatttccctcacttcccttctgaaagtggtgtgattatacagatgatccagtgcatctggcctgaattkattctttaattgtaaaatacgaacccaataattaacttcctgaatgttttctgcagtgagttagttaaaaggatctgacaagattccttccaatatgattcaagagcagtattgtccactgatgttccttccagtttccttgttgaagatcacaagagtctgtggaaaagaggtagtaaaaaggccgcctcaaactcttcgtggttggagtgggtaccacacatgcaagcagtaggacaaggatgatctctggggtaaagtctataaacatataggccttttagctgccaagtcatagggtaataactgatgcagcctgaggagtggaccatggtttcatagtgctagtgggagaacccttggccaagcaagttttacattttattacattttattaaagatttgataattttaatgtaaagatgacattttttaaacattcccagaagattgtgagtggtattgattctgtctcgtatgaacaatgacagtgccctccacggttagattatgttataaactagaatgaggtagagtgtttggtgtgttaaatcactatttttttagcttctatgttagttttttgtttgtgtgttagcatttgctttaaaattctattaatcagatctctagttggtagaaattcatctgaaagtttcttccattgttgtccattttgataggatttccagaagatgtaagaaccctctctgtttgcaaaaatattccaaagttgtgcaccatctagaaacatagttacttaattctaatttttaatttattaaaaagttgtgataagtgcaaagttttctgccttctgaattgatttcataacacacagaataatatatactaaatggaagtttgtactagtaatacaaattactgattaataacctctacttttattattgaggtattatccatcaatatataatcttaaatcaatgatctcagtgggaatcttacctaagtaatatacaaaatattttcctgatctcgacacaaaatagatgtgaacacattcttcatattcagccatgtctcctgtctatcacattatgaaccacatgctaactttgatttacttgggacttgctctaaattcaaactagttatcttttatcttcacgcagctggattattatgtgtggctattttatcagagtgataaga

SEQ ID NO: 709212 - DNA, 2736 bp, Homo sapiens
gaatatagaaaaataatggcataattttatgtcactaaaaaagtttatcgaactccaccagtcatgtggtattagttcattttcacactggtataaagaactacctgcgactgggtagtttacaaggaaaagagatttagttggctcaccgttcttcatggctggggaggccacaggaaacttacaatcatggtggaaggtgaaggggaaacaaggcacatctcccagggcagcaggagagagagagaggggggaagtgacacatacttttaaacaatcagtggttgttagaactcactcactaccatgagaacaacatggggaaactggacccatgatccaatcacctctcacctggtccctcccctgacatgtggggattacaatttgagatgatactttgatggggatacgaaatcaatctatatcacatgtccagctctgtcctggagttgtttcagggatccagggtgtccggctgatagaaccagtgacaccaagctcacaccctcagctgtagttgacaccacgcaaagccaagagattacaactaagatttagtttgaatgtcgtgtctgatgaagtcacacactcagagaaagtgaatatggaaaagtttattatttgcactctataggtgtctggtgagtgcagggcaggtctcccaggaaaatctgaaacagcttgaaagaagaggaaaggagactggctcagcatttttatgatggtttggtcctgggggcagagtgaggcttcccactcacagaaaggggtttgcagggtttgaaactccccctggcatcgaatgaagaagctcctgtgatttcaaactagagccaccttgtgtggcaaaaaaggagatgatggaggaatatgctttaaatcatcagcagtcacgcacccaaaaatagtgtgacaacttattctatgcagcaggaataaaaataattaataagaaagaagataagggttcagtgtgggtggacaacacgcaggtctacagaaatgagatgactttagaaatataagcaaaggataatgaaaaaaaggaggggaaggggaattaaacagggtcctggtctgatgtcttgggtagaagcttctcacaatcaaggactaccagctcattctgcaggtcttaggtcagccatctgcttaaaaacatcagaaacgccagagaatctatgaacatggtcagtttaacatttcctatttgagtagctttacagttgtgtggaattcttaactggttcttgttttttcttttagatacaggctctcaccctgtcacacagtttaaagtgcagtggtgtgatcatagctcgctgtaattttgaactcctgactcatattcttcccatcttagcctcttgaatatctagaactagaggggcatgccactcatcccctccttattttttattttattttttcatataaataaggtctctttgtgttgcccaggctggttttgattgcctggtctcatgggatttccctcacttcccttctgaaagtggtgtgattatacagatgatccagtgcatctggcctgaattgattctttaattgtaaaatacgaacccaataattaactkcctgaatgttttctgcagtgagttagttaaaaggatctgacaagattccttccaatatgattcaagagcagtattgtccactgatgttccttccagtttccttgttgaagatcacaagagtctgtggaaaagaggtagtaaaaaggccgcctcaaactcttcgtggttggagtgggtaccacacatgcaagcagtaggacaaggatgatctctggggtaaagtctataaacatataggccttttagctgccaagtcatagggtaataactgatgcagcctgaggagtggaccatggtttcatagtgctagtgggagaacccttggccaagcaagttttacattttattacattttattaaagatttgataattttaatgtaaagatgacattttttaaacattcccagaagattgtgagtggtattgattctgtctcgtatgaacaatgacagtgccctccacggttagattatgttataaactagaatgaggtagagtgtttggtgtgttaaatcactatttttttagcttctatgttagttttttgtttgtgtgttagcatttgctttaaaattctattaatcagatctctagttggtagaaattcatctgaaagtttcttccattgttgtccattttgataggatttccagaagatgtaagaaccctctctgtttgcaaaaatattccaaagttgtgcaccatctagaaacatagttacttaattctaatttttaatttattaaaaagttgtgataagtgcaaagttttctgccttctgaattgatttcataacacacagaataatatatactaaatggaagtttgtactagtaatacaaattactgattaataacctctacttttattattgaggtattatccatcaatatataatcttaaatcaatgatctcagtgggaatcttacctaagtaatatacaaaatattttcctgatctcgacacaaaatagatgtgaacacattcttcatattcagccatgtctcctgtctatcacattatgaaccacatgctaactttgatttacttgggacttgctctaaattcaaactagttatcttttatcttcacgcagctggattattatgtgtggctattttatcagagtgataaga

SEQ ID NO: 709213 - DNA, 1650 bp, Homo sapiens
attttggagaatttctttctgtctgatattcaggtgtgacaagctgtagagggtcacaccactttcctgtgagatgtaggggatgacaatttggggggatggctggaaacatccaatatcctcagggtcggccatcagtaagcgcaggctggaagtctcagaacgagttgaagttgcttaaccacggaattttaccttctccagatcagctttgatggaatcagggccaaactggttatcaatgataatctacctaacattgagtcaactgatcacagttttaataacctctattaaaaattcacaccaacacttggattagtgtctgatcaaataactacaaagtattttccagccaagtataccataaaacagaccattacccatggagaaaaacatttaacatgagttctaggtccttacattgttaaaggtgtaaaactgattatttttaaattatgctttttatttttgctattgagttgtagaagtttcatttacattttggatattaacgcttttttcagatacatgatatattatccaattctgtgagttggaattatttcattgctttgcagaatatttttttaatctagtccaacttgttcaattctgcttttttttaaatgtgctttgaatgtaaaatccagaaaaagattgctaatttttgaggattgggagttttacagttgcaggaatttcattgaaatatttaatgcatttaaagttaatttttgtgtttattctaacctaaaattcttaattcttcacatgtgaaaatccagttttcataacatgctctttggaagacaccataatttagccattgtatgttgatggttctcatgctgaaaatcagttcgccatcaaaatgtgggtttatatctaagctctctatatgcatttatgctgawaccattcggatttattactctgtgtttgtaacaaatgttgaggactggaagtgaaatgcctcaagctttattcttgccttattacagatattagacccaaatattctaaccttctactagtgagtataataatagctgtcgctttttttttttttttttgattcagagtttcactcttgttgtgtaggctggagtgcagtggtgtgatctcagctcaccgcaacctctgcctcccgggttcaagcgattctcctgcctcggcctcccgagtagctgggattacaggcatgcaccaccacacccggctaattttgtattttcagtaaagatggggtttctccatgttggtcaggctggtcgcgaactccagacctcaggtgatcctcccgcctcagcctcccaaagtgctgggattacaagcatgagccactgcacccagcctcttcattttttttttattcatatgttcattcagcagccactatgtcttcccattgatttctttggtttcctctttactatctttttctttttagtaaagctgttactcctaagggaagatgggaggtgggcctggacagggatttggtgcattcctctcttcactcacagttcttattgatctctccagtgtctctagaacactggttttcctggcattaccgctgcagataatttctcttgcaatgtagtgctgatgaggaggtgtgtctggatgcatttcagctatagt

SEQ ID NO: 709214 - DNA, 1650 bp, Homo sapiens
attttggagaatttctttctgtctgatattcaggtgtgacaagctgtagagggtcacaccactttcctgtgagatgtaggggatgacaatttggggggatggctggaaacatccaatatcctcagggtcggccatcagtaagcgcaggctggaagtctcagaacgagttgaagttgcttaaccacggaattttaccttctccagatcagctttgatggaatcagggccaaactggttatcaatgataatctacctaacattgagtcaactgatcacagttttaataacctctattaaaaattcacaccaacacttggattagtgtctgatcaaataactacaaagtattttccagccaagtataccataaaacagaccattacccatggagaaaaacatttaacatgagttctaggtccttacattgttaaaggtgtaaaactgattatttttaaattatgctttttatttttgctattgagttgtagaagtttcatttacattttggatattaacgcttttttcagatacatgatatattatccaattctgtgagttggaattatttcattgctttgcagaatatttttttaatctagtccaacttgttcaattctgcttttttttaaatgtgctttgaatgtaaaatccagaaaaagattgctaatttttgaggattgggagttttacagttgcaggaatttcattgaaatatttaatgcatttaaagttaatttttgtgtttattctaacctaaaattcttaattcttcacatgtgaaaatccagttttcataacatgctctttggaagacaccataatttagccattgtatgttgatggttctcatgctgaaaatcagttcgccatcaaaatgtgggtttatatctaagctctctatatgcatttatgctgaaaccattcggatttattactctgtgtttgtaacaaatgttgaggactggaagtgaaatgcctcaagctttattcttgccttattrcagatattagacccaaatattctaaccttctactagtgagtataataatagctgtcgctttttttttttttttttgattcagagtttcactcttgttgtgtaggctggagtgcagtggtgtgatctcagctcaccgcaacctctgcctcccgggttcaagcgattctcctgcctcggcctcccgagtagctgggattacaggcatgcaccaccacacccggctaattttgtattttcagtaaagatggggtttctccatgttggtcaggctggtcgcgaactccagacctcaggtgatcctcccgcctcagcctcccaaagtgctgggattacaagcatgagccactgcacccagcctcttcattttttttttattcatatgttcattcagcagccactatgtcttcccattgatttctttggtttcctctttactatctttttctttttagtaaagctgttactcctaagggaagatgggaggtgggcctggacagggatttggtgcattcctctcttcactcacagttcttattgatctctccagtgtctctagaacactggttttcctggcattaccgctgcagataatttctcttgcaatgtagtgctgatgaggaggtgtgtctggatgcatttcagctatagt

SEQ ID NO: 709215 - DNA, 1650 bp, Homo sapiens
attttggagaatttctttctgtctgatattcaggtgtgacaagctgtagagggtcacaccactttcctgtgagatgtaggggatgacaatttggggggatggctggaaacatccaatatcctcagggtcggccatcagtaagcgcaggctggaagtctcagaacgagttgaagttgcttaaccacggaattttaccttctccagatcagctttgatggaatcagggccaaactggttatcaatgataatctacctaacattgagtcaactgatcacagttttaataacctctattaaaaattcacaccaacacttggattagtgtctgatcaaataactacaaagtattttccagccaagtataccataaaacagaccattacccatggagaaaaacatttaacatgagttctaggtccttacattgttaaaggtgtaaaactgattatttttaaattatgctttttatttttgctattgagttgtagaagtttcatttacattttggatattaacgcttttttcagatacatgatatattatccaattctgtgagttggaattatttcattgctttgcagaatatttttttaatctagtccaacttgttcaattctgcttttttttaaatgtgctttgaatgtaaaatccagaaaaagattgctaatttttgaggattgggagttttacagttgcaggaatttcattgaaatatttaatgcatttaaagttaatttttgtgtttattctaacctaaaattcttaattcttcacatgtgaaaatccagttttcataacatgctctttggaagacaccataatttagccattgtatgttgatggttctcatgctgaaaatcagttcgccatcaaaatgtgggtttatatctaagctctctatatgcatttatgctgaaaccattcggatttattactctgtgtttgtaacaaatgttgaggactggaagtgaaatgcctcaagctttattcttgccttattacagatattagaccmaaatattctaaccttctactagtgagtataataatagctgtcgctttttttttttttttttgattcagagtttcactcttgttgtgtaggctggagtgcagtggtgtgatctcagctcaccgcaacctctgcctcccgggttcaagcgattctcctgcctcggcctcccgagtagctgggattacaggcatgcaccaccacacccggctaattttgtattttcagtaaagatggggtttctccatgttggtcaggctggtcgcgaactccagacctcaggtgatcctcccgcctcagcctcccaaagtgctgggattacaagcatgagccactgcacccagcctcttcattttttttttattcatatgttcattcagcagccactatgtcttcccattgatttctttggtttcctctttactatctttttctttttagtaaagctgttactcctaagggaagatgggaggtgggcctggacagggatttggtgcattcctctcttcactcacagttcttattgatctctccagtgtctctagaacactggttttcctggcattaccgctgcagataatttctcttgcaatgtagtgctgatgaggaggtgtgtctggatgcatttcagctatagt

SEQ ID NO: 709216 - DNA, 649 bp, Homo sapiens
tagaattaccatttgacccagtaacccctcctggtgggtatgtttctcccaaaaggaaacttctatataagaaaaagtcacctgcattcctatttttattgcaacactattttcaatagaaaagtcaagtaatctctctaagtgtcaatcagtggatgattaaataaaatatgatagatgtaaatcatggaatactatgcagccataaaaaatgaaattgtgtctttcacagcaacatgaatagagttgaaggacatttcctaaataaaataactcaaattctcttttataattggaaagcamacaatgggtacacatgtacatagagaaaaacaatagacactgggtactgcaaaagaaggcaaggtgagaggaaagtgagggttaaaaaatcagctattggctccaatgttcactatggggtaacagttacatcagaagcacaaacctcacctttatgaaatatattcatgttacaactctgcacatgtgcaccctgattctatgaaaataaaaacagaaaacatgaacagaattgttagactgctagctagattgaccaacaaacaagaaaaatgcaaaagtagcaattctttgttttgtaaccctttctcattttctggtaccataagaaattgtagactatcgt

SEQ ID NO: 709217 - DNA, 1628 bp, Homo sapiens
ctgttgggacaaggtcttttaaacaagccctggggctttgtcacaaatgttgcattttatcctttattaggacttaactaattgacaatgagtaccagctggatggaaactgaccactgaccatcttctgctgtctccttattatatcacagaaaaccacagcaacattactctatgtcttcaactttctaaatttgtactgaatctattgctaaatgaggagctacatggggtctgagttttgttaycttcttcccagtcttccccaattaccaagcatagaagatactttcagtgaaatttagctgtcaatgcccccaacaccacatcatgttttaaggtccaaggactttctttggggggctattgaaaaacacttttgaatggaaaatcctaaagcatacaacagctgaaagaatggcccctgtgcacatgaaggctgaagggatggatgatagggtacgttcctccaaggtgttcctgggcatgtgatggttggatacctcatgcatacgaaaacaaggactgaactgagatagaaacaagggccatatcctataggaaaacaagaaaaaaacgggcatccctgaagagagttaattagacttggtgggtttaagatgaatttttttccaaagttttttaatgttctaagctaaatatgaatattttcaataaactgcaaattaaaaggagaatgaatttagaagtttagacagaaaaaagccatgagggtgtagaaagcaaatccacacaaaactgtcacatggcagaggccagaatggagctgatgcagctatatcattattctgcagacctagttgagaccctttggtgtttaaggcaggtccagcagtgaagaactcctttattttttgtctgggaaagttctaatctaatcttcatttctgaaaaggatttacatgataaagattcgtcttggcaggttttatttatttttagtcccctccaacccacgtcaatttgagtaaagtcatgtgttacgtaacaatgctgcagtcaacagtagaccacatatatgtttgtggccacataatgttgtaataccatattttcactaaactttttccatgttttgatgtgtttagatagagagatacttaccatggtgtttccatttcctgcagtgttcagtgcagtaacacgctgtacaggttagttgtctgggaaccctgcgctaatccacataccctgtgtgtagtagggtattccttgtaggtttgtgaaaattcacccttgatgcttgcacaatgatgaaattgcccagggacacatttctcaaaaagaacctctgtcaataaaccacacaccattgaatacaatccctgtgccttctgaactgaaaaccttctgctgagaaatctgttccttttctttctgttttctaaagcctcttttatttccagcaatgtggttttaaactgtgtcacattttttgtcattgggtttatcttacgtaaaatttatagagcttcttcattgtggatgaatatttgcttcccttctccaaatttggaaatattttttgctattattttgaataatttatctcttctctctctctctctctctctctctctctctctctccctctctctctctctctc

SEQ ID NO: 709218 - DNA, 1628 bp, Homo sapiens
ctgttgggacaaggtcttttaaacaagccctggggctttgtcacaaatgttgcattttatcctttattaggacttaactaattgacaatgagtaccagctggatggaaactgaccactgaccatcttctgctgtctccttattatatcacagaaaaccacagcaacattactctatgtcttcaactttctaaatttgtactgaatctattgctaaatgaggagctacatggggtctgagttttgttaccttcttcccagtcttccccaattaccaagcayagaagatactttcagtgaaatttagctgtcaatgcccccaacaccacatcatgttttaaggtccaaggactttctttggggggctattgaaaaacacttttgaatggaaaatcctaaagcatacaacagctgaaagaatggcccctgtgcacatgaaggctgaagggatggatgatagggtacgttcctccaaggtgttcctgggcatgtgatggttggatacctcatgcatacgaaaacaaggactgaactgagatagaaacaagggccatatcctataggaaaacaagaaaaaaacgggcatccctgaagagagttaattagacttggtgggtttaagatgaatttttttccaaagttttttaatgttctaagctaaatatgaatattttcaataaactgcaaattaaaaggagaatgaatttagaagtttagacagaaaaaagccatgagggtgtagaaagcaaatccacacaaaactgtcacatggcagaggccagaatggagctgatgcagctatatcattattctgcagacctagttgagaccctttggtgtttaaggcaggtccagcagtgaagaactcctttattttttgtctgggaaagttctaatctaatcttcatttctgaaaaggatttacatgataaagattcgtcttggcaggttttatttatttttagtcccctccaacccacgtcaatttgagtaaagtcatgtgttacgtaacaatgctgcagtcaacagtagaccacatatatgtttgtggccacataatgttgtaataccatattttcactaaactttttccatgttttgatgtgtttagatagagagatacttaccatggtgtttccatttcctgcagtgttcagtgcagtaacacgctgtacaggttagttgtctgggaaccctgcgctaatccacataccctgtgtgtagtagggtattccttgtaggtttgtgaaaattcacccttgatgcttgcacaatgatgaaattgcccagggacacatttctcaaaaagaacctctgtcaataaaccacacaccattgaatacaatccctgtgccttctgaactgaaaaccttctgctgagaaatctgttccttttctttctgttttctaaagcctcttttatttccagcaatgtggttttaaactgtgtcacattttttgtcattgggtttatcttacgtaaaatttatagagcttcttcattgtggatgaatatttgcttcccttctccaaatttggaaatattttttgctattattttgaataatttatctcttctctctctctctctctctctctctctctctctctccctctctctctctctctc

SEQ ID NO: 709219 - DNA, 1628 bp, Homo sapiens
ctgttgggacaaggtcttttaaacaagccctggggctttgtcacaaatgttgcattttatcctttattaggacttaactaattgacaatgagtaccagctggatggaaactgaccactgaccatcttctgctgtctccttattatatcacagaaaaccacagcaacattactctatgtcttcaactttctaaatttgtactgaatctattgctaaatgaggagctacatggggtctgagttttgttaccttcttcccagtcttccccaattaccaagcatagaagatactttcagtgaaatttagctgtcaatgcccccaacaccacatcatgttttaaggtccaaggactttctttggggggctattgaaaaacacttttgaatggaaaatcctaaagcatacaacagctgaaagaatggcccctgtgcacrtgaaggctgaagggatggatgatagggtacgttcctccaaggtgttcctgggcatgtgatggttggatacctcatgcatacgaaaacaaggactgaactgagatagaaacaagggccatatcctataggaaaacaagaaaaaaacgggcatccctgaagagagttaattagacttggtgggtttaagatgaatttttttccaaagttttttaatgttctaagctaaatatgaatattttcaataaactgcaaattaaaaggagaatgaatttagaagtttagacagaaaaaagccatgagggtgtagaaagcaaatccacacaaaactgtcacatggcagaggccagaatggagctgatgcagctatatcattattctgcagacctagttgagaccctttggtgtttaaggcaggtccagcagtgaagaactcctttattttttgtctgggaaagttctaatctaatcttcatttctgaaaaggatttacatgataaagattcgtcttggcaggttttatttatttttagtcccctccaacccacgtcaatttgagtaaagtcatgtgttacgtaacaatgctgcagtcaacagtagaccacatatatgtttgtggccacataatgttgtaataccatattttcactaaactttttccatgttttgatgtgtttagatagagagatacttaccatggtgtttccatttcctgcagtgttcagtgcagtaacacgctgtacaggttagttgtctgggaaccctgcgctaatccacataccctgtgtgtagtagggtattccttgtaggtttgtgaaaattcacccttgatgcttgcacaatgatgaaattgcccagggacacatttctcaaaaagaacctctgtcaataaaccacacaccattgaatacaatccctgtgccttctgaactgaaaaccttctgctgagaaatctgttccttttctttctgttttctaaagcctcttttatttccagcaatgtggttttaaactgtgtcacattttttgtcattgggtttatcttacgtaaaatttatagagcttcttcattgtggatgaatatttgcttcccttctccaaatttggaaatattttttgctattattttgaataatttatctcttctctctctctctctctctctctctctctctctctccctctctctctctctctc

SEQ ID NO: 709220 - DNA, 1628 bp, Homo sapiens
ctgttgggacaaggtcttttaaacaagccctggggctttgtcacaaatgttgcattttatcctttattaggacttaactaattgacaatgagtaccagctggatggaaactgaccactgaccatcttctgctgtctccttattatatcacagaaaaccacagcaacattactctatgtcttcaactttctaaatttgtactgaatctattgctaaatgaggagctacatggggtctgagttttgttaccttcttcccagtcttccccaattaccaagcatagaagatactttcagtgaaatttagctgtcaatgcccccaacaccacatcatgttttaaggtccaaggactttctttggggggctattgaaaaacacttttgaatggaaaatcctaaagcatacaacagctgaaagaatggcccctgtgcacatgaaggctgaagggatggatgatagggtacgttcctccaaggtgttcctgggcatgtgatggttggatacctcatgcatacgaaaacaaggactgaactgagatagaaacaagggccatatcctataggaaaacaagaaaaaaacgggcatccctgaagagagttaattagacttggtgggtttaagatgaatttttttccaaagttttttaatgttctaagctaaatatgaatattttcaataaactgcaaattaaaaggagaatgaatttagaagtttagacagaaaaaagccatgagggtgtagaaagcaaatccacacaaaactgtcacatggcagaggccagaatggagctgatgcagctatatcattattctgcagacctagttgagaccctttggtgtttaaggcaggtccagcagtgaagaactcctttattttttgtctgggaaagttctaatctaatcttcatttctgaaaaggatttacatgataaagattcgtcttggcaggttttatttatttttagtccccyccaacccacgtcaatttgagtaaagtcatgtgttacgtaacaatgctgcagtcaacagtagaccacatatatgtttgtggccacataatgttgtaataccatattttcactaaactttttccatgttttgatgtgtttagatagagagatacttaccatggtgtttccatttcctgcagtgttcagtgcagtaacacgctgtacaggttagttgtctgggaaccctgcgctaatccacataccctgtgtgtagtagggtattccttgtaggtttgtgaaaattcacccttgatgcttgcacaatgatgaaattgcccagggacacatttctcaaaaagaacctctgtcaataaaccacacaccattgaatacaatccctgtgccttctgaactgaaaaccttctgctgagaaatctgttccttttctttctgttttctaaagcctcttttatttccagcaatgtggttttaaactgtgtcacattttttgtcattgggtttatcttacgtaaaatttatagagcttcttcattgtggatgaatatttgcttcccttctccaaatttggaaatattttttgctattattttgaataatttatctcttctctctctctctctctctctctctctctctctctccctctctctctctctctc

SEQ ID NO: 709221 - DNA, 1628 bp, Homo sapiens
ctgttgggacaaggtcttttaaacaagccctggggctttgtcacaaatgttgcattttatcctttattaggacttaactaattgacaatgagtaccagctggatggaaactgaccactgaccatcttctgctgtctccttattatatcacagaaaaccacagcaacattactctatgtcttcaactttctaaatttgtactgaatctattgctaaatgaggagctacatggggtctgagttttgttaccttcttcccagtcttccccaattaccaagcatagaagatactttcagtgaaatttagctgtcaatgcccccaacaccacatcatgttttaaggtccaaggactttctttggggggctattgaaaaacacttttgaatggaaaatcctaaagcatacaacagctgaaagaatggcccctgtgcacatgaaggctgaagggatggatgatagggtacgttcctccaaggtgttcctgggcatgtgatggttggatacctcatgcatacgaaaacaaggactgaactgagatagaaacaagggccatatcctataggaaaacaagaaaaaaacgggcatccctgaagagagttaattagacttggtgggtttaagatgaatttttttccaaagttttttaatgttctaagctaaatatgaatattttcaataaactgcaaattaaaaggagaatgaatttagaagtttagacagaaaaaagccatgagggtgtagaaagcaaatccacacaaaactgtcacatggcagaggccagaatggagctgatgcagctatatcattattctgcagacctagttgagaccctttggtgtttaaggcaggtccagcagtgaagaactcctttattttttgtctgggaaagttctaatctaatcttcatttctgaaaaggatttacatgataaagattcgtcttggcaggttttatttatttttagtcccctccaacccacgtcaatttgagtaaagtcatgtgttacgtaacaatgctgcagtcaacagtagaccacatatatgtttgtggccacataatgttgtaataccatattttcactaaactttttccatgttttgatgtgtttagatagagagatrcttaccatggtgtttccatttcctgcagtgttcagtgcagtaacacgctgtacaggttagttgtctgggaaccctgcgctaatccacataccctgtgtgtagtagggtattccttgtaggtttgtgaaaattcacccttgatgcttgcacaatgatgaaattgcccagggacacatttctcaaaaagaacctctgtcaataaaccacacaccattgaatacaatccctgtgccttctgaactgaaaaccttctgctgagaaatctgttccttttctttctgttttctaaagcctcttttatttccagcaatgtggttttaaactgtgtcacattttttgtcattgggtttatcttacgtaaaatttatagagcttcttcattgtggatgaatatttgcttcccttctccaaatttggaaatattttttgctattattttgaataatttatctcttctctctctctctctctctctctctctctctctctccctctctctctctctctc

SEQ ID NO: 709222 - DNA, 652 bp, Homo sapiens
aatgtggatgaatttttgacacaaaacagtgacagcatgccagcaatgagtacagaataacatccagttgttatgttaagagatacagactccgaaaaagagacatcaggtagaggctgtcaaaggcctcactgcctaatgactgcttttccattgatactgtgtgtatatcccggaatgcacctgtgaatgaggacatcatgtctttcatagtgtgagagaaagagacattactacccatctgacaaaggattgatcagaatataccaggatctcagacaactctataggaaaaatatctagtaatccgaataaaaagcaggcgatatttatttcttaaaataagactttcaaattgcaaacaggcatataaaatgtgctgtgtaacactgatcatcagaacaatgcaaaacaaaactacagtgaaatatcatctcatctgattttaaaatgatttcatccgaaagccagacagaaacaaatgctgggaaggatatggagaaatgagaacactcataacctgttggtgggcacttaagttwataaaaccactatggagaacagtttagagtttcctccaaacctaatagtagtgttgtcatataatccagcaatcctgctgctggcatgtactccctcccacaaaaaaaaa

SEQ ID NO: 709223 - DNA, 652 bp, Homo sapiens
aatgtggatgaatttttgacacaaaacagtgacagcatgccagcaatgagtacagaataacatccagttgttatgttaagagatacagactccgaaaaagagacatcaggtagaggctgtcaaaggcctcactgcctaatgactgcttttccattgatactgtgtgtatatcccggaatgcacctgtgaatgaggacatcatgtctttcatagtgtgagagaaagagacattactacccatctgacaaaggattgatcagaatataccaggatctcagacaactctataggaaaaatatctagtaatccgaataaaaagcaggcgatatttatttcttaaaataagactttcaaattgcaaacaggcatataaaatgtgctgtgtaacactgatcatcagaacaatgcaaaacaaaactacagtgaaatatcatctcatctgattttaaaatgatttcatccgaaagccagacagaaacaaatgctgggaaggatatggagaaatgagaacactcataacctgttggtgggcacttaagtttataaaaccactatggagaacagtttagagtttcctcmaaacctaatagtagtgttgtcatataatccagcaatcctgctgctggcatgtactccctcccacaaaaaaaaa

SEQ ID NO: 709224 - DNA, 643 bp, Homo sapiens
cttcaacatccagtgacaggaaaaatctgcccaggagaatttgttctaaaaacagctttattgagatataactcgcacatcatatcattcacctctttaaactttacagttcaatggtttttagaatattcatatttaaccaaaaccaccatcartttcaggacattttcaccactctctgaaacacctgtacccattagtggtgactccccttcctcttctccctctagccctaggcaaccactaatctattttctgtctctagagatttgcctgttccagacaaatggatgattccatttcatatgaatggaaccttataatatagggtcatttctgactggcttttttcacttaacataatgttttcaagatttatccaaattgtagcatgtatcagtacctcattttttcactgccaaaaccaaaaaaattttgaaatgaactttttattttgtaatactttcaggttgcaaatataatacccatactcttcacccagtttctcctaaggttaacatcttaaatgaccatggtacatttgacaaaactaagaaatagtaccgtttaactaaactatagacattatttggatttcagttttttttaaataaaatatatttttttctgtttcaggatgtaa

SEQ ID NO: 709225 - DNA, 683 bp, Homo sapiens
agtggatataaatacatttgcaggggacatgtgtaatctataattattaaaacaaacttcaacactttgttattgttgatggaagctacggattgcaaatatatttttaaagcaactggtttggtcacatttcaaagtatgtattatagtataagaagtaaagtatatattayagtataagaagtaaggctgggaacattggctcatgcctgtaatctcagcactttgggaggccaaggcaggaggactgcttgagtccaggagtttgagaccagcctgggcaacatagtgagaccctgactctagaaaaactaaaaaataaaaaattagacaggcatggtggcacgtgcctgtagtcccagctactcaggaggctgaggtgggaggatcatttgagccctggaggttgaaactgcagtaagtcatgatggtgccactgcactccagcctgggcaacagcgtgagaccctgtctcaaaaaataaaaatacaagaagatatttttgtgttcttaaattcacacggttcacttattcgactaatggctctgcttatcgcttcagattattctacacacttttaaaacaaaagttgcctctaaatcttgcaatcataaaatcctaaagtgttgttgctaagaaaacatcttcaatattatccactccagattcttctcttgacaaa

SEQ ID NO: 709226 - DNA, 683 bp, Homo sapiens
agtggatataaatacatttgcaggggacatgtgtaatctataattattaaaacaaacttcaacactttgttattgttgatggaagctacggattgcaaatatatttttaaagcaactggtttggtcacatttcaaagtatgtattatagtataagaagtaaagtatatattatastataagaagtaaggctgggaacattggctcatgcctgtaatctcagcactttgggaggccaaggcaggaggactgcttgagtccaggagtttgagaccagcctgggcaacatagtgagaccctgactctagaaaaactaaaaaataaaaaattagacaggcatggtggcacgtgcctgtagtcccagctactcaggaggctgaggtgggaggatcatttgagccctggaggttgaaactgcagtaagtcatgatggtgccactgcactccagcctgggcaacagcgtgagaccctgtctcaaaaaataaaaatacaagaagatatttttgtgttcttaaattcacacggttcacttattcgactaatggctctgcttatcgcttcagattattctacacacttttaaaacaaaagttgcctctaaatcttgcaatcataaaatcctaaagtgttgttgctaagaaaacatcttcaatattatccactccagattcttctcttgacaaa

SEQ ID NO: 709227 - DNA, 683 bp, Homo sapiens
agtggatataaatacatttgcaggggacatgtgtaatctataattattaaaacaaacttcaacactttgttattgttgatggaagctacggattgcaaatatatttttaaagcaactggtttggtcacatttcaaagtatgtattatagtataagaagtaaagtatatattatagtataagaagtaaggctgggaacattggctcatgcctgtaatctcagcactttgggaggccaaggcaggaggactgcttgagtccaggagtttgagaccagcctgggcaacatagtgagaccctgactctagaaaaactaaaaaataaaaaattagacaggcatggtggcacgtgcctgtagtcccagctactcaggaggctgaggtgggaggatcatttgagccctggaggttgaaactgcagtaagtcatgatggtgccactgcactccagcctgggcaacagmgtgagaccctgtctcaaaaaataaaaatacaagaagatatttttgtgttcttaaattcacacggttcacttattcgactaatggctctgcttatcgcttcagattattctacacacttttaaaacaaaagttgcctctaaatcttgcaatcataaaatcctaaagtgttgttgctaagaaaacatcttcaatattatccactccagattcttctcttgacaaa

SEQ ID NO: 709228 - DNA, 1868 bp, Homo sapiens
  misc_feature 1633, 1638, 1659, 1664, 1668, 1685, 1696: n = A,T,C or G
tctccaaggcacagaccaagtctcatccacctctctctctccccactccctaaaaaggcagccatattacaggggcctctgtatgaaaccaggacaggtttgttgatatgaacaaaactacagaacaaccaaactgaacagttttctttttgcttttaatttttattttttccctatgttgctcaggctggtcttgaactcctgaccacaagcgatcctccctcctcgtcttcccaaaatgctgggattccaggcatgagccacagtactgagccagtctttttttttcccctttgcattatcatgtatagccatctttaaaactgtgattaaaaaaatgtctgaagagctcaagttgtattcttatcagttgccccctgagataattacagcttttattgctatgtcagtaacatgttgatataaacttggttttctcaatgaattttagccagttcctgaaataacatccctgaagaatattagggaaaagtaacaacacggcaaatctgctttgcttttgttgcaccacagagattgttttaggaataaacagaactttcagaaagaatccccagatatgattcagggagttaactcaaaagtgctctttaatccataaatataactaacctcatttttcaaagcattaaactaagtgtgatatgaaaagctacacacagacaaacacacaaattaagtgaaaaaaatgctaatgctagtttaggtctagaggcatacaccggcgtaagaggcaattatgttttttgctgttgccattctraccaacagactctaggggaaaaaaaggaagtgagaaaatgtttccatcccaaattgctagagaccgactcaagtatctggtgaagtgacaaaaatgtaatgggatgaatgacacctgatctttcccatcatttacctagatattcccaaggccagcgtgtgagcaagtcctccccgtgctcccccgacctcaagtagaaaggctctttctaggatgcacctccttacctcagacagcaggtgctgaatcacaactgtcaatgcctcaaacttggtattaccacaggcaagaagctgcttgagctgcaggataaatccactttggttttcacattttgttttatattgcgtcaattcaagtgttttctcagggggcagcgcatcgggagctgtctgtggctggatacataagcttcgaggattcttttgcctgctcttttcaactgcaaaacgaattaacataggtacaaagataggtgaggttaatttttaaaatcaccaccacaaggattcaaaaacaaccagataagccacagaaatccatttaagttatgttgctgtaaggaatgcatatggatgagaactggaatgaatcggagatctagatggttggaattcatgaacagggaccgtggcttcatttatgactttaaaagatttatggggaacagagaattaggaacatgacacaaatggatttggcaacccagaaacacaaaaactgggtgcaaaatgttgttctcctcgtttctcattttccagttaaattggtagagaaaccttgactgaagagaagcctgacttttctgatctcatatgctgaaaggaacacacaaatcactggactttnaattnaatgcctttctctcctcccanacatnttcnacaaatcttttaccttntccctgatganggccccgccataacacagatttatactgcagatgagtcatttcctaatctctaataaatcataacatacatcgaaaatatactcagattttgcctctttaagttcactgttaggagtactatactgttgactatactattccattttctatcgaacacaagctttgttggtc

SEQ ID NO: 709229 - DNA, 1873 bp, Homo sapiens
ctttcattacagcatccacattctgtggtagcaaatctgaaacaacttttaaagaaatttagtaattactgtctctaatttttcaggaaaaggcaagctactacagtgattgcttaaagaaacatcagyactcactttctaagaacaaatggctaaatatattgaataaactaagttaaaaacagggaaaaaaggctcttattttctatggctgcattacatggttaaataagtcatatttgtattaatacttgataattctcagttctaaaatcactaaaatatccattgtcccactgtgtctctgtaatacttgatgagaggaagtatttatccattactctttattattagcaattattagtagtagcttatgaataattgtcacttgcatagatgcagaaaatagccaagttaatatcgtaatattacagccctgaaggaagaacaaattattagttacatactaatgaaaaataatctaaatatttgaccatgagattagtattctttcatgtcatttcctaaatgtttttagaaattgtcacgtaacacataacaattccacagtgtttcactcatcacagtgtgctctcactttccctttcttttcatcctcccaataaccccagatagggaagagaaggctcacaggtgtgaatgtcttccctggatgtatacaacttctatgggaatccagattcaaagtcagaacccaggcctctgatgctaagcctcttctgttcccacacattttggaaagcggattaggtggtgatgtaatatatgacatacataaaaataaatatttatgcaacaaatgtaataatatcttgctataatacatataagcccattatctgataactcattttaacaaacctacatataaacatctatgtgttatataactttataaacaaaaatgttcaaattctttcactatctagaatttactgtaacaaatatagacacagttcattctcctgatatcatttgtatatgtcctaccgaaacttacttaaaaattcatttattgataactcctttatcatttcctgagtcctgagtaacatttgcctctctttctagaatttctatgctaatcaatgctatttttaacacaatttcagagctttaaaactgttggtttataattatttacaaaatctgagaggtgagtcttttatattaatcttttggagaaaatattcttcaagattcttgctttttgcttataaatccgtaacaaaaatatcacagaatacatgtaattgtactaacaatgtttacttttgaagggaaggtaataggaatcagacagctaaaaagtatcctgaagcattttttatactttttaaccatggggtaaatatattacctattcaaaagttaaatataagaagtaaataaaatcacttttaacagacagttaaagtgaaattcgaggacatacattttttatataatacttagctatgaaggaaatagtctatgcagaatttttccttggggaaactacacaggaatctaaacattacgcagggtttgtaagtgattactcaggatagctttatgattaaggaggaaagaacacattgatgtattcgtctaagagtacgtgtcttcaaattttaaaatgagagcaaatgagccaacagactgccctctccgtggcgctggaaactcgtgctgtgcagtcaccatcttccgctccatatactgtgctccctaaggatgaagtgtgaccgcatggcagccgatgacccagtttccacatgcttcccactctcagcactcctggctcagctgaagatcagagatgatgcaaaaatctccaatgacgctcaaaaccccaaggctcatcaatacg

SEQ ID NO: 709230 - DNA, 1015 bp, Homo sapiens
tcaatatttactttcatttctaaaattttttaaatcaaccactaagactttaacctccccctacacacgccaagaagaaatgctggctctcccctgcactggccacacctgtctttagacagcacccctttcctgctcgacggcctcctgcccccatcatgtgatcaacctctggcatcaggaaggcagtggtggctctgtgccatgaggtccctctttgtaggctgtggctatttttgggctggcagcccctctgattcctgacttggccctagataatcatgaggccgcctttagagagaaacccttcagaagccaggcaggtccctgtgggattagcaacactccactgctaacacagcaagtctcaggtcctaagtgctataaaggccctccaaggacagcgccctctaacctgatggccctcggttggccagacccaagcctgggctcccatttcaaatgggcaagtccgtggttttatggggctaacaaatcaaagctgacacagatatactactcatacatggattttagccaggaaatttcaaacaactcaatgatgggatttttttccccccttaaatgtcatgtccattcataacagtgagatttcagatgtgtgtaacagctttgggaaaaggtattgataaaaatattcaaagaaaatgttagtcacttttcaaaaaaagcacagcataccaagatgatgtagtaagttaaatattcccttgtgctatttatagacataaccatatactgtatcatttctaattggaaaaggtctaccagagatactatacacctgatcctaaaactatacattatcttctgctacgcctctaggaaacaagactataataacttgaattttaagaactacamattcaagataaatatttgattggtttttccatctcactattaaaatgaagcataagaccctcaaattaggtttaaatgttttaacagtgaagttttatgggagagtacatccaaaaatacagagaaaata

SEQ ID NO: 709231 - DNA, 897 bp, Homo sapiens
cttcgactcctacgtattttctttcatttactggtattttttttttttcttacaaacctgcaccagtagctgtgtctgaagtagacatagaattgggaaatttcattgataggcctttttcttacctaatttgcttgttttaggttgcgttgttttcatcagaatttgcatgacattttggaattcacttgtattgtttaaatgaaacaacaaaatgaaataaatatgggcttcagagtttgataactaagtttaaatccttgttcctacattgaactgtctgtgaaagcttgagcaagttacttaaattttctgcaaatgaaagtaatgtcatctactatataggattattttaaggattaaataagtgtgacaatgtatatgaagtgctcaagtagtatagtgtgtagaacttgttaaagctaattttcctcccttttgtttggacatttttttattaatgcattttgaggaatatatgaaaaagttcacttttacatactcaaaaaatatttttgttccaaatgtaggtaacaccgtgattcacttagatcaagcattagccagaatgagagaatatgagcgtatgaagactgaggctgaaagtaactcaaatatgagatgcatctgcaggattattgaggatggagatggtgctggtgcaggtactacagttaataatttagaaggtatatatttttgttttcggtaggtttttggagaacaggtggtgtttggttacatgaataagttctttagtggtgatttctgagattttggtgcacccatcgcctgagcagtatacactgtacccagtgtgtattgtttgatccctcacscccttcccaccctttcccctgaaaccccaaagtccactgtatcctgcttatgtctttg

SEQ ID NO: 709232 - DNA, 782 bp, Homo sapiens
ttttttttttttttttttgagatggattctgtctctgttgctcaggctggagtgcagtggtgacgtcttggttcactgcaaactctgcctcccaggttcaagcaattctcctgcctcagtctcctgagtagctgggactataggtgcccgccgccataccacgcctggctaattttttatttttatttttagtagagacagggtttcaccatgttggccaggctggtctcgaactcctgatctcaggtgacccgcccgccttggcctcccaaagtgctaggattacaggtgtgagccaccatgcctggccccattatacactttttaaggagctgtgtaaatgtgtttctaagagtgtcaattgaataaataaataagtcccatgttacttaacgaagcattttgttccgttccctgtgccgcatgttttacactctccaaagacacatgtgtaaaggaatttctaacaggtcaacttgtgtggatgaatcagttttatttctatgaagcactgagttcagcactcgctgcacggtrtgcattctttatgacacacgtgtaaaagatgttgctaagactgctatttgtgtgcataaaccagcataacgttgtttctgtaaacctcattgttcaggactattgctgaacgttctacacttcataacattttatgggtaaaagatgtttctaagcgtgctggttgtgtgaatgaatcaatatactgtcatatctatgaaacactattcgcagcattctgaactgtattgtataatctctgtaaa

SEQ ID NO: 709233 - DNA, 2867 bp, Homo sapiens
  misc_feature 1563: n = A,T,C or G
tgcgtattacccgggtgatgaaataatctgtacaccaaacccgtgtgacatgagtttacctatataacaaacctgcgcatataccccggaacctaaaagtttaacagatcctgaaagaaactgctacttttaatccatttattccctctcaatttgtatgctattatcttgtatcttaaacacacacacacacacacacacacacacacacacacacacacacttttatgccatatgagacagcactattgttttgtggctccatttttataaagctatgttgtcttcttcaaaaaagttaaaattcatctttacataatacagactagatctagaaattaatatacttttactctttgtacctgagcaaaacagaacactagaaataaaggacgctaaatagcataatagaaagtctgtatgtatgtgatttcacaagtaaacaattagacacatccctgaaaacactgtaactgtaagaaagcaacattttttcttctgatgtctgcccaagcccaccttccggaatccattcattaaacagctttatgtcaactttgacttcctccagttatctctgacactaatgacgaaatttttctttgacttttatcaaggtaaaattcattttaagaaatgaccactgatttgtttaagatattccagcatgggggaggagggcaaaatatacatttataaatgaataagtcttagttataactttattagcttttgactcaagtttaagtcaaaaaaagttgattttatcaacttttattaaaattgggaaataggcatgtggcatttgattatacatatctttatttttgtgtatgtttgaatttttctttaatataaactaaaaaatagtggcttttttagttttttagcttttttaaatgaaatttaattttttarttgatatgtaatagatatacctacttttagaaaaacatcaggccgggcgtggtggctcatacttgtaatctcagcacctgggaggctgaggcgggtggatcatgaggttaggagttcaagaccagcctggccaacatgatgaaaccccgtctctactaaaactacaaaaattagccaggtgtggtggtgaacacctataaccccagctactcaggaggctgaggcaggagaatcacttgaacccgagaggtggagactgcagtgagcccagattgtcccactgcactccagcctgggtgacagagagagactccgactcaaaaaaaaaaaaaaaagaaagaaagaaagaaagaaaatcagtgtattttttgcctatcacatctgcagagtatttgtcccttacttagagatctcagtaagaaatatttattacaacacataaaatgcattattcactcatcaaagttgtcagataatttgctacagtttttttccttgggtagcattaggggttccttgaggatttcaaacttgaaaaacacatgttttatggcagcaattttattcactttattattttttccaacttttccctcccttcctctcataataacgtttattgatcaggcactgtgctagctactntatgtttgtaatctgctttaatcattcctgcaaggtagcaggtatcagcacctctcatttggagagtagtacgagatgggaaaagagagcaatactctgggggaggcatatcagataacagtgtagtttgaaaaagcacgtgtaataatataataaaaacggtcacacaacatagagttgatcaaatattcactactagtaggaatatactaaagacatatttttctaccccagacattagaatctcaaggggagtgggaagtgattatttgaaaagttgatcagtttttataggtagaaggcttttgtttatttactttgcgatgtggttgtttcttgccttttctctccgaattcccttgcagtatgggctggttacactgtgttccacctgcatgatgactgtgaagcttagaagtcacagagttctgtggttgttgtttaggatcactgttatgtagtattgacatttgattattattttgtgacaagagtctcactctgttacccaggctggagtgcaatggcatgatcttggatcactacagcctccacctcctgggttcaagcgattctcctgcctcagcctcctgagtagctgggactacatgcacgtgccaccacacctggctaatttttgtatttatagtagagatcggttttcaccatgttcgccaggctggtctcgaactcctgaccacaagggatctgtccaccttggcctcccaaagtgctgggattacaggtgtgagccaccacacccagcctgctattgacattttatattctaatatatgtgttttaatttaattcagctcttataagaacctgatgagtgagatgatcttaatcccattatacatagaacaaaatggagatgctagaggtaacttgcccacatttactatccaggctactgttgtaagtttaattaagtgcttcagaactttttctgttcactcctgtgtgaaagtgtgtgtccttgggctgtatgtctcatgcagagcataatttcagaggaggcggtattcactgatgaagtcctgggcagctttgaacacagcctagagtatttaaattgtggccacacacagtgtgacatcactctagtgatcatctttgaactgaatgagaagagtgtttcctctttaccctacatgcattcattttcatgtttattagcccaggcgaaaaactttcctgaggactgactctgaaaaccgatttaatacttctttcagctgctttcctctttcagctgtggacctagaagccatgagcagctgctctccaggacgtggtgg

SEQ ID NO: 709234 - DNA, 2867 bp, Homo sapiens
  misc_feature 1563: n = A,T,C or G
tgcgtattacccgggtgatgaaataatctgtacaccaaacccgtgtgacatgagtttacctatataacaaacctgcgcatataccccggaacctaaaagtttaacagatcctgaaagaaactgctacttttaatccatttattccctctcaatttgtatgctattatcttgtatcttaaacacacacacacacacacacacacacacacacacacacacacacttttatgccatatgagacagcactattgttttgtggctccatttttataaagctatgttgtcttcttcaaaaaagttaaaattcatctttacataatacagactagatctagaaattaatatacttttactctttgtacctgagcaaaacagaacactagaaataaaggacgctaaatagcataatagaaagtctgtatgtatgtgatttcacaagtaaacaattagacacatccctgaaaacactgtaactgtaagaaagcaacattttttcttctgatgtctgcccaagcccaccttccggaatccattcattaaacagctttatgtcaactttgacttcctccagttatctctgacactaatgacgaaatttttctttgacttttatcaaggtaaaattcattttaagaaatgaccactgatttgtttaagatattccagcatgggggaggagggcaaaatatacatttataaatgaataagtcttagttataactttattagcttttgactcaagtttaagtcaaaaaaagttgattttatcaacttttattaaaattgggaaataggcatgtggcatttgattatacatatctttatttttgtgtatgtttgaatttttctttaatataaactaaaaaatagtggcttttttagttttttagcttttttaaatgaaatttaattttttaattgatatgtaatagatatacctacttttagaaaaacatcaggccgggcgtggtggctcatacytgtaatctcagcacctgggaggctgaggcgggtggatcatgaggttaggagttcaagaccagcctggccaacatgatgaaaccccgtctctactaaaactacaaaaattagccaggtgtggtggtgaacacctataaccccagctactcaggaggctgaggcaggagaatcacttgaacccgagaggtggagactgcagtgagcccagattgtcccactgcactccagcctgggtgacagagagagactccgactcaaaaaaaaaaaaaaaagaaagaaagaaagaaagaaaatcagtgtattttttgcctatcacatctgcagagtatttgtcccttacttagagatctcagtaagaaatatttattacaacacataaaatgcattattcactcatcaaagttgtcagataatttgctacagtttttttccttgggtagcattaggggttccttgaggatttcaaacttgaaaaacacatgttttatggcagcaattttattcactttattattttttccaacttttccctcccttcctctcataataacgtttattgatcaggcactgtgctagctactntatgtttgtaatctgctttaatcattcctgcaaggtagcaggtatcagcacctctcatttggagagtagtacgagatgggaaaagagagcaatactctgggggaggcatatcagataacagtgtagtttgaaaaagcacgtgtaataatataataaaaacggtcacacaacatagagttgatcaaatattcactactagtaggaatatactaaagacatatttttctaccccagacattagaatctcaaggggagtgggaagtgattatttgaaaagttgatcagtttttataggtagaaggcttttgtttatttactttgcgatgtggttgtttcttgccttttctctccgaattcccttgcagtatgggctggttacactgtgttccacctgcatgatgactgtgaagcttagaagtcacagagttctgtggttgttgtttaggatcactgttatgtagtattgacatttgattattattttgtgacaagagtctcactctgttacccaggctggagtgcaatggcatgatcttggatcactacagcctccacctcctgggttcaagcgattctcctgcctcagcctcctgagtagctgggactacatgcacgtgccaccacacctggctaatttttgtatttatagtagagatcggttttcaccatgttcgccaggctggtctcgaactcctgaccacaagggatctgtccaccttggcctcccaaagtgctgggattacaggtgtgagccaccacacccagcctgctattgacattttatattctaatatatgtgttttaatttaattcagctcttataagaacctgatgagtgagatgatcttaatcccattatacatagaacaaaatggagatgctagaggtaacttgcccacatttactatccaggctactgttgtaagtttaattaagtgcttcagaactttttctgttcactcctgtgtgaaagtgtgtgtccttgggctgtatgtctcatgcagagcataatttcagaggaggcggtattcactgatgaagtcctgggcagctttgaacacagcctagagtatttaaattgtggccacacacagtgtgacatcactctagtgatcatctttgaactgaatgagaagagtgtttcctctttaccctacatgcattcattttcatgtttattagcccaggcgaaaaactttcctgaggactgactctgaaaaccgatttaatacttctttcagctgctttcctctttcagctgtggacctagaagccatgagcagctgctctccaggacgtggtgg

SEQ ID NO: 709235 - DNA, 622 bp, Homo sapiens
tgactcaagattattaccaaaagactattttgtcttttycttctttgttttctatccttttgttatcatattagaatataaggtggctatactagccagatactccaggtcaacatgcttattcacaggcagtgatcgaaagaacatcgctggggatcagtcaaaactgcctgaaatgggtatccaagaatggtagcaggtcatttctcctaaggaaatttgtggaactattatccttaagaaagggaaatggaggtaaacagtaaaccaaggtgtacactgaaatctctttctaggagaaaagagtccacattcaaaagtcccaagcattgtctgagcaatgttatgtgacttcaataaacatttgcaactttgtatttattggattcatcggtggtcacttagcatgactgaatgacctgtccataaatatctgaaggtcattctcagatcttagaggaatattaaagtgtgaatgttttatttctaagattgggaaactgatgctccaggagagaaagtaacttgtctaaattctccagacctgtaaacacaaagccggcatgagaacccactctttcttactgtctctctgaagtacatagagataaacaaaagaaat

SEQ ID NO: 709236 - DNA, 2373 bp, Homo sapiens
  misc_feature 46: n = A,T,C or G
tatcaagcattctaatataccaggaattggaatcctagaagaagangagataaaggaaccaaatattttaattaagaaaaagagtattatgcagccagaaaaaaagaatgagttcatgtggtatgatgcagccctaaaaaagaatgagttcatgtcctttgcagtgacacggacgaggctggaagccatygttctcagccaagtaacacagaaacagaaaaccaaatgccgtatgttctcattcgtaagtgggagttgaacaatgagaacacatagacatggggaggggaacatcccaaactggagcttattgaggagtggggggcaaggtgaaggagagcattaggacaaatacctaatgaatgtggggcttaaaacctagatgacaagttgataggtgcagcaaaccaccatggcacatgtatgcctatgtaacaaacctgcatgttcagcacatgtatctcagaacttaaagtaaaattaaaaaaaaaaaaaaagtaaaagggttttacttggatttgatgaaaaaatagatccttacaggtgaaaaagcccaggaaaccctaagctaaatgaatacaaataaactgcaactatgaacattgtaggcaaacatcttggaaaagattgggtcggggggagaagaaacagagagagagagagagggaaggaatttgaaagcagccagaaaaaaaaaaaaaaaaaaagaaaagaaaccttgacacattacatacagttgatcaaataaacaaatgatggtgacattattagaagcaataatgctagggtgacgtgacaatagaagagcctcattaaagtaccaaaagaagaaacaaatctactactagctcataattctataagaagagaaaataccatccacaagtgaaggtgagggacttctgttgttgtctaaggtacagaaaactggaaaaaaagtgtaactttcatcctgataatgagaaaaataccagttaagccacaaaatcacagctttccttgaagccatcagaaagctgagttcacacagccaccaggtagctgacaggatcctctaagagacatgagatgggatcctctcagctgtggcacagcacagaagcaagaccttgccaccatacaagcagctaaaaaggaatcagataaagtagtaacaaagtggttcttaggatttgcttatttttaaaaaaagatttgcaaataataattgtatgtatttatggggtacaatgtcatgttttggtatatgtatacattatgaaatgatgaaatcaatctaattagcatatccttcatctcacctacttattattttttgtggtgagaatgtttaaagcctactttttagatcctggagcatgtgactgctgttgtgggccatgggctgctgactgtaagggatatttaacaagagagaggaagagaagatggcatttctgataaaggttgtgatacaaccacaggattaaccctccctcttgaagatcatcctgtaaatgagatgctatgtataccaacttcccaccacctttgtttttctgttcagtaatcctggtgtggataaatgaagtcttcgcgtgtatgttaaaaaaaaaaaaagtctacccttttagcagttttgaaatatacaaagccaagtgtgggtgagtgtgagagtatagaaaccctggaagcctcacattaagaaaaggattcacagccacttgctgggtcatttccatggaccatcacatggtgctcaggagacagaagaggggcaggatgggagactgaacagggcctccttttgcattgcaggcatgaagtaggagagggacaagctggacttcctgctcagaacctcttctcaaaatcattaagcctcagggggagtgcgagcatcttctatctctcctagggcatcagaaaagacccattgcttcttggaggggaaagtgtagcctagagcaaaaacattctctaccccagagagaaagaggtaagaaacagtttcatgttagaaggcttctaaggcagtgcctagagaaaataaaatagtttcaatgtttatactagaaaagtaaagatttagaatcaatgatctaaatgttcacattaacaagatatacaaataaactcgaaattagtaaaagaaaggtaacaaagttcagagcagaaatcagtaaaataaaaaatcaatagagaataaaaataaagtgaaaagtaggtccccaggaaagtgtaaaactttgataaatctctaatgaagactcatcaaaaataaaaacataaattccttatataatagagatgtaattactaaatgtcccatacatattccaagcatagtaagagaatattaacaacatgccaataaatacaacatgccaataa

SEQ ID NO: 709237 - DNA, 2373 bp, Homo sapiens
  misc_feature 46: n = A,T,C or G
tatcaagcattctaatataccaggaattggaatcctagaagaagangagataaaggaaccaaatattttaattaagaaaaagagtattatgcagccagaaaaaaagaatgagttcatgtggtatgatgcagccctaaaaaagaatgagttcatgtcctttgcagtgacacggacgaggctggaagccattrttctcagccaagtaacacagaaacagaaaaccaaatgccgtatgttctcattcgtaagtgggagttgaacaatgagaacacatagacatggggaggggaacatcccaaactggagcttattgaggagtggggggcaaggtgaaggagagcattaggacaaatacctaatgaatgtggggcttaaaacctagatgacaagttgataggtgcagcaaaccaccatggcacatgtatgcctatgtaacaaacctgcatgttcagcacatgtatctcagaacttaaagtaaaattaaaaaaaaaaaaaaagtaaaagggttttacttggatttgatgaaaaaatagatccttacaggtgaaaaagcccaggaaaccctaagctaaatgaatacaaataaactgcaactatgaacattgtaggcaaacatcttggaaaagattgggtcggggggagaagaaacagagagagagagagagggaaggaatttgaaagcagccagaaaaaaaaaaaaaaaaaaagaaaagaaaccttgacacattacatacagttgatcaaataaacaaatgatggtgacattattagaagcaataatgctagggtgacgtgacaatagaagagcctcattaaagtaccaaaagaagaaacaaatctactactagctcataattctataagaagagaaaataccatccacaagtgaaggtgagggacttctgttgttgtctaaggtacagaaaactggaaaaaaagtgtaactttcatcctgataatgagaaaaataccagttaagccacaaaatcacagctttccttgaagccatcagaaagctgagttcacacagccaccaggtagctgacaggatcctctaagagacatgagatgggatcctctcagctgtggcacagcacagaagcaagaccttgccaccatacaagcagctaaaaaggaatcagataaagtagtaacaaagtggttcttaggatttgcttatttttaaaaaaagatttgcaaataataattgtatgtatttatggggtacaatgtcatgttttggtatatgtatacattatgaaatgatgaaatcaatctaattagcatatccttcatctcacctacttattattttttgtggtgagaatgtttaaagcctactttttagatcctggagcatgtgactgctgttgtgggccatgggctgctgactgtaagggatatttaacaagagagaggaagagaagatggcatttctgataaaggttgtgatacaaccacaggattaaccctccctcttgaagatcatcctgtaaatgagatgctatgtataccaacttcccaccacctttgtttttctgttcagtaatcctggtgtggataaatgaagtcttcgcgtgtatgttaaaaaaaaaaaaagtctacccttttagcagttttgaaatatacaaagccaagtgtgggtgagtgtgagagtatagaaaccctggaagcctcacattaagaaaaggattcacagccacttgctgggtcatttccatggaccatcacatggtgctcaggagacagaagaggggcaggatgggagactgaacagggcctccttttgcattgcaggcatgaagtaggagagggacaagctggacttcctgctcagaacctcttctcaaaatcattaagcctcagggggagtgcgagcatcttctatctctcctagggcatcagaaaagacccattgcttcttggaggggaaagtgtagcctagagcaaaaacattctctaccccagagagaaagaggtaagaaacagtttcatgttagaaggcttctaaggcagtgcctagagaaaataaaatagtttcaatgtttatactagaaaagtaaagatttagaatcaatgatctaaatgttcacattaacaagatatacaaataaactcgaaattagtaaaagaaaggtaacaaagttcagagcagaaatcagtaaaataaaaaatcaatagagaataaaaataaagtgaaaagtaggtccccaggaaagtgtaaaactttgataaatctctaatgaagactcatcaaaaataaaaacataaattccttatataatagagatgtaattactaaatgtcccatacatattccaagcatagtaagagaatattaacaacatgccaataaatacaacatgccaataa

SEQ ID NO: 709238 - DNA, 2373 bp, Homo sapiens
  misc_feature 46: n = A,T,C or G
tatcaagcattctaatataccaggaattggaatcctagaagaagangagataaaggaaccaaatattttaattaagaaaaagagtattatgcagccagaaaaaaagaatgagttcatgtggtatgatgcagccctaaaaaagaatgagttcatgtcctttgcagtgacacggacgaggctggaagccattgttctcagccaagtaacacagaaacagaaaaccaaatgccgtatgttctcattcgtaagtgggagttgaacaatgagaacacatagacatggggaggggaacatcmcaaactggagcttattgaggagtggggggcaaggtgaaggagagcattaggacaaatacctaatgaatgtggggcttaaaacctagatgacaagttgataggtgcagcaaaccaccatggcacatgtatgcctatgtaacaaacctgcatgttcagcacatgtatctcagaacttaaagtaaaattaaaaaaaaaaaaaaagtaaaagggttttacttggatttgatgaaaaaatagatccttacaggtgaaaaagcccaggaaaccctaagctaaatgaatacaaataaactgcaactatgaacattgtaggcaaacatcttggaaaagattgggtcggggggagaagaaacagagagagagagagagggaaggaatttgaaagcagccagaaaaaaaaaaaaaaaaaaagaaaagaaaccttgacacattacatacagttgatcaaataaacaaatgatggtgacattattagaagcaataatgctagggtgacgtgacaatagaagagcctcattaaagtaccaaaagaagaaacaaatctactactagctcataattctataagaagagaaaataccatccacaagtgaaggtgagggacttctgttgttgtctaaggtacagaaaactggaaaaaaagtgtaactttcatcctgataatgagaaaaataccagttaagccacaaaatcacagctttccttgaagccatcagaaagctgagttcacacagccaccaggtagctgacaggatcctctaagagacatgagatgggatcctctcagctgtggcacagcacagaagcaagaccttgccaccatacaagcagctaaaaaggaatcagataaagtagtaacaaagtggttcttaggatttgcttatttttaaaaaaagatttgcaaataataattgtatgtatttatggggtacaatgtcatgttttggtatatgtatacattatgaaatgatgaaatcaatctaattagcatatccttcatctcacctacttattattttttgtggtgagaatgtttaaagcctactttttagatcctggagcatgtgactgctgttgtgggccatgggctgctgactgtaagggatatttaacaagagagaggaagagaagatggcatttctgataaaggttgtgatacaaccacaggattaaccctccctcttgaagatcatcctgtaaatgagatgctatgtataccaacttcccaccacctttgtttttctgttcagtaatcctggtgtggataaatgaagtcttcgcgtgtatgttaaaaaaaaaaaaagtctacccttttagcagttttgaaatatacaaagccaagtgtgggtgagtgtgagagtatagaaaccctggaagcctcacattaagaaaaggattcacagccacttgctgggtcatttccatggaccatcacatggtgctcaggagacagaagaggggcaggatgggagactgaacagggcctccttttgcattgcaggcatgaagtaggagagggacaagctggacttcctgctcagaacctcttctcaaaatcattaagcctcagggggagtgcgagcatcttctatctctcctagggcatcagaaaagacccattgcttcttggaggggaaagtgtagcctagagcaaaaacattctctaccccagagagaaagaggtaagaaacagtttcatgttagaaggcttctaaggcagtgcctagagaaaataaaatagtttcaatgtttatactagaaaagtaaagatttagaatcaatgatctaaatgttcacattaacaagatatacaaataaactcgaaattagtaaaagaaaggtaacaaagttcagagcagaaatcagtaaaataaaaaatcaatagagaataaaaataaagtgaaaagtaggtccccaggaaagtgtaaaactttgataaatctctaatgaagactcatcaaaaataaaaacataaattccttatataatagagatgtaattactaaatgtcccatacatattccaagcatagtaagagaatattaacaacatgccaataaatacaacatgccaataa

SEQ ID NO: 709239 - DNA, 2373 bp, Homo sapiens
  misc_feature 46: n = A,T,C or G
tatcaagcattctaatataccaggaattggaatcctagaagaagangagataaaggaaccaaatattttaattaagaaaaagagtattatgcagccagaaaaaaagaatgagttcatgtggtatgatgcagccctaaaaaagaatgagttcatgtcctttgcagtgacacggacgaggctggaagccattgttctcagccaagtaacacagaaacagaaaaccaaatgccgtatgttctcattcgtaagtgggagttgaacaatgagaacacatagacatggggaggggaacatcccaaactggagcttattgaggagtggggggcaaggtgaaggagagcattaggacaaatacctaatgaatgtggggcttaaaacctagatgacaagttgataggtgcagcaaaccaccatggcacatgtatgcctatgtaacaaacctgcatgttcagcacatgtatcycagaacttaaagtaaaattaaaaaaaaaaaaaaagtaaaagggttttacttggatttgatgaaaaaatagatccttacaggtgaaaaagcccaggaaaccctaagctaaatgaatacaaataaactgcaactatgaacattgtaggcaaacatcttggaaaagattgggtcggggggagaagaaacagagagagagagagagggaaggaatttgaaagcagccagaaaaaaaaaaaaaaaaaaagaaaagaaaccttgacacattacatacagttgatcaaataaacaaatgatggtgacattattagaagcaataatgctagggtgacgtgacaatagaagagcctcattaaagtaccaaaagaagaaacaaatctactactagctcataattctataagaagagaaaataccatccacaagtgaaggtgagggacttctgttgttgtctaaggtacagaaaactggaaaaaaagtgtaactttcatcctgataatgagaaaaataccagttaagccacaaaatcacagctttccttgaagccatcagaaagctgagttcacacagccaccaggtagctgacaggatcctctaagagacatgagatgggatcctctcagctgtggcacagcacagaagcaagaccttgccaccatacaagcagctaaaaaggaatcagataaagtagtaacaaagtggttcttaggatttgcttatttttaaaaaaagatttgcaaataataattgtatgtatttatggggtacaatgtcatgttttggtatatgtatacattatgaaatgatgaaatcaatctaattagcatatccttcatctcacctacttattattttttgtggtgagaatgtttaaagcctactttttagatcctggagcatgtgactgctgttgtgggccatgggctgctgactgtaagggatatttaacaagagagaggaagagaagatggcatttctgataaaggttgtgatacaaccacaggattaaccctccctcttgaagatcatcctgtaaatgagatgctatgtataccaacttcccaccacctttgtttttctgttcagtaatcctggtgtggataaatgaagtcttcgcgtgtatgttaaaaaaaaaaaaagtctacccttttagcagttttgaaatatacaaagccaagtgtgggtgagtgtgagagtatagaaaccctggaagcctcacattaagaaaaggattcacagccacttgctgggtcatttccatggaccatcacatggtgctcaggagacagaagaggggcaggatgggagactgaacagggcctccttttgcattgcaggcatgaagtaggagagggacaagctggacttcctgctcagaacctcttctcaaaatcattaagcctcagggggagtgcgagcatcttctatctctcctagggcatcagaaaagacccattgcttcttggaggggaaagtgtagcctagagcaaaaacattctctaccccagagagaaagaggtaagaaacagtttcatgttagaaggcttctaaggcagtgcctagagaaaataaaatagtttcaatgtttatactagaaaagtaaagatttagaatcaatgatctaaatgttcacattaacaagatatacaaataaactcgaaattagtaaaagaaaggtaacaaagttcagagcagaaatcagtaaaataaaaaatcaatagagaataaaaataaagtgaaaagtaggtccccaggaaagtgtaaaactttgataaatctctaatgaagactcatcaaaaataaaaacataaattccttatataatagagatgtaattactaaatgtcccatacatattccaagcatagtaagagaatattaacaacatgccaataaatacaacatgccaataa

SEQ ID NO: 709240 - DNA, 612 bp, Homo sapiens
tataactgaggatttaatctactcagacagtggtagaattggttgcattttctctttyattgtgtttgcagtgggtgtacaacatgtcttcattaactctccatgacattcagaatagcttgagataaaaaaagcactcaatcaaaaagtaaaaaacagtcttctgccctcccatttccaatcacaagcatcccctagggcatgtattaattactgaagatgaatgctagaccttcattctcagcagggtccttcaaattttattgctctgttgggtcagaagatggtgctccatcttgcaaaatggtaaggagtctcaacttcttgaggaagttccagctaataatgtcctttgttaccgagtgcctacaatatgtctagcattattagattctttttatgaatcaacccacctaatcccaatatctaccctacaagacacattattatccccatttgctggatggagaaactgattccaaacccctgacaatttcagtccagtaaatggctctctgtggttcaaaactgaggggggtctgtagttcctcaaagtagtctggtgtcaatgaagacattgccacagtatttccattgttgaagcctgttggg

SEQ ID NO: 709241 - DNA, 1519 bp, Homo sapiens
ctatgtggcccaaactgattttgaactcttagactcaagatttcctcctgccttggcctcccaaagtgctgggtttacaaagtgtgagccactgtgcccagcctaaattattttatttctattttattgtgagaaagatgaagcacagagaagttgaagcattttctcaaggactcatagctgataggtggcagaattgaaatccaaacctaaacattatggctccagagccaagcctctctgaagcacacttattgacccttcagaatgatctcatcttaaactagcactccttaatatatattttgagacacaaagccaacatagtcaaaaaagtgtctcctttttgtatacacttgctcttctgacggtagaacctgacagtccttctgagcccaagtcttcgaacttaagtttaaccttgagctcagagagtcagcccaagttattcattttattggcaacttatacagttgcacaagtcatttctgcaagcagatcctcccagtaagtggataaatgtgtgctaaaatccagcttggtctccactcaccaagacaagcacttgctggatacatttctcttgagagtcatgctattttcacatggtcacaaaagctgtatgtgctgtctctatgttcttatagtcaataatcatcagcaagcaagtgcctgtgtacttctgcaagtcttcccacagtcctgaaagagctttccaaacgaggaaacaagaaacttagatactttacccaaagccacatttcaaaatgaacgagtctggatttaagtcaaaccagtgtttaaacaaacaaacaaacaacaacaacaacaacaacawcaacaaaaaactcataccaagaaaaaagaaagaaaaagcaaaagcagatatcttacttcctattgacttaagcaattctgttaaatgcagtgctatgaatctctccatcatcatccagtccacccaaaatataaacagcaacaactaatgatcctcccatgaaagcttgaaatgtactgcgggactgacaatgtggtcaataacctgtaatcttcagaaaaaataaagctaaagtcaatcccgtttagtcaaactccaacctcaacagacaccttgcttccatacattagtgacttctttctctgtcgcccaggctggagtgcagtggcgcgatctcagctcactgcaagctccgcttcccgggttcatgctgcctcagcctccccagcaactgagactacaggcgcccgcgaccacgcccggctaatttttctgtatttttagtagagacggggtttcaccgtgttagccaggatggtctcaatctcctgacctcctgatccgcctgcttcggtctcccaaagtgctgggattacaggcgtgagccaccgctcccggccgcattagcgatttcttaacctgatgaccagaattgggctacaaagggtaaggggacccttttaattgaatgcaaaatatttagtttatttttaacaattatttttacattattttgagata

SEQ ID NO: 709242 - DNA, 652 bp, Homo sapiens
tcattgttttccttaagacctgctggtggctatcagtctcattcagagttaagccccaaatcattccccagacccacatggtccttcatgacctgtctacctgttaccttcctatcccagatcagctcactccagcctcctggcattccttaagagctctcagactcactgaggtgagctctaggatttgggctgtttctttgcctccagcatgcttccttccgatgttcgtaaggttgaccttacctcctgtggtctttaccgaaatgtcaccttcacaggcaamcctttctaaaatttaaataccccccacttccacatttcctactcaattattttctttagaactcattactatgtaaaatagtatagtttttactaccctgtaaaaagaatttatacaattcttgtataaattgcctatcttcctcactggagtatgtttcacaggccagatttttttttaatttactgctgtatttttaccacatagaatggtacttggcatatactaggtgctcaatcattattcattgagtggctgataggagttatttgaccatcttgtgcctcagttacattatcaaaaattataaatatcaaatgctggtgaggatataaagaaattgattactcacacattgctggtaaa

SEQ ID NO: 709243 - DNA, 1152 bp, Homo sapiens
ggacacctaaagagaggaccttatctattccagaactgtccaaggaagataaaatattggtcaacacacctgccattgaaaagatcctctacagtgaagcttccaagctctctttgctgaggaccagttcttaaaactattaaataatgtaaatcttccagttaaaacttagctaaccgaagagatctgcctacaactatggttttcaaatgtagaacactagattatattcccaaatgtactgactaaataggggagaggtaggggcatttttatcacataccccagtgaagtgataacctgaggaccacatgtttgagaattactgtcctacgtgagaatattgcagtcccttggcggttctgtttttcaaccaagttaatgccaaggcacttcgtttatatatcaatttcagaagaatttgagaaatcagaaaacagagtgtgcattcatttttataaaaggtaactcttcacattgatgaaatgggtttcatggattaaagaaccaaggacaagtccttggtagattgaagttaatatctgagaatctaatatttgataagaggtagcagattgggctctcctggtgacactcagtccacagtccctgccgtctttcttgttttttctcatttcttcagggccatgtaggggaagaggtgtttgggataagttgaggccatctcactgaagcacaaaaatcccagtctcagaaagtataggacagtcaaatttcagatgctcacagaactaaactcttcctgcatagaaacacacttcagaatttatgacattgataaaggctaaaatgtctcaccttctctaaactctaattactacaaaatgcaggaccagcatatatattttttcttctaaaaatagatttaaaaaaattctcgtaatattcatttggccagtcacttatttattcaccctcatattcacttctgtttccatgcccatatgtattccttcacacattgtgtacaaattcactcacattttattgagtcagtcattaactcattcacgagtctcactcacttggtcattcatttatgcattcacttacttatatcatctttcattgttgtctcattmtttgattctctaattcatgtatttgtttactcatttacttgctcattta

SEQ ID NO: 709244 - DNA, 1845 bp, Homo sapiens
gcatttcatttgtatctgaaagtggaaaaaaaaaaccctgaaattcagggcacgtagttggtgagtttggctttgcatggaaattcaaggggtagggggctgatcctcctggggaagctgctgatcagctccaagaggagccagacagacccaagcagatcttcttggccattgtattagttagggttcatagagaagagaacataacaacataaccaataggatacagatatagatatagatgatatagctatagatatagatatagacatagacataaatatggatatagttatcatatttattatggaaattggctcatgtgattatagaagccaataaatcctaccacctgccatctgtaagctggggaaccaggaaagctagtagtataattcagtctgagtccaatggcctgagaacaatggatagggttctcctagtggtgtagctcccaatctaagtataagggctagagaatctgtgagttgaggtggggggccccactagtataagtcctggagtctgagggcccaagaaccagatgaatgatgtccaactgcatgagaaaatggatgctccagtagaagaaaaaagaagaaaatcgccctttctccaactttatgttctatcacgctctcaaactattagtgctgcccacccacattagtgaggctgatcttccttactcagtctacaaattcaaatacaacatcctcaatgacacacccagaaataatgttttaccagctatctgggcaacccttagcccagtcaagttgacacataaaattaactattatggccatagagggaagcttgtgaacaaccctttaaaaatgatgggatttgctgtaattgctgaggtgctaccagcattttgaggtccagaagggattagcactaagagaacccaatatgacacagaagacgtgtccaacacagtgtgccaataattgagccaccctacactggcatgacattggggagttctaattcctacactctaaccttaaatggcagcaataaaatataaaacctccaactactggttgggtggaccaacattagaaagccatctgtaactcatttccatagtgaaggaaaactttgccattgcttctcactgtgtatcctctcttttaaagaataactaaaacactaaatgaacccgtttttttataagatgttaaaaatacatcaaagattgaactctgcctgcctgttgctgatttggaaatgggcttgaatgcattccttacatccagattgaattactattacttttactctgcaatactgccagacttttaaaactttttttttagtaggacttgctctgggtccagaacatggtaataggaattaactctggcatttctgctgcttagtctgctcaccagctcctaaatatcaacatgcgttctgaatttcagccagaattgattggaaaattggccttataattcactagggttcagatttgagatcagttaacaccagacttctggaaacattggctgcccctttgggccaatgagtggtgaggttattctccttgaaaacagagctgaaagtcattcctttcttcctcgctcttcagtgatttcagactttgcatcctgctgagaactgctctgagagtgggagtacacaatgcttcatgcaggctttacacagaaggagaaatctgttcatacagrgggggtgttcagacccatgccatcaattcagattgtcaggttgagccacagagagggggcaggatctactgagtgctatagactgaattgtgtccatcccaccagtccgaatgtatttgttgaagcccagacccaaatgtga

SEQ ID NO: 709245 - DNA, 1845 bp, Homo sapiens
gcatttcatttgtatctgaaagtggaaaaaaaaaaccctgaaattcagggcacgtagttggtgagtttggctttgcatggaaattcaaggggtagggggctgatcctcctggggaagctgctgatcagctccaagaggagccagacagacccaagcagatcttcttggccattgtattagttagggttcatagagaagagaacataacaacataaccaataggatacagatatagatatagatgatatagctatagatatagatatagacatagacataaatatggatatagttatcatatttattatggaaattggctcatgtgattatagaagccaataaatcctaccacctgccatctgtaagctggggaaccaggaaagctagtagtataattcagtctgagtccaatggcctgagaacaatggatagggttctcctagtggtgtagctcccaatctaagtataagggctagagaatctgtgagttgaggtggggggccccactagtataagtcctggagtctgagggcccaagaaccagatgaatgatgtccaactgcatgagaaaatggatgctccagtagaagaaaaaagaagaaaatcgccctttctccaactttatgttctatcacgctctcaaactattagtgctgcccacccacattagtgaggctgatcttccttactcagtctacaaattcaaatacaacatcctcaatgacacacccagaaataatgttttaccagctatctgggcaacccttagcccagtcaagttgacacataaaattaactattatggccatagagggaagcttgtgaacaaccctttaaaaatgatgggatttgctgtaattgctgaggtgctaccagcattttgaggtccagaagggattagcactaagagaacccaatatgacacagaagacgtgtccaacacagtgtgccaataattgagccaccctacactggcatgacattggggagttctaattcctacactctaaccttaaatggcagcaataaaatataaaacctccaactactggttgggtggaccaacattagaaagccatctgtaactcatttccatagtgaaggaaaactttgccattgcttctcactgtgtatcctctcttttaaagaataactaaaacactaaatgaacccgtttttttataagatgttaaaaatacatcaaagattgaactctgcctgcctgttgctgatttggaaatgggcttgaatgcattccttacatccagattgaattactattacttttactctgcaatactgccagacttttaaaactttttttttagtaggacttgctctgggtccagaacatggtaataggaattaactctggcatttctgctgcttagtctgctcaccagctcctaaatatcaacatgcgttctgaatttcagccagaattgattggaaaattggccttataattcactagggttcagatttgagatcagttaacaccagacttctggaaacattggctgcccctttgggccaatgagtggtgaggttattctccttgaaaacagagctgaaagtcattcctttcttcctcgctcttcagtgatttcagactttgcatcctgctgagaactgctctgagagtgggagtacacaatgcttcatgcaggctttacacagaaggagaaatctgttcatacagggggggtgttcagacccatgccatcaattcagattgtcaggttgagccacagagagggggcaggatctactgagtgctatagactgaattgtgtccatcccaccagtccgaatgtatttgttgaagcccagacccwaatgtga

SEQ ID NO: 709246 - DNA, 671 bp, Homo sapiens
acaaaggggcggaggggacctcgttctggtgagtttcccaggctgctggagcgggggggtgggtgggctggaggtgtggcgcggcgaggggccctgtttaggggccaaggaggctccacagctaccttcagaactggggacagggagaatgaagagcaagacagaaaaagaagaaaaamggaagagagtcatgacagcaaaggttttggtagaaaaaaagagaaatctgagtctttcttttttttttttttcttttttgagacggagtctcactctgtcacccaagctggagtgcagtggcacgatcttggctcactgcaacttccgcctcctgggttcaagccattctcctgcctcagcctcccaagtagctgggattacaggcacgtgccaccgtgcccagctaatttttgtatttttagtagagacggggtttcaccatgttggccaggctggtcttgaacccctggactcaggcgatctgcctgccttagcctctcaaagtgctgggattacaggcatgagccaccatgcccagcccaagaaatctgagtctttagagagaacgaatcctttccctgggtcccctgagcattctcttcccttgtgttaaggtaccccaggcccagacaccccacccttgcccctcttacattctcggtcactagagg

SEQ ID NO: 709247 - DNA, 658 bp, Homo sapiens
ggtctcaaactcctgggctcaagtaatctgcccaccttggtctcccaaacctgtactaggattacaggtgtgagccaccacacccagctgaatgaatatgtatttctcacagttctggagactaggaagtccaagatccaggtaccagcagatttgatgtctgctgagggctctcttcctgattctcagactgcagccttctcactaccgatggccgagagagagctctggtctctaactcgtcttataagggcactaatcacacatgggggctccacccttatgacctcagctaaacctaagtacctccaaaaggccccacctccaaatatcatcacactgggggttgggttttcaacatattaattatggggggacagagacatttagcccatagaagccactattgtttctctagctgcctctactttcagaggctacagwcaagtcctggagtgatgtcctctgggtcaggcccagcacttcccctcacatcagcaatgtccacatcacccatagtagaatctccctggggaccctggcctctgtgcccctagctgggagaaatcatggcttctctgggcattctccagcaatccttcagcctgggaatgctctgggcagaagtgggggtctcctcactcgtggggagaaagca

SEQ ID NO: 709248 - DNA, 614 bp, Homo sapiens
tgagattgtttgtttttctgttgttaagtcatagttctttatgtattctggatattaattctttatcaggtatataaytggcaaatatttcctcccattctgtgcattttcttttaactctgttaatagtgtcccttgatatataaaaaaggtttttaaattttgatagtctaatttattgtttttcttttattggttgtgcttttgctcaccagccaagaagccattgccacatccaatgttcctaagattttcttcaatgttttcttctaaaagatttataggttgaactcctaagttgagttccttgaaccattctgagttaattgagttaatttttgaatatggtgtaaggtgatgctatgaattttgtccaacatcattattttgtatgtgggtattaaggtttcctggtactatcagctgaagtggggctgatacacttgtaagatgcagtgagcactgataaatgggaacaccatgcatttatttacttgtctttactccacaggtgattggaggaggcttttggtgacaaacccaaaagaaatgaatacatatgaattcttattaaatcaaaatcaaataaaattataaattttaaaatgttaaga

SEQ ID NO: 709249 - DNA, 614 bp, Homo sapiens
tgagattgtttgtttttctgttgttaagtcatagttctttatgtattctggatattaattctttatcaggtatataactggcaaatatttcctcccattctgtgcattttcttttaactctsttaatagtgtcccttgatatataaaaaaggtttttaaattttgatagtctaatttattgtttttcttttattggttgtgcttttgctcaccagccaagaagccattgccacatccaatgttcctaagattttcttcaatgttttcttctaaaagatttataggttgaactcctaagttgagttccttgaaccattctgagttaattgagttaatttttgaatatggtgtaaggtgatgctatgaattttgtccaacatcattattttgtatgtgggtattaaggtttcctggtactatcagctgaagtggggctgatacacttgtaagatgcagtgagcactgataaatgggaacaccatgcatttatttacttgtctttactccacaggtgattggaggaggcttttggtgacaaacccaaaagaaatgaatacatatgaattcttattaaatcaaaatcaaataaaattataaattttaaaatgttaaga

SEQ ID NO: 709250 - DNA, 557 bp, Homo sapiens
gatcttgaacccctgacctcaagtgatccatctgcctcggcctcccaaagtgctgggattacaggtgtgagccaccgtgctgcgacccacccccgtcgcccgccctccctccccccagcccctgcatggcattcttacagagatctctgcacctgccactttgcttccagtgcccccctcatcttttagctctagagggccctgcccagctctctctcctcccccaggtgrcctcactccaggaaaaagtgacatcccagagccaggagcaggccatcctgcagcgatccctgcaggacaaagccgcagaggtggaggtggagcgtatgggtgccaaggttggtgtcagcctactagagactcggggagggcaagggagcccctgttccggggctgcagccaggacttagggagggaccctgtcctttgctgcatcctccccagggcctgcagttggagctgagccgtgctcaggaggccaggcgtcggtggcagcagcagacagcctcagccgaggagcagctgaggcttgtggtcaatgctgtcagcaggtatca

SEQ ID NO: 709251 - DNA, 557 bp, Homo sapiens
gatcttgaacccctgacctcaagtgatccatctgcctcggcctcccaaagtgctgggattacaggtgtgagccaccgtgctgcgacccacccccgtcgcccgccctccctccccccagcccctgcatggcattcttacagagatctctgcacctgccactttgcttccagtgcccccctcatcttttagctctagagggccctgcccagctctctctcctcccccaggtggcctcactccaggaaaaagtgacatcccagagccaggagcaggccatcctgcagcgatccctgcaggacaaagccgcagaggtggaggtggagcgtatgggtgccaaggttggtgtcagcctactagagactcggggagggcaagggagcccctgttccggggctgcagccaggacttagggagggaccctgtcctttgctgcatcctccccagggcctgcagttggagctgagccgtgctcaggaggccaggcgtyggtggcagcagcagacagcctcagccgaggagcagctgaggcttgtggtcaatgctgtcagcaggtatca

SEQ ID NO: 709252 - DNA, 643 bp, Homo sapiens
atcacattttatgacctaatcttgtaagttgcacagcactacatcctctgcatgccgtagattacaaacaagtcactaaggttcatccagattcaagggaagatatgtagacttcatttctttttttttaaaacctttttttttgaaataaggtctggctctgtcgcccaggctggagtgcagtggcatgatcttggctcactgcaacctctgcctcctgggctcaagcaactcctcccaactcagcttcccaagaagctggggctacaggtgcaggccaccacacctggctaatttttgtattttttgtatagacrggtttttgctatgttgcccaggctggtttcaaactcctgagctcaagcaacccacccgcctcggcttcctaaagtgctaggattacaggcgtgagccagtgtccagcctagacttcatctctaatgagaacagtgtcaaagaacttatggatgtgtcttaaaactgctctaggagttatcctatatgatagcagtaggtgtagtgggcaactagcccagattagaagaggccagaaagctctaggagaggttgatttatggagatgacattgagaagagtccctgatacacctggacatatgggggagagatttgtagggtggtgg

SEQ ID NO: 709253 - DNA, 609 bp, Homo sapiens
tatgtcagtaaaatttataataaacatgtacatatttattttttgcagtttgttrttaaacagttactagcaaattgctatgtacacacattccttatcaaaaatgtgggaattatttgcaacataaatgagaacatatgaggttatacgtagtaggtacaatcttaaagagacaaaccacaagtatgattgatacttccactagacatcttgtcaagagaattatattcccaaataagtatcaccaaaaattttgttgaaactagacctttccacaagctatgggctcctataaatacatatttttaccagagtttcttcatctaattaggtttttaaattgtggtaagaataagatacagataaatgaattagatgcagcctggccaatatggtgaaaccccatctctactaaaaatacaaaaattagctgggtgtggtggcaggcgcctgtaatcccagctactcaggaggctgaggcagaagaattgctgggagccgggaggcagaggttgcagtgagctgagattgcgccactgcactccagcctgggcgacagagcgagactccaactcttaaaaaaaaaaaaaaaacaaatcaattagatgt

SEQ ID NO: 709254 - DNA, 609 bp, Homo sapiens
tatgtcagtaaaatttataataaacatgtacatatttattttttgcagtttgttattaaacagttactagcaaattgctatgtacacacattccttatcaaaaatgtgggaattatttgcaacataaatgagaacatatgaggttatacgtagtaggtacaatcttaaagagacaaaccacaagtatgattgatacttccactagacatcttgtcaagagaattatattcccaaataagtatcaccaaaaattttgttgaaactagacctttccacaagctatgggctcctataaatacatatttttaccagagtttcttcatctaattaggtttttaaattgtggtaagaataagatacagataaatgaattagatgcagcctggccaatatggtgaaaccccatctctactaaaaatacaaaaattagctgggtgtggtggcaggcgcctgtaatcccagctactcrggaggctgaggcagaagaattgctgggagccgggaggcagaggttgcagtgagctgagattgcgccactgcactccagcctgggcgacagagcgagactccaactcttaaaaaaaaaaaaaaaacaaatcaattagatgt

SEQ ID NO: 709255 - DNA, 627 bp, Homo sapiens
ttgtcttccaagtttatggtaaagtttgaaaagctacttttgagtgaacccttctctttggagaaaaatatttattcaggttaattttcttcaccagcaggacacagtacactccagtctttctctttcagcgatcacatggatccacaatgtagggttttttgtttggttttgtttttttgtttcattttttctttaaattctgagacaaggaaaaagcctgaacttaacatcaagtactgggctgttgccgaccctataaaatctgtgacaattaaaatattctctgcatgttagtcagttataccttttaagaggagaatatggacatgaaatgttatattggtaacagagctacaataaatctgcaggaagaaataccaccaaaatcaggttaaaggrgacctattagctcaattaaagcacaagaacaggattaaataaagcagtggttgagaatagttaaattattaaaaacagtacgtaattatgtgcatatcatcacatttcttttaaaatattgctttaattcatttaaacatgataattactctttgtgcttgtaataaggtattgttttattttaaaatatggttaagtactgatgaatactcatctcgtagttct

SEQ ID NO: 709256 - DNA, 998 bp, Homo sapiens
ctaagccatctcagcactaatgagatccaggttgttgagccatacaaactggccctctgtcttaactatagccaactaccacataataagaaaaaaactattcttaataaatggggctactgaaattgacgatttggggaaataaaaactatttagatcttattctacaccatatgtcaaaatattccagatggacagagctgagctccaccttcagtttggggtgtggtgctcctgtccaggcagggaaggagaggtgagaaaagtgcctgtttggaggctgagccagactgggtgtgctgaggtggtgtcctggcctgtcccaggaggtctggagtggccagtttgcagggggaggcaagggtgtmactgtggtttccagttaccattttttaaactgcctagaccaaactgttttggaaaaagatgcttacatcaaccataattatgcattttatggtatttttcagccctctgaaaagggaatcctccctaaacctctaaatctaaaaatctaagtttgttttgtttctacattcccatttccaaatataatcatggaagcaaattaagcactgaggttcgtctatagctcatttctcttctcacaatgaacatatctacatctgcagaaattcatcttttaatactcttctaggggaatttgtgttcccaccttccctaactgattgtctttagctatggctatcctctctcaagactgataagatttactgaagctgaaacttctcatctaaactctgacaatcccagcaactggcccccagccacctccaccagctagaggttcaacaatacagattctccttaatgatcctactctagttgactcctatcccagtaattaatacatggctgtgcttcaaaggctgcattttttttctcgctatagataatcatattcttaaaaatagtgttttatccttaaaagtagccctctcattaagactcattcagaatttctgtgcaatttgatg

SEQ ID NO: 709257 - DNA, 998 bp, Homo sapiens
ctaagccatctcagcactaatgagatccaggttgttgagccatacaaactggccctctgtcttaactatagccaactaccacataataagaaaaaaactattcttaataaatggggctactgaaattgacgatttggggaaataaaaactatttagatcttattctacaccatatgtcaaaatattccagatggacagagctgagctccaccttcagtttggggtgtggtgctcctgtccaggcagggaaggagaggtgagaaaagtgcctgtttggaggctgagccagactgggtgtgctgaggtggtgtcctggcctgtcccaggaggtctggagtggccagtttgcagggggaggcaagggtgtcactgtggtttccagttaccattttttaaactgcctagaccaaactgttttggaaaaagatgcttacatcaaccataattatgcattttatggtatttttyagccctctgaaaagggaatcctccctaaacctctaaatctaaaaatctaagtttgttttgtttctacattcccatttccaaatataatcatggaagcaaattaagcactgaggttcgtctatagctcatttctcttctcacaatgaacatatctacatctgcagaaattcatcttttaatactcttctaggggaatttgtgttcccaccttccctaactgattgtctttagctatggctatcctctctcaagactgataagatttactgaagctgaaacttctcatctaaactctgacaatcccagcaactggcccccagccacctccaccagctagaggttcaacaatacagattctccttaatgatcctactctagttgactcctatcccagtaattaatacatggctgtgcttcaaaggctgcattttttttctcgctatagataatcatattcttaaaaatagtgttttatccttaaaagtagccctctcattaagactcattcagaatttctgtgcaatttgatg

SEQ ID NO: 709258 - DNA, 603 bp, Homo sapiens
cagtggctcaggcctataattctagtgctttgggaggctagaggcgggaggatcgatcgcttgagcccaggagttcgaaaccagcctgggcaacatagcgagactccttctctataaaaaaaaataaaaaattagctgggcatgatggcctgcacctatgtgggtggtcctgagcttctcgggaggctgaggcaggagaatcgcttgaacctgggaatcagaggttgcagtgagccgagactgctccattgcactccagcctgggggacagagtgagactctgactcaaaaaaaaaaacaccccaaaaacacaggatggtagaacacacctacctgagttggcactgaaaatggcaagaaatgtccgccgttgtttccaaacaccaagttctctctggcttgagaggcctcactgctacccaagagcattatggaggaagatgtggaagggctgcctctcccagttggtgggttggccaggggcgtgatggcagcgaccagccatgytgccaggagtcgcctctcaggttcatcccaggagctgcatgctgaccttcgcgtgctgcctccgggccacccctcctccccacttaatgccttcac

SEQ ID NO: 709259 - DNA, 1778 bp, Homo sapiens
ggaaaagtctgactttaaaatacagataagtaataactattattaattaattaaattattaaaattaaaataattaaataatttgttaattaaaatgccttattcccctacttatttctgcaatttgactctaagaatagataggacaygtagattgccttaggtttgaaatctgggtgaaataagatactgcctccttcagtatttctgcctttgcttttatgggagcctctttcaagaaaaagtcattctctcatggtccctttgtttgagtcccagaggttttcctactccagaaagtgcaacgtagtgagactagtactatactcccttgcatggtaagtgagaaggctgtctgtataaaatgagggaaggactcatgagagggaagtaggtcaggagaaatgataggttctcaggcaggttaattttaggaaagagtgaatagagtcccttaaaacaaggtgcatctgcttcctcctgatcaatctttaggactgtttactttgatttgaagaccactatgctaaagcttcccacgggggcaatagtgaggcaaggaatttttaaaagggaattacttcttcgtagctacttttgtgaaatgaattcatttgaattatctggcaatctcttcatatttatattcaacaataattacttaaagaaatgctttgagcttctcagaggagggtgctaccagtgtgatggagtagaattcagatttgggtagtgactttaaagctgtgtgactttagtcatttaactgctgagtcacagtctacagctttgaaagaggaggattataaaatctatctcatgttaatgctgaagattaaataatagtgtttatgtaccccgcttataggagaagagggtgtgtgtgtgtgtgtgtgtgtgtgtgtgtgtatgtgtatgtatacatgtatgtattcagtctttactgaaattaaaaaatctttaacttgataatgggcaaatatcttagttttagatcatgtcctctagaaaccgtatgctatataattatgtactataaagtaataatgtatacagtgtaatggatcatgggccatgtgcttttcaaactaattgtacataaaacaagcatctattgaaaatatctgacaaactcatcttttatttttgatgtgtgtgtgtgtgtgtgtgtgtttttttaacagggatttggggaattatttgagaaagcaaaacaaaacaataacaatagaaaaacttctaatggtgatgacagcctcttcttcagtaatttctcacttcttggtactcctgtcctgaaagatattaatttcaagatagaaagaggacagttgttggcggttgctggatccactggagcaggcaaggtagttcttttgttcttcactattaagaacttaatttggtgtccatgtctctttttttttctagtttgtagtgctggaaggtatttttggagaaattcttacatgagcattaggagaatgtatgggtgtagtgtcttgtataatagaaattgttccactgataatttactctagttttttatttcctcatattattttcagtggctttttcttccacatctttatattttgcaccacattcaacactgtatcttgcacatggcgagcattcaataactttattgaataaacaaatcatccattttatccattcttaaccagaacagacattttttcagagctggtccaggaaaatcatgacttacattttgccttagtaaccacataaacaaaaggtctccatttttgtta

SEQ ID NO: 709260 - DNA, 1778 bp, Homo sapiens
ggaaaagtctgactttaaaatacagataagtaataactattattaattaattaaattattaaaattaaaataattaaataatttgttaattaaaatgccttattcccctacttatttctgcaatttgactctaagaatagataggacatgtagattgccttaggtttgaaatctgggtgaaataagatactgcctccttcagtatttctgcctttgcttttatgggagcctctttcaagaaaaagtcattctctcatggtccctttgtttgagtcccagaggttttcctactccagaaagtgcaacgtagtragactagtactatactcccttgcatggtaagtgagaaggctgtctgtataaaatgagggaaggactcatgagagggaagtaggtcaggagaaatgataggttctcaggcaggttaattttaggaaagagtgaatagagtcccttaaaacaaggtgcatctgcttcctcctgatcaatctttaggactgtttactttgatttgaagaccactatgctaaagcttcccacgggggcaatagtgaggcaaggaatttttaaaagggaattacttcttcgtagctacttttgtgaaatgaattcatttgaattatctggcaatctcttcatatttatattcaacaataattacttaaagaaatgctttgagcttctcagaggagggtgctaccagtgtgatggagtagaattcagatttgggtagtgactttaaagctgtgtgactttagtcatttaactgctgagtcacagtctacagctttgaaagaggaggattataaaatctatctcatgttaatgctgaagattaaataatagtgtttatgtaccccgcttataggagaagagggtgtgtgtgtgtgtgtgtgtgtgtgtgtgtgtatgtgtatgtatacatgtatgtattcagtctttactgaaattaaaaaatctttaacttgataatgggcaaatatcttagttttagatcatgtcctctagaaaccgtatgctatataattatgtactataaagtaataatgtatacagtgtaatggatcatgggccatgtgcttttcaaactaattgtacataaaacaagcatctattgaaaatatctgacaaactcatcttttatttttgatgtgtgtgtgtgtgtgtgtgtgtttttttaacagggatttggggaattatttgagaaagcaaaacaaaacaataacaatagaaaaacttctaatggtgatgacagcctcttcttcagtaatttctcacttcttggtactcctgtcctgaaagatattaatttcaagatagaaagaggacagttgttggcggttgctggatccactggagcaggcaaggtagttcttttgttcttcactattaagaacttaatttggtgtccatgtctctttttttttctagtttgtagtgctggaaggtatttttggagaaattcttacatgagcattaggagaatgtatgggtgtagtgtcttgtataatagaaattgttccactgataatttactctagttttttatttcctcatattattttcagtggctttttcttccacatctttatattttgcaccacattcaacactgtatcttgcacatggcgagcattcaataactttattgaataaacaaatcatccattttatccattcttaaccagaacagacattttttcagagctggtccaggaaaatcatgacttacattttgccttagtaaccacataaacaaaaggtctccatttttgtta

SEQ ID NO: 709261 - DNA, 683 bp, Homo sapiens
aataagattaaatctatatttccaagtaatctctataagattttgttattaatattactattatttttgagacagagtcttactgtcaccaggctggagcacagtggtgcgatctcggctcactgcaacctctgcctcccgggctcaagcaattctcctgcctcaccctcccaagtagctgggactacaggcacgcacaaccacactcagctaatttttgtatttttagtagagacggggtttcaccatgttggccaggatggtattgatctcttgacctcatgatctgcctgcctyggcctcccaaagtgttgggattacaggcatgagccactgtgcacagccattaatattattgttacccaataaaaaaaatttggaaacttgtcttcttttcccctgattctgtttaaatagcactggagttacctgttttgaattttttttccaagcggtcccttatgagttttctctatgttttatttgtttcatttctttttttttttttttttttttttttgagacggagtctcgctctgtcgcccaggctggagtgcagtggcgggatctcggctcactgcaagctccgcctcccgggttcacgccattctcctgcctcagcctcccaagtagctgggactacaggcgcccgccactacgcccggctaattttttgtattttt

SEQ ID NO: 709262 - DNA, 1063 bp, Homo sapiens
tcatagagtacatttttatggattcatttgagcttctcaagtaccctgtaaaaagaatggcaattcaaaaaaaaaaaaaaaaagtccttcaccgtattcactaactgaaacaacactagtctggtgagagctcagaagtaagggacrattgtgttgttaatgagttaatgttctataggaccgctgactcagacctaaaagtatggtgtggagatgggctggtgctggctgagagagcagaactgtgaaagagcttagagatctgtggggaactgtagtgccagagagaggaggaaagcttgcataacaatgagaaatgctttttttcttaagttgtttgccaaagagttcagagtctggtttaggaacctggaatgctactgcatcagaattttgtataagtaatgatagcatgtttgacctagaaaggaaagatgaaatatataagggtcagataaaaaaaaaaactttgcattcttggggacaggggggctgaaacagaattgcagcatttgacttggaatatgaaagtataagtaaatttaacaaaccaatgaaaactgtaagagcacaatttacattttaatctacaataagctgaaatcaaaatagagatcatgtacatttaattttcttaattggcatttaccttgaaccagatattcctattcatgttagaagtacagctggccatccatatccatgggatcttcattcatggattcaaccaaccatggatcaaaaatattgaaagaaaagtacaatttttttcttattgtttttccctaagtgatgcagtatgacaactatttacatagtatttatattgtattgcatattataaataatctagagatacataaagtatacaggaggataagagtaggctatatgcaaatactatgtcattttatatcatgaacttgaacatccatatgttttggtatccaaaggggtcctggatactgagggacaactctacatagtctgtaccaaatagtgaagtgtgataatctggcagtgatacctggctaataatccaaaatccctccggagcttgttg

SEQ ID NO: 709263 - DNA, 822 bp, Homo sapiens
taataaataagataaaaatgacctccaaacaagtgaccaacatttccttatccttttgggtacatctgtttcactcctcttctactgagtgacttttgcatggaagcagcccaaatcatcttcagtaaagtactatctcttcctaatgcagctaatcataaataatgatcataaatttatgatccctaatcataaataatgatccctcttcagagacaccaaagggtacagcaaatgcatgagttcattaattcttcttgacctgtagcaaaatatccgaaaatcaacccctgagtacccagatccaagaattctctctggtaccattaggcgccttaaaacaaaacaaaaacaacyctagttctccactctccattgggtatacagagaaccacaaaagggcccacagatctaaagcgacggatatcaactaaacccccatatgtttaagacataataataatgatcagaaaagtaaatgggaaaaattgattttaactatcttgccaaaaatattgctcaaattcttttttcagatagggcaatgtgtaatatgaaaactgaggcttctctatctaatagcactctctggaattcactattccctcctctcacaggtttccttttgggtgccacctctttttttcgtaaagcctttcttatgagctgcagttaaaagagccacagccatcattggtcttcttcattcctttccctaaaactaggtgtgggtgagccctccaggaccctaggcttccaagttcctgtacagaacttggaatcttggaatctagatctcaagggtgcagggtttactcctag

SEQ ID NO: 709264 - DNA, 822 bp, Homo sapiens
taataaataagataaaaatgacctccaaacaagtgaccaacatttccttatccttttgggtacatctgtttcactcctcttctactgagtgacttttgcatggaagcagcccaaatcatcttcagtaaagtactatctcttcctaatgcagctaatcataaataatgatcataaatttatgatccctaatcataaataatgatccctcttcagagacaccaaagggtacagcaaatgcatgagttcattaattcttcttgacctgtagcaaaatatccgaaaatcaacccctgagtacccagatccaagaattctctctggtaccattaggcgccttaaaacaaaacaaaaacaactctagytctccactctccattgggtatacagagaaccacaaaagggcccacagatctaaagcgacggatatcaactaaacccccatatgtttaagacataataataatgatcagaaaagtaaatgggaaaaattgattttaactatcttgccaaaaatattgctcaaattcttttttcagatagggcaatgtgtaatatgaaaactgaggcttctctatctaatagcactctctggaattcactattccctcctctcacaggtttccttttgggtgccacctctttttttcgtaaagcctttcttatgagctgcagttaaaagagccacagccatcattggtcttcttcattcctttccctaaaactaggtgtgggtgagccctccaggaccctaggcttccaagttcctgtacagaacttggaatcttggaatctagatctcaagggtgcagggtttactcctag

SEQ ID NO: 709265 - DNA, 2408 bp, Homo sapiens
ttttttttgaaatggaatctcactctgtcaccaggctggagtgcggtggtgcaatctcagctcactgtaatctctgcctccctggttcaagctattctcctgcctcagcctcccaagtagctgggattacaggcgtgcaccaccacgcccggctaatttttgtatttttagtggagacggggtttcaccatgttagccaggatggtcttgatctcctgacctcgtgatccacctgcctcggcctcccaaagtgctgggattacaggtgtgagccactgcacctggccggtacctcttaaattagccaaggaagcttactttaaacaataggtgaagagcaactttcccacagaaataatgtaaaaaactttattatatcctttctagaagatgacttatagtaaacagttaactactactctaaacactaacaactcagcccaactgaggggaaaaataattatgtgagaggagaccaagagctacactgggcaactagtggaaagagctaaccccaatcctgtcccaacactagtatctaacataatggaaagctgtggttctaatgaaggcttttgagggcttcttgataaccagtttctcaaagcactaaaaggatacttttatagcaagacgcaaggtcaaatcgtaagtagttaacacatgcaaacttccagtaaagataagcataacataatcccaatacaaaacaagagaaactgcaaaacaagagaaactgcaagggtgaataagtgaccttgtactctacagtgacatttactagtcattaagtatcctactatatgacctggcaatgcctaaggacactaacagtacgttccccatagggcagaccttacaattctgaacattggcacatatacaatcatctaagatcaaaacagaaaactcctaaggcaaacaggtagagaaaaagtatttggaatgagaacagtcttgaaaagaagsactaacatttataataaaaaatgtattctttctaaaaagaaaagaataaatattccatttaccagcatgcataatgaatgggtgcccagtggtcactatctaactggttgactgaaaatctttcactgagaagacggcttagtaattctgaatctccttcacaggcgcttcggtggagaggaaaatcatctacccactgtcgttccctaatcattaaaaagaaattttgaaaaatacaacaggactgtaaaaattgtttcaaaagaaatgtgacacatctatgaaagctctgtatcactaagaagctgtaaactcaatagtgactacaatgcatacaaattgcatatataattttaaacaatactttaaattagaatgtaagtttttataaaagcaatgtggagtaaaaccgaaacagtacttgtcttctgtgacactgctcatgcttctctgccatttttcctgtttaggtatttggatttttgagtagtctggagctcctagaccaaagtatggatttattaccactttatctacctagaaagggaaaacaataacaaaaacccattaagagctttgtcatcttaatgtttacatgtttatattttaaatttttacttatttatttattgagaatgagtcttgctctgttgcccaggctggagttcagtgctgcgatctcagcacactgcaacctccgcctcccaggttcaagcgattctcctgcctcagtctccggggtagctaagactacaggggtacgccaccacatccagctaatttttgtatttttagtagagacgagatttcaccatgttggccaggctggtctcgaactcctgacctcaggcaatctgccctccttggcctcccaaagtgctgggattacaggcgtgagccactgtaccaggccttcatgtttataattagtaatagatgtatatatctcaggaaaaaaaattacacttgagataaaacgtcttttaaatcagagctaaaattcattcaactcttacccgatttgtatactgaagatctgatccaaacaaagggttgtaaatacaggtatctgctttctctagggctaacattttactctttatttctagtgcactatagcccatatgtagtgagttttctgtctgacctgattcagtagcatatgcaggatttatgacattagtttttatccgctcaagaggagaaggtcggaataaagctggaataaagtgagattgtgcatgacgttcatctaaccacctggcaaaataaaaaaacaggtagaagtagccattcgaaagtgaagatgaaaaagatagattactatctaactctgatatatgacacttgtgaatattaccttcagatttttataattttaatttagtgttagttaagtactttattatttttaaaatttatttatattgcaaattgat

SEQ ID NO: 709266 - DNA, 1527 bp, Homo sapiens
gtctttggggatcaacttgactttcacagtgttggaggcttttagacttgcctcctcaaattaagggcaaagatgccaggcacagtgtgggagactgcaagataacatggagtggttgggttttacagtaaaatagacctggctttgaaagttagagctatttgatcttggggaagccatttggcatctccgagcctctgttttttcatctgtgaaatggggataattgtgagcattakataaaatactgcagggaacatgcctaaagattgctgagtcttaggaaatttgtaaacactatttccctcctgatttttttccccatcttcattcattaacaaaccttactttaatgaatgaatgtcactatgcaagctattgtgctaggtgccatgctaggtacaaagatgatagaaactgtaactatgtttttaatgttcatttggaataaatttcacctactgaatattgtgttaactcaattagtgattgaatgtgtcagcctcagaccaaataaataaataaataaggcaaaagatgcattaggcagggagcttctgcatatttgtttaaatgattattttctgtataaattatcaaaattagttgtttctgtgctattgccactcttgtcatggcgatctggctcatttccatgtttcactaatgttattccacattaattactgtacaaataggcctcattggggggaattgtgaaaagcacactacttacatttaacccttcagccccaaagtcctcttattagcttaacaaattatattctggctcattctacaatatcttatacccacctcttgggggaaacatgacaataagagcaatacgatccaaagtgaagaacatcccaagcaaagggaatttaggtagacagcatgcaattaaccatgctggaatctggccaggaaatcatagttaacattctgattcttaatgaaaaaagacatgggaacatgggctagccacaagtctaactgagctcaggtttatcctcattagaaagccaccactcaaatccctcaagttacacactagatagtttccagtaaagtgataatgcaaagcacatttctgaaaagtaaatctgattttctcttatttgtcctgtatattgtcagaatataaaaccatcaagtgaactgctgaaaccttttttctgaggtgcccaattgaacattgcatggaagatgaattaggtatgatagtattgctgtgtcagggggttatatttccaaaaagtaggtttaaaggtgaattctaccttgagtgtgatctttcctttcaccatttgtcttagatttttttcattagctttaacttgtgttaaggctaaatttttcggacaaattacattttttttcataatttgatatattttttctccattgatggttcagcaattgtgacaacagtactagatgggtgacagcagaagcccagaataaaagattcagttcttattcaggactggagacttgcctagtgtccactgggacaatgaattt

SEQ ID NO: 709267 - DNA, 1840 bp, Homo sapiens
tctttcctaactcctcagtgtgccttaatattccacttctgtgtccttataatgtattcctcttccatcatacttgaagaggaactgcattgcttgtctctgtacctgactcagtgcctcgcacgaagcaggagcttacttgtttactgactgaatgaaataagtcaatgtaagacagtgaaatctgaagaatactcatggaatgctttaacttttgatactgaacaagctctgccaaaaaaattgtttaatttgcttattattactaatctgtccccaatcgtatttttaaataatttctttcatcttctattcaataaagtgtgctaagttgaaatcttcaacctttaaaaggcaaacacctcatttcaaacacaactagtcttacaagtaataaactctttaattaacatgtaatacaaaggcttgcattactcaagagactaaaaggaatttgggttaattcaacctagcaaatacctgtttgcctgcatacctaggacaccatctacacatcagcagcatgtaaacaaatctagctgtcaccaccccacagcccccaaatcaactacagtcacgtcagtaaatctcctgtcatgtatcatagccccagcatcccttcagcttcctatgatcaacccagtaaggtttaggttatttttaattcttaccaacaaagttaatktagttatttaaaagctataacactatttccacctctgtatgcaacataccaaattaaaattctagcaaagaggacctgaaagcaaaatatttttaagtaaagaaattaaagttatttttaaaatagaacttattcaaaaacaaaattgtcagtcaatgccttaaaaacaataaacacacctagtcctaacaatatcataatgaaaattaagcatgtgtaatcttcagagttgagtgttatttttaagaggcaatagagtctctgaacagatgacttacttcctctacttgtcttttatttgacctcagaggaccatagctgacaggaggatcggaaatgagaaattacttttagattcatgtttatcatttatctgatggtcattggaaaaaacgaaggacaaagtttcatcctctgcgtactgaaactttaatggaagacaatatccaaaccaaaactattttagactggatctaaagcccattacacttctcttatagaataagcaagagtaggaaacagatacaccacacttaaatgaaaaaaaaaaaggaaatcttttaaaatgtagatggttattatttatagccttattgttcaaagtgtggatcacacaccatcagcacggacatcacatggagctcgctggaactggaaaatctcaggtcacacccagagctcctgactcagaatctgcattttaacaaggtcccacatgatcatatatatgttaaggtttgaggttctttggtttatatagttgagtagttctgaaaacccatcaaattacccaggtagttggtacaaaatatataggagcttggacactaccactagaaattgcaatctgatagatgtggagtcagccaaacatctgcattttttcaaaattttgtaggcaatttgaattcacatcctgattaaataaccaaccactagtgtaatcaaaggaattttggctttaccaaagtacagaactcctttaaataccaaactcctctactctagtacattgaaaataacattttatgtattcttgtttcagacactctattttgtaaaacagacaaatgttaatttatatatttacatataatcctttataggagattcaataatctctcctacagaaaagttgaggtcaactcagatgta

SEQ ID NO: 709268 - DNA, 1840 bp, Homo sapiens
tctttcctaactcctcagtgtgccttaatattccacttctgtgtccttataatgtattcctcttccatcatacttgaagaggaactgcattgcttgtctctgtacctgactcagtgcctcgcacgaagcaggagcttacttgtttactgactgaatgaaataagtcaatgtaagacagtgaaatctgaagaatactcatggaatgctttaacttttgatactgaacaagctctgccaaaaaaattgtttaatttgcttattattactaatctgtccccaatcgtatttttaaataatttctttcatcttctattcaataaagtgtgctaagttgaaatcttcaacctttaaaaggcaaacacctcatttcaaacacaactagtcttacaagtaataaactctttaattaacatgtaatacaaaggcttgcattactcaagagactaaaaggaatttgggttaattcaacctagcaaatacctgtttgcctgcatacctaggacaccatctacacatcagcagcatgtaaacaaatctagctgtcaccaccccacagcccccaaatcaactacagtcacgtcagtaaatctcctgtcatgtatcatagccccagcatcccttcagcttcctatgatcaacccagtaaggtttaggttatttttaattcttaccaacaaagttaatttagttatttaaaagctataacactatttccacctctgtatgcaacataccaaattaaaattctagcaaagaggacctgaaagcaaaatatttttaagtaaagaaattaaagttatttttaaaatagaacttattcaaaaacaaaattgtcagtcaatgccttaaaaacaataaacacacctagtcctaacaatatcataatgaaaattaagcatgtgtaatcttcagagttgagtgttatttttaagaggcaatagagtctctgaacagatgacttacttcctctacttgtcttttatttgacctcagaggaccatagctgacaggaggatcggaaatgagaaattacttttagattcatgtttatcatttatctgatggtcattggaaaaaacgaaggacaaagtttcatcctctgcgtactgaaactttaatggaaracaatatccaaaccaaaactattttagactggatctaaagcccattacacttctcttatagaataagcaagagtaggaaacagatacaccacacttaaatgaaaaaaaaaaaggaaatcttttaaaatgtagatggttattatttatagccttattgttcaaagtgtggatcacacaccatcagcacggacatcacatggagctcgctggaactggaaaatctcaggtcacacccagagctcctgactcagaatctgcattttaacaaggtcccacatgatcatatatatgttaaggtttgaggttctttggtttatatagttgagtagttctgaaaacccatcaaattacccaggtagttggtacaaaatatataggagcttggacactaccactagaaattgcaatctgatagatgtggagtcagccaaacatctgcattttttcaaaattttgtaggcaatttgaattcacatcctgattaaataaccaaccactagtgtaatcaaaggaattttggctttaccaaagtacagaactcctttaaataccaaactcctctactctagtacattgaaaataacattttatgtattcttgtttcagacactctattttgtaaaacagacaaatgttaatttatatatttacatataatcctttataggagattcaataatctctcctacagaaaagttgaggtcaactcagatgta

SEQ ID NO: 709269 - DNA, 1840 bp, Homo sapiens
tctttcctaactcctcagtgtgccttaatattccacttctgtgtccttataatgtattcctcttccatcatacttgaagaggaactgcattgcttgtctctgtacctgactcagtgcctcgcacgaagcaggagcttacttgtttactgactgaatgaaataagtcaatgtaagacagtgaaatctgaagaatactcatggaatgctttaacttttgatactgaacaagctctgccaaaaaaattgtttaatttgcttattattactaatctgtccccaatcgtatttttaaataatttctttcatcttctattcaataaagtgtgctaagttgaaatcttcaacctttaaaaggcaaacacctcatttcaaacacaactagtcttacaagtaataaactctttaattaacatgtaatacaaaggcttgcattactcaagagactaaaaggaatttgggttaattcaacctagcaaatacctgtttgcctgcatacctaggacaccatctacacatcagcagcatgtaaacaaatctagctgtcaccaccccacagcccccaaatcaactacagtcacgtcagtaaatctcctgtcatgtatcatagccccagcatcccttcagcttcctatgatcaacccagtaaggtttaggttatttttaattcttaccaacaaagttaatttagttatttaaaagctataacactatttccacctctgtatgcaacataccaaattaaaattctagcaaagaggacctgaaagcaaaatatttttaagtaaagaaattaaagttatttttaaaatagaacttattcaaaaacaaaattgtcagtcaatgccttaaaaacaataaacacacctagtcctaacaatatcataatgaaaattaagcatgtgtaatcttcagagttgagtgttatttttaagaggcaatagagtctctgaacagatgacttacttcctctacttgtcttttatttgacctcagaggaccatagctgacaggaggatcggaaatgagaaattacttttagattcatgtttatcatttatctgatggtcattggaaaaaacgaaggacaaagtttcatcctctgcgtactgaaactttaatggaagacaatatccaaaccaaaactattttagactggatctaaagcccattacacttctcttatagaataagcaagagtaggaaacagatacaccacacttaaatgaaaaaaaaaaargaaatcttttaaaatgtagatggttattatttatagccttattgttcaaagtgtggatcacacaccatcagcacggacatcacatggagctcgctggaactggaaaatctcaggtcacacccagagctcctgactcagaatctgcattttaacaaggtcccacatgatcatatatatgttaaggtttgaggttctttggtttatatagttgagtagttctgaaaacccatcaaattacccaggtagttggtacaaaatatataggagcttggacactaccactagaaattgcaatctgatagatgtggagtcagccaaacatctgcattttttcaaaattttgtaggcaatttgaattcacatcctgattaaataaccaaccactagtgtaatcaaaggaattttggctttaccaaagtacagaactcctttaaataccaaactcctctactctagtacattgaaaataacattttatgtattcttgtttcagacactctattttgtaaaacagacaaatgttaatttatatatttacatataatcctttataggagattcaataatctctcctacagaaaagttgaggtcaactcagatgta

SEQ ID NO: 709270 - DNA, 917 bp, Homo sapiens
ctcgcagctttttcccctaagaactccacagggagattggagtaggggcaacactaaaaccagcccaagggcttaacccccgcagctgaccttctcctgggcgtagttattagttgtttgactgggagaggtggctcatgcctgtaatcccagcactttgggataccaaggcgggaggatcactgaagccaagagttccagatccaagagtttgagatcatcctggcaacatagtgagaccctgtctctattttatttatttaaaattgttaaaaagaaaaaaaaaaaggcctgtgcagtggctcacgcctgtaatcccagcactttgggaggcygaggtgggtggatcacctgaggtcaggagttcgagaccagcctggccaacatggtgaaaccctgtctcttactaaaaatacaaaaattagccaggcatggtggcaggcgcctgtaatcccagctactcgggaggctgaggcacgagaatcgcttaaatctgggagacggaggttgcagtgagccgagatcacaacattgcactccagcctgggtgacagaatgagactctgtctcaaaaaaataaataaataaaaataaataaaataaaatgttaatactgcctatgtagagcttgctatggattatttttatttttcttcgtacttgcctgcattttccaaaattactacaattaacatgttttcttttataattaaaaaaaaaatgttaccctcacgcaaaattcaatttggagagttctagcagcacatcgatttgctcctcattagtctcctatagtactctgaggcatatatatgaattaatcgggaaacatcaatcatgggttacctaaaacattcttccaacctgactatgtactagaaggaggcaggtaggaatagagggatggcagatggcaa

SEQ ID NO: 709271 - DNA, 618 bp, Homo sapiens
tacagccattaaaaatgattctgtaggctggacccggtggttcatgcccacartcccagcactttgggagcctgaggtgggagtatcacttgagcccgggagttcaagaccagcctgggcaacaaccccatctcttagaaaaaatatatatatataaatataaatatatatgtaattattttaatttacctgcaaagacattactgggagataacgcgcttacgtttttctgttttaaaaaaccaaacacctttacgtgtatgtatgaaaattctaaatttatgtagcaatatgttaatagtattatccactgtggcaagaatgagagtttaagtttcttttataaacatgtatgtactctcgaactactgctgctattacagggagcaggcattttttaaaagcactattcttcttacagtcaggaaatacaggacactattacttcgcgggggaagacgggcactgggaagagtccacgccggcgaaggcaggcgaagacagggctcgctgacgcccccggtcgcccgcgcctcttcccacagctctccgaggagcccagctaccggaaacacgccacatcaggcctcgggaattctgggcatcggacggacagct

SEQ ID NO: 709272 - DNA, 820 bp, Homo sapiens
taccccatatttactgcagcactatttgcaatagccaagatatggaatcaatctaaatgtcaatcaatggatgaatggataaagaaaatgggaatatacacacaatggaatagtatttagccataaaaaatgaaatcctgtcattttcagctaattgggtggaattaaaggtcataacgtcaggtgaactaggccatgcacagaaagaaaactattgcatgttctcacttatatgagcagcttatgctcctggaaatcaaagcggggccatatttcaggtcagtagggtcacggatagagaccacagttatggacttgtgtgccctggagctatataaaattgatatcatggagataaagagtagaatgatagttaccagaggctaggaataggagaggtttgaaaagaggttgattaatgggtataaaaatatataatagaaggaatragatctagtgtttattatcacagaaagtgactacaataatttattgtatatttcttttttttaatttcaatagtttttagggaacaggtggtattttgttacatggatacgtcccttaggggtgatctctgaaattttggcatacccatcagcaaagcagtttacccaatgtatagtcttttatctctcaccccctcccaccttccccctgagcccccaaagtccactgtttcattcttgtgccttcgcatcatcatagcttagctcccatgttctcccacgagtgagaacatgcaatgtttggttttccattcctgagttacttcatttgaaataatggtctccaactccatccaggttgttatgaatgc

SEQ ID NO: 709273 - DNA, 820 bp, Homo sapiens
taccccatatttactgcagcactatttgcaatagccaagatatggaatcaatctaaatgtcaatcaatggatgaatggataaagaaaatgggaatatacacacaatggaatagtatttagccataaaaaatgaaatcctgtcattttcagctaattgggtggaattaaaggtcataacgtcaggtgaactaggccatgcacagaaagaaaactattgcatgttctcacttatatgagcagcttatgctcctggaaatcaaagcggggccatatttcaggtcagtagggtcacggatagagaccacagttatggacttgtgtgccctggagctatataaaattgatatcatggagataaagagtagaatgatagttaccagaggctaggaataggagaggtttgaaaagaggttgattaatgggtataaaaatatataatagaaggaatgagatctagtgtttattatcacagaaagtgactacaataatttattgtatrtttcttttttttaatttcaatagtttttagggaacaggtggtattttgttacatggatacgtcccttaggggtgatctctgaaattttggcatacccatcagcaaagcagtttacccaatgtatagtcttttatctctcaccccctcccaccttccccctgagcccccaaagtccactgtttcattcttgtgccttcgcatcatcatagcttagctcccatgttctcccacgagtgagaacatgcaatgtttggttttccattcctgagttacttcatttgaaataatggtctccaactccatccaggttgttatgaatgc

SEQ ID NO: 709274 - DNA, 820 bp, Homo sapiens
taccccatatttactgcagcactatttgcaatagccaagatatggaatcaatctaaatgtcaatcaatggatgaatggataaagaaaatgggaatatacacacaatggaatagtatttagccataaaaaatgaaatcctgtcattttcagctaattgggtggaattaaaggtcataacgtcaggtgaactaggccatgcacagaaagaaaactattgcatgttctcacttatatgagcagcttatgctcctggaaatcaaagcggggccatatttcaggtcagtagggtcacggatagagaccacagttatggacttgtgtgccctggagctatataaaattgatatcatggagataaagagtagaatgatagttaccagaggctaggaataggagaggtttgaaaagaggttgattaatgggtataaaaatatataatagaaggaatgagatctagtgtttattatcacagaaagtgactacaataatttattgtatatttcttttttttaatttcaatagtttttagggaacaggtggtattttgttacatggatacgtcccttaggggtgatctctgaaattttggcatacccatcagcaaagcagtttacccaatgtatagtcttttatctctcaccccctcccaccttccccctgagcccccaaagtccactgtttcattcttgtgccttcgcatcatcatagcttagctcccatgttmtcccacgagtgagaacatgcaatgtttggttttccattcctgagttacttcatttgaaataatggtctccaactccatccaggttgttatgaatgc

SEQ ID NO: 709275 - DNA, 820 bp, Homo sapiens
taccccatatttactgcagcactatttgcaatagccaagatatggaatcaatctaaatgtcaatcaatggatgaatggataaagaaaatgggaatatacacacaatggaatagtatttagccataaaaaatgaaatcctgtcattttcagctaattgggtggaattaaaggtcataacgtcaggtgaactaggccatgcacagaaagaaaactattgcatgttctcacttatatgagcagcttatgctcctggaaatcaaagcggggccatatttcaggtcagtagggtcacggatagagaccacagttatggacttgtgtgccctggagctatataaaattgatatcatggagataaagagtagaatgatagttaccagaggctaggaataggagaggtttgaaaagaggttgattaatgggtataaaaatatataatagaaggaatgagatctagtgtttattatcacagaaagtgactacaataatttattgtatatttcttttttttaatttcaatagtttttagggaacaggtggtattttgttacatggatacgtcccttaggggtgatctctgaaattttggcatacccatcagcaaagcagtttacccaatgtatagtcttttatctctcaccccctcccaccttccccctgagcccccaaagtccactgtttcattcttgtgccttcgcatcatcatagcttagctcccatgttcycccacgagtgagaacatgcaatgtttggttttccattcctgagttacttcatttgaaataatggtctccaactccatccaggttgttatgaatgc

SEQ ID NO: 709276 - DNA, 820 bp, Homo sapiens
taccccatatttactgcagcactatttgcaatagccaagatatggaatcaatctaaatgtcaatcaatggatgaatggataaagaaaatgggaatatacacacaatggaatagtatttagccataaaaaatgaaatcctgtcattttcagctaattgggtggaattaaaggtcataacgtcaggtgaactaggccatgcacagaaagaaaactattgcatgttctcacttatatgagcagcttatgctcctggaaatcaaagcggggccatatttcaggtcagtagggtcacggatagagaccacagttatggacttgtgtgccctggagctatataaaattgatatcatggagataaagagtagaatgatagttaccagaggctaggaataggagaggtttgaaaagaggttgattaatgggtataaaaatatataatagaaggaatgagatctagtgtttattatcacagaaagtgactacaataatttattgtatatttcttttttttaatttcaatagtttttagggaacaggtggtattttgttacatggatacgtcccttaggggtgatctctgaaattttggcatacccatcagcaaagcagtttacccaatgtatagtcttttatctctcaccccctcccaccttccccctgagcccccaaagtccactgtttcattcttgtgccttcgcatcatcatagcttagctcccatgttctcycacgagtgagaacatgcaatgtttggttttccattcctgagttacttcatttgaaataatggtctccaactccatccaggttgttatgaatgc

SEQ ID NO: 709277 - DNA, 820 bp, Homo sapiens
taccccatatttactgcagcactatttgcaatagccaagatatggaatcaatctaaatgtcaatcaatggatgaatggataaagaaaatgggaatatacacacaatggaatagtatttagccataaaaaatgaaatcctgtcattttcagctaattgggtggaattaaaggtcataacgtcaggtgaactaggccatgcacagaaagaaaactattgcatgttctcacttatatgagcagcttatgctcctggaaatcaaagcggggccatatttcaggtcagtagggtcacggatagagaccacagttatggacttgtgtgccctggagctatataaaattgatatcatggagataaagagtagaatgatagttaccagaggctaggaataggagaggtttgaaaagaggttgattaatgggtataaaaatatataatagaaggaatgagatctagtgtttattatcacagaaagtgactacaataatttattgtatatttcttttttttaatttcaatagtttttagggaacaggtggtattttgttacatggatacgtcccttaggggtgatctctgaaattttggcatacccatcagcaaagcagtttacccaatgtatagtcttttatctctcaccccctcccaccttccccctgagcccccaaagtccactgtttcattcttgtgccttcgcatcatcatagcttagctcccatgttctccyacgagtgagaacatgcaatgtttggttttccattcctgagttacttcatttgaaataatggtctccaactccatccaggttgttatgaatgc

SEQ ID NO: 709278 - DNA, 2422 bp, Homo sapiens
cagagtcaaagctgcaaccagaataccctgactcgcagagacctatggtgcctgctgatcgtggctttcctagaagtgaaatagataagaagcctgccacatttttacktgatctgtgtttgcagaagagttctaggtcaggtgagcagaagtctaatctgaatcataaaaacagtgtcacagaccccattcaattccctgccataagccagttcacagacccggagtcccttgtctgaatgggaagccaggtcccctccagaaaggactctgctccactgccaaaaatttatactgtcaatctttctcccagcctgcccccaagggaatacacagcctttaccaggatgactgaacaggagaaaaggaactaatgagacctgtgcaggatcactggacacaggctctgaactggcactaggctgagactagggtctaccagtcagaatacacattttttaggtcaggtgaatgttggtccaagttcatgtcatggtagatccattgggtcccccaatccatcctctggttatatacaaaatggccatgttgagatttaaattcagggtatccaacttagaggctgtgctcttactcatgaaacattctgacactactaaccaatttaaaaatgcaaacacctcctggggctagcgagagtcctccaaacagtcatgtaaattggttctgtcaaggatttcctcctacccaccccacccaccactgagagccagttgcaaggagagactagggaagggcattgggtaactttgttgctaaaagctcttctggataaagaagagctttaccaggaaaaagaagcaaaatagagttcagcagaagttgcgaaaagaagcaaatagagttcagcagaagaggtaagaaagtaagtttatgtttgcccaggcacggtggctcacgcctgtaatcctagcactttgggaagccaaggcgggcagatcacgaggtcaagagatcgcaccatcccggccaacatggtgaagccccgtctgtactaaaaattcaaaaattagctggtcatgatggcacacgcctgtagtcccaggtactcgggagcctgaggaaggagtatcactagaacgcaggaggcagaggttgcagtgggccgagatcatgccactgcattccaacccggtgacagaactagactccatctcataaaacaaaacaaaacaaacaaaaaaagtaagcttatttttaagcctgaacaaatgtaatgatttaggggttctgcaaacacggccccaatcaggctacaagatgttgtggcagcaatatttacagccagtcactcctggacggctgagccacttttcaaaacgcccttgcacggctgtgcagagtggctggctccactggcagccggcagagtaataactcacactgtcaccactgccctaaaacctcttcggtaagcgctttgtttttttgagatggagtcttgctctgtcatccaggctggagtgcagtggcacaatctcggctcactgcaagccctgcctcctgggttcatgccattctcctgcctcagcctcccaagtagctgggactacaggcactcgccacgatgcccggctaattttttgtattttcagtagagacggggttttaccgtgttagccagcatggtctcaatctcctgaccttgtgatctgcctgcctctgcctccaaagtgctgggattacaggcgtgaccaccgcgcctggcctggtaagcacttttaatcaatgcaacaggaataaacatttgctgcagagcggcaatgtgcagggaggaacatgcttccactcaggatcagaaagcaaaacctcctggctgtttgcatctatgcaagagctcacaggaaaagccctctgtgtggctgccagcctcacacactccccccaaggggtgagtttctctttccatgttaatctatgctctgacgtgccatctgtcaaccaccacaccattctcagttgacatttcaaagcatctttgccctgagaatggtcaccagccctgccctgcaagcccccaggtgacaatgaacttaaatgagagagaaaacaggtttcggggtggatttcagttcagcatcttggagtctctgtgtggacatgaaatctgtctccccagctgtgggctgcatccttgtttgtcatctggtttggttcttggggacttggaaactcgtgggcacctttgcaatttgtcaagaagctgcacggcccttccaacaaaagcaaggaataggagcagaagcccaaggcttcagatcaaggtgcaatttaaagcagcctcagtgtaaaagcaaacaagagccagagggatgcctaaggcagagtctagaccccagggcaactataaggcaaagagaaagagagagagagacagagacagaaagacagagagagatgg

SEQ ID NO: 709279 - DNA, 2422 bp, Homo sapiens
cagagtcaaagctgcaaccagaataccctgactcgcagagacctatggtgcctgctgatcgtggctttcctagaagtgaaatagataagaagcctgccacatttttacgtgatctgtgtttgcagaagagttctaggtcaggtgagcagaagtctaatctgaatcataaaaacagtgtcacagaccccattcaattcccwgccataagccagttcacagacccggagtcccttgtctgaatgggaagccaggtcccctccagaaaggactctgctccactgccaaaaatttatactgtcaatctttctcccagcctgcccccaagggaatacacagcctttaccaggatgactgaacaggagaaaaggaactaatgagacctgtgcaggatcactggacacaggctctgaactggcactaggctgagactagggtctaccagtcagaatacacattttttaggtcaggtgaatgttggtccaagttcatgtcatggtagatccattgggtcccccaatccatcctctggttatatacaaaatggccatgttgagatttaaattcagggtatccaacttagaggctgtgctcttactcatgaaacattctgacactactaaccaatttaaaaatgcaaacacctcctggggctagcgagagtcctccaaacagtcatgtaaattggttctgtcaaggatttcctcctacccaccccacccaccactgagagccagttgcaaggagagactagggaagggcattgggtaactttgttgctaaaagctcttctggataaagaagagctttaccaggaaaaagaagcaaaatagagttcagcagaagttgcgaaaagaagcaaatagagttcagcagaagaggtaagaaagtaagtttatgtttgcccaggcacggtggctcacgcctgtaatcctagcactttgggaagccaaggcgggcagatcacgaggtcaagagatcgcaccatcccggccaacatggtgaagccccgtctgtactaaaaattcaaaaattagctggtcatgatggcacacgcctgtagtcccaggtactcgggagcctgaggaaggagtatcactagaacgcaggaggcagaggttgcagtgggccgagatcatgccactgcattccaacccggtgacagaactagactccatctcataaaacaaaacaaaacaaacaaaaaaagtaagcttatttttaagcctgaacaaatgtaatgatttaggggttctgcaaacacggccccaatcaggctacaagatgttgtggcagcaatatttacagccagtcactcctggacggctgagccacttttcaaaacgcccttgcacggctgtgcagagtggctggctccactggcagccggcagagtaataactcacactgtcaccactgccctaaaacctcttcggtaagcgctttgtttttttgagatggagtcttgctctgtcatccaggctggagtgcagtggcacaatctcggctcactgcaagccctgcctcctgggttcatgccattctcctgcctcagcctcccaagtagctgggactacaggcactcgccacgatgcccggctaattttttgtattttcagtagagacggggttttaccgtgttagccagcatggtctcaatctcctgaccttgtgatctgcctgcctctgcctccaaagtgctgggattacaggcgtgaccaccgcgcctggcctggtaagcacttttaatcaatgcaacaggaataaacatttgctgcagagcggcaatgtgcagggaggaacatgcttccactcaggatcagaaagcaaaacctcctggctgtttgcatctatgcaagagctcacaggaaaagccctctgtgtggctgccagcctcacacactccccccaaggggtgagtttctctttccatgttaatctatgctctgacgtgccatctgtcaaccaccacaccattctcagttgacatttcaaagcatctttgccctgagaatggtcaccagccctgccctgcaagcccccaggtgacaatgaacttaaatgagagagaaaacaggtttcggggtggatttcagttcagcatcttggagtctctgtgtggacatgaaatctgtctccccagctgtgggctgcatccttgtttgtcatctggtttggttcttggggacttggaaactcgtgggcacctttgcaatttgtcaagaagctgcacggcccttccaacaaaagcaaggaataggagcagaagcccaaggcttcagatcaaggtgcaatttaaagcagcctcagtgtaaaagcaaacaagagccagagggatgcctaaggcagagtctagaccccagggcaactataaggcaaagagaaagagagagagagacagagacagaaagacagagagagatgg

SEQ ID NO: 709280 - DNA, 2422 bp, Homo sapiens
cagagtcaaagctgcaaccagaataccctgactcgcagagacctatggtgcctgctgatcgtggctttcctagaagtgaaatagataagaagcctgccacatttttacgtgatctgtgtttgcagaagagttctaggtcaggtgagcagaagtctaatctgaatcataaaaacagtgtcacagaccccattcaattccctgccataagccagttcacagacccggagtcccttgtctgaatgggaagccaggtcccctccagaaagkactctgctccactgccaaaaatttatactgtcaatctttctcccagcctgcccccaagggaatacacagcctttaccaggatgactgaacaggagaaaaggaactaatgagacctgtgcaggatcactggacacaggctctgaactggcactaggctgagactagggtctaccagtcagaatacacattttttaggtcaggtgaatgttggtccaagttcatgtcatggtagatccattgggtcccccaatccatcctctggttatatacaaaatggccatgttgagatttaaattcagggtatccaacttagaggctgtgctcttactcatgaaacattctgacactactaaccaatttaaaaatgcaaacacctcctggggctagcgagagtcctccaaacagtcatgtaaattggttctgtcaaggatttcctcctacccaccccacccaccactgagagccagttgcaaggagagactagggaagggcattgggtaactttgttgctaaaagctcttctggataaagaagagctttaccaggaaaaagaagcaaaatagagttcagcagaagttgcgaaaagaagcaaatagagttcagcagaagaggtaagaaagtaagtttatgtttgcccaggcacggtggctcacgcctgtaatcctagcactttgggaagccaaggcgggcagatcacgaggtcaagagatcgcaccatcccggccaacatggtgaagccccgtctgtactaaaaattcaaaaattagctggtcatgatggcacacgcctgtagtcccaggtactcgggagcctgaggaaggagtatcactagaacgcaggaggcagaggttgcagtgggccgagatcatgccactgcattccaacccggtgacagaactagactccatctcataaaacaaaacaaaacaaacaaaaaaagtaagcttatttttaagcctgaacaaatgtaatgatttaggggttctgcaaacacggccccaatcaggctacaagatgttgtggcagcaatatttacagccagtcactcctggacggctgagccacttttcaaaacgcccttgcacggctgtgcagagtggctggctccactggcagccggcagagtaataactcacactgtcaccactgccctaaaacctcttcggtaagcgctttgtttttttgagatggagtcttgctctgtcatccaggctggagtgcagtggcacaatctcggctcactgcaagccctgcctcctgggttcatgccattctcctgcctcagcctcccaagtagctgggactacaggcactcgccacgatgcccggctaattttttgtattttcagtagagacggggttttaccgtgttagccagcatggtctcaatctcctgaccttgtgatctgcctgcctctgcctccaaagtgctgggattacaggcgtgaccaccgcgcctggcctggtaagcacttttaatcaatgcaacaggaataaacatttgctgcagagcggcaatgtgcagggaggaacatgcttccactcaggatcagaaagcaaaacctcctggctgtttgcatctatgcaagagctcacaggaaaagccctctgtgtggctgccagcctcacacactccccccaaggggtgagtttctctttccatgttaatctatgctctgacgtgccatctgtcaaccaccacaccattctcagttgacatttcaaagcatctttgccctgagaatggtcaccagccctgccctgcaagcccccaggtgacaatgaacttaaatgagagagaaaacaggtttcggggtggatttcagttcagcatcttggagtctctgtgtggacatgaaatctgtctccccagctgtgggctgcatccttgtttgtcatctggtttggttcttggggacttggaaactcgtgggcacctttgcaatttgtcaagaagctgcacggcccttccaacaaaagcaaggaataggagcagaagcccaaggcttcagatcaaggtgcaatttaaagcagcctcagtgtaaaagcaaacaagagccagagggatgcctaaggcagagtctagaccccagggcaactataaggcaaagagaaagagagagagagacagagacagaaagacagagagagatgg

SEQ ID NO: 709281 - DNA, 2422 bp, Homo sapiens
cagagtcaaagctgcaaccagaataccctgactcgcagagacctatggtgcctgctgatcgtggctttcctagaagtgaaatagataagaagcctgccacatttttacgtgatctgtgtttgcagaagagttctaggtcaggtgagcagaagtctaatctgaatcataaaaacagtgtcacagaccccattcaattccctgccataagccagttcacagacccggagtcccttgtctgaatgggaagccaggtcccctccagaaaggactctgctccactgccaaaaatttatactgtcaatctttctcccagcctgcccccaagggaatacacagcctttaccaggatgactgaacaggagaaaaggaactaatgagacctgtgcaggatcactggacacaggctctgaactggcactaggctgagactagggtctaccagtcagaatacacattttttaggtcaggtgaatgttggtccaagttcatgtcatggtagatccattgggtcccccaatccatcctctggttatatacaaaatggccatgttgagatttaaattcagggtatccaacttagaggctgtgctcttactcatgaaacattctgacactactaaccaatttaaaaatgcaaacacctcctggggctagcgagagtcctccaaacagtcatgtaaattggttctgtcaaggatttcctcctacccaccccacccaccactgagagccagttgcaaggagagactagggaagggcattgggtaactttgttgctaaaagctcttctggataaagaagagctttaccaggaaaaagaagcaaaatagagttcagcagaagttgcgaaaagaagcaaatagagttcagcagaagaggtaagaaagtaagtttatgtttgcccaggcacggtggctcacgcctgtaatcctagcactttgggaagccaaggcgggcagatcacgaggtcaagagatcgcaccatcccggccaacatggtgaagccccgtctgtactaaaaattcaaaaattagctggtcatgatggcacacgcctgtagtcccaggtactcgggagcctgaggaaggagtatcactagaacgcaggaggcagaggttgcagtgggccgagatcatgccactgcattccaacccggtgacagaactagactccatctcataaaacaaaacaaaacaaacaaaaaaagtaagcttatttttaagcctgaacaaatgtaatgatttaggggttctgcaaacacggccccaatcaggctacaagatgttgtggcagcaatatttacagccagtcactcctggacggctgagccacttttcaaaacgcccttgcacggctgtgcagagtggctggctccactggcagccggcagagtaataactcacactgtcaccactgccctaaaacctcttcggtaagcgctttgtttttttgagatggagtcttgctctgtcatccaggctggagtgcagtggcacaatctcggctcactgcaagccctgcctcctgggttcatgccattctcctgcctcagcctcccaagtagctgggactacaggcactcgccacsatgcccggctaattttttgtattttcagtagagacggggttttaccgtgttagccagcatggtctcaatctcctgaccttgtgatctgcctgcctctgcctccaaagtgctgggattacaggcgtgaccaccgcgcctggcctggtaagcacttttaatcaatgcaacaggaataaacatttgctgcagagcggcaatgtgcagggaggaacatgcttccactcaggatcagaaagcaaaacctcctggctgtttgcatctatgcaagagctcacaggaaaagccctctgtgtggctgccagcctcacacactccccccaaggggtgagtttctctttccatgttaatctatgctctgacgtgccatctgtcaaccaccacaccattctcagttgacatttcaaagcatctttgccctgagaatggtcaccagccctgccctgcaagcccccaggtgacaatgaacttaaatgagagagaaaacaggtttcggggtggatttcagttcagcatcttggagtctctgtgtggacatgaaatctgtctccccagctgtgggctgcatccttgtttgtcatctggtttggttcttggggacttggaaactcgtgggcacctttgcaatttgtcaagaagctgcacggcccttccaacaaaagcaaggaataggagcagaagcccaaggcttcagatcaaggtgcaatttaaagcagcctcagtgtaaaagcaaacaagagccagagggatgcctaaggcagagtctagaccccagggcaactataaggcaaagagaaagagagagagagacagagacagaaagacagagagagatgg

SEQ ID NO: 709282 - DNA, 616 bp, Homo sapiens
gctatttgggctctcttttcattccatatgaattttaggatagtttcttcttgttcttaaatgcatattataattaacttgtttagctctaagaaaaaaacttgattttgtattggaatagcattaaatttaatatttttaaaaaatgtttcatctacttctaacttactgcaaagagttttataaagttgcctgtaatgattttttaatgtttttcttcatttttataaaggaaacatccttgtaaccacacccaggtcaaggaatagaactttatcaatcatcccagaagcgcccaccacatgtcccatttctattataacctacttcctctccycaaaaataaccacttcccaaactcttatggtaatcatttccctaatctttatagttttatcaccaagtgtatatccctagacactatagtttagtgttgttttattcttaaaatttgatatgtttttaaagtctcttttaatctacacgtttttctctctatctctttcttttccttatcttttacaatgtttaaattttcttctgttagcacttgtaactttcttatttttttttttttctaatcagatacctagtggtttgttttggttgattattt

SEQ ID NO: 709283 - DNA, 616 bp, Homo sapiens
gctatttgggctctcttttcattccatatgaattttaggatagtttcttcttgttcttaaatgcatattataattaacttgtttagctctaagaaaaaaacttgattttgtattggaatagcattaaatttaatatttttaaaaaatgtttcatctacttctaacttactgcaaagagttttataaagttgcctgtaatgattttttaatgtttttcttcatttttataaaggaaacatccttgtaaccacacccaggtcaaggaatagaactttatcaatcatcccagaagcgcccaccacatgtcccatttctattataacctacttcctctccccaaaaataaccacttcccaaactcttatggtaatcatttccctaatctttatagttttatcaccaagtgtatatccctagacactatagtttagtgttgttttattcttaaaatttgatatgtttttaaagtctcttttaatctacacgtttttctctctatctctttcttttccttatcttttacaatgtttaarttttcttctgttagcacttgtaactttcttatttttttttttttctaatcagatacctagtggtttgttttggttgattattt

SEQ ID NO: 709284 - DNA, 1098 bp, Homo sapiens
atatatgctcctctctctcttgaattccctgctttgcccactcggctcgtatctggaaccgtctccctcactgctggctatctctaatcccctccttttccttggccctcatgctcttaaccacgccttctttcctgtaggaactgtgcttctataggaaaccgtcattccactcgcttgagactatgctggggaacaacagcagttccaaacttgcccacagcccaggagcgacgtgcgcggaagcaggaacatcttgcaccttcatcacaaggactgactaatggtggttccctttagctacagatgactccatccttcccactctcgccctttagatgacagtcttccccctgatctccacacccagctccctcactcccagctccacacttgcttcctggttggtcctggtgggccattaktgggtctatgggactcagcaggcacctgtgctgatggtttctgggttcctggatgtttgctgctggtgccgcttctcatctttctcatgaacatttccaactgcaccacgatcccactgagacacctctcagggaactcattgtgtggagaactgaatgcttctcctcctgcatcccataatgcagacagtggcttctccaccctcccaggccccagcccccaaacccctcagtcctttgtctcctctcctaaatcaacaagccctgttggctcttgccagtgaagttcctctcactctttggcctgcctgtcactgtccaatcctcgtaaattcttgccggatttcctgtgaccatctcttagctccaggcatcatcttgcctccagcttcacccccacacagcagggacctgtctcctgcaagcctcgctgtcaccgcatcctggacgtacatgagggcctgtgtctttcacagcgaagtccagacctcctgatggtgagcgcagcccttcgtgatctgcccccgacactcagccgtctcattctcagctcctcacacatgtctcaccagagccatatgctttgcatcttggatattattttcaggaaattgccccaaaccaagcagtgggaccagggacagtcggcgacttctctggtcctgtctttcct

SEQ ID NO: 709285 - DNA, 670 bp, Homo sapiens
atcgtaataatccccatgtgtcaagggtggggccaggtggagataattgaatcatggggtggtttcccccatactgttctcatggtagggaataagtctcaggagatctgatggttttataaagggagttcccctgcacatgctctctctctctttcctgctgccatgtaagacatgcctttgctcctcatttgccttccaccatgattgtgaggcctccccagccatgtggaactgtgagtccattaaacctctttcctgtataaattacccagtcttggktatgtctttattagcagcgtgagaacacactaatacaccatcttcttgtattcctgatgttcttgttgtggtttgtggttatttatttatgagacagagtttcactcttgttgcccaggctggagtgcaatggtgcaatcttggctcactgcaaccttcgcctcccaggttcaagccattctcctgtctcagactcctgagtagctgggattacagctgcccaccaccacgcccggttaattttttgtatttttagtagagatggggtttcaccatgttggccaggctgattttgaactcctgacctcaggtgattcacccatgtcggcctcccaaagtgctgggattacaggtgtgagccacagtgcctggcctgtggttttgtttt

SEQ ID NO: 709286 - DNA, 619 bp, Homo sapiens
attcaagaggaggcaggaggggcacactggcttgccttgctcagtctccctctcctccagccccagctaagtctcacccctcctccatccactctgcgtcctccagggttggttggaatctcccatcctctgctgctgcctctgcctgttctctcatctttgtcggttatatgttttgcttccctcccttcctcccttgctctcttcctcgatccattccttcttccttcttccccttttgctgttattttatgggatttggggaaggagaggcttgaatggcagtgacccattcactgtgtgtaacttgaggccccgtgtccactctgtcctcggggtcctacaacgagaaggaccatctcgagcccgtgaccctgggtggaggtgctggcccaccacggggcatggggaaccaagtccccacccagttctggmtgatgccaaggcctctctctctgccttccagaacatgcccaatgtccgtgatcatgatgcctctgtctacctccgcctccaaggggatgccttgtctgtgggtggctatgaggccaaccccatcttttgggaggaggtaagatgccagggccctgggataatgggagggagttggggctgcatc

SEQ ID NO: 709287 - DNA, 614 bp, Homo sapiens
cctggggccggggtgttttgtgagtttggttcttgtcaggccggctgagaggagatggagcagacagatggatgctaggtgggcctgccgcagctttgttttaggaagtgcggagcaccagggcctgaccctgaggctgtgtccctctaagagcacggtgkctccttccctctaaagggccaggtgctgtcctcactcactgcccctctgaagagagtcccctgcctgagtcgtggctctcctgcccttcccagacccgtgggagaccctgactacgtggcggtggcctggggttgggagggcctgaccagtgtctgtggggccaacttcctcgttcccagcatgtgtggagggtcgggcctcctcacgcgcctcatgagggtcccacgggggtagagcgtcctttgagtcctctctattcgaggagtgggtagagaggcgggtagggacggagcttggaagaggtgacgggttgtggccagaaggctgtgggggcgtcatggcaggaagggaaaccttcggagaggccgctcacccagggccgtggggccatggagaagcacaggccctgggttcagaaagcaggaggcatatgaggtcttaggtctagaagg

SEQ ID NO: 709288 - DNA, 886 bp, Homo sapiens
gatccacccatgctctctgaccatcaccagagtgagcaaatctctgatatgtgggtaagagtttctcccatgggctcccagccgggctgtaagtgaggcaagaccccttcttcagtgcacggggctcagtgcagctgcctccctgaccaagtcttcctgggacactaagcttatcagtttctctcccccagggacagtttttggttgtcctaagcctagctcagctctgctatgaactttgcatcctaagagcccattaaacacccccttgtgcctcaatggaataacctggagtaaatagtgtgaggtgcccctgctttctgctcccagggcctcttctcctcggtggcaccagcactgccctattgaccagcaatcctcacctgcccattcaggcctctacactgcctaccgtgaacagtcacagatcacaaactgattgccaaatttgtgcagatcatcttgacagtttctgtggaactgggtgccttctcatagaaccaggaagtcacaagccaggccagctctagagaagcaactgggggagtaacatgcatcacagcgcctggacacaacaaagggattttgctgtagtcctactaggacacatcctagtgatgtctctgagaaccagtcttggtccctgcaacagaaagcctactaaacaggacagtaggctgcraggttgggcacaatttgtgccgtgtgtgagccatgtagattgtgcatgtgtgtatgtgtgtacatatgtgtacatgtgcatttagtgttgcaaggaagggttgtgtcaaatgtcccaactcaaaacttttctgttttcctaagttatctgcttctatctttactacctttgtactatcataagaataaggataatgattagggt

SEQ ID NO: 709289 - DNA, 2229 bp, Homo sapiens
tatagtagtgaatggataaactataatttatttataaaaatgaatgctgaaacgaattaaaattaataatctagatctacttgtgacaatgtgaataatttttaaaataaacatgttgaataacagaagcaaattacaaaagatacatataatatgatacatttgagtaaaattccaaaacacatacttctattctgagaatagtaagagggaaaagggataatattttatttctctaaaaaaaaactaaagcaaatatgacaaaattttaacatttgtttaaacttttgatagatgtataagatatctgatatatttgctttatttgaaatgtttttgttttaaattatcactttttctccacagatccgtttttcagtcatggtaacagttttcatggtacaggtggccgaggcaacaagtttgcccagatgcgttacagtttaagactcctgagagccgtggtctaccttgaagatgagactgtaaacaaagatctttgtgaaaagggaacaattcagcaaatgataggtaaaatataacatggtggtttactgatgaaagaggaatatttttaatagtagtagttttgtttgaaatgtttttccaaaatttattttgtctttatgactgagaaattcctgaatattttcttgatttttgtttcatattgytgctataaattagtgtgtcttattgaaatatcatacttactaaccctttaagcatttatttcttcaactcaaatatcatttcatttaggattatctttatctttttttaaaatggtctattgttatgttttattcttttagtaataaaggtcaccacttttgaccaaggcttttggagctattttaaaacaggataacatggcatattccaatgcatgtgtcataacagaacactggtacattggtatttacagaaatgtacagaggagtttcttttctgatatgaaatatcagaatatccttgacttttagcttacacttgactatgctagaaaagaaaatggaaattatgtgtatcatagaaatactgcatgtgttaccctatacgtcatcaattagacacttaatgagtatctcataaaataagtacacataaactcagtgtaaaattcagaacccctaaacaaaagctgctttgccttttgttatttaaaaaataaatagttctctagatccttgactttgaaaagagctatttcagtcgttcgtattcagtgattgcttcactagtcaattatataatctgctagatgtcaattaattataaatgcctactcaaaaaatcttctacttgttaaattaaggtggttactcttccatcactagtggagtggagtggtgctctccaataataataataataatataggaaatagcaggaaatcaaagtatattgaaaaggagctaggtgaaaacatttacctttttgcccagtttgtttgggatgaacaaacctgaaagtacagtttatcattcctgtgcacattctgttgcacaaaactcagtctaactagaggaaatccaggaaacgtaatctttcatatgtctaggaagaattcttaatcctgcctgcactagggaatagggtagggaaaagggaaaacaaatagcaatggtttttttcttcttagaaccttttccctttaaccggaaagaagctgatctttatgttaagttcttagaggcagggaccttgtcttattgagtctaacatggctgtgtagtagtaacgtgctcaataagtagtaactagattttaaatgtaaatgtttatacacttcctgggtacagtgtacactgcttggtgacaggtgcaccaaaatctcagaaaccaccaataaagaacttatccatgtaaccaaaaaccacctattccccaaaaactattgaaataaaatataaatgtttatatacttcctgtgtagacactggggttacaaacatgtatagagcaggacaccaaggaccttttccttaatgagaaaatagaaactacatgtatcatagaaagatagcatgtgttagcctacacgtcatcaattagacacttaatgagtaggacagagtaaatgttacagaaactaagaggcttgggtagttttcaaggctaggaagtcttaggattctgtgaggtaaaggtagtttagaggtggaaaagaagagaaggccttcaagcaaggaaataccatgaacagagagacatggtcctgaaata

SEQ ID NO: 709290 - DNA, 3598 bp, Homo sapiens
taccagtgttttttcagtgttttcaaatacacgggaacaaagaatttgtttttctttgtactccatcaacctgttaagaaacagtttgtgaagagcttgaccatatgaaaacccatagtcatttattaataacttctagtttcttcccctgatattaaaagataagggccacgttagacaaggagcaaagataagcatttttaaagaactatgtattatttggaggtaacctgaagaagtctagtgactcatggaccattgttttgcagaatgagcagatgtgagcaagctaggccttccaatagagacagtgccatctagcagctgtgaagaatatagccccttactagcctcaattctaactggaatccatagtcaggatgatatgggaggaaacgtacaattttgtttcaataaaattttgagagagattctcacacagagttctagcccgctccctgtccgtgattctatgattgccactattcttgattttattaacagaataacaaacctactttgatttagcaaaagtgctaaaattatttgtgccccttaacctccctgaaagttagttcatttctctcttttcgatttctttacctgtaaaacagagataacaacattatatatcttattgtattgttggaaggattaaatgagtgattgtatgtctgtgtgtgcatctaagtgtgcatgcatacatatatattatagattaaatatagtgcctaacatgattcctgtatttactgttattatgaatattattgctagaatatatttaatgctgattcaaccaaattaattgcaaattacagatattatttaatgaagattttatatcaatttcaatctttcacatttgcctgtctcctgaagtagagaaataaaaaaactcatttccttgagtgttttgcttaatacaactctgctgaaatataaagtatgtaatgataactgctaataatggttaaatgttaatgagagctgactatgtaccagggagtctcatataactcataataaccctttgcaggtaatattattatcctttcattttataaaaggaaactgatgatgttcgcaattaaaacaaaagcttacatatttcctttgctatattcaaataacagtatactgtaaaagttaatcaacaaaaagtatttcacatagaagaattagattatggaggccattgctctggatggaattttctatacctaaattttggtgtactgaaaactacttgtagcaaaataaaggaaatatgctttataataggagaatttttttgaatccttaaatactcttttatggatgatgattgccacaaaaccaaattacatcttgttttattttcatatgtgattgtcatttgcagttaccatcagttactctcttaataacaaagagattacagttagtatgaatctttacaagccttaataaagcatataaattggaaagatcctgtaattacagtgaactctgtataacactatcgagcttcgccacttaaaatgaacatcttcacttatttgtgcaaatctttttccaactcagccacatcagtcacattttggtcatgatatatgtttataatgacttcagaattatattaaatcttttactttttatccttttaaatttctaatgtttgaaaatatagtcattacaatgggtgtccattttaacaggagattttcctgactctgagtttagaagaaacttaatgataatagaagtgtttctctcttttttttttgaagacaataattcttaatatttattgcaacttttttccttttctgtttccttgctaaagttgaaccaaaaaaaattctgtaatctaatacttggaataatggttgaattttgtgataatcccaaaactgcagctcatgtcaatgcttggcaagggaagaaggatcagacagctgctagtcttttaattaaattgtggagaaaggaggaaaaagaactaggagtaaaacgtgataaaaatgggaagatcattggtgagtatatttataattgttagtagaagcaattaatgtatatattttaaaagatctttaaatggtattaagaaagcatcaggcctttcacccctttgtctaaagttttttttttttttttacaagggtttgaaaaatttgctatcctaagtgactggaagaaaactaagtaaattagtagtaggttcatatttttagagaatatttttaagaaatggtatttaattatattcttttaactaaaaaaaaaattaaagtagttcctaaagatgcttctttgggttttctgcttttatagatagattcaataatatttcattgagatgtaaatagattgcttcaaaataatattttggtattttatacatttctgttcatttttcctttttctaaatccattaggcaacatgatctgattaatgtttatagagtttactttttatatgaaagaagatattgtttcctaaataaaaatagtccaaatgttcaaaaattttaattactagattctaaattaatgagacttacagtatcataatttttagttcatttacatattccatactgctatattacatttttttcttttttttttcttttttttttgtgagacagggtttcactcaggtcacccagactggggtgtgatggtgcaatcttggctcactgaaacctctgcctcccaggctcaagcgattttcctgccttagcctcccaagtagctgggactacaggcatgcactaccacacccagctaatttttgtattttttgtagagatgaggtttcaccgtgttgcccaggctggtctcaagctcctgggctcaagcgatccactcacctcagcctctgccaagtgttgggattataggcatgagccaccacacctggccaatatattacattttctttttttcttttttttttggagacagagtctcgctctttcgcccaggctggagtgcagtgacatgaactcggctcactgcaacctccgcctcccaggttcaaatgattcttctgcctcagcctcctgagtagctgggtctacaggcacgtgccaccatacccagctaatttttrtatttttttaattagagacagggtttcaccatgttggctaggctggtcttgaactcctgacctcaggggatctgcccaactccacttgccaaagtgctgggattacagacatgagccactgcaccccgcctacatattctaagccttttaagattcttatggtttcatctaaacggttcacttttttttttaaattttattttaggttcaggggtacacatacaggtttgttatatgggtaaactcatgtcacaagggtttgttgtacagattattttgtcacccaggtactaagcctagtacccaatagttattttttctgaccctctccctcctcctactctctaccatctaataggcctcagtgtgtgttgttctcctccatgtgtccatgaattctcatcatttagatcccacttataagtgaagacatgcagtgtttggttttctgttcctgtgttagtttgctaaggataatggcctccacctccatcc

SEQ ID NO: 709291 - DNA, 3598 bp, Homo sapiens
taccagtgttttttcagtgttttcaaatacacgggaacaaagaatttgtttttctttgtactccatcaacctgttaagaaacagtttgtgaagagcttgaccatatgaaaacccatagtcatttattaataacttctagtttcttcccctgatattaaaagataagggccacgttagacaaggagcaaagataagcatttttaaagaactatgtattatttggaggtaacctgaagaagtctagtgactcatggaccattgttttgcagaatgagcagatgtgagcaagctaggccttccaatagagacagtgccatctagcagctgtgaagaatatagccccttactagcctcaattctaactggaatccatagtcaggatgatatgggaggaaacgtacaattttgtttcaataaaattttgagagagattctcacacagagttctagcccgctccctgtccgtgattctatgattgccactattcttgattttattaacagaataacaaacctactttgatttagcaaaagtgctaaaattatttgtgccccttaacctccctgaaagttagttcatttctctcttttcgatttctttacctgtaaaacagagataacaacattatatatcttattgtattgttggaaggattaaatgagtgattgtatgtctgtgtgtgcatctaagtgtgcatgcatacatatatattatagattaaatatagtgcctaacatgattcctgtatttactgttattatgaatattattgctagaatatatttaatgctgattcaaccaaattaattgcaaattacagatattatttaatgaagattttatatcaatttcaatctttcacatttgcctgtctcctgaagtagagaaataaaaaaactcatttccttgagtgttttgcttaatacaactctgctgaaatataaagtatgtaatgataactgctaataatggttaaatgttaatgagagctgactatgtaccagggagtctcatataactcataataaccctttgcaggtaatattattatcctttcattttataaaaggaaactgatgatgttcgcaattaaaacaaaagcttacatatttcctttgctatattcaaataacagtatactgtaaaagttaatcaacaaaaagtatttcacatagaagaattagattatggaggccattgctctggatggaattttctatacctaaattttggtgtactgaaaactacttgtagcaaaataaaggaaatatgctttataataggagaatttttttgaatccttaaatactcttttatggatgatgattgccacaaaaccaaattacatcttgttttattttcatatgtgattgtcatttgcagttaccatcagttactctcttaataacaaagagattacagttagtatgaatctttacaagccttaataaagcatataaattggaaagatcctgtaattacagtgaactctgtataacactatcgagcttcgccacttaaaatgaacatcttcacttatttgtgcaaatctttttccaactcagccacatcagtcacattttggtcatgatatatgtttataatgacttcagaattatattaaatcttttactttttatccttttaaatttctaatgtttgaaaatatagtcattacaatgggtgtccattttaacaggagattttcctgactctgagtttagaagaaacttaatgataatagaagtgtttctctcttttttttttgaagacaataattcttaatatttattgcaacttttttccttttctgtttccttgctaaagttgaaccaaaaaaaattctgtaatctaatacttggaataatggttgaattttgtgataatcccaaaactgcagctcatgtcaatgcttggcaagggaagaaggatcagacagctgctagtcttttaattaaattgtggagaaaggaggaaaaagaactaggagtaaaacgtgataaaaatgggaagatcattggtgagtatatttataattgttagtagaagcaattaatgtatatattttaaaagatctttaaatggtattaagaaagcatcaggcctttcacccctttgtctaaagttttttttttttttttacaagggtttgaaaaatttgctatcctaagtgactggaagaaaactaagtaaattagtagtaggttcatatttttagagaatatttttaagaaatggtatttaattatattcttttaactaaaaaaaaaattaaagtagttcctaaagatgcttctttgggttttctgcttttatagatagattcaataatatttcattgagatgtaaatagattgcttcaaaataatattttggtattttatacatttctgttcatttttcctttttctaaatccattaggcaacatgatctgattaatgtttatagagtttactttttatatgaaagaagatattgtttcctaaataaaaatagtccaaatgttcaaaaattttaattactagattctaaattaatgagacttacagtatcataatttttagttcatttacatattccatactgctatattacatttttttcttttttttttcttttttttttgtgagacagggtttcactcaggtcacccagactggggtgtgatggtgcaatcttggctcactgaaacctctgcctcccaggctcaagcgattttcctgccttagcctcccaagtagctgggactacaggcatgcactaccacacccagctaatttttgtattttttgtagagatgaggtttcaccgtgttgcccaggctggtctcaagctcctgggctcaagcgatccactcacctcagcctctgccaagtgttgggattataggcatgagccaccacacctggccaatatattacattttctttttttcttttttttttggagacagagtctcgctctttcgcccaggctggagtgcagtgacatgaactcggctcactgcaacctccgcctcccaggttcaaatgattcttctgcctcagcctcctgagtagctgggtctacaggcacgtgccaccatacccagctaatttttgtatttttttaattagagacagggtttcaccatgttggctaggctggtcttgaactcctgacctcaggggatctgcccamctccacttgccaaagtgctgggattacagacatgagccactgcaccccgcctacatattctaagccttttaagattcttatggtttcatctaaacggttcacttttttttttaaattttattttaggttcaggggtacacatacaggtttgttatatgggtaaactcatgtcacaagggtttgttgtacagattattttgtcacccaggtactaagcctagtacccaatagttattttttctgaccctctccctcctcctactctctaccatctaataggcctcagtgtgtgttgttctcctccatgtgtccatgaattctcatcatttagatcccacttataagtgaagacatgcagtgtttggttttctgttcctgtgttagtttgctaaggataatggcctccacctccatcc

SEQ ID NO: 709292 - DNA, 3364 bp, Homo sapiens
atataaaaatcaccttcacataaaccttctaccaactccatcctatcaggcttcctagagtaaacaacttgttctttactctctctaaataaggacttagcctctcctttgttcatcagaaaccttattaagatttttcttagacctcggtggtgatcgggaggtgatgcttaggtataagcatatgtataggaatatatgcttggtggcttttttccccccaacatttgttacatactgaggttttggtatatattttttcttaccaagaattaaaatttacataaaatcaaaagttacagggattatactatcttttgatatgttcattttttctcctttgttagcatttagggcataccccataactccaattgcctcactagtagacatttcccagtcaaataagatatggcctgaggaaacggcccagtaagtataattttactgaaataagaacagaagcaaagttctaatgggttgatgaatacatgggaaatgaggaaatagatataagaaatgaataccaaaatttctggaagctccacagtaaccaaatgaggaattcggtgctgttgcaagaactagattgaatgaaaaaaaataaagttaaaggccaaatataattattacagacctaatttaaaaaaattatgactcttttaagtgcttatgatgctttaaaaatgttttaaaaatctgtatttttatgttctgtgtaactcgcataaaatgagttctcattaaacttcatttttacttatacaaccatgtcttccaataagtatatgttctataccttctcagagtatactctgttatgtgttgtatgtggaatatacaatgggaacaattgtgctcaattactattctgcccaatgctgtagcttaccatgtatagagtgatagtctataatacatgcataggacaatgactaacatattcttacaatatctcctttgaaggggaatattctgattaatttatgatgtggtagtaataaatacttaaaataacacatgaacacgctaatataagcactgatttcattattttatttatttatttatttaaagacagtctcactctgtcacccagactggagtgcattggcatcatcatggcttactgcagcctcaacctcctgggctcaggtgatcttcccaccacagcctcacaggcagcttagactacaagtgtgtgccatcatgcccagctaatttgttgtgttttttgtagagacagggttttgccatgtcaccaggctggtctcaaactcctggactcaagagaccaacctgccttggcctcccaaagtgctgggattacagctgtgagccactatgcctggcctcttatttttgtttcttattcatattatctaagaattttaatttactgtcagtggttattgctttatgaaatctcagtaacaagaagcaaagaaaatgagatcagtaagtgagaatcctgaatacattacgaacttttctgctcataagtcctcttgtttgaacaaacaggaagcattatcatgaaagtctcttctgataattccactgccattcttacatctatcaatgattgaaataaagtataaaaaatgagactaaccgatgactaataggatagtagaagacccttaaaatagttttattcctctagtacaggtggtcttaaatgggggtcttaaaaaaatgattctaattctcaagatttctagaaatgcttcctaaaaagtaacctttacattatatccttcaaattaaaagcaaagtgccttaacagcgaagtaaaatcatgttccataggaataaatttcctccactcattatgaatacaggtatcagaaagattaaaatttacttctttctgtcattgacacaactactctgcttattcttgcttagttatttcagtacccatgacagtgttccagcacatagctgagtatgtgggacaaattcagaacacagaaattattatattaatgcatgaataaatgaatgaatagttgaagtgtaagttcctaggaagaaaggcaatgagataaatccactttttttccctcacataggccttgtttgaagacaataattacatggcctgaggccctctctttgagaatacttcatttttactcaaagaggtcttacctagtatgtaaacctcatttgtttgatccatttaacttcatcatttgggagatataatggttctcagacttgtaatattttgacggcatgaaacaaataatatttgatttgttacatctgaaggattataaggctaatgagtaagaataactcgatgctccacttcaggtgattcgtatgctataggagttagcaatctagttcttgtctttcgtttgaataaattaacaaatattcctagagtatctactgattacaaggcctgagccagacggaccttgttagggactcttgaacaagcagaactaaaagcatgatagacaaaaggtagaaatctaattaaaagcagttgagatgatgacacaagatcaattgaaataatctgcaaagcccagaatgaagttagacacttttcattttagtctgctgacaaaattaagcaatataacatcacaaaatattagatttgttaattatatatttgtctattttatgcttaagtgtatctacattaaatgttagattaaatgcaatgtggtgttagtattagaccctggagtaaagtcataggtgaaaaaccagtgaaagcaaatagtctgtagtttagttaatattctagcaatattaatttttttagttttgaaaaatggttataaaagatgttaacattcgggcaaactggataaagattacatggaatctcttttggctatttttgtaacttctgtaaattaaaaagtacttcaaaataaaattatttaaaattgtaattagaacaactctatattaaattttttcataaccctcattattgtgtgtgtgtgtgtatatatgtatatatgtatatatgtgtatatatgtatatatgtatatatgtgtatatrtgtatatatgtatatatgtgtatatatgcatatatatgtatatatgtgtatatatgtatatatgtatatatgtatatgtatgtatatatgtatgtgtgtatatatatggttttgttttgttttttttttttttttttttgagacagagtctctctctgtcgcccaggctgaagtgtagtggcgctatctcggctcactgcaagctccgcctcccaggttcacgccattctcctgcctcagcctcctgagtagctgggactacaggcgcccactatcacgcccggctaattttttgtatttttagtagagacgaggtttcaccg

SEQ ID NO: 709293 - DNA, 3364 bp, Homo sapiens
atataaaaatcaccttcacataaaccttctaccaactccatcctatcaggcttcctagagtaaacaacttgttctttactctctctaaataaggacttagcctctcctttgttcatcagaaaccttattaagatttttcttagacctcggtggtgatcgggaggtgatgcttaggtataagcatatgtataggaatatatgcttggtggcttttttccccccaacatttgttacatactgaggttttggtatatattttttcttaccaagaattaaaatttacataaaatcaaaagttacagggattatactatcttttgatatgttcattttttctcctttgttagcatttagggcataccccataactccaattgcctcactagtagacatttcccagtcaaataagatatggcctgaggaaacggcccagtaagtataattttactgaaataagaacagaagcaaagttctaatgggttgatgaatacatgggaaatgaggaaatagatataagaaatgaataccaaaatttctggaagctccacagtaaccaaatgaggaattcggtgctgttgcaagaactagattgaatgaaaaaaaataaagttaaaggccaaatataattattacagacctaatttaaaaaaattatgactcttttaagtgcttatgatgctttaaaaatgttttaaaaatctgtatttttatgttctgtgtaactcgcataaaatgagttctcattaaacttcatttttacttatacaaccatgtcttccaataagtatatgttctataccttctcagagtatactctgttatgtgttgtatgtggaatatacaatgggaacaattgtgctcaattactattctgcccaatgctgtagcttaccatgtatagagtgatagtctataatacatgcataggacaatgactaacatattcttacaatatctcctttgaaggggaatattctgattaatttatgatgtggtagtaataaatacttaaaataacacatgaacacgctaatataagcactgatttcattattttatttatttatttatttaaagacagtctcactctgtcacccagactggagtgcattggcatcatcatggcttactgcagcctcaacctcctgggctcaggtgatcttcccaccacagcctcacaggcagcttagactacaagtgtgtgccatcatgcccagctaatttgttgtgttttttgtagagacagggttttgccatgtcaccaggctggtctcaaactcctggactcaagagaccaacctgccttggcctcccaaagtgctgggattacagctgtgagccactatgcctggcctcttatttttgtttcttattcatattatctaagaattttaatttactgtcagtggttattgctttatgaaatctcagtaacaagaagcaaagaaaatgagatcagtaagtgagaatcctgaatacattacgaacttttctgctcataagtcctcttgtttgaacaaacaggaagcattatcatgaaagtctcttctgataattccactgccattcttacatctatcaatgattgaaataaagtataaaaaatgagactaaccgatgactaataggatagtagaagacccttaaaatagttttattcctctagtacaggtggtcttaaatgggggtcttaaaaaaatgattctaattctcaagatttctagaaatgcttcctaaaaagtaacctttacattatatccttcaaattaaaagcaaagtgccttaacagcgaagtaaaatcatgttccataggaataaatttcctccactcattatgaatacaggtatcagaaagattaaaatttacttctttctgtcattgacacaactactctgcttattcttgcttagttatttcagtacccatgacagtgttccagcacatagctgagtatgtgggacaaattcagaacacagaaattattatattaatgcatgaataaatgaatgaatagttgaagtgtaagttcctaggaagaaaggcaatgagataaatccactttttttccctcacataggccttgtttgaagacaataattacatggcctgaggccctctctttgagaatacttcatttttactcaaagaggtcttacctagtatgtaaacctcatttgtttgatccatttaacttcatcatttgggagatataatggttctcagacttgtaatattttgacggcatgaaacaaataatatttgatttgttacatctgaaggattataaggctaatgagtaagaataactcgatgctccacttcaggtgattcgtatgctataggagttagcaatctagttcttgtctttcgtttgaataaattaacaaatattcctagagtatctactgattacaaggcctgagccagacggaccttgttagggactcttgaacaagcagaactaaaagcatgatagacaaaaggtagaaatctaattaaaagcagttgagatgatgacacaagatcaattgaaataatctgcaaagcccagaatgaagttagacacttttcattttagtctgctgacaaaattaagcaatataacatcacaaaatattagatttgttaattatatatttgtctattttatgcttaagtgtatctacattaaatgttagattaaatgcaatgtggtgttagtattagaccctggagtaaagtcataggtgaaaaaccagtgaaagcaaatagtctgtagtttagttaatattctagcaatattaatttttttagttttgaaaaatggttataaaagatgttaacattcgggcaaactggataaagattacatggaatctcttttggctatttttgtaacttctgtaaattaaaaagtacttcaaaataaaattatttaaaattgtaattagaacaactctatattaaattttttcataaccctcattattgtgtgtgtgtgtgtatatatgtatatatgtatatatgtgtatatatgtatatatgtatatatgtgtatatatgtatatatgtatatatgtgtatatatgcatatatrtgtatatatgtgtatatatgtatatatgtatatatgtatatgtatgtatatatgtatgtgtgtatatatatggttttgttttgttttttttttttttttttttgagacagagtctctctctgtcgcccaggctgaagtgtagtggcgctatctcggctcactgcaagctccgcctcccaggttcacgccattctcctgcctcagcctcctgagtagctgggactacaggcgcccactatcacgcccggctaattttttgtatttttagtagagacgaggtttcaccg

SEQ ID NO: 709294 - DNA, 3364 bp, Homo sapiens
atataaaaatcaccttcacataaaccttctaccaactccatcctatcaggcttcctagagtaaacaacttgttctttactctctctaaataaggacttagcctctcctttgttcatcagaaaccttattaagatttttcttagacctcggtggtgatcgggaggtgatgcttaggtataagcatatgtataggaatatatgcttggtggcttttttccccccaacatttgttacatactgaggttttggtatatattttttcttaccaagaattaaaatttacataaaatcaaaagttacagggattatactatcttttgatatgttcattttttctcctttgttagcatttagggcataccccataactccaattgcctcactagtagacatttcccagtcaaataagatatggcctgaggaaacggcccagtaagtataattttactgaaataagaacagaagcaaagttctaatgggttgatgaatacatgggaaatgaggaaatagatataagaaatgaataccaaaatttctggaagctccacagtaaccaaatgaggaattcggtgctgttgcaagaactagattgaatgaaaaaaaataaagttaaaggccaaatataattattacagacctaatttaaaaaaattatgactcttttaagtgcttatgatgctttaaaaatgttttaaaaatctgtatttttatgttctgtgtaactcgcataaaatgagttctcattaaacttcatttttacttatacaaccatgtcttccaataagtatatgttctataccttctcagagtatactctgttatgtgttgtatgtggaatatacaatgggaacaattgtgctcaattactattctgcccaatgctgtagcttaccatgtatagagtgatagtctataatacatgcataggacaatgactaacatattcttacaatatctcctttgaaggggaatattctgattaatttatgatgtggtagtaataaatacttaaaataacacatgaacacgctaatataagcactgatttcattattttatttatttatttatttaaagacagtctcactctgtcacccagactggagtgcattggcatcatcatggcttactgcagcctcaacctcctgggctcaggtgatcttcccaccacagcctcacaggcagcttagactacaagtgtgtgccatcatgcccagctaatttgttgtgttttttgtagagacagggttttgccatgtcaccaggctggtctcaaactcctggactcaagagaccaacctgccttggcctcccaaagtgctgggattacagctgtgagccactatgcctggcctcttatttttgtttcttattcatattatctaagaattttaatttactgtcagtggttattgctttatgaaatctcagtaacaagaagcaaagaaaatgagatcagtaagtgagaatcctgaatacattacgaacttttctgctcataagtcctcttgtttgaacaaacaggaagcattatcatgaaagtctcttctgataattccactgccattcttacatctatcaatgattgaaataaagtataaaaaatgagactaaccgatgactaataggatagtagaagacccttaaaatagttttattcctctagtacaggtggtcttaaatgggggtcttaaaaaaatgattctaattctcaagatttctagaaatgcttcctaaaaagtaacctttacattatatccttcaaattaaaagcaaagtgccttaacagcgaagtaaaatcatgttccataggaataaatttcctccactcattatgaatacaggtatcagaaagattaaaatttacttctttctgtcattgacacaactactctgcttattcttgcttagttatttcagtacccatgacagtgttccagcacatagctgagtatgtgggacaaattcagaacacagaaattattatattaatgcatgaataaatgaatgaatagttgaagtgtaagttcctaggaagaaaggcaatgagataaatccactttttttccctcacataggccttgtttgaagacaataattacatggcctgaggccctctctttgagaatacttcatttttactcaaagaggtcttacctagtatgtaaacctcatttgtttgatccatttaacttcatcatttgggagatataatggttctcagacttgtaatattttgacggcatgaaacaaataatatttgatttgttacatctgaaggattataaggctaatgagtaagaataactcgatgctccacttcaggtgattcgtatgctataggagttagcaatctagttcttgtctttcgtttgaataaattaacaaatattcctagagtatctactgattacaaggcctgagccagacggaccttgttagggactcttgaacaagcagaactaaaagcatgatagacaaaaggtagaaatctaattaaaagcagttgagatgatgacacaagatcaattgaaataatctgcaaagcccagaatgaagttagacacttttcattttagtctgctgacaaaattaagcaatataacatcacaaaatattagatttgttaattatatatttgtctattttatgcttaagtgtatctacattaaatgttagattaaatgcaatgtggtgttagtattagaccctggagtaaagtcataggtgaaaaaccagtgaaagcaaatagtctgtagtttagttaatattctagcaatattaatttttttagttttgaaaaatggttataaaagatgttaacattcgggcaaactggataaagattacatggaatctcttttggctatttttgtaacttctgtaaattaaaaagtacttcaaaataaaattatttaaaattgtaattagaacaactctatattaaattttttcataaccctcattattgtgtgtgtgtgtgtatatatgtatatatgtatatatgtgtatatatgtatatatgtatatatgtgtatatatgtatatatgtatatatgtgtatatatgcatatatatgtatatatgtrtatatatgtatatatgtatatatgtatatgtatgtatatatgtatgtgtgtatatatatggttttgttttgttttttttttttttttttttgagacagagtctctctctgtcgcccaggctgaagtgtagtggcgctatctcggctcactgcaagctccgcctcccaggttcacgccattctcctgcctcagcctcctgagtagctgggactacaggcgcccactatcacgcccggctaattttttgtatttttagtagagacgaggtttcaccg

SEQ ID NO: 709295 - DNA, 3364 bp, Homo sapiens
atataaaaatcaccttcacataaaccttctaccaactccatcctatcaggcttcctagagtaaacaacttgttctttactctctctaaataaggacttagcctctcctttgttcatcagaaaccttattaagatttttcttagacctcggtggtgatcgggaggtgatgcttaggtataagcatatgtataggaatatatgcttggtggcttttttccccccaacatttgttacatactgaggttttggtatatattttttcttaccaagaattaaaatttacataaaatcaaaagttacagggattatactatcttttgatatgttcattttttctcctttgttagcatttagggcataccccataactccaattgcctcactagtagacatttcccagtcaaataagatatggcctgaggaaacggcccagtaagtataattttactgaaataagaacagaagcaaagttctaatgggttgatgaatacatgggaaatgaggaaatagatataagaaatgaataccaaaatttctggaagctccacagtaaccaaatgaggaattcggtgctgttgcaagaactagattgaatgaaaaaaaataaagttaaaggccaaatataattattacagacctaatttaaaaaaattatgactcttttaagtgcttatgatgctttaaaaatgttttaaaaatctgtatttttatgttctgtgtaactcgcataaaatgagttctcattaaacttcatttttacttatacaaccatgtcttccaataagtatatgttctataccttctcagagtatactctgttatgtgttgtatgtggaatatacaatgggaacaattgtgctcaattactattctgcccaatgctgtagcttaccatgtatagagtgatagtctataatacatgcataggacaatgactaacatattcttacaatatctcctttgaaggggaatattctgattaatttatgatgtggtagtaataaatacttaaaataacacatgaacacgctaatataagcactgatttcattattttatttatttatttatttaaagacagtctcactctgtcacccagactggagtgcattggcatcatcatggcttactgcagcctcaacctcctgggctcaggtgatcttcccaccacagcctcacaggcagcttagactacaagtgtgtgccatcatgcccagctaatttgttgtgttttttgtagagacagggttttgccatgtcaccaggctggtctcaaactcctggactcaagagaccaacctgccttggcctcccaaagtgctgggattacagctgtgagccactatgcctggcctcttatttttgtttcttattcatattatctaagaattttaatttactgtcagtggttattgctttatgaaatctcagtaacaagaagcaaagaaaatgagatcagtaagtgagaatcctgaatacattacgaacttttctgctcataagtcctcttgtttgaacaaacaggaagcattatcatgaaagtctcttctgataattccactgccattcttacatctatcaatgattgaaataaagtataaaaaatgagactaaccgatgactaataggatagtagaagacccttaaaatagttttattcctctagtacaggtggtcttaaatgggggtcttaaaaaaatgattctaattctcaagatttctagaaatgcttcctaaaaagtaacctttacattatatccttcaaattaaaagcaaagtgccttaacagcgaagtaaaatcatgttccataggaataaatttcctccactcattatgaatacaggtatcagaaagattaaaatttacttctttctgtcattgacacaactactctgcttattcttgcttagttatttcagtacccatgacagtgttccagcacatagctgagtatgtgggacaaattcagaacacagaaattattatattaatgcatgaataaatgaatgaatagttgaagtgtaagttcctaggaagaaaggcaatgagataaatccactttttttccctcacataggccttgtttgaagacaataattacatggcctgaggccctctctttgagaatacttcatttttactcaaagaggtcttacctagtatgtaaacctcatttgtttgatccatttaacttcatcatttgggagatataatggttctcagacttgtaatattttgacggcatgaaacaaataatatttgatttgttacatctgaaggattataaggctaatgagtaagaataactcgatgctccacttcaggtgattcgtatgctataggagttagcaatctagttcttgtctttcgtttgaataaattaacaaatattcctagagtatctactgattacaaggcctgagccagacggaccttgttagggactcttgaacaagcagaactaaaagcatgatagacaaaaggtagaaatctaattaaaagcagttgagatgatgacacaagatcaattgaaataatctgcaaagcccagaatgaagttagacacttttcattttagtctgctgacaaaattaagcaatataacatcacaaaatattagatttgttaattatatatttgtctattttatgcttaagtgtatctacattaaatgttagattaaatgcaatgtggtgttagtattagaccctggagtaaagtcataggtgaaaaaccagtgaaagcaaatagtctgtagtttagttaatattctagcaatattaatttttttagttttgaaaaatggttataaaagatgttaacattcgggcaaactggataaagattacatggaatctcttttggctatttttgtaacttctgtaaattaaaaagtacttcaaaataaaattatttaaaattgtaattagaacaactctatattaaattttttcataaccctcattattgtgtgtgtgtgtgtatatatgtatatatgtatatatgtgtatatatgtatatatgtatatatgtgtatatatgtatatatgtatatatgtgtatatatgcatatatatgtatatatgtgtatatatgtatatatgtatatatgtatatgtatgtatatatgtatgtgtgtatatatatggttttgttttgktttttttttttttttttttgagacagagtctctctctgtcgcccaggctgaagtgtagtggcgctatctcggctcactgcaagctccgcctcccaggttcacgccattctcctgcctcagcctcctgagtagctgggactacaggcgcccactatcacgcccggctaattttttgtatttttagtagagacgaggtttcaccg

SEQ ID NO: 709296 - DNA, 3364 bp, Homo sapiens
atataaaaatcaccttcacataaaccttctaccaactccatcctatcaggcttcctagagtaaacaacttgttctttactctctctaaataaggacttagcctctcctttgttcatcagaaaccttattaagatttttcttagacctcggtggtgatcgggaggtgatgcttaggtataagcatatgtataggaatatatgcttggtggcttttttccccccaacatttgttacatactgaggttttggtatatattttttcttaccaagaattaaaatttacataaaatcaaaagttacagggattatactatcttttgatatgttcattttttctcctttgttagcatttagggcataccccataactccaattgcctcactagtagacatttcccagtcaaataagatatggcctgaggaaacggcccagtaagtataattttactgaaataagaacagaagcaaagttctaatgggttgatgaatacatgggaaatgaggaaatagatataagaaatgaataccaaaatttctggaagctccacagtaaccaaatgaggaattcggtgctgttgcaagaactagattgaatgaaaaaaaataaagttaaaggccaaatataattattacagacctaatttaaaaaaattatgactcttttaagtgcttatgatgctttaaaaatgttttaaaaatctgtatttttatgttctgtgtaactcgcataaaatgagttctcattaaacttcatttttacttatacaaccatgtcttccaataagtatatgttctataccttctcagagtatactctgttatgtgttgtatgtggaatatacaatgggaacaattgtgctcaattactattctgcccaatgctgtagcttaccatgtatagagtgatagtctataatacatgcataggacaatgactaacatattcttacaatatctcctttgaaggggaatattctgattaatttatgatgtggtagtaataaatacttaaaataacacatgaacacgctaatataagcactgatttcattattttatttatttatttatttaaagacagtctcactctgtcacccagactggagtgcattggcatcatcatggcttactgcagcctcaacctcctgggctcaggtgatcttcccaccacagcctcacaggcagcttagactacaagtgtgtgccatcatgcccagctaatttgttgtgttttttgtagagacagggttttgccatgtcaccaggctggtctcaaactcctggactcaagagaccaacctgccttggcctcccaaagtgctgggattacagctgtgagccactatgcctggcctcttatttttgtttcttattcatattatctaagaattttaatttactgtcagtggttattgctttatgaaatctcagtaacaagaagcaaagaaaatgagatcagtaagtgagaatcctgaatacattacgaacttttctgctcataagtcctcttgtttgaacaaacaggaagcattatcatgaaagtctcttctgataattccactgccattcttacatctatcaatgattgaaataaagtataaaaaatgagactaaccgatgactaataggatagtagaagacccttaaaatagttttattcctctagtacaggtggtcttaaatgggggtcttaaaaaaatgattctaattctcaagatttctagaaatgcttcctaaaaagtaacctttacattatatccttcaaattaaaagcaaagtgccttaacagcgaagtaaaatcatgttccataggaataaatttcctccactcattatgaatacaggtatcagaaagattaaaatttacttctttctgtcattgacacaactactctgcttattcttgcttagttatttcagtacccatgacagtgttccagcacatagctgagtatgtgggacaaattcagaacacagaaattattatattaatgcatgaataaatgaatgaatagttgaagtgtaagttcctaggaagaaaggcaatgagataaatccactttttttccctcacataggccttgtttgaagacaataattacatggcctgaggccctctctttgagaatacttcatttttactcaaagaggtcttacctagtatgtaaacctcatttgtttgatccatttaacttcatcatttgggagatataatggttctcagacttgtaatattttgacggcatgaaacaaataatatttgatttgttacatctgaaggattataaggctaatgagtaagaataactcgatgctccacttcaggtgattcgtatgctataggagttagcaatctagttcttgtctttcgtttgaataaattaacaaatattcctagagtatctactgattacaaggcctgagccagacggaccttgttagggactcttgaacaagcagaactaaaagcatgatagacaaaaggtagaaatctaattaaaagcagttgagatgatgacacaagatcaattgaaataatctgcaaagcccagaatgaagttagacacttttcattttagtctgctgacaaaattaagcaatataacatcacaaaatattagatttgttaattatatatttgtctattttatgcttaagtgtatctacattaaatgttagattaaatgcaatgtggtgttagtattagaccctggagtaaagtcataggtgaaaaaccagtgaaagcaaatagtctgtagtttagttaatattctagcaatattaatttttttagttttgaaaaatggttataaaagatgttaacattcgggcaaactggataaagattacatggaatctcttttggctatttttgtaacttctgtaaattaaaaagtacttcaaaataaaattatttaaaattgtaattagaacaactctatattaaattttttcataaccctcattattgtgtgtgtgtgtgtatatatgtatatatgtatatatgtgtatatatgtatatatgtatatatgtgtatatatgtatatatgtatatatgtgtatatatgcatatatatgtatatatgtgtatatatgtatatatgtatatatgtatatgtatgtatatatgtatgtgtgtatatatatggttttgttttgttttttttttttttttttttgagacagagtctctctctgtcgcccaggctgragtgtagtggcgctatctcggctcactgcaagctccgcctcccaggttcacgccattctcctgcctcagcctcctgagtagctgggactacaggcgcccactatcacgcccggctaattttttgtatttttagtagagacgaggtttcaccg

SEQ ID NO: 709297 - DNA, 2706 bp, Homo sapiens
ctcacttggaagcgggtcttcaagagctttaaaagttaaaagcaaaaacgttaaaccttaatctgttgctcacacaaatatccattcaaacaaggacggctatgggcagactgcatcctttctgcccttccttggtaatggtggggctgtcactttctatattcacttccaataagccatccagtattcactcttactaggagtccacagtacatctttcctttgtgcccaagatgctggtgtaccatttcaagacatttttttccctaagctagcagccccttaatttcctactctgttaacaaggaatgtgttgaatgtgaatgggtcacatttactgaatctttgtcaagcactgagctcagcaacactctcaataattctatgaggcaggtaatattgtgtcttttttaggatgaggaaactgagacacagaggttgaataatgtcctgaggaccacccagctagtaggcagttgcacttggattcaatcctatgattgtatgattccaggacttgagctcttaacagctactctattctatttcctttccgaaagaattgacaggtagaataaccatcctgggagtggaggacgaaaagagagggagcccttcagtgaagcctttaaagcccaataatacttcagcgagccgttctaatattcaataaaatctctagattccatttgcattttaaacttgatttttttttgaaaaaaaaattttttttttcttaaaagagtctcactaagtttcccacgctggctttgaactcctgggctcaagggatcctcccacttcagcctcctgagtagctgggcctaatttgttgcccactttatttgtgaatggctagcaatttcaggacgatggcaaccaaaggttctgattcatcctcctatcttttttttcttttctgctgtgtccattggtcaggattcagggcaaggtcatgggtagagattttgtagtatggcctagagctatatgaaaacaacattgaccttggagctaattctgtatttactttttgttctccagcaccatagtagcttttatagacaatacctaaaaatactttttttgcattgcacctgagaggagtgtaggtttgaaaaagcatctgtgtctaagggaatcacatttttagaaccattgtagaaactattgatggatgttccaaacttatggcctttctgattctttttattccctcctaccatcaaaattccaagctgagactggaattttttattccctcctaccatcaaaattccaagctaactgtagccgttagctaccctcatcattcttttctgtgtgtgctctccagctttttccccaatggattcctctccgacatcttacacacttaacgtcaatatttgtttttagtccaaaacttacttaagacatttgggagttgtcatacgatcactgatttgagttgtacagagtggatgtgctgcagaaaactaaaggtcattcacttgcatcaaatactcatattaagggatgatggtttgccttactgctgtggcaaaggtgctcaacagcattctagctaaaataattcacagttgtaacttaattttgtttgtttgcttatttctttttttctgtttctttctttctttctttctttctttctttctttctttctttctttctttctttctttctttctttctttctttcttctttttttttttttcctgagacagggtcttgctctgtcacccaggctggagtgcagtggtgcaaacagctcacttcagccttgacctcccagactcaagtgatcctcccacttcagcccccmagtagctgggtctacaggcacacgccaccatgcctggctaattttttaaatttttttgttgaaattaggtttccccatgttgaccaggctggtctcaaactcctgagctcaagtgagccatctgcctcagcttcacaaagtgctgggattacaggtgtgagccaccatgtttagcctacttaattttctcaataaaaatatttatatggtgattttgcatttactgctatgtttgatcttcacagcaatgctgttcggtaagcatcactgacaaccctcaggatgttaaagaactttcttgaagttatgcagccaataagcataacttgctgaagttatgcagtaaataagcagcaaaaaagcagagaagccaggagctctttcctttccaaaagactaatataaaatgtcaaatttgcatttaagaaacaagctactgttatgggatctttggggtgtcaatttttctggccagaaacctctgtggctggagatgcctttgcccaagttttgcttgggcctgtggggcttgtgttttgcccacttggcctggcaggctgcgctgggctcatgctaccggcctgggtcccacacctgccaagggtgagtcaggcctggaactgtgaggagtgtgtgagggagcatggagtctggccactgtgcagtcagacatgccacctgctggagcagggcaggctgctccaggagccagcacaggtgcgggctctctgcaaggctgtgactgaaccacttgcactgcaagcagcttccacagctggcaccagggaacacagtggctcctggaagattggagatgccaggaactgcagggccccaaagagggaggagtcatagcctggcttggggaactcccaggtctg

SEQ ID NO: 709298 - DNA, 627 bp, Homo sapiens
tgcatttggaaaatatggcagccagggaaaccttccccttattgctctggaggtttgctgcaaaaaatcaatcagaaaaaggtgaggggtagagctgcacaggaacaagtgtataattatgcagattcatttcctcaagtaatttcttggcgctgctcttagaagaatagatgaaagctctgtctggatgtggtgataactccaagtctcttctcaggtggttgatttttcctggttatttgatgagatcacttagggtgaggatttaagacaattgtatttcttttggaaagaagctttcttggtcagatgaggaaattccaaagagactctctccctgtaattggaagtggagatgcaagacaaggttagaggagcattgattctgagtcatcttcaaaagcctctcagtatatcagagtgccagtctttgggatattgctttttgagtcccaacaaaagggatkgataagtgggtttgtgaactttcaaggatgtaaacacttggtctcaaagattccttgtcctgtagcataggataaatgtagaggtgggcaaaattgggcccagtaaagcctgaagcccaggggcacataccctggttgctgagctctaagggaagtgtca

SEQ ID NO: 709299 - DNA, 627 bp, Homo sapiens
tgcatttggaaaatatggcagccagggaaaccttccccttattgctctggaggtttgctgcaaaaaatcaatcagaaaaaggtgaggggtagagctgcacaggaacaagtgtataattatgcagattcatttcctcaagtaatttcttggcgctgctcttagaagaatagatgaaagctctgtctggatgtggtgataactccaagtctcttctcaggtggttgatttttcctggttatttgatgagatcacttagggtgaggatttaagacaattgtatttcttttggaaagaagctttcttggtcagatgaggaaattccaaagagactctctccctgtaattggaagtggagatgcaagacaaggttagaggagcattgattctgagtcatcttcaaaagcctctcagtatatcagagtgccagtctttgggatattgctttttgagtcccaacaaaagggatggataagtgggtttgtgaactttcaaggatgtaaacacttggtctcaargattccttgtcctgtagcataggataaatgtagaggtgggcaaaattgggcccagtaaagcctgaagcccaggggcacataccctggttgctgagctctaagggaagtgtca

SEQ ID NO: 709300 - DNA, 2496 bp, Homo sapiens
ccatagacaattacattttgggggaagaaattacatgtgaatgagcattttggagaaatatgatggtgaaaggagtattttagaagacgagattttacctaaattttcaataagtgttctaaactagatatcacattttttattagacaatattttgaaaagacccacctgctgaaaagaaagaacaaacatggttactgttataattattgattcagaggggatgttatgtatgtaggaaaatcacaggcaattcattaaaaaactcttttggtagcttctatcaccagcaaagaaaatagtttaatttcattttactgtagttcaaaatcctccccagggtgtaattctgattttttgtcacaggagccaattgtgttattagaataagaaaatggtgtattttaaaaaaatcagctacgttggctttttattctgatgataggaaattatgtgtgtgtgtgtatgtttcacacatgatggaaaaaaatgagtaagacataaatcttcagaattaaagcccggaagcaaagtgtatgttccagtgaagactttaagtgacagcgtgacgaacttttgatcagtgtttcttatcatggagtaatttcttgatcaattaacaatcaattagaatttcagacatggcttagatggcatgatcctatttcaaaaatgtaatgagccaaaaaaaatgggttggcagattccaaaatctatgaatatactgatttaagaacaggaaaaacattcaaatgtcatatttttgttagtacattggacccgtagggtatgggaaaaataatatactgggatatttgcagtcattccaaatatatatattatattatatattcatatacattatattattatatatttatatattatatataatatattaatatattatattatatatttatattatatacaatacatattatatattgtagtatagtatatattatatgatatattaatatatagtatatattaatatgttatatatatataatccaagttaaagcaatagaacaaaacacagtatgtggtacctgcagtgctcactgcaattgaacattcagtattaactcttaattcccttgaaataaaaccaaaatgggtcatatatagagatatatagttcttaagctgcctgagacaaaattccgaattatccacttattagttatttgcaaattattgactttattcttggctaaactttatccatgaaaagagaaaagaatattaccttaatcatgaggatattgtaagaattgcaggtaatactatatgtaagacccttaacactgatgtgcacagacaaaatgcttaatattaatgaatattagcagttaataatgttattaatattagtattatggtaaataaaattatggtaatttatgtgaggggattccttcttcctgcttctcctaccccagcaactaaatttaaataaagcatttatgataagggtaaaacggaaattagttaatatgatttttatttaagtgtggtttttgaaaaagacaaatgattgtattttacaaaactatgtttcttttatcaactctatacagaaactgagaccttagtcttaatgtataacttagaaaagagtttttcatgacaaagtgctgaaacaatatggtgtggacacctgatytcctggtaatctaatttaatacagtggtaaaacttggatgttggacacattatgctgtcccttccaatcactaggagtctgaagtagctggtgttgggttggactcacttccaagctgaatttttttgaataaagggccaatattgtttgatgactatggtaaggtctgtatgcttaaattgtcagacaataaacagtcagagttggcattctgttgtgaagatgtggaaatcaaaattggttcttgctatgatgtttaatctactttttcacatcagtgagtctccaaaatgcctctgggtatagctgacattttcctgcagaatgaactttaaatctttttaattacttgccacattacacgaatgagacaattttaacctaaagaaaatgtaagggcagatgttatcagttaatcattctaaccaaaaagaaaaaaatattcctctgagtcctatgggcaatgctcacatttcagtagaaatgtattcaagttgacctgccagaatgagttggttccttgcaataccaatagaaaatcaaatatagtaatcatttagaatgtacagaccaccaacatgcttaagaatgtccactaaatagcataattgctgcttttagttgtgttttaccagtgtatatatcatcacactagaaaaagctgttgattgtggtatttgttgtaatcaaaccaaatcaatttaacacatgtaccaattatttaaatataaacttaaaatttgagggtgcacatttagattatagtattagttatatatgtatatatttatttttacctagccttattgacctataattgacaa

SEQ ID NO: 709301 - DNA, 2496 bp, Homo sapiens
ccatagacaattacattttgggggaagaaattacatgtgaatgagcattttggagaaatatgatggtgaaaggagtattttagaagacgagattttacctaaattttcaataagtgttctaaactagatatcacattttttattagacaatattttgaaaagacccacctgctgaaaagaaagaacaaacatggttactgttataattattgattcagaggggatgttatgtatgtaggaaaatcacaggcaattcattaaaaaactcttttggtagcttctatcaccagcaaagaaaatagtttaatttcattttactgtagttcaaaatcctccccagggtgtaattctgattttttgtcacaggagccaattgtgttattagaataagaaaatggtgtattttaaaaaaatcagctacgttggctttttattctgatgataggaaattatgtgtgtgtgtgtatgtttcacacatgatggaaaaaaatgagtaagacataaatcttcagaattaaagcccggaagcaaagtgtatgttccagtgaagactttaagtgacagcgtgacgaacttttgatcagtgtttcttatcatggagtaatttcttgatcaattaacaatcaattagaatttcagacatggcttagatggcatgatcctatttcaaaaatgtaatgagccaaaaaaaatgggttggcagattccaaaatctatgaatatactgatttaagaacaggaaaaacattcaaatgtcatatttttgttagtacattggacccgtagggtatgggaaaaataatatactgggatatttgcagtcattccaaatatatatattatattatatattcatatacattatattattatatatttatatattatatataatatattaatatattatattatatatttatattatatacaatacatattatatattgtagtatagtatatattatatgatatattaatatatagtatatattaatatgttatatatatataatccaagttaaagcaatagaacaaaacacagtatgtggtacctgcagtgctcactgcaattgaacattcagtattaactcttaattcccttgaaataaaaccaaaatgggtcatatatagagatatatagttcttaagctgcctgagacaaaattccgaattatccacttattagttatttgcaaattattgactttattcttggctaaactttatccatgaaaagagaaaagaatattaccttaatcatgaggatattgtaagaattgcaggtaatactatatgtaagacccttaacactgatgtgcacagacaaaatgcttaatattaatgaatattagcagttaataatgttattaatattagtattatggtaaataaaattatggtaatttatgtgaggggattccttcttcctgcttctcctaccccagcaactaaatttaaataaagcatttatgataagggtaaaacggaaattagttaatatgatttttatttaagtgtggtttttgaaaaagacaaatgattgtattttacaaaactatgtttcttttatcaactctatacagaaactgagaccttagtcttaatgtataacttagaaaagagtttttcatgacaaagtgctgaaacaatatggtgtggacacctgatttcctggtaatctaatttaatacagtggtaaaacttggatgttggacacattatgctgtcccttccaatcactaggagtctgaagtagctggtgttgggttggactcacttccaagctgaatttttttgaataaagggccaatattgtttgatgactatggtaaggtctgtatgcttaaattgtcagacaataaacagtcagagttggcattctgttgtgaagatgtggaaatcaaaattggttcttgctatgatgtttaatctactttttcacatcagtgagtctccaaaatgcctctgggtatagctgacattttcctgcagaatgaactttaaatctttttaattacttgccacattacacgaatgagacaattttaacctaaagaaaatgtaagggcagatgttatcagttaatcattctaaccaaaaagaaaaaaatattcctctgagtcctatgggcaatgctcacatttcagtagaaatgtattcaagttgacctgccagaatgagttggttccttrcaataccaatagaaaatcaaatatagtaatcatttagaatgtacagaccaccaacatgcttaagaatgtccactaaatagcataattgctgcttttagttgtgttttaccagtgtatatatcatcacactagaaaaagctgttgattgtggtatttgttgtaatcaaaccaaatcaatttaacacatgtaccaattatttaaatataaacttaaaatttgagggtgcacatttagattatagtattagttatatatgtatatatttatttttacctagccttattgacctataattgacaa

SEQ ID NO: 709302 - DNA, 2496 bp, Homo sapiens
ccatagacaattacattttgggggaagaaattacatgtgaatgagcattttggagaaatatgatggtgaaaggagtattttagaagacgagattttacctaaattttcaataagtgttctaaactagatatcacattttttattagacaatattttgaaaagacccacctgctgaaaagaaagaacaaacatggttactgttataattattgattcagaggggatgttatgtatgtaggaaaatcacaggcaattcattaaaaaactcttttggtagcttctatcaccagcaaagaaaatagtttaatttcattttactgtagttcaaaatcctccccagggtgtaattctgattttttgtcacaggagccaattgtgttattagaataagaaaatggtgtattttaaaaaaatcagctacgttggctttttattctgatgataggaaattatgtgtgtgtgtgtatgtttcacacatgatggaaaaaaatgagtaagacataaatcttcagaattaaagcccggaagcaaagtgtatgttccagtgaagactttaagtgacagcgtgacgaacttttgatcagtgtttcttatcatggagtaatttcttgatcaattaacaatcaattagaatttcagacatggcttagatggcatgatcctatttcaaaaatgtaatgagccaaaaaaaatgggttggcagattccaaaatctatgaatatactgatttaagaacaggaaaaacattcaaatgtcatatttttgttagtacattggacccgtagggtatgggaaaaataatatactgggatatttgcagtcattccaaatatatatattatattatatattcatatacattatattattatatatttatatattatatataatatattaatatattatattatatatttatattatatacaatacatattatatattgtagtatagtatatattatatgatatattaatatatagtatatattaatatgttatatatatataatccaagttaaagcaatagaacaaaacacagtatgtggtacctgcagtgctcactgcaattgaacattcagtattaactcttaattcccttgaaataaaaccaaaatgggtcatatatagagatatatagttcttaagctgcctgagacaaaattccgaattatccacttattagttatttgcaaattattgactttattcttggctaaactttatccatgaaaagagaaaagaatattaccttaatcatgaggatattgtaagaattgcaggtaatactatatgtaagacccttaacactgatgtgcacagacaaaatgcttaatattaatgaatattagcagttaataatgttattaatattagtattatggtaaataaaattatggtaatttatgtgaggggattccttcttcctgcttctcctaccccagcaactaaatttaaataaagcatttatgataagggtaaaacggaaattagttaatatgatttttatttaagtgtggtttttgaaaaagacaaatgattgtattttacaaaactatgtttcttttatcaactctatacagaaactgagaccttagtcttaatgtataacttagaaaagagtttttcatgacaaagtgctgaaacaatatggtgtggacacctgatttcctggtaatctaatttaatacagtggtaaaacttggatgttggacacattatgctgtcccttccaatcactaggagtctgaagtagctggtgttgggttggactcacttccaagctgaatttttttgaataaagggccaatattgtttgatgactatggtaaggtctgtatgcttaaattgtcagacaataaacagtcagagttggcattctgttgtgaagatgtggaaatcaaaattggttcttgctatgatgtttaatctactttttcacatcagtgagtctccaaaatgcctctgggtatagctgacattttcctgcagaatgaactttaaatctttttaattacttgccacattacacgaatgagacaattttaacctaaagaaaatgtaagggcagatgttatcagttaatcattctaaccaaaaagaaaaaaatattcctctgagtcctatgggcaatgctcacatttcagtagaaatgtattcaagttgacctgccagaatgagttggttccttgcaataccaatagaaaatcaaatatagtaatcatttagaatgtacagaccaccaacatgcttaagaatgtccactaaatagcataattrctgcttttagttgtgttttaccagtgtatatatcatcacactagaaaaagctgttgattgtggtatttgttgtaatcaaaccaaatcaatttaacacatgtaccaattatttaaatataaacttaaaatttgagggtgcacatttagattatagtattagttatatatgtatatatttatttttacctagccttattgacctataattgacaa

SEQ ID NO: 709303 - DNA, 1481 bp, Homo sapiens
ctctttctctctctctctctggtttaatataattgattgtatactcttatgcactcagaaaaaagtcttaaaacctcttatctgaactgatactttgtattgaagagagtaatatgaaaattgwaggcagaaattgaagatcttacctaattggatgttgaatgttggtcctcccttgtctcagatggggagaatataggtaacaggttttgtctatgttgaagtgttatttgtcactcactattcaattacagtactcatatatggctttaacctcttttaacctgcacaattacattttcacaactatagctatggtgccacttaaaatgtggttatttgtcttaaaattgttcaccaaatttcatgtggaattctaagcctgatctccttggagatttgagtcatttgataggtagaagttcataagtagttagcctggttctctcctgctgtgttcttctcttctctggcatttgccctgtattttaggaaattaattgctgtcttatatgtgcctattatacaagaataaaataattctcatatattcatatatacttatatataatataaatatatattattactaatatatatttatatattatttgaaaccttatatattcttactatatatgaataaaacactttctggagagaaaaaaaacagacatcagagtcgtgcctgggatagcctatttgataaatatttgttgcattatttcctacatgaatgatggcacaatacattttcttttaaagattagcatttcagagagatgctcagaccataccacttctaaggaaatgattgtggcttagaaaggaaggaaagaggaacaagaagtagtaaaggatggttaagcactgagtaagcttttttttcatttttgttatctggcataaagcattaggaaaaaacaactctatttttccagatgtcccagtctttcaactgacatatttacagctagagcacgcttattcatttatttatttatttttggagtggaggaagaggaggtagtcaggtggtttacaaaaggtggatttctaagtctctgtcaacatagaccaaccctgctggacctcatactttttccccttcctccctgtcatcctcatttttttcctttctttaaaactacattttgaatgtctacttgaatacctgttcaaggcattgatacttatcagtaaatacaatggccaagaactttgctaccatgtagtcattaccttctacaacaggaagaaaactaaaataaagcaaacactcaaataccaaaatttaagatagtaataattactattataaacagagtaatgagttaaagagtgatggggtgaaagtgatgttaagtgttgacttagattgactggctatggaagaccttcttgaaaaggttaattttgagggatgacttgaccaagaaagttcggttatggggaaatctgtggcagagggaagaatcctt

SEQ ID NO: 709304 - DNA, 1481 bp, Homo sapiens
ctctttctctctctctctctggtttaatataattgattgtatactcttatgcactcagaaaaaagtcttaaaacctcttatctgaactgatactttgtattgaagagagtaatatgaaaattgtaggcagaaattgaagatcttacctaaytggatgttgaatgttggtcctcccttgtctcagatggggagaatataggtaacaggttttgtctatgttgaagtgttatttgtcactcactattcaattacagtactcatatatggctttaacctcttttaacctgcacaattacattttcacaactatagctatggtgccacttaaaatgtggttatttgtcttaaaattgttcaccaaatttcatgtggaattctaagcctgatctccttggagatttgagtcatttgataggtagaagttcataagtagttagcctggttctctcctgctgtgttcttctcttctctggcatttgccctgtattttaggaaattaattgctgtcttatatgtgcctattatacaagaataaaataattctcatatattcatatatacttatatataatataaatatatattattactaatatatatttatatattatttgaaaccttatatattcttactatatatgaataaaacactttctggagagaaaaaaaacagacatcagagtcgtgcctgggatagcctatttgataaatatttgttgcattatttcctacatgaatgatggcacaatacattttcttttaaagattagcatttcagagagatgctcagaccataccacttctaaggaaatgattgtggcttagaaaggaaggaaagaggaacaagaagtagtaaaggatggttaagcactgagtaagcttttttttcatttttgttatctggcataaagcattaggaaaaaacaactctatttttccagatgtcccagtctttcaactgacatatttacagctagagcacgcttattcatttatttatttatttttggagtggaggaagaggaggtagtcaggtggtttacaaaaggtggatttctaagtctctgtcaacatagaccaaccctgctggacctcatactttttccccttcctccctgtcatcctcatttttttcctttctttaaaactacattttgaatgtctacttgaatacctgttcaaggcattgatacttatcagtaaatacaatggccaagaactttgctaccatgtagtcattaccttctacaacaggaagaaaactaaaataaagcaaacactcaaataccaaaatttaagatagtaataattactattataaacagagtaatgagttaaagagtgatggggtgaaagtgatgttaagtgttgacttagattgactggctatggaagaccttcttgaaaaggttaattttgagggatgacttgaccaagaaagttcggttatggggaaatctgtggcagagggaagaatcctt

SEQ ID NO: 709305 - DNA, 1481 bp, Homo sapiens
ctctttctctctctctctctggtttaatataattgattgtatactcttatgcactcagaaaaaagtcttaaaacctcttatctgaactgatactttgtattgaagagagtaatatgaaaattgtaggcagaaattgaagatcttacctaattggatgttgaatgttggtcctcccttgtctyagatggggagaatataggtaacaggttttgtctatgttgaagtgttatttgtcactcactattcaattacagtactcatatatggctttaacctcttttaacctgcacaattacattttcacaactatagctatggtgccacttaaaatgtggttatttgtcttaaaattgttcaccaaatttcatgtggaattctaagcctgatctccttggagatttgagtcatttgataggtagaagttcataagtagttagcctggttctctcctgctgtgttcttctcttctctggcatttgccctgtattttaggaaattaattgctgtcttatatgtgcctattatacaagaataaaataattctcatatattcatatatacttatatataatataaatatatattattactaatatatatttatatattatttgaaaccttatatattcttactatatatgaataaaacactttctggagagaaaaaaaacagacatcagagtcgtgcctgggatagcctatttgataaatatttgttgcattatttcctacatgaatgatggcacaatacattttcttttaaagattagcatttcagagagatgctcagaccataccacttctaaggaaatgattgtggcttagaaaggaaggaaagaggaacaagaagtagtaaaggatggttaagcactgagtaagcttttttttcatttttgttatctggcataaagcattaggaaaaaacaactctatttttccagatgtcccagtctttcaactgacatatttacagctagagcacgcttattcatttatttatttatttttggagtggaggaagaggaggtagtcaggtggtttacaaaaggtggatttctaagtctctgtcaacatagaccaaccctgctggacctcatactttttccccttcctccctgtcatcctcatttttttcctttctttaaaactacattttgaatgtctacttgaatacctgttcaaggcattgatacttatcagtaaatacaatggccaagaactttgctaccatgtagtcattaccttctacaacaggaagaaaactaaaataaagcaaacactcaaataccaaaatttaagatagtaataattactattataaacagagtaatgagttaaagagtgatggggtgaaagtgatgttaagtgttgacttagattgactggctatggaagaccttcttgaaaaggttaattttgagggatgacttgaccaagaaagttcggttatggggaaatctgtggcagagggaagaatcctt

SEQ ID NO: 709306 - DNA, 1068 bp, Homo sapiens
tctggcatgcctaaggtctttgaggaacagggatgcttatttcctctgccttccttggctgcctacatagatacctaagtgtcttcccttcgggatagattgtcctctggtgcacatgctgaagagttgtctttcttgacataggccagaggcattgatgtgcagcaggtttctttagtcatcaactatgaccttccgaccaacagagaaaactatayccgtagaactgtttgaagtggacggtttggccgtaagggtgtggctattaacgtggtgacagaagaagacaagaggactcttcaagacatagagattttctacaatacctccataccttcactgaggaaatccccctcaatgttgctgacctcatctgaggggctgtcctgctacctagccccagccagggttcaatcttgggggtcagaggagctgcaggaggcgggagggaagggagccaagggatggacatcttgtcattttttttctttgaataaatgtcactttttgaggcaaaagaaggaaccgtgaacattttagataccctttctttagggtaggctcttgccccaggcactggctcttctcccaaaaaaatactaatccatttccctaacctagtaacctccagatcccagaggctttcttcacctcagctgagctcctttgaaagtgattcaagggactatgtcactcagcctcacttgctggaccaaatctagagggagaacccctaaaaccccggagtgagtttgcccaggggattgagtccccaggtccggggaagctggggagagaaaatagtagccattttttacattgttttgtatagtatctattgattcaggaaacaaacacaaaattctaaataaaaagacttggaagctgcaaaaaaaaaaaaaaaaaagaaaaaaagaaagaaaaagaaaaccacctattacttcctttattccctagcatcctcagaactgtctactgccttcaaggacacacacacacacacacacacacacacacacaaataaggactatcatcaaccactctaatcctgttcccaaaaaaacaca

SEQ ID NO: 709307 - DNA, 1068 bp, Homo sapiens
tctggcatgcctaaggtctttgaggaacagggatgcttatttcctctgccttccttggctgcctacatagatacctaagtgtcttcccttcgggatagattgtcctctggtgcacatgctgaagagttgtctttcttgacataggccagaggcattgatgtgcagcaggtttctttagtcatcaactatgaccttccgaccaacagagaaaactatacccgtagaactgtttgaagtggacggtttggccgtaagggtgtggctattaacgtggtgacagaagaagacaagaggactcttcaagacatagagattttctacaatacctccataccttcactgaggaaatccccctcaatgttgctgacctcatctgaggggctgtcctgctacctagccccagccagggttcaatcttgggggtcagaggagctgcaggaggcgggagggaagggagccaagggatggacatcttgtcattttttttctttgaataaatgtcactttttgaggcaaaagaaggaaccgtgaacattttagataccctttctttagggtaggctcttgccccaggcactggctcttctcccaaaaaaatactaatccatttccctaacctagtaacctccagatcccagaggctttcttcacctcagctgagctcctttgaaagtgattcaagggactatgtcactcagcctcacttgctggaccaaatctagagggagaacccctaaaaccccggagtgagtttgcccaggggattgagtccccaggtccggggaagctggggagagaaaatagtagccattttttacattgttttgtatagtatctattgattcaggaaacaaasacaaaattctaaataaaaagacttggaagctgcaaaaaaaaaaaaaaaaaagaaaaaaagaaagaaaaagaaaaccacctattacttcctttattccctagcatcctcagaactgtctactgccttcaaggacacacacacacacacacacacacacacacacaaataaggactatcatcaaccactctaatcctgttcccaaaaaaacaca

SEQ ID NO: 709308 - DNA, 1068 bp, Homo sapiens
tctggcatgcctaaggtctttgaggaacagggatgcttatttcctctgccttccttggctgcctacatagatacctaagtgtcttcccttcgggatagattgtcctctggtgcacatgctgaagagttgtctttcttgacataggccagaggcattgatgtgcagcaggtttctttagtcatcaactatgaccttccgaccaacagagaaaactatacccgtagaactgtttgaagtggacggtttggccgtaagggtgtggctattaacgtggtgacagaagaagacaagaggactcttcaagacatagagattttctacaatacctccataccttcactgaggaaatccccctcaatgttgctgacctcatctgaggggctgtcctgctacctagccccagccagggttcaatcttgggggtcagaggagctgcaggaggcgggagggaagggagccaagggatggacatcttgtcattttttttctttgaataaatgtcactttttgaggcaaaagaaggaaccgtgaacattttagataccctttctttagggtaggctcttgccccaggcactggctcttctcccaaaaaaatactaatccatttccctaacctagtaacctccagatcccagaggctttcttcacctcagctgagctcctttgaaagtgattcaagggactatgtcactcagcctcacttgctggaccaaatctagagggagaacccctaaaaccccggagtgagtttgcccaggggattgagtccccaggtccggggaagctggggagagaaaatagtagccattttttacattgttttgtatagtatctattgattcaggaaacaaacacaaaattytaaataaaaagacttggaagctgcaaaaaaaaaaaaaaaaaagaaaaaaagaaagaaaaagaaaaccacctattacttcctttattccctagcatcctcagaactgtctactgccttcaaggacacacacacacacacacacacacacacacacaaataaggactatcatcaaccactctaatcctgttcccaaaaaaacaca

SEQ ID NO: 709309 - DNA, 1068 bp, Homo sapiens
tctggcatgcctaaggtctttgaggaacagggatgcttatttcctctgccttccttggctgcctacatagatacctaagtgtcttcccttcgggatagattgtcctctggtgcacatgctgaagagttgtctttcttgacataggccagaggcattgatgtgcagcaggtttctttagtcatcaactatgaccttccgaccaacagagaaaactatacccgtagaactgtttgaagtggacggtttggccgtaagggtgtggctattaacgtggtgacagaagaagacaagaggactcttcaagacatagagattttctacaatacctccataccttcactgaggaaatccccctcaatgttgctgacctcatctgaggggctgtcctgctacctagccccagccagggttcaatcttgggggtcagaggagctgcaggaggcgggagggaagggagccaagggatggacatcttgtcattttttttctttgaataaatgtcactttttgaggcaaaagaaggaaccgtgaacattttagataccctttctttagggtaggctcttgccccaggcactggctcttctcccaaaaaaatactaatccatttccctaacctagtaacctccagatcccagaggctttcttcacctcagctgagctcctttgaaagtgattcaagggactatgtcactcagcctcacttgctggaccaaatctagagggagaacccctaaaaccccggagtgagtttgcccaggggattgagtccccaggtccggggaagctggggagagaaaatagtagccattttttacattgttttgtatagtatctattgattcaggaaacaaacacaaaattctaaataaaaagacttggaagctgcaaaaaaaaaaaaaaraaagaaaaaaagaaagaaaaagaaaaccacctattacttcctttattccctagcatcctcagaactgtctactgccttcaaggacacacacacacacacacacacacacacacacaaataaggactatcatcaaccactctaatcctgttcccaaaaaaacaca

SEQ ID NO: 709310 - DNA, 2626 bp, Homo sapiens
taaaactaagtttagagagattatataatttaccccagtacacatagattgtaactggtaagcttagatttgaacacagttatgcatgattccaaattacatgctcttagatgtcattccattatatttcaataaaactctaaacacatgaaatggattaaaaccaatgttgtctcactttttaaaacatgttcccaaaatgtagacattgtgaaatctgaagaaactctactacagccctcagggaagcttaaattcttatattctttatatccccacacagcatgarttctgataccgtctttcccacctcacctgtatcacccatatccctactgcaggagaagtggagaaaagggaaatactcacagaaaagaaattcaaaaaatttctcactacaggtgacatgggaagctacaggattatttggtggtgagctgcactcaggaaagtcaatgcagagttaggtaaaggtattcttgccagtggttggcactgagtgcttagggaaggtctgttaaatgactgaagggacccatcacactggtgaaaaaggtgaggggaaacccgggttcaacctgtgtgagtgagctggaatgcttccatgaactgacttctactgtggctttgttttcattggtgtttctaaagggtgctttatgtcttttcatttaagggctctgtatcatagaaaaagctcataaataagagaagggggcaatgtcaccttcagggccagcaagtttcccaaatacctgcagccaaattgtgaagtgtttttagttgctagaagcctagaattaaggctggtagtggggagctagccaaatatagtacttcacagtaatattttaacagtgcaactatttcttgaaaatcagaattcttttcctgaagcaatgaacttcccctagtgaaaacatgcatatatctgtaaattcctaaacattttgccctacaaataatatcattatatctttataaaaaagtgcattaaaaacagattctatttgaatgaagcagaagccctgacatagaagaaaaccacagctttttgaattccttctatcaggcatcaaagtaacagaaaaactgaaagaattcagattgtcaggttgccacagttacattgattttatagaactagagtttccttaggaaatgtagtatggtaaaatgattattttactacagtccccatccatgctaagagaatatgttttctttcttgatagaaattttttttattatactttaagttctgggttacttgtgcagaacatgcagtttcgttacataggtatacacgtgccatggtggtttgctgcacccatcaatccatcacctacattaggcatttctcctaacattatccgtcccctagccccctacccaaacaggccccagtgtgtgatgttcgcctccctgtgtccatgtgttctcactgttcaactcccacttatgagtgagaacatgtggtgtttggttttctgatcttgtgatagtttgctgagaatgattgcttccagcttcatccatgtccctgaaaaggacatgaactcatccttttttatggctgcatagtattccatggagtatatgtgccacattttcttaatccagtctatcattgatggacatttgggttggttccaagtctttgctattgtgaatagcaccacaataaacatatatgtgcatgtgtctttataataagtagcatgatttataatcctttgggtatatacctagtaatgggattgatgggtcaaatggtatttctagttctatatcctagaactgcctagcaaattatcccacagctctccaaaagatagagcagatggggcaagtgagtgtttaaagtctcttcctgcttaactgcccctactcgtggacaattatctgctatcccacagcccagccacagtgcctatctcttctgaaataacatgtggacccactgtgtcagtaaactcacaccctgtaatgttctcatcaaccaagtagaccattttcctcaatcggccttgaaagagagagaaccgtggtttaagcccaaccacatcaatctaattatcaaactttgagaaaacctctagtgaaaaataaatgttcgtggttcaaaactagtatctcctcattcttattgactgcaagggtgcttctctcagaatctgtgctctaagcagagaagcatcttttcagcacatccttgaattaaatcagcacatcagtgtaagcagcccagggagccatgagcaaccactttgccatcctcatcacattctcccccaaatacatccccagtgagggtccagagcccccacaaaattgtttttgcagtcacttacagtgcaaattggaattcctatcattaaaaaggaagacactcatttcttaacagtttctctgcatctgaggccccgttccatgggagatgtctcttaagagaaaacagtgttaacttagaaacaccaaagacagttttctgagtccagtggcaaatctcagtttacactatgtctagccacagacttggctcatctgctctaggcaaagaattcttgaggcaggagtaactaacttgttcctttccataccataacaatcaggtgtatggttt

SEQ ID NO: 709311 - DNA, 409 bp, Homo sapiens
taaatacttggacaacacaaagaagctttatctgctgagtatgcaatataataatttcaattccaaatttaaytaaaaataaaacagtctccaccaaagttacaaggcatcaaaacctagagcttagggtaaccatcattcttttttattattattatactttgagttttgggatacatgtgcagaatgtgcaggtttgttacataggtatacaggtgccatgaaactcattttttatggctgcatagtattccatggtgtgtatgtaccacattttctttatccagtctatcatggatgggcatttgggttggttccaatctttgctattgtgaacagagctgccataaacatatgtgtgcatgtgtctttatagtagaatgatttataatccttggggtatataccc

SEQ ID NO: 709312 - DNA, 1419 bp, Homo sapiens
tttgttctatgttatactgacatctatggaccccataagagaaattcagctttttagaaaaattctgttagctgcttataagcaacttaaaatgtggctcaacctggtagactaatggtcctaatctattgtgtgtgggcaactagttgatctttgaaccttatcacttttttcaaaatcattatggagttcttctctctacctacaatcaaaacttaagggagagggaatgagtgaatcaccttagtaaagaattagggcatcttggccgggcgcggtggctcatgcctataatcccagcactttgggaggctgaggaaggcagatcacgaggtcaggagatcgagaccatcctggctaacacggtgaaaccccgtctctactaaaaatacaaaaaaaaaaattagccgggcatggtggtgggcgcccgtagtcccagctacttgggaggccgaggcaggagaatggcatgaacccgggaggtggagcttgcagtgagccgagatcgcaccactggactccagcctgggcgacagagcaagactccgtctcaaaaaaaaaaaaaaaaaaaaaagaaaaagaattcagacatcttaaataaaagagtggtccttattgatgagacagtaagggggatcctgtcagtgcacttgtatccatttatagtattaattcaataagatttattattgtaattactgtatactgaacactgagctaacaactaggggtacaatgactaaagatatactggtcctgtcccccaaggaagtcccaatctaatggaggagacaaagtacaaaaacatataaaatacaagagaggatgataagtactatgacagatagagtgtttttgtcaggataggctaaatgctacaacaaatctcaaaatttcagtggcgtaagtcagtaaagatttttttgctcatttgagtcaaagcccaatgtggtcagtaggagcagaggagcatctaatccagctagtcatttaaagactgagactccttcagtcttataatgctaccatcttcartgcatggtctccaagttcattgtgaagaggaaagagagagtgtaaagaaaacatatccactcctacctgcttcaacccagaagagacacatcacttctgttcacattctataggggagaaccagtcacagtgccccatttagacaaagggagactgggaaagatatttcagctctgttcctaagaaaagaaaagaatcttggtggacaactattgataactagatgtaactggtagtaactaacttgttaactaaaggtaactaaagataactagaagaagccaagatgcaaaaaacaaacaaaaccaaaatcctctcgaatctaacttatttcatgttaaaatcatagtgacaactacagaaaactagaaaaaatagaggatc

SEQ ID NO: 709313 - DNA, 625 bp, Homo sapiens
taataatgaacatgctcacaaatttatctgtaagttcatcaggattttttttaacttggaaaaagaaagccgctaatgtctaacaaaggattgaattatgttaaatccacacractaaatgctaaacagctagttagtaaaatattgctggcaatgtaaaatctcaagataatactaaaagactcccactcacacaaagaaggtactaagtatctgtagaacaaatgaaattttaagagagggttacaaaacaggagccacatattgtaaaaaacaaaaaacaaaaactgtaaaaagtatacacacatctgtaaaatacacgcacagatttgtaaaatttgtgtgtatatataattatagaaaaatggaaaagaaaatagaaccaaaatgtttccagtggttacctctggattggtgtggttataagtgatttttttccccctcttttcctttctgtattttacaagttttcctttacttttataatcaaggagaaaaattgtaaggctaagaaggaaacttctaaagccatcagctcatttgtagaagcttctcctagaatgttcctcacccctctattctccggctctggcctctgtccttgaggacgaggaggggtcttctc

SEQ ID NO: 709314 - DNA, 3774 bp, Homo sapiens
tcagtgagaagaggcatcacgctacctgatttcaaactatactataaggccatagtcaccaaaacagcatggtactgatataaaaatagacacatagaacaatggaacagaatagagaacccagaaataaacccaaatacttatagccaactgatctttgacaaaacaaacaaaaatataaagtgaaggagggacacctttctcaataaatggtgctgggataattggctggccacatgtaggagaatgaaactgtatcctcatctctcaccttccatttgactttcaagagcaattgatgaattcacaaataatggttctgttcatcattctattaaataggctttgaaaatattacccccaatttacagatgaaagaaatgatgatcaaagggcattttacccctctctcatttctgttcctgccaagtttttaacaatttgcccaaaaaattaatgtcccaactctggaagttgcccttaacatatatgatgagaacaatatcaggctgatcattaaattcacacaactaatttaaagcaaagcaccactcaatcggaatccattaaaaacagcaagtcaaccttaacagacttctcattggtaaattatggattgtgcttgaatgttcatcctatagaactgatcaagtttctgggtttttttctctgtccttagacttcatgttatataaacaagtgtcagggtatacattcagcaagttagttccttgtgaaatgaggagaaaataagcttttcatttctgatttccttcaagttcatgaagagaaaaatcccaagaactgtactttctattaaattgagaagagagatatgtaatgaggaaagaattttgttcaacaatagcagcagtgccacatagctgaccagctggagctttgcctggtggtggctccacctccctcccttccagagagaagccagcgtggctcaacccctctctgtgagggtgagagacgccttcacagagggagtttgccctcagccctcatcagagaaaccagccatcctttctgtagtagaatgtatgcacttataaaacttttctgatctctctctctctgttttcccaactgctgccttttaagtcagtttggtggctttcacatgagcatttgagtgtattgggtccacccaggcaatccttggatttaaatgagttgctttttatttcctcggggacttaattttattcaaaagatgagggttacacactgacgatttatgtgagagagagaaagagagagagagagaaaggccattctgagatcaacatttcaacctctccttcctgattgctacttaaatcacttattccaacttggggagattgtaatatatagtttcttaatgtgtttagttaaggacttcatgaatcatgtggatttctcctcaacctaagtggttattatgctgacccaagggtgtgccgttttgcggacacttcatttttgtgtccctgtttatttgtagcaagcaagctcagttctgtaagacattgattagagggacaatggaagttgttatctactgtaagtcgcattcagcaaaaagctgccaagtggtgttcacataattgaagaggtagagctttcagacttgattgtgattttgggtttggggcttccagttctaactcaggctctcaataaggctaagaccactccttatcttgaattgttccttttcaggaacaacactctaacwacaaatcttggagatctcatacaagttgttgcatttaaaacctccttaactaggacaatcttttcctcagtcttcctaaagctaacgagcccaagctgcttcctttgcttgctgctggatatcaactttgcaagggattttactaagcggagagaggctatgggggatggtattggcagtgagttacttagtacaaccccagggctgggagggagggagatgctgtgctttcttaccagctgttatacttcaagaagaaacaggattttgtaaccctttcctggcataccagtctcaaaacaaaggccagactcagttttgacaaagattttcttgtgaaaatacacacaacacaacagtatgaatgcattcctatctaaatatgattaataaaatgtgacattgtttctgtgttttggattttcacaagaaagtgtgaaaacagaggcattaaacagtgttggtctcattgacatccaaatggcactactatttgcgtctccctcaaggaaagccagtcttttccactgaggagtagggaaagaaaacaccaatctgaaaaagaaaaagtggagggttggacctcctcttggttaaagcccagaagcgtattcaaatgtgcttcccttaagagttaagcacaggcacctcccaggaaatgacaaatggtcctacagccacagctctgctaatttccctgcccccaatatccagacttccagacatcaaatggttagaaaaagtgtttagtttgaaaaaattcttgaggtttagcttgcctcacaaatcacattctttttacccttttcccccagcccagtttaaaaaaaaacaaaacaacaacaaaaaaaaaaaaaaaaagaaaggaacatgccttggaattctgatgatagattttcataaaattgtccacgttgcttgctgaggcaaaaaaaaaaaaaaggaaagaaaaaaaagaaaatctatataaagttacaacttttgtagctgttggtcttcaattagagatacttgtcttctatttttacttctttacatcttgaatttttattttattttattttattttttgatagagggcctgggtctatgtcccaggctggaatgcagtggcatgatcatggctcactgcagccttgacctccttgggctcaggtgatcctcccacttcagccccctgagaagctgggtctatagacatgtgccaccacacccatctaatcttttcactttttatagagacaggggtctcactatgttgcccagactggtcttgaactccggggctcaagtaatcctccagcctcagcctcccaaagtgttgggattacacatttgtgccaccacacctagccacatcttgaattcttattgtagttttcattttgcaattttttttctgacaacctaactgcatattagccctacccccataaagatatcaactattttctgaagctcaaggtctctgggtataccaaaactcttaagtcagtctgtgagcattttttaacctacaaatgcatggggcccagcctcaaaatttctcattcaggcccagcacagtggcttaagtctaatctcagcactttgggaggccaaggcaggtggatctcttgaggccggcagttcgggaccagcctggccaacatagcaaaaccctgtctctactaaagattaaaaaaattaactgggcatggtgacacatgtctgtaattcaggtggctgaggcaagagaatcacttgaacccaggaggtggaagttgcagtgagccaagattgcaccactgcactccagcctaggcaacagagtgagactctgtctccaaataaataaataaataagtctcactcagtagtttgatttgggccttagaaagcatgattggttcctccagtggtttaaatgcagatctgggcttggaagacactgctgaatagtatacacctacacacacacacacacacacacacacacacacaaacacacattactttccttaatgactaccatccaataagaacagtcatcattaaaagttttg

SEQ ID NO: 709315 - DNA, 3774 bp, Homo sapiens
tcagtgagaagaggcatcacgctacctgatttcaaactatactataaggccatagtcaccaaaacagcatggtactgatataaaaatagacacatagaacaatggaacagaatagagaacccagaaataaacccaaatacttatagccaactgatctttgacaaaacaaacaaaaatataaagtgaaggagggacacctttctcaataaatggtgctgggataattggctggccacatgtaggagaatgaaactgtatcctcatctctcaccttccatttgactttcaagagcaattgatgaattcacaaataatggttctgttcatcattctattaaataggctttgaaaatattacccccaatttacagatgaaagaaatgatgatcaaagggcattttacccctctctcatttctgttcctgccaagtttttaacaatttgcccaaaaaattaatgtcccaactctggaagttgcccttaacatatatgatgagaacaatatcaggctgatcattaaattcacacaactaatttaaagcaaagcaccactcaatcggaatccattaaaaacagcaagtcaaccttaacagacttctcattggtaaattatggattgtgcttgaatgttcatcctatagaactgatcaagtttctgggtttttttctctgtccttagacttcatgttatataaacaagtgtcagggtatacattcagcaagttagttccttgtgaaatgaggagaaaataagcttttcatttctgatttccttcaagttcatgaagagaaaaatcccaagaactgtactttctattaaattgagaagagagatatgtaatgaggaaagaattttgttcaacaatagcagcagtgccacatagctgaccagctggagctttgcctggtggtggctccacctccctcccttccagagagaagccagcgtggctcaacccctctctgtgagggtgagagacgccttcacagagggagtttgccctcagccctcatcagagaaaccagccatcctttctgtagtagaatgtatgcacttataaaacttttctgatctctctctctctgttttcccaactgctgccttttaagtcagtttggtggctttcacatgagcatttgagtgtattgggtccacccaggcaatccttggatttaaatgagttgctttttatttcctcggggacttaattttattcaaaagatgagggttacacactgacgatttatgtgagagagagaaagagagagagagagaaaggccattctgagatcaacatttcaacctctccttcctgattgctacttaaatcacttattccaacttggggagattgtaatatatagtttcttaatgtgtttagttaaggacttcatgaatcatgtggatttctcctcaacctaagtggttattatgctgacccaagggtgtgccgttttgcggacacttcatttttgtgtccctgtttatttgtagcaagcaagctcagttctgtaagacattgattagagggacaatggaagttgttatctactgtaagtcgcattcagcaaaaagctgccaagtggtgttcacataattgaagaggtagagctttcagacttgattgtgattttgggtttggggcttccagttctaactcaggctctcaataaggctaagaccactccttatcttgaattgttccttttcaggaacaacactctaacaacaaatcttggagatctcatacaagttgttgcatttaaaacctccttaactaggacaatcttttcctcagtcttcctaaagctaacgagcccaagctgcttcctttgcttgctgctggatatcaactttgcaagggattttactaagcggagagaggctatgggggatggtattggcagtgagttacttagtacaaccccagggctgggagggagggagatgctgtgctttcttaccagctgttatacttcaagaagaaacaggattttgtaaccctttcctggcataccagtctcaaaacaaaggccagactcagttttgacaaagattttcttgtgaaaatacacacaacacaacagtatgaatgcattcctatctaaatatgattaataaaatgtgacattgtttctgtgttttggattttcacaagaaagtgtgaaaacagaggcattaaacagtgttggtctcattgacatccaaatggcactactatttgcgtctccctcaaggaaagccagtcttttccactgaggagtagggaaagaaaacaccaatctgaaaaagaaaaagtggagggttggacctcctcttggttaaagcccagaagcgtattcaaatgtgcttcccttaagagttaagcacaggcacctcccaggaaatgacaaatggtcctacagccacagctctgctaatttccctgcccccaatatccagacttccagacatcaaatggttagaaaaagtgtttagtttgaaaaaattcttgaggtttagcttgcctcacaaatcacattctttttacccttttcccccagcccagtttaaaaaaaaacaaaacaacaamaaaaaaaaaaaaaaaaagaaaggaacatgccttggaattctgatgatagattttcataaaattgtccacgttgcttgctgaggcaaaaaaaaaaaaaaggaaagaaaaaaaagaaaatctatataaagttacaacttttgtagctgttggtcttcaattagagatacttgtcttctatttttacttctttacatcttgaatttttattttattttattttattttttgatagagggcctgggtctatgtcccaggctggaatgcagtggcatgatcatggctcactgcagccttgacctccttgggctcaggtgatcctcccacttcagccccctgagaagctgggtctatagacatgtgccaccacacccatctaatcttttcactttttatagagacaggggtctcactatgttgcccagactggtcttgaactccggggctcaagtaatcctccagcctcagcctcccaaagtgttgggattacacatttgtgccaccacacctagccacatcttgaattcttattgtagttttcattttgcaattttttttctgacaacctaactgcatattagccctacccccataaagatatcaactattttctgaagctcaaggtctctgggtataccaaaactcttaagtcagtctgtgagcattttttaacctacaaatgcatggggcccagcctcaaaatttctcattcaggcccagcacagtggcttaagtctaatctcagcactttgggaggccaaggcaggtggatctcttgaggccggcagttcgggaccagcctggccaacatagcaaaaccctgtctctactaaagattaaaaaaattaactgggcatggtgacacatgtctgtaattcaggtggctgaggcaagagaatcacttgaacccaggaggtggaagttgcagtgagccaagattgcaccactgcactccagcctaggcaacagagtgagactctgtctccaaataaataaataaataagtctcactcagtagtttgatttgggccttagaaagcatgattggttcctccagtggtttaaatgcagatctgggcttggaagacactgctgaatagtatacacctacacacacacacacacacacacacacacacacaaacacacattactttccttaatgactaccatccaataagaacagtcatcattaaaagttttg

SEQ ID NO: 709316 - DNA, 1463 bp, Homo sapiens
ttctttgttccttccttctttcattcctctctctcctcattcccttcctcccttattccctgttctcctcctctccttccctccttttcctaggtttaagggctttgcaagttctctttagtgcacctgggttgacctgattttgttgttctctactatgtggtttgggatgtggtttcaaaactcataccaccgcaacttattcattcataaagatctctatttcatttgagtaatcattatgacttattgtagcactggaggactgaggagtgctttggggccagaggttgggtaatacttaagaggaggtgttgtcagctgtttgttagaagagagacttgctgtctgaaactcagtgagttgttgcctacaggtcagtagcaaggccaggaacatgaccttggatttaagattttctgtcttttcaatggaaacaatatgctgaccatttctttcacttcgtaatccttcatcacatagtctcccttcagaaggtcttctcaaccaccactgacattgattgcaaagatttttaaaattctcatcactttttctctctggtctgacactaggggactgcttgtttggccttactcagcctagttgagcttatattgaggtttatactctattagatgaggggatgggttaacagaacaaaatagttctggttagttagttctattaaccagtcccctcgtccaatagagtcaaacgattctgaatcactgttggccattatcactctcatcactactccagtctgaccaacttttgcatagttatatatatagtatgtaacttagttatctaaagtattatatatataatattatatatatgcatatatakatagatagatagagagagagagagagagtctttctcagttgtccaggagtacagtggtgtgatcatggctcactgaggcttggatgtccaggctcaagcgatcctcccacctcagcctccttcctgggtagctgggattacagatgtgtgccatcacacctagctaatttttagtaaagacagtctatgttgcccaggttggtcatcaagttctgagctcaagggatattcccaccttgatctcccaaatgctatgattacaacaggcctgagccactgcacctggccgcaaagcaatctgtaattgttacagcttaccctgtgaggtgtaaagttgaattggaggtggggaagaagcatctctgacaataccccacagctttgtgtaatcccacagcttcttgcacaagagcttgcatatagctggagttcaagaaatatttgtggattggatggatgtacaaatgaatgacagtaaagaggctacatctgacaagggaggaggaagctgggcaatgaggatccaggggacaccagtagggaggtacggataaatctttgagatgggagaaaggagaggctgaaagcgataaggatataggaagccc

SEQ ID NO: 709317 - DNA, 1463 bp, Homo sapiens
ttctttgttccttccttctttcattcctctctctcctcattcccttcctcccttattccctgttctcctcctctccttccctccttttcctaggtttaagggctttgcaagttctctttagtgcacctgggttgacctgattttgttgttctctactatgtggtttgggatgtggtttcaaaactcataccaccgcaacttattcattcataaagatctctatttcatttgagtaatcattatgacttattgtagcactggaggactgaggagtgctttggggccagaggttgggtaatacttaagaggaggtgttgtcagctgtttgttagaagagagacttgctgtctgaaactcagtgagttgttgcctacaggtcagtagcaaggccaggaacatgaccttggatttaagattttctgtcttttcaatggaaacaatatgctgaccatttctttcacttcgtaatccttcatcacatagtctcccttcagaaggtcttctcaaccaccactgacattgattgcaaagatttttaaaattctcatcactttttctctctggtctgacactaggggactgcttgtttggccttactcagcctagttgagcttatattgaggtttatactctattagatgaggggatgggttaacagaacaaaatagttctggttagttagttctattaaccagtcccctcgtccaatagagtcaaacgattctgaatcactgttggccattatcactctcatcactactccagtctgaccaacttttgcatagttatatatatagtatgtaacttagttatctaaagtattatatatataatattatatatatgcatatatagatagatagatagagagagagagagagagtctttctcagttgtccaggagtacagtggtgtgatcatggctcactgaggcttggatgtccaggctcaagcgatcctcccacctcagcctccttcctgggtagctgggattacagatgtgtgccatcacacctagctaatttttagtaaagacagtctatgttgcccaggttggtcatcaagttctgagctcaagggatattcccaccttgatctcccaaatgctatgattacaacaggcctgagccactgcacctggccgcaaagcaatctgtaattgttacagcttacccygtgaggtgtaaagttgaattggaggtggggaagaagcatctctgacaataccccacagctttgtgtaatcccacagcttcttgcacaagagcttgcatatagctggagttcaagaaatatttgtggattggatggatgtacaaatgaatgacagtaaagaggctacatctgacaagggaggaggaagctgggcaatgaggatccaggggacaccagtagggaggtacggataaatctttgagatgggagaaaggagaggctgaaagcgataaggatataggaagccc

SEQ ID NO: 709318 - DNA, 701 bp, Homo sapiens
cccagccccmgttcaggcttttgggagcatctaggaactgcctgcttgctgttcattgcagttaattttttttttccgcttccaacgcaggctggtccttgcctctctctaatagatctaattatcagaaaatgcactttgcaatcagtcccacacaacaccggccttctctttcagtatgccagccagctgttttgaaaagtacagctcaaatctctttgctgccacatgttgaagcagatgaaagtaattttctgctcaactgtctataagtaattaggctgccatgtaaaagggggtctttatgcatccgtttggaatgaggtaccctctgtgcatacggagtaattatcagccatcctcttccacagtaaggtacatcttatgcattttacatgagcgccggttattaacataacctgacgatcaaaagccctctggatcggctgtcttccttttcatgtaacgggctgaaattccccagaaatataataatttgaaaacggggcaatggtgatttgtttcagctgtaatttgttaagtttttttttttcctcctctttgttatttgcctagtatagaccaagggctgctgggggctcccatacacacaaacaagtgttctgcctgcccggcgaggtgggttttaatatgcagaaggggtctcggggctgcagacgcacagatcgaatgccttcatc

SEQ ID NO: 709319 - DNA, 701 bp, Homo sapiens
cccagccccagttcaggcttttgggagcatctaggaactgcctgcttgctgttcattgcagttaattttttttttccgcttccaaygcaggctggtccttgcctctctctaatagatctaattatcagaaaatgcactttgcaatcagtcccacacaacaccggccttctctttcagtatgccagccagctgttttgaaaagtacagctcaaatctctttgctgccacatgttgaagcagatgaaagtaattttctgctcaactgtctataagtaattaggctgccatgtaaaagggggtctttatgcatccgtttggaatgaggtaccctctgtgcatacggagtaattatcagccatcctcttccacagtaaggtacatcttatgcattttacatgagcgccggttattaacataacctgacgatcaaaagccctctggatcggctgtcttccttttcatgtaacgggctgaaattccccagaaatataataatttgaaaacggggcaatggtgatttgtttcagctgtaatttgttaagtttttttttttcctcctctttgttatttgcctagtatagaccaagggctgctgggggctcccatacacacaaacaagtgttctgcctgcccggcgaggtgggttttaatatgcagaaggggtctcggggctgcagacgcacagatcgaatgccttcatc

SEQ ID NO: 709320 - DNA, 701 bp, Homo sapiens
cccagccccagttcaggcttttgggagcatctaggaactgcctgcttgctgttcattgcagttaattttttttttccgcttccaacgcaggctggtccttgcctctctctaatagatctaattatcagaaaatgcactttgcaatcagtcccacacaacaccggccttctcttkcagtatgccagccagctgttttgaaaagtacagctcaaatctctttgctgccacatgttgaagcagatgaaagtaattttctgctcaactgtctataagtaattaggctgccatgtaaaagggggtctttatgcatccgtttggaatgaggtaccctctgtgcatacggagtaattatcagccatcctcttccacagtaaggtacatcttatgcattttacatgagcgccggttattaacataacctgacgatcaaaagccctctggatcggctgtcttccttttcatgtaacgggctgaaattccccagaaatataataatttgaaaacggggcaatggtgatttgtttcagctgtaatttgttaagtttttttttttcctcctctttgttatttgcctagtatagaccaagggctgctgggggctcccatacacacaaacaagtgttctgcctgcccggcgaggtgggttttaatatgcagaaggggtctcggggctgcagacgcacagatcgaatgccttcatc

SEQ ID NO: 709321 - DNA, 918 bp, Homo sapiens
tagccagttctggcagtaataattttgtgttcagcagactcagaagctgtggtgtgaatgagactaacaactaagcactctctagttggatgatgtgaagaatcatttrccacatcttgctgaagaacattacaggttataaaaatgtcatctagaccatgcagacaagcccatctgtatttaaggctgaattcctttgaaataaaagcactccatgtggttcaaatgggtctgtgatttcaaatgtcagaaaactcttaacacataaccagaacacacagaccataatagggcaatcgaaggaatgtgagatatgaaatctttccaatagtctcacttagagcctaactcatcaaaagagtccattttatacataaagataaaagagaatgttttaagaattttataacatatcaatataattaatcagaacctatgatagcctttagtgcaattaatggctggagttctagttcatgaggtgttaagaaggagaggtcaagatatttatgattgtcattggataccatatgccacgtgtgggagagagggaggtggagtgttttatgagaataaactagaataactaaggataaaatattatttcaaactgagggaaaacaaagctagtttattttctagaattatatcaatgagctagattgatgtttgagatgaaatcaactactttaatacctatgcatattgatttatgtataaaactatgcatttatatattgatttatgtataaaagtatgcatttatattatcaatctctctctctgtcagtatggacaaagaatatatattagggtgggtgcatatatattttctgcagtttttgagcctagaggaaatcaggagtaaagctgtctggttggatttcttgacaacgtatgtctactcccctccttcca

SEQ ID NO: 709322 - DNA, 918 bp, Homo sapiens
tagccagttctggcagtaataattttgtgttcagcagactcagaagctgtggtgtgaatgagactaacaactaagcactctctagttggatgatgtgaagaatcatttaccacatcttgctgaagaacattacaggttataaaaatgtcatctagaccatgcagacaagcccatctgtatttaaggctgaattcctttgaaataaaagcactccatgtggttcaaatgggtctgtgatttcaaatgtcagaaaactcttaacacataaccagaacacacagaccataatagggcaatcgaaggaatgtgagatatgaaatctttccaatagtctcacttagagcctaactcatcaaaagagtccattttatacataaagawaaaagagaatgttttaagaattttataacatatcaatataattaatcagaacctatgatagcctttagtgcaattaatggctggagttctagttcatgaggtgttaagaaggagaggtcaagatatttatgattgtcattggataccatatgccacgtgtgggagagagggaggtggagtgttttatgagaataaactagaataactaaggataaaatattatttcaaactgagggaaaacaaagctagtttattttctagaattatatcaatgagctagattgatgtttgagatgaaatcaactactttaatacctatgcatattgatttatgtataaaactatgcatttatatattgatttatgtataaaagtatgcatttatattatcaatctctctctctgtcagtatggacaaagaatatatattagggtgggtgcatatatattttctgcagtttttgagcctagaggaaatcaggagtaaagctgtctggttggatttcttgacaacgtatgtctactcccctccttcca

SEQ ID NO: 709323 - DNA, 918 bp, Homo sapiens
tagccagttctggcagtaataattttgtgttcagcagactcagaagctgtggtgtgaatgagactaacaactaagcactctctagttggatgatgtgaagaatcatttaccacatcttgctgaagaacattacaggttataaaaatgtcatctagaccatgcagacaagcccatctgtatttaaggctgaattcctttgaaataaaagcactccatgtggttcaaatgggtctgtgatttcaaatgtcagaaaactcttaacacataaccagaacacacagaccataatagggcaatcgaaggaatgtgagatatgaaatctttccaatagtctcacttagagcctaactcatcaaaagagtccattttatacataaagataaaagagaatgttttaagaattttataacatatcaatataattaatcagaacctatgatagcctttagtgcaattaatggctggagttctagttcatgaggygttaagaaggagaggtcaagatatttatgattgtcattggataccatatgccacgtgtgggagagagggaggtggagtgttttatgagaataaactagaataactaaggataaaatattatttcaaactgagggaaaacaaagctagtttattttctagaattatatcaatgagctagattgatgtttgagatgaaatcaactactttaatacctatgcatattgatttatgtataaaactatgcatttatatattgatttatgtataaaagtatgcatttatattatcaatctctctctctgtcagtatggacaaagaatatatattagggtgggtgcatatatattttctgcagtttttgagcctagaggaaatcaggagtaaagctgtctggttggatttcttgacaacgtatgtctactcccctccttcca

SEQ ID NO: 709324 - DNA, 918 bp, Homo sapiens
tagccagttctggcagtaataattttgtgttcagcagactcagaagctgtggtgtgaatgagactaacaactaagcactctctagttggatgatgtgaagaatcatttaccacatcttgctgaagaacattacaggttataaaaatgtcatctagaccatgcagacaagcccatctgtatttaaggctgaattcctttgaaataaaagcactccatgtggttcaaatgggtctgtgatttcaaatgtcagaaaactcttaacacataaccagaacacacagaccataatagggcaatcgaaggaatgtgagatatgaaatctttccaatagtctcacttagagcctaactcatcaaaagagtccattttatacataaagataaaagagaatgttttaagaattttataacatatcaatataattaatcagaacctatgatagcctttagtgcaattaatggctggagttctagttcatgaggtgttaagaaggagaggtcaagatatttatgattgtcattggataccatatgccacrtgtgggagagagggaggtggagtgttttatgagaataaactagaataactaaggataaaatattatttcaaactgagggaaaacaaagctagtttattttctagaattatatcaatgagctagattgatgtttgagatgaaatcaactactttaatacctatgcatattgatttatgtataaaactatgcatttatatattgatttatgtataaaagtatgcatttatattatcaatctctctctctgtcagtatggacaaagaatatatattagggtgggtgcatatatattttctgcagtttttgagcctagaggaaatcaggagtaaagctgtctggttggatttcttgacaacgtatgtctactcccctccttcca

SEQ ID NO: 709325 - DNA, 2036 bp, Homo sapiens
ggtataagaaataatgtaggtaaagggctttacatggtgtgtaacacatcgtaaaaactcagtaaacgctagttccctctccagacaggccctaagaaactgggaaggccctaaacttcttgttcttcccacctcctgccaagcagtccctggacccagagtgcattacagaaagcatggcacagtgaggcaggagtggctagcagatgagagagctcccttctatatgctgagaactggaggatagggcatttggttctcccctcccagtgccccctgctttttcattgagacaaggtctcactctgtcatccaggctagagtgcaatagcatgatcttggcttactcagcttactgcaacctctgcctcccaggctcaagtgatcctcccaccttagcctcctgagtagctgggactacaggcgtgcgctaccatgtcagctaatttctgcgtttttttgtagagatgggctttygccatgttgcccaggctggtctcaaactcctgaactcaagcatcctcccaccttggtctcccaaagtgctgggattacaggcatgtaccaccacgcctggctaatttttttgtatttttagtaaagatggggtttcgctatattggccatgctggtcttaaactcccaacctcaagtgatccgcctgcctcagcctcccaaaatgctacgattacaggtgtgagccacctcacctggcccagtgtagctttttaacacaaattttatatagctcaggttactggaaacactgtaaaatgccacctactttttcttttcacagctgacacttctcccaactaacagaaactggcaaacattgtagaggaagtgtccactgagtgaatgagtatataatttatgaaaacagaaaagtgctttggaaaaaaaaaaaaagacaacaggagtacatacagtgaaccaaaaagagtgtaccaggaggagcagaccctgaacagttagaactatggaaatcgctatgctttgtgttgtcacaggagttaaaataggaataccctgcatacaataaatatttattggataaataactaagcctgatacccttttcaatgcgttatacagactctatcatcacaccactaatctaagttctcagaagttaaacattacaagacttcagaacaacataggcgtctttggctccatttaacagaagaaggaccatagtgatcatttaatctctatgagtctgtcttatcttctggaaaaggggcctaacaccatttccttttgcaaaaaggtagctgccttgcttccagttctaccatcctctagcaacccatctttctcttatttgatgtctctgatcagctcctcttccagcacaaactggagaaaggggatcctttctgttttcttggaggcttctgaactcaattacaggtctgcattaaaaatgtatggagaaagctggtgatcagtttgtacatatggacaagttcaaggcagtatggtctacttctgggaaggcctggattccatttgctcctgatggaaaaaccctagtcccagcagtgtttagaatgaactggagaaggcagatgggtaccagattcaggaagaggtactgatagaccaagaccagttctttctgttttaaagatgtgttatctcaatctcctccaatgctccctttggaaattcacagaagattagggctccccacagaaacagcagctggcctgggctggtcttctgactaactggagctgaatacaaaaagtctgatgggttgactgagtcggtgactgccaattggagcctgaagcccccaaagtcttctctagacttgatgatgaagcaccagttacagttctcccagctcgccttccattgcccgcaccatgacatacagctcggccagacccaccacagaggcgacgatcaatgcagctagcacccgctggagatggggagaaccaggcttaagggatgcaggccaacaaccagctctgtaccccagcaactttaatgaggatggagagccccccaaccaccct

SEQ ID NO: 709326 - DNA, 2036 bp, Homo sapiens
ggtataagaaataatgtaggtaaagggctttacatggtgtgtaacacatcgtaaaaactcagtaaacgctagttccctctccagacaggccctaagaaactgggaaggccctaaacttcttgttcttcccacctcctgccaagcagtccctggacccagagtgcattacagaaagcatggcacagtgaggcaggagtggctagcagatgagagagctcccttctatatgctgagaactggaggatagggcatttggttctcccctcccagtgccccctgctttttcattgagacaaggtctcactctgtcatccaggctagagtgcaatagcatgatcttggcttactcagcttactgcaacctctgcctcccaggctcaagtgatcctcccaccttagcctcctgagtagctgggactacaggcgtgcgctaccatgtcagctaatttctgcgtttttttgtagagatgggcttttgccatgttgcccaggctggtctcaaactcctgaactcaagcatcctcccaccttggtctcccaaagtgctgggattacaggcatgtaccaccacgcctggctaatttttttgtatttttagtaaagatggggtttcgctatattggccatgctggtcttaaactcccaacctcaagtgatccgcctgcctcagcctcccaaaatgctacgattacaggtgtgagccacctcacctggcccagtgtagctttttaacacaaattttatatagctcaggttactggaaacactgtaaaatgccacctactttttcttttcacagctgacacttctcccaactaacagaaactggcaaacattgtagaggaagtgtccactgagtgaatgagtatataatttatgaaaacagaaaagtgctttggaaaaaaaaaaaaagacaacaggagtacatacagtgaaccaaaaagagtgtaccaggaggagcagaccctgaacagttagaactatggaaatcgctatgctttgtgttgtcacaggagttaaaataggaataccctgcatacaataaatatttattggataaataactaagcctgatacccttttcaatgcgttatacagactctatcatcacaccactaatctaagttctcagaagttaaacattacaagacttcagaacaacataggcgtctttggctccatttaacagaagaaggaccatagtgatcatttaatctctatgagtctgtcttatcttctggaaaaggggcctaacaccatttccttttgcaaaaaggtagctgccttgcttccagttctaccatcctctagcaacccatctttctcttatttgatgtctctgatcagctcctcttccagcacaaactggagaaaggggatcctttctgttttcttggaggcttctgaactcaattacaggtctgcattaaaaatgtatggagaaagctggtgatyagtttgtacatatggacaagttcaaggcagtatggtctacttctgggaaggcctggattccatttgctcctgatggaaaaaccctagtcccagcagtgtttagaatgaactggagaaggcagatgggtaccagattcaggaagaggtactgatagaccaagaccagttctttctgttttaaagatgtgttatctcaatctcctccaatgctccctttggaaattcacagaagattagggctccccacagaaacagcagctggcctgggctggtcttctgactaactggagctgaatacaaaaagtctgatgggttgactgagtcggtgactgccaattggagcctgaagcccccaaagtcttctctagacttgatgatgaagcaccagttacagttctcccagctcgccttccattgcccgcaccatgacatacagctcggccagacccaccacagaggcgacgatcaatgcagctagcacccgctggagatggggagaaccaggcttaagggatgcaggccaacaaccagctctgtaccccagcaactttaatgaggatggagagccccccaaccaccct

SEQ ID NO: 709327 - DNA, 654 bp, Homo sapiens
ttttatttatttattttttgtgagacggagtttcagtcttgttgcccaggctggagtgcaatggcatggtctcggctcactgcaagctccacctcctgggttyaagcagttctcctacctcagcctccctagtagctgggattacaagcatgcgccaccacacttggctaattttgtacttttagtggagatgcggtttctccatgttggtcaggctggtctcgagctcccgacctcaggtgatccacctgccttggcctcccaaagtcctgggattactggcgtgagccaccgcacccagcccagaatcaaatttttatagatagggtttctgttctcctggatttgaatgcacttaatgtgtcagtgggttctctttccaagttaatgtggacagggatggtgtggactatagtgaggtttagccaagttgctgaagatttctctaacatagtggatggtgggaagccgtggagggagctttcagaaaagtatacctttgatgctttgccgtaataaaattgacttcagtgtggtaaactctggatgtgtggttctttttctatatcagctttgttctgggtccactgggatagatttaggcccttctaggatattgtaggtaaggaagactttttgtttgttcaacatttt

SEQ ID NO: 709328 - DNA, 654 bp, Homo sapiens
ttttatttatttattttttgtgagacggagtttcagtcttgttgcccaggctggagtgcaatggcatggtctcggctcactgcaagctccacctcctgggtttaagcagttctcctrcctcagcctccctagtagctgggattacaagcatgcgccaccacacttggctaattttgtacttttagtggagatgcggtttctccatgttggtcaggctggtctcgagctcccgacctcaggtgatccacctgccttggcctcccaaagtcctgggattactggcgtgagccaccgcacccagcccagaatcaaatttttatagatagggtttctgttctcctggatttgaatgcacttaatgtgtcagtgggttctctttccaagttaatgtggacagggatggtgtggactatagtgaggtttagccaagttgctgaagatttctctaacatagtggatggtgggaagccgtggagggagctttcagaaaagtatacctttgatgctttgccgtaataaaattgacttcagtgtggtaaactctggatgtgtggttctttttctatatcagctttgttctgggtccactgggatagatttaggcccttctaggatattgtaggtaaggaagactttttgtttgttcaacatttt

SEQ ID NO: 709329 - DNA, 1112 bp, Homo sapiens
tcataggattattatcaggactaatgagataagccttatagagtgcttggcacaatgcctggcacatggtaaaaactcaacaaatattaacttgtcctaatttgaagtgtcacttgaagcacaccactcttagccttgccttttcctcactccatggcccatgaccggggcatatctattcattcattcaacagatgcttcctgaggacgtcccctgtgccagccactgcactaggggctgaggtttaacagagactggccagagcttatcctcagggcgatggaggaagacatagacaagaaaacaatgagtgaaccagatcgtagtgatagggccttggcgctagcaaaacaggatgatgtaatggcgtgtgcctggaggaggggtatgtgggaagaggtgacatctaagcttaatgtgaagaaatccctgtgtgcaaatatctgggaggagcataacaggcagagagaggagcaaggatgaaggcctgagggcagaggagctgacgtgtttgaggaatagaaagaatgccagaggtattgcgatgtctaaaaccaaaaagggaaaatataaaaccaggctgggcaaggtggctcatgcctgtagaatgcttggcacaatgcctggcacatggaggccaaggtgggaggctcacttgagaccatcctggacaacaaagtgagaccctgtgtcaaaagaaaaaaaaaaaaaagagagagagagacagaaaaaaaaaaaaaagaaaagaaaaaaatcaatgaggggtttatatgtagaatatatcagcaaatattcaaatcaagaagaaaaaggcaacaaattcaaaagaaaatgggcaaaggacataaacaggcaattgacaagaggaaatmcaaaatttgaaaaaccagataaagagatgctctaactcattagtaatcagagaaatgaaaattaaaacaatagctatcgctacctgaaatgttcttcaacaaaatccgcttcatggttcgtcattccaatgtctgctcaaatgttacttccttccaatcatccaatctaaaggcttttccccatcactttctaactcattaccttattttattgtcttcagggcatttaatatctgata

SEQ ID NO: 709330 - DNA, 678 bp, Homo sapiens
gtaggtaggggtcttccctttttattcatttaatttatttttgagactctgtcattcaggttggagtgcagaagtacgaacatggctgaccgcagcctcaacctcctgggctcaagcaatcttcccacctcagcctcctgagtagccrggactacaggtgtgcaccacgacacccagctaatttttttattatttgtagacatggggtctccctgcattactcaggttgatctctaactcaggctcaagagatctgcctgccatggcctcctaaattgctgagattacaggagtgagccatcacacatggccgagaatttatttaataaactgcaaggggaagaaaattaaaatgccacttcccaggcctaagcaatatgaacatattggtttatattctttctttcctttataatctaagtgaaaaacagaaaactaaataaaaatattagaagaaaatgtatgtagttttattaatctaagtctgacataggacccagaagccataaaacagaaattgacaaatttaaaactttgtagaagtcaaaagataaacaataatctgggaaaatatttgcaacatatgtattagtttaaaataattgaatgaataggcagttcagaaagaaaaaatgtgtaatcagtaaataataagatggttaaagtcataatggaaga

SEQ ID NO: 709331 - DNA, 678 bp, Homo sapiens
gtaggtaggggtcttccctttttattcatttaatttatttttgagactctgtcattcaggttggagtgcagaagtacgaacatggctgaccgcagcctcaacctcctgggctcaagcaatcttcccacctcagcctcctgagtagccgggactacaggtgtgcaccacgacacccagctaatttttttattatttgtagacatggggtctccctgcattactcaggttgatctctaactcaggctcaagagatctgcctgccatggcctcctaaattgctgagattacaggagtgagccatcacacatggccgagaatttatttaataaactgcaaggggaagaaaattaaaatgccacttcccaggcctaagcaatatgaacataytggtttatattctttctttcctttataatctaagtgaaaaacagaaaactaaataaaaatattagaagaaaatgtatgtagttttattaatctaagtctgacataggacccagaagccataaaacagaaattgacaaatttaaaactttgtagaagtcaaaagataaacaataatctgggaaaatatttgcaacatatgtattagtttaaaataattgaatgaataggcagttcagaaagaaaaaatgtgtaatcagtaaataataagatggttaaagtcataatggaaga

SEQ ID NO: 709332 - DNA, 1013 bp, Homo sapiens
ttttttccaaatgaaataaatttaaagcgtaggcatgtgcaaaatagaaaataaaatctaatctcattcccatctctatgacacaacggctgttttcagttaggggtatctttttccaggagaagatgtttttacagatattaaacctcgtgcacagagagcttaaatcggacatgttcctttggcttgtgacatgtgggcttaaaatcagttttcctgatattccgctcacttttgtagacttcaaagtcctatcaaagattttgactcatacacactggaagcacattgcaggtgaaaatattagtaagcctggaaaaaattaacaaaattaaaatttttattataaaaatactacctatatattgtagaaaatttgcaagctagaaagaatgaaatttaaaagaccgctgatcagacccactctaagttaaccactgttgtcatctcagtgtgtttcatttaaacatttattttgcattgtcttaaacttcaactttaatcattatgrtgagctcagtaggttatatttacagtgtataaatgatcagttatactattattagaatcatcaactgccttgatgcttcatagttttcatgcttgcttgtgaataccttttcttaaagacctttcaaaataggctaagagaacttgatgatggaatgcctctagtaatattgcttttcatcatacctaataatgaaatacttctccctgagatacattatttctgactatttgtgataagcatctcccatgaatggtagtatggcactatcctgagaaatgtctgcagaaaaaaaaagcaatagatttttcaatttatgttcatctgtgaggcaatgactctttattacaggggttttatattgtgctttaattctccattcctggtaatttttcattttttttctgtttttaaaaccttattttaacaatagaatgcttcgaatcttcactgtcttgttggaaagacaataaactaaaataatcaattgcgattgattatc

SEQ ID NO: 709333 - DNA, 1268 bp, Homo sapiens
gaaagtcaatgtttgagtcttctaaaatcttcctatttccaagttgcagagtaccattgattcctaaacaaagacctaatttttgactcagagacgtgacaaggtagtgaatcgccattataatttaacaatcttcaagataaaattatctctgatatttagattttacccaattattaagatattagggtgtttcattaagaatggaagactctagtctcttgagcagagactataaaggcctcagatgatcatttttaattttatgctcttttctttaacaccttcaacacagttggaagcagctgatattccccagagttgttgtgttttttaaaccaaatgcatggttcagtggtagaaaactgggctgatccaagctgttttcagtaaacacttcatttcaggtgacctatttcatattaaataatctctagatcctgtcttcgaaactaactagatcagataacctaccctggattttctccttttagggtctgtgagctgcagtcacttttgtgaaaatgattgcaatgacaagatagagttgtagatggggaaaatgttttgactaatttaagcatagtggtatttcatatgagaatttaagttacacacatttgaaaattataatggagtctcttggctgagctttaaaaaaaatagcgtttaggctaaaaagggaactgctacctctcctaaaatcagaaagatgttacagtaattctccattctctagaattatcaggaagcacctttatgatgatttacttttgctcttgggagtgtgagcctgtgcagtcgtggaaccatcaattagaatggtggctttctgatcccaaartcattcgttctgaaaacaatatttttcataaatttgaaagtgagaaattttgatcttgccattcccaagtaactctcttaatcagaggcatcagcatgcttcagtgacagctgtcaccttccactgctgagagccgtctttgagttctccatttcactccctacactccaatttagctgcagttctcttggccagtcctatgaaatacatccatggcctaacgactcctcaccactactaccactcatcctgacagcattctcacctaagtcactaccttttttcttgggattatggtagcctcccaatttatttgctcacataacctatttattctacacagtgcaccagatacacccctttgaaatgcaaacacaatcatgttattctctggtgaaattgtctcatatattcctatcgcatt

SEQ ID NO: 709334 - DNA, 1268 bp, Homo sapiens
gaaagtcaatgtttgagtcttctaaaatcttcctatttccaagttgcagagtaccattgattcctaaacaaagacctaatttttgactcagagacgtgacaaggtagtgaatcgccattataatttaacaatcttcaagataaaattatctctgatatttagattttacccaattattaagatattagggtgtttcattaagaatggaagactctagtctcttgagcagagactataaaggcctcagatgatcatttttaattttatgctcttttctttaacaccttcaacacagttggaagcagctgatattccccagagttgttgtgttttttaaaccaaatgcatggttcagtggtagaaaactgggctgatccaagctgttttcagtaaacacttcatttcaggtgacctatttcatattaaataatctctagatcctgtcttcgaaactaactagatcagataacctaccctggattttctccttttagggtctgtgagctgcagtcacttttgtgaaaatgattgcaatgacaagatagagttgtagatggggaaaatgttttgactaatttaagcatagtggtatttcatatgagaatttaagttacacacatttgaaaattataatggagtctcttggctgagctttaaaaaaaatagcgtttaggctaaaaagggaactgctacctctcctaaaatcagaaagatgttacagtaattctccattctctagaattatcaggaagcacctttatgatgatttacttttgctcttgggagtgtgagcctgtgcagtcgtggaaccatcaattagaatggtggctttctgatcccaaagtcattcgttctgaaaacaatatttttcataaatttgaaagtgagaaattttgatcttgccattcccaagtaactctcttaatsagaggcatcagcatgcttcagtgacagctgtcaccttccactgctgagagccgtctttgagttctccatttcactccctacactccaatttagctgcagttctcttggccagtcctatgaaatacatccatggcctaacgactcctcaccactactaccactcatcctgacagcattctcacctaagtcactaccttttttcttgggattatggtagcctcccaatttatttgctcacataacctatttattctacacagtgcaccagatacacccctttgaaatgcaaacacaatcatgttattctctggtgaaattgtctcatatattcctatcgcatt

SEQ ID NO: 709335 - DNA, 2690 bp, Homo sapiens
aatgtgctccagcagtggagacaggctaccctgaaccattcacgtgctcactccaggccaccgcagccagcccctgtgcatgacggtcacctcaggtagctggagcccatgcagcagacagacagacagacacacacacacacacatacacgcatctctttctttagcaaagatgcaggggtctctgtggagagagcacagagggtagcaaaaaggagcagaggttttggccaggtgcagtggctcacgcctgtaatcccaacactttgggaggctgaggtgggtggatcacctgaggtcgggagttcgagatcagcctggccaacatggtgaaacccccatctctactaaaatacaaaaataataataataataataatagctgggcgtggtggtgcacacctgtaatcccagctacttgggaagctgaggtgggagaatcgcttgaacccaggagacggaggttgcagtgagccgagattgcaccactgcactgcagcctgggcaacagaccaagacgcggtctcaaaaaagaaataaaggacaagaggagtgtctcggaggctcccagctcagatcctcccgttccggctgctccttcaaggagctccacaagaaaaccccaggcacctgcccgacagggacctcatgcccagctggcccccagagcggactggagaagagggatccccacacgctgagcctgcctctttctctccttccttccacctgcatgtgatgggccaaccatgatgacacatgttgattcattcagcaaatacagactgaaaacctgttttgtgccaggcactgggtaggccctaaggagtcagggatgtaatgcacagagcccctgctctcagagacttccattcacacagccatgcattcactcactcaacagcgagcgcctaccatcaccaaggtcctgagaaaaatacgaaaggattcaaggcatgaatgcaaactcctagaacgtcaaggctggaagagagaaggctggacgctaatccaaccctttacagacggggaaactgacccagagaggtgaacgatttgcctgtgtgttagcctgaggctatatcccacacacaagcctccttctcctgcgtggtaccgttgccacctcccctccagcattccaacgtggctccatagcccctgtacccctgcactgcagttaagtaaatccttgcttctgagtgtccaactcatccaggcaccacagaccccattcaatccaggcctccagcaaggggatgggccccagcaaaccaggggcggccttctcacccacggtgtcgtggaggcggaggtgcattctgcggccacggattctatatacacagcccctgagaacatcagggaaagaatatgggaaagtagggcgggaggcaggkgtgagaaccactcagctccacacacaaaacacagacccagattcaaatcccaactctgtgacttcctccctgaagaccttgaacgggtttcctaaactctctcagtctccactttcttatctgtaaaatgcagagaggattggtgcctgcttcatgaggtgggtgcaaagcctcaggaaaacagtgcaacgaagcctgagcacacagtgaatgcttcataacggtgaggccagacccctgtcgtcagagctgcaggcctcagggacacctggggaggcaccaaggacaccaggtccttggggagggagccaaggcaaccagggagcctgggctgcagcccaggagtatccgctacatggcagggaatgcagtgagctgctgtagaaggagagatgcctcacccagcaaaggcagagggaggaggcatcttggtgactcaggagccccaacagtgggcatttggctgcctcatcaattcaccagaaatgcaagggcttatttctgaactctgaattctactggatccatctgtctgtccatctttatgtccgtaccacactgtcttaataaccatagctttgcaatacttttgttttgttttgttctgtttttgttttgttttgagacatagtctcactctgtcacccaggctgtagtgtaatggtgtgatctcagctcatggtaacctccacctcctgggttcaagcgactctcctgcctcagcctcccaagtagccggggctacaggcgcacaccaccacactgggctaatttttgtattttcagtagagacggggttttaccatgttggtcaggcttgtcgcaaactcctgacctcaaatgatccacgtgcctcgacctccgaaagtgctgggattacaggcgtgagccatcgcgcctggccgcgatacgttttgaaatcaggaagaatgagtgcaccaactttgttctcctttttcaagattatctttgaacttctatgtgaatctcaggatcagcttatccatgtctgcaaagaagccagctgggattttgatggcaacgggtttccagttcctggttcaaccactcctgagctctggctttgcttcctccccttcagttccctggggcaccctgctttcttccccataaattccatcttttgcgtaaccagatgacactgggtttttgtttcttgtaatcaaaggaatcttaaccaataaaactccgaacacagtgctacacactgtcccaagctatcatcccaatatcgccttcccagataatcactcagagacctcactgggg

SEQ ID NO: 709336 - DNA, 2690 bp, Homo sapiens
aatgtgctccagcagtggagacaggctaccctgaaccattcacgtgctcactccaggccaccgcagccagcccctgtgcatgacggtcacctcaggtagctggagcccatgcagcagacagacagacagacacacacacacacacatacacgcatctctttctttagcaaagatgcaggggtctctgtggagagagcacagagggtagcaaaaaggagcagaggttttggccaggtgcagtggctcacgcctgtaatcccaacactttgggaggctgaggtgggtggatcacctgaggtcgggagttcgagatcagcctggccaacatggtgaaacccccatctctactaaaatacaaaaataataataataataataatagctgggcgtggtggtgcacacctgtaatcccagctacttgggaagctgaggtgggagaatcgcttgaacccaggagacggaggttgcagtgagccgagattgcaccactgcactgcagcctgggcaacagaccaagacgcggtctcaaaaaagaaataaaggacaagaggagtgtctcggaggctcccagctcagatcctcccgttccggctgctccttcaaggagctccacaagaaaaccccaggcacctgcccgacagggacctcatgcccagctggcccccagagcggactggagaagagggatccccacacgctgagcctgcctctttctctccttccttccacctgcatgtgatgggccaaccatgatgacacatgttgattcattcagcaaatacagactgaaaacctgttttgtgccaggcactgggtaggccctaaggagtcagggatgtaatgcacagagcccctgctctcagagacttccattcacacagccatgcattcactcactcaacagcgagcgcctaccatcaccaaggtcctgagaaaaatacgaaaggattcaaggcatgaatgcaaactcctagaacgtcaaggctggaagagagaaggctggacgctaatccaaccctttacagacggggaaactgacccagagaggtgaacgatttgcctgtgtgttagcctgaggctatatcccacacacaagcctccttctcctgcgtggtaccgttgccacctcccctccagcattccaacgtggctccatagcccctgtacccctgcactgcagttaagtaaatccttgcttctgagtgtccaactcatccaggcaccacagaccccattcaatccaggcctccagcaaggggatgggccccagcaaaccaggggcggccttctcacccacggtgtcgtggaggcggaggtgcattctgcggccacggattctatatacacagcccctgagaacatcagggaaagaatatgggaaagtagggcgggaggcaggtgtgagaaccactcagctccacacacaaaacacagacccagattcaaatcccaactctgtgacttcctccctgaagaccttgaacgggtttcctaaactctctcagtctccactttcttatctgtaaaatgcagagaggattggtgcctgcttcatgaggtgggtgcaaagcctcaggaaaacagtgcaacgaagcctgagcacacagtgaatgcttcataacggtgaggccagacccctgtcgtcagagctgcaggcctcagggacacctggggaggcaccaaggacaccaggtccttggggagggagccaaggcaaccagggagcctgggctgcagcccaggagtatccgctacatggcagggaatgcagtgagctgctgtagaaggagagatgcctcacccagcaaaggcagagggaggaggcatcttggtractcaggagccccaacagtgggcatttggctgcctcatcaattcaccagaaatgcaagggcttatttctgaactctgaattctactggatccatctgtctgtccatctttatgtccgtaccacactgtcttaataaccatagctttgcaatacttttgttttgttttgttctgtttttgttttgttttgagacatagtctcactctgtcacccaggctgtagtgtaatggtgtgatctcagctcatggtaacctccacctcctgggttcaagcgactctcctgcctcagcctcccaagtagccggggctacaggcgcacaccaccacactgggctaatttttgtattttcagtagagacggggttttaccatgttggtcaggcttgtcgcaaactcctgacctcaaatgatccacgtgcctcgacctccgaaagtgctgggattacaggcgtgagccatcgcgcctggccgcgatacgttttgaaatcaggaagaatgagtgcaccaactttgttctcctttttcaagattatctttgaacttctatgtgaatctcaggatcagcttatccatgtctgcaaagaagccagctgggattttgatggcaacgggtttccagttcctggttcaaccactcctgagctctggctttgcttcctccccttcagttccctggggcaccctgctttcttccccataaattccatcttttgcgtaaccagatgacactgggtttttgtttcttgtaatcaaaggaatcttaaccaataaaactccgaacacagtgctacacactgtcccaagctatcatcccaatatcgccttcccagataatcactcagagacctcactgggg

SEQ ID NO: 709337 - DNA, 2690 bp, Homo sapiens
aatgtgctccagcagtggagacaggctaccctgaaccattcacgtgctcactccaggccaccgcagccagcccctgtgcatgacggtcacctcaggtagctggagcccatgcagcagacagacagacagacacacacacacacacatacacgcatctctttctttagcaaagatgcaggggtctctgtggagagagcacagagggtagcaaaaaggagcagaggttttggccaggtgcagtggctcacgcctgtaatcccaacactttgggaggctgaggtgggtggatcacctgaggtcgggagttcgagatcagcctggccaacatggtgaaacccccatctctactaaaatacaaaaataataataataataataatagctgggcgtggtggtgcacacctgtaatcccagctacttgggaagctgaggtgggagaatcgcttgaacccaggagacggaggttgcagtgagccgagattgcaccactgcactgcagcctgggcaacagaccaagacgcggtctcaaaaaagaaataaaggacaagaggagtgtctcggaggctcccagctcagatcctcccgttccggctgctccttcaaggagctccacaagaaaaccccaggcacctgcccgacagggacctcatgcccagctggcccccagagcggactggagaagagggatccccacacgctgagcctgcctctttctctccttccttccacctgcatgtgatgggccaaccatgatgacacatgttgattcattcagcaaatacagactgaaaacctgttttgtgccaggcactgggtaggccctaaggagtcagggatgtaatgcacagagcccctgctctcagagacttccattcacacagccatgcattcactcactcaacagcgagcgcctaccatcaccaaggtcctgagaaaaatacgaaaggattcaaggcatgaatgcaaactcctagaacgtcaaggctggaagagagaaggctggacgctaatccaaccctttacagacggggaaactgacccagagaggtgaacgatttgcctgtgtgttagcctgaggctatatcccacacacaagcctccttctcctgcgtggtaccgttgccacctcccctccagcattccaacgtggctccatagcccctgtacccctgcactgcagttaagtaaatccttgcttctgagtgtccaactcatccaggcaccacagaccccattcaatccaggcctccagcaaggggatgggccccagcaaaccaggggcggccttctcacccacggtgtcgtggaggcggaggtgcattctgcggccacggattctatatacacagcccctgagaacatcagggaaagaatatgggaaagtagggcgggaggcaggtgtgagaaccactcagctccacacacaaaacacagacccagattcaaatcccaactctgtgacttcctccctgaagaccttgaacgggtttcctaaactctctcagtctccactttcttatctgtaaaatgcagagaggattggtgcctgcttcatgaggtgggtgcaaagcctcaggaaaacagtgcaacgaagcctgagcacacagtgaatgcttcataacggtgaggccagacccctgtcgtcagagctgcaggcctcagggacacctggggaggcaccaaggacaccaggtccttggggagggagccaaggcaaccagggagcctgggctgcagcccaggagtatccgctacatggcagggaatgcagtgagctgctgtagaaggagagatgcctcacccagcaaaggcagagggaggaggcatcttggtgactcaggagccccaacagtgggcatttggctgcctcatcaattcaccagaaatgcaagggcttatttctgaactctgaattctactggatccatctgtctgtccatctttatgtccgtaccacactgtcttaataaccatagctttgcaatacttttgttttgttttgttctgtttttgttttgttttgagacatagtctcactctgtcacccaggctgtagtgtaatggtgtgatctcagctcatggtaacctccacctcctgggttcaagcgactctcctgcctcagcctcccaagtagccggggctacaggcgcacaccaccacacygggctaatttttgtattttcagtagagacggggttttaccatgttggtcaggcttgtcgcaaactcctgacctcaaatgatccacgtgcctcgacctccgaaagtgctgggattacaggcgtgagccatcgcgcctggccgcgatacgttttgaaatcaggaagaatgagtgcaccaactttgttctcctttttcaagattatctttgaacttctatgtgaatctcaggatcagcttatccatgtctgcaaagaagccagctgggattttgatggcaacgggtttccagttcctggttcaaccactcctgagctctggctttgcttcctccccttcagttccctggggcaccctgctttcttccccataaattccatcttttgcgtaaccagatgacactgggtttttgtttcttgtaatcaaaggaatcttaaccaataaaactccgaacacagtgctacacactgtcccaagctatcatcccaatatcgccttcccagataatcactcagagacctcactgggg

SEQ ID NO: 709338 - DNA, 2690 bp, Homo sapiens
aatgtgctccagcagtggagacaggctaccctgaaccattcacgtgctcactccaggccaccgcagccagcccctgtgcatgacggtcacctcaggtagctggagcccatgcagcagacagacagacagacacacacacacacacatacacgcatctctttctttagcaaagatgcaggggtctctgtggagagagcacagagggtagcaaaaaggagcagaggttttggccaggtgcagtggctcacgcctgtaatcccaacactttgggaggctgaggtgggtggatcacctgaggtcgggagttcgagatcagcctggccaacatggtgaaacccccatctctactaaaatacaaaaataataataataataataatagctgggcgtggtggtgcacacctgtaatcccagctacttgggaagctgaggtgggagaatcgcttgaacccaggagacggaggttgcagtgagccgagattgcaccactgcactgcagcctgggcaacagaccaagacgcggtctcaaaaaagaaataaaggacaagaggagtgtctcggaggctcccagctcagatcctcccgttccggctgctccttcaaggagctccacaagaaaaccccaggcacctgcccgacagggacctcatgcccagctggcccccagagcggactggagaagagggatccccacacgctgagcctgcctctttctctccttccttccacctgcatgtgatgggccaaccatgatgacacatgttgattcattcagcaaatacagactgaaaacctgttttgtgccaggcactgggtaggccctaaggagtcagggatgtaatgcacagagcccctgctctcagagacttccattcacacagccatgcattcactcactcaacagcgagcgcctaccatcaccaaggtcctgagaaaaatacgaaaggattcaaggcatgaatgcaaactcctagaacgtcaaggctggaagagagaaggctggacgctaatccaaccctttacagacggggaaactgacccagagaggtgaacgatttgcctgtgtgttagcctgaggctatatcccacacacaagcctccttctcctgcgtggtaccgttgccacctcccctccagcattccaacgtggctccatagcccctgtacccctgcactgcagttaagtaaatccttgcttctgagtgtccaactcatccaggcaccacagaccccattcaatccaggcctccagcaaggggatgggccccagcaaaccaggggcggccttctcacccacggtgtcgtggaggcggaggtgcattctgcggccacggattctatatacacagcccctgagaacatcagggaaagaatatgggaaagtagggcgggaggcaggtgtgagaaccactcagctccacacacaaaacacagacccagattcaaatcccaactctgtgacttcctccctgaagaccttgaacgggtttcctaaactctctcagtctccactttcttatctgtaaaatgcagagaggattggtgcctgcttcatgaggtgggtgcaaagcctcaggaaaacagtgcaacgaagcctgagcacacagtgaatgcttcataacggtgaggccagacccctgtcgtcagagctgcaggcctcagggacacctggggaggcaccaaggacaccaggtccttggggagggagccaaggcaaccagggagcctgggctgcagcccaggagtatccgctacatggcagggaatgcagtgagctgctgtagaaggagagatgcctcacccagcaaaggcagagggaggaggcatcttggtgactcaggagccccaacagtgggcatttggctgcctcatcaattcaccagaaatgcaagggcttatttctgaactctgaattctactggatccatctgtctgtccatctttatgtccgtaccacactgtcttaataaccatagctttgcaatacttttgttttgttttgttctgtttttgttttgttttgagacatagtctcactctgtcacccaggctgtagtgtaatggtgtgatctcagctcatggtaacctccacctcctgggttcaagcgactctcctgcctcagcctcccaagtagccggggctacaggcgcacaccaccacactgggctaatttttgtattttcagtagagacggggttttaccatgttggtcaggcttgtcgcaaactcctgacctcaaatgatccacgtgcctcgacctccgaaagtgctgggattacaggcgtgagccatcgcgcctggccgcgatacgttttgaaatcaggaagaatgagtgcaccaactttgttctcctttttcaagattatctttgaacttctatgtgaatctcaggatcagcttatccatgtctgcaaagaagccagctgggattttgatggcaacgggtttccagttcctggttcaaccactcctgagctctggctttgcttcctccccttcagttccctggggcaccctgctttcttccccataaattccatcttttgcgtaaccagatgacactgggtttttgtttcttgtaatcaaaggaatcttaaccartaaaactccgaacacagtgctacacactgtcccaagctatcatcccaatatcgccttcccagataatcactcagagacctcactgggg

SEQ ID NO: 709339 - DNA, 2690 bp, Homo sapiens
aatgtgctccagcagtggagacaggctaccctgaaccattcacgtgctcactccaggccaccgcagccagcccctgtgcatgacggtcacctcaggtagctggagcccatgcagcagacagacagacagacacacacacacacacatacacgcatctctttctttagcaaagatgcaggggtctctgtggagagagcacagagggtagcaaaaaggagcagaggttttggccaggtgcagtggctcacgcctgtaatcccaacactttgggaggctgaggtgggtggatcacctgaggtcgggagttcgagatcagcctggccaacatggtgaaacccccatctctactaaaatacaaaaataataataataataataatagctgggcgtggtggtgcacacctgtaatcccagctacttgggaagctgaggtgggagaatcgcttgaacccaggagacggaggttgcagtgagccgagattgcaccactgcactgcagcctgggcaacagaccaagacgcggtctcaaaaaagaaataaaggacaagaggagtgtctcggaggctcccagctcagatcctcccgttccggctgctccttcaaggagctccacaagaaaaccccaggcacctgcccgacagggacctcatgcccagctggcccccagagcggactggagaagagggatccccacacgctgagcctgcctctttctctccttccttccacctgcatgtgatgggccaaccatgatgacacatgttgattcattcagcaaatacagactgaaaacctgttttgtgccaggcactgggtaggccctaaggagtcagggatgtaatgcacagagcccctgctctcagagacttccattcacacagccatgcattcactcactcaacagcgagcgcctaccatcaccaaggtcctgagaaaaatacgaaaggattcaaggcatgaatgcaaactcctagaacgtcaaggctggaagagagaaggctggacgctaatccaaccctttacagacggggaaactgacccagagaggtgaacgatttgcctgtgtgttagcctgaggctatatcccacacacaagcctccttctcctgcgtggtaccgttgccacctcccctccagcattccaacgtggctccatagcccctgtacccctgcactgcagttaagtaaatccttgcttctgagtgtccaactcatccaggcaccacagaccccattcaatccaggcctccagcaaggggatgggccccagcaaaccaggggcggccttctcacccacggtgtcgtggaggcggaggtgcattctgcggccacggattctatatacacagcccctgagaacatcagggaaagaatatgggaaagtagggcgggaggcaggtgtgagaaccactcagctccacacacaaaacacagacccagattcaaatcccaactctgtgacttcctccctgaagaccttgaacgggtttcctaaactctctcagtctccactttcttatctgtaaaatgcagagaggattggtgcctgcttcatgaggtgggtgcaaagcctcaggaaaacagtgcaacgaagcctgagcacacagtgaatgcttcataacggtgaggccagacccctgtcgtcagagctgcaggcctcagggacacctggggaggcaccaaggacaccaggtccttggggagggagccaaggcaaccagggagcctgggctgcagcccaggagtatccgctacatggcagggaatgcagtgagctgctgtagaaggagagatgcctcacccagcaaaggcagagggaggaggcatcttggtgactcaggagccccaacagtgggcatttggctgcctcatcaattcaccagaaatgcaagggcttatttctgaactctgaattctactggatccatctgtctgtccatctttatgtccgtaccacactgtcttaataaccatagctttgcaatacttttgttttgttttgttctgtttttgttttgttttgagacatagtctcactctgtcacccaggctgtagtgtaatggtgtgatctcagctcatggtaacctccacctcctgggttcaagcgactctcctgcctcagcctcccaagtagccggggctacaggcgcacaccaccacactgggctaatttttgtattttcagtagagacggggttttaccatgttggtcaggcttgtcgcaaactcctgacctcaaatgatccacgtgcctcgacctccgaaagtgctgggattacaggcgtgagccatcgcgcctggccgcgatacgttttgaaatcaggaagaatgagtgcaccaactttgttctcctttttcaagattatctttgaacttctatgtgaatctcaggatcagcttatccatgtctgcaaagaagccagctgggattttgatggcaacgggtttccagttcctggttcaaccactcctgagctctggctttgcttcctccccttcagttccctggggcaccctgctttcttccccataaattccatcttttgcgtaaccagatgacactgggtttttgtttcttgtaatcaaaggaatcttaaccaataaaactccraacacagtgctacacactgtcccaagctatcatcccaatatcgccttcccagataatcactcagagacctcactgggg

SEQ ID NO: 709340 - DNA, 641 bp, Homo sapiens
ggaaggacagagggcccgtgtcactggagggtgctggcctcaatgactctgcagccctgccagctctgagattctgggatccacaaaaccagcaacacttctrtagcaccccaccatctacacaggaagcaagcttagagggctcagtgacttgcccaaggtcacactgcagcccttaacccaggctgactccaagtccagatccttttccccagcaccactcccctgcagagggcactgcagctccatcagggccagcacccaccaacctgcccccaggagccttccgataggacaggtaggccccagggccatcgccaatgtccacacacgcctaccctgcagctgcccgacacacacaggctcagggtcccgtcctcccgggggccacttggcatacaccgggtcccatcgaggaagctgtctccacgcttcatgatgaagctctcgccaatggcccggcacatgtgtctgcacagagcatcccctgggagggcagagtgaaaaagggtgtcctgaaccgagcaggaggggcaagtcccccagcccccacccagcttcatcctttgcatctggggcaagggtttctatcttccccacatcccacctcctaaggcaataatcctaatcacgatcctaat

SEQ ID NO: 709341 - DNA, 641 bp, Homo sapiens
ggaaggacagagggcccgtgtcactggagggtgctggcctcaatgactctgcagccctgccagctctgagattctgggatccacaaaaccagcaacacttctatagcaccccaccatctacacaggaagcaagcttagagggctcagtgacttgcccaaggtcacactgcagcccttaacccaggctgactccaagtccagatccttttccccagcaccactcccctgcagasggcactgcagctccatcagggccagcacccaccaacctgcccccaggagccttccgataggacaggtaggccccagggccatcgccaatgtccacacacgcctaccctgcagctgcccgacacacacaggctcagggtcccgtcctcccgggggccacttggcatacaccgggtcccatcgaggaagctgtctccacgcttcatgatgaagctctcgccaatggcccggcacatgtgtctgcacagagcatcccctgggagggcagagtgaaaaagggtgtcctgaaccgagcaggaggggcaagtcccccagcccccacccagcttcatcctttgcatctggggcaagggtttctatcttccccacatcccacctcctaaggcaataatcctaatcacgatcctaat

SEQ ID NO: 709342 - DNA, 600 bp, Homo sapiens
tttttagcagagatggggtttcaccatgatggccaggctggtcttgaactcctgacctcaaataatctgcttgcctcggcttcccaaagtgctgggattacaggggtgagccaccacgcctggtcaagatatcaagatatttcttgaagacgtgttacatgaggcacactaataaatacctacgtatgatgaccactttgggacccttgggagacacagagtccttactatgccaaaatactgtagctatttccrgtgaatgtattctttttttttttttttttttttgagacggagtttagctctcgttgccctagctggagtgcaatggtgcaatctcagctcactgcaacctctgcctcccaggttcaagtgattctcctgcctcagcctccctagtagctgggattacaggcgtgtgccaccacgcccagctaattttttgtatttttggtagaaacgggttttaaccaggctggtctcaaactcctgacctcaggtgatccgcccgccttggcctcccaaagtgcagggattacaagcgtgagccactgcgactggcaagtgaatgaattatttttttcctttttctttttcttt

SEQ ID NO: 709343 - DNA, 658 bp, Homo sapiens
ttcaggccgccatttcccagaatccctagacacaatctcacttaatcctcccagcagccttatggaggtgtgtgatctcccttttccaggtgaggaaacaggcccgagagggtgagtgccctatttgacaacccctcttgctatccagccagaatggttcctctagtaccccttctggaggcctggctgtacaggtgtccctcagggacacacacccccactcgactctgggggcccagcccatcctaatccccaccccggggcttcccaccccccatcatacactctccacatcttctgtggctgcaacaaccttttcacttggccagttggagctactgactgctcacacagggttttaacgaaaatctatggtgtgcctattagctagggaaacatttattctggtgttgtcagagaaccttggacagaaaagctcctcttgatgtgtgcactgcacatatgtggatgcgtgtacatgcacgtgtctgtgtgcctctatgcatgtgcagacgtgtttttgtctgtgcaygcatgtgcctacacacacacatgaacacatcttttgttattaaagatctgtcagaagagtgtcctgggtaactctaacccatgtgggactgcagagaagaaaaaaacccacacctttttttgtcac

SEQ ID NO: 709344 - DNA, 1508 bp, Homo sapiens
cattccccatctctgactctgagcctgtttccctatccataacatgggaataagaatatctatttggcaggattgttacgagaattaaacataaacctgcaaaaggctaccagacaacctcacacatagtaggtactcattaagtgagtccttttatcccatgaccaagggtgaccctgactgcctggcaactgccccagagaatgtggacacaggcctgggggctctgacacagctgtggaacagctggacgcctgcgtgggtgagaggtcgagaacggatgtggggtgggtggaggcccctgaggccagctggtgacccagttggccacagagacaagggagaaaaggaccagaaataagccagggcagcttcttgaaataacagaatgggaacaggatggggcmacaggatgcctcccgggggcaaagaattgggaaggcaggaagatgtgtccctcaactctagctccaagaatccccagacaggccggggaacttggccaaccctcagagccctgcctcccacccagcccacctatgtgttctctggccaagagcagagacaagtctggcagggactacacaaccccgggctgctgggtagggtttgaaacggaaaatgtccatcaattccatggaatattgtgcagtggcaaaaaagaatgagatgctccttatatactgatgggactggtctctaagagatgttgtgaagtaagaaagatgaatttttttttaatttgggtttttttgtttgtttgtttgttttccctacgacagggtctcactctgtcactcaagctggagtgcagtggcataatcatggctcactgcagcctcaacctccccggctcaggtgatcttcacacctcagcctcccgagtagctgggactatggtgcacgccaccacacctggctaatttttatattttttgtagagacaggatcctgctatgttgcccacaggtgatctgcctgcctcggcctcccacagtgctagattacaggcatgagccaccacgcctggcctaataaatatttttttaatagaaaaataaagagtcctggctgagtgtggtggttcacacctgtaatcccagcactgtgggaggccaaggggggcaaatcacctgaggtcaggagttcgagaccagcctggccaacatggtgaaacctcatctctactaaaaatacaaaagttagctggaagtggtggcgggcacctgtagtcccagctacttgggaggctgaggcacgacaatcacttgaacccaggagacagaggttgcagtgagccaagatcctgccactgcactccagcctgagtgacagagtgagactctgtctcaaaaaaatacataaataaaataaacaaataaataaaaaagaaagttgattatatttctcctctttatgttgctccactgtttaaatcctttcagtgacacatagctgagtatattggataatttcaaaaaaagtatttgttgattggattggtaaat

SEQ ID NO: 709345 - DNA, 1444 bp, Homo sapiens
gtttattttcacattgggttgttaatcttttattattgtgttataagaattctttgtatattctagatacaagtcccttatcaggcatataatctacaaatattttcttccattttttgtcttttctcttttttgataatgctctttgatgcacagtggttttaaattctaattaagtaatatttgtctatattttctttggttgcttgtgttttgagtgttatatataaggaaccgtttcctaattcaaagtactggagatttactcctatgtttttactaagactttttatagtttcagctgttatatttaggtttatggtccattttaagtttttatatgcagcgtgagatagcagtccaacttcacttttttgcacatgcatatctagtctttccaccactgttcgttgaaaactctgttgttttcctcattgatttgtcgtagcacccttgttgcaaatccatttaccatgaatataatgttttatttctggactctcaattctgttctattgatttatatatgcctatctttatgttaatgtaacattgtctttatttagcttttaaaaaatttttcatccattttattccactttgcacacatagtattttcagaataataatgctaacactaccacctactatrtaattactaaaaagagtttaagaggtttttttttttgagacggagtttcactcttgttgcccaggatggagtgcaatctccaggtgcgatctcagctcactgcaacctccgcctcccaggttcaatggatcctgcctcagcctcccgtgtagctggggttataggcatgtgccaccacgcccagctaattttgtattttttagtagagacaagtttcaccatgtagaccaggctagtctccaagtcctgacctcaggtgatttgcccgccttggcctctcaaagtgctgggattacaggcatgagccacattgagaagaagagagtatcatacaaagatgtgatgttggaataagagtaagggaaatgcaaggcaagtgacttgattcattggctttaaatacggataaacgagatgatgtaccaaagaatgtgggcagactttagagctagagaaggcaaagagacagatttttcccttagggcctcaataccaccctgctgatacattgattttagttcaatgatacccatgtcagacttctgacttacagacctgtaagataattttgggggattttttgtttttgtttttatttcagtactttctggggtaattggtggtttttagttacatggataagttctttactgatgatttctgagattttggtgcactcattacttgaacagtgtacacttgaacagtctacccagtgcatagtcttttatccctgagtatctccccaccattcctcctgagtccccaaagtttattacctcattcttacgc

SEQ ID NO: 709346 - DNA, 1308 bp, Homo sapiens
tgaaaaggtttgttttcatatatatatatatatgaaaaggtttgttttcatatatatatatatgaaaaggtttgttttcatatatatatatatatgaaaaggtttgttttcatatatatatatgaaaaggtttgttttcactctgaatatagcaatagaaatcattgtaccagagagtactctgacaaattttcagcatttaatgagaatgtgggcaggaagtcaaataacttgttcttcctgtaggaaggtaaagattattatattattgggcacttgtgtttacaatggaaagtccagaataaaggaggcctcaatatgctctgtggaacacactgtgctagaaagaatggcagcaaattttatggcagattttgccacaagacctcaatgtgtattacgccttggaactagatcagctttggaattcaaacacttcctcatttccatctctcaacattggattatcattgccctgcaacgaatattccatttgccttcatttgtagttgcaggatatttcctggtaatcattacatttcttgtaaccataaaataagtaccaaataatatctgataagaactttgcttcatttttttcctgctagaatcaaaatttagagaagcaaagcatcagaatccatttccaaaatttgattggtaccactcagtacaaagacccatattccattgtaatgttgatattttcatctgtttttgtatcatgtgtatctgctttataatttccctgcattctcaagtattaattttcaaatgatttttaacttattacttctgaattgaaacacaattgttttcattttgtctacatggatttatagcttcatatagytgcaatcacaaaattttatacttttagtaagattatattcatccaacaagggactatatccggaatatacaaggaactcaatgcaacaccaaaaaaagtaaataatcccattaaaaagcgggcaaagggttgcaataagcattgttcaaaagaagacatacaaatggccaacaagtacatgaaaaaatgatcagcatcactagtcatcagggaaatgcaaatcaaaaccacagtgagatagaattacaccacagttagaatggctattatcagaaaaaaaaataacagattccggcaagaatacagagaaatgggaactcttatgcactgttgatgggaatgtaaattaacacaactattatggaaaacagtacatagatttctcaaaaaactacaaataaaactaccatatgattcaacaatcccactactggatgtttatccaaaggaaatga

SEQ ID NO: 709347 - DNA, 1392 bp, Homo sapiens
tggaaaagtcctggaacatttatcacggggaataagtaagaaaggaagggagaaaatgagtcaccttctattcctgctagcaaattctatttggcttcttccaccaccacctcctgtccatccttctggtgcaaaagaccagagaaattgggggacagtaayaagatagttgaaggaggttaccagaagttgcatcagatgaaataatcgggagaaagaatttgtaaaacgacacttcccagtaagattccccacaaacgtaaacccagtcatttgggtcatttgtgactttgattggcatattcaaattgtgccaatcatttggcacaattgtgattggcagtcatttgtgagtttcagcatgaaacagtgacaagaatctagtcacctctgcaacagaacatccagtaactgacattgactgtcatctcggcaacactatgacctcattacatacctttctttagaaagtttactgtctctttttagattctcttggattttcagttaaaaacatcaaagatagttttatgtaataagccagatgactgtgttttcctccttcttttctatccattttcccctaaacaacttagattttctcaatattcttaatcagagttgagatgcttaccaatacacattaccagaattcttaacatacaaagccaattttcttctttctttgcttccccaaatatttgacttcagagcatttagaaataaatgcagagggtagaaaaatgccttttacttcatgtttgttattcctatgtcaagaatacctattgtgatagttttattcaaataggaggcacacttcccttctatgagttccatgtgaaagaagttcccagggttaggaagaaacaatacacaatgccagtacttcccaaaggataagagccccatggaaacccaaatatatttttcatagaatttgtttatttaacttatcctgactaccctatctaatatagcaccccttcattctctgttcccctgtactgcttcctattcttcatagcatggatcatcatgctattattatgttattcatatattagcttacttattatattaaccatctctcccactagcatgaaagccctactggtttatactccaccgaatccccagggctttgaacactgttcaacatacggtgggtgctcaatatattgtttgaatacagcggacaccatcaatgcttcttcccgatcccatcacctctgttacccttgtattgtttctgcgtatccctttctgtgcttttggttccaatggccccacacatccaattcatctttggagcactgctctggggctcctggagctgttttgccacctcgtgcaggagatggaagtgacagcgtttatatctcccttggg

SEQ ID NO: 709348 - DNA, 594 bp, Homo sapiens
ggaatatcgtgtgggaaatccctgtgatgagagtgaggtcagcaaatttagtacataagtaactgcacattcacctctccctcagcactccctttcaccagcccttgcttaattattctccatagaatgaatcaccttctaatattttttttttttttcagacagagtcttgctctgtctcccaggctggagtgcagtggcaaaatctcggctgactrcaacctccgcctcctgggttcaagcaattctcctgtctcaggctcctgagtagctgggattacaggcacacgccaccacacctggctaattttaatatttgtatttttagtagagacggggtttcagcatattggccaggctggtctcgaactcctgaccttgtgatcctcccgcctcggcctcccaaagtgctggggttacaggcgtgagccactgtccccagctttttttttttttttttttttttttttttgagacagagtctcacttcaacacctaagctggagtgcagtggcgcgatctcggctcacagcaaactctgccacctgggttcaacccattgtcttgcctcagcctcccaggtagctgggatta

SEQ ID NO: 709349 - DNA, 1206 bp, Homo sapiens
ttgctgacagattttaagcctcacccttccctcttctctgtgccctacacctggacaagctgataagaaagtctgggtgcaccctcctttggtgtttgagggggaatattcacaagccccttcctgagggaaccctcacccctcaaccacaataaaaacccaggccagtctccttcctggctctcccaacacatctgggacctgcttgaaagactggccctgctccccctggagacctcaattatgtaaataataaaccttttcatactctcttggtgtttgggtggtgtcgtcagtcttcattcaaaccaaaccttggatgggatccatctgcctctgcaggtgaccgtaacaacatgcaaatggtgagttctgctggggggtcatggaagctccctggaggaggtgtatctggacaacagggaaagaaaggagctggagaagagaggcagaaaaattgggtcctggttcaggtgaagttttcccagctggaacaatgacaatgtcaatatcccacaaaggcggcttctgtttatttagcgcttgctgtgttcccacaagtcttcctctacctgccctctccccagccctcatctcactctcccagagccccagagcacaccaatggacaccatcacctctcgggcagatcagcacagagacgtgaagcacacaggcagctgctggaaaaataacaaggaattgcaatggtgtgcccctccgttgaatgcaagctctcttctgccttctcaccttgggcaagttaccttccgttccaggcctcggtttctccatgtgtgaaatgaaagggctggagagaaatctctcactattccccaatctacattcattgtatcccaarccttctaatatctgttcaacgaagtgtaccaaatctcagctattggactgagactcaggggtctatctgacttgaattgaaaatgcaaattactgaagagggagggagggaggagtgctgaagattgaatggatttatcagatttccttctcctatggcccagatgcaggcctagtccaggcgattcccctggctcagaatctgccaggctcaagcattcattgacagcctactatgtaccaatcctgggctgagtcccaacccggggatgacttagaggaggccaggatgtggcctcatgttctggttgctctcacatttaaacaggctaaacccactttgca

SEQ ID NO: 709350 - DNA, 1206 bp, Homo sapiens
ttgctgacagattttaagcctcacccttccctcttctctgtgccctacacctggacaagctgataagaaagtctgggtgcaccctcctttggtgtttgagggggaatattcacaagccccttcctgagggaaccctcacccctcaaccacaataaaaacccaggccagtctccttcctggctctcccaacacatctgggacctgcttgaaagactggccctgctccccctggagacctcaattatgtaaataataaaccttttcatactctcttggtgtttgggtggtgtcgtcagtcttcattcaaaccaaaccttggatgggatccatctgcctctgcaggtgaccgtaacaacatgcaaatggtgagttctgctggggggtcatggaagctccctggaggaggtgtatctggacaacagggaaagaaaggagctggagaagagaggcagaaaaattgggtcctggttcaggtgaagttttcccagctggaacaatgacaatgtcaatatcccacaaaggcggcttctgtttatttagcgcttgctgtgttcccacaagtcttcctctacctgccctctccccagccctcatctcactctcccagagccccagagcacaccaatggacaccatcacctctcgggcagatcagcacagagacgtgaagcacacaggcagctgctggaaaaataacaaggaattgcaatggtgtgcccctccgttgaatgcaagctctcttctgccttctcaccttgggcaagttaccttccgttccaggcctcggtttctccatgtgtgaaatgaaagggctggagagaaatctctcactattccccaatctacattcattgtatcccaaaccttctaatatctgttcaacgaagtgtaccaaatctcagctattggactgagactcaggggtctatctgacttgaattgaaaatgcaaattactgaagagggagggagggaggagtgctgaagattgaatggatttatcagatttccttctcctatggcccagatgcaggcctagtccaggcgattcccctggctcagaatctgccaggctcaagcattcattgacagcctactatgtaccaatcctgggctgagtcccaacccggggatgacttagaggaggccagsatgtggcctcatgttctggttgctctcacatttaaacaggctaaacccactttgca

SEQ ID NO: 709351 - DNA, 2563 bp, Homo sapiens
tgtgggttcacccacccattgttatcataaatccatcccagctccatttcaagactctcagggtttcagcagaacatctaacacgaaatgaatatatacattcaaggagctggcatgttgtatcacaagggagaagggaaaacacccattgttacagcctcagagctgattgaaaaagaatgcaataaagaatatcagaggttctcagaccagaatcatgattctcattattatcccacaggaggagaaaagggacagtcacccagaattagagagggctctagaagttttgaagtgttgacacctaagcgtccacaaaactgctcggaatagttttattttagaagtatcctgcccagcctgagtctgagaaaccagcaatgcaaaggctctgttaattattatttcacttatctgagacttggtttctttatctatgaaatagggctaagcaaggctcccacatggtattattgtgaggatcaaatgtgataatgtaggttatcactggcagctatatgtggtaatgagcactgcaccaccctgtggggtcaccttgagtagattcaggtctgcagagggtaaacagactccctgatttaaaggttctccaaagccctgcaaccctgaggtctccacctgacctacctatccaactaatagtctaccattagaatcaaggcactgcagggagacaaataaagggagggaggacattgctttcagaaatcccagtgattaggcatctaggcagagagccttcatttaggaactccggaatctggattcaaatctttacgttgtcactgctccaaaagcgctttttcaactctaaagtgcagattccaattcagcaggaccaaatgcgagctgagattctgcatttctcatagcactcagggatggcattgctactcatccgtggaccacattttgagtggtaagatcctgtaagaccatggactcacaaatcattgaaatgactgggcctcagttccttcacctatgaagtaaggtgataaatgaaatgtgatttattgtcttctctggggatcaaatatgtcattactgtgtgatagtactttatccaaatttaaaacagctttttacaaaattcatttttcttgagagatcagatagcaggctcccattagcttgtcactggggatcttgttgacttaagtcttacacagtctgtctcccttgggaaaatagtgagtggggaagcttctgtgagagacaggggtgatgcatgacaacagagatccagggcactggggacatcacagttgttgttggatgattcagtgaagaagcatcattgtaggatgatgcaccaaaggaagcacccaatgctggcaagcaagagctagtaggctatacctggtgcagactgaagatgagagaagcagtcatcactacatcatggatgtattgcagggcccaaacaggggtggtgtttggagtttagatagtttagccacagtaaagccctgyaaagaacagtatcactataggattctttggttctcatccttaattcattccctcgacaaaatttgttaagcatctattatgtgtcagaccttgaagaaagagcagtaaagacagacacccataaccctatgcctaggacacttgcactagcccattgtgttctaaagaatcaacaacacagaatatctttttaaagttcacatctgtatttggctagctagggctgtcataacacaataccacagattgggtggcttaagcaacaggaattaattttctcacagttctggagcctagaagttcaatatcaaaatgttggcagatttgatttctcctaaggcttctctcctgggtccttggatgaccttcttctcattgtggcctcacaagcttttctctgttcatgcgcatccctgctgtctctttcttttcttataaggacatcagtcattttgtattagggccccacccttatgatctcatttaaccttaattaccttttcaaaggacttattgattgctgaatacagtcccattgggcttaggacttcaatatgcgaattctgaggaaacacaattcagtccataacgatattaatgtccagggttggctttggttgaaaccccagctcttcatctcatcaactatataactttggtcaagttacttaacctctttacagttcagtttactcttctgtaaaggtgactaataatacttttataaagctctcatgaggaattaaataggtagtgtttgtaaagtgcttaatagggtccagcacctagtaggtgccccaatcttacccactatgctgttctttaaatactgaccaaagatatttactttttgctttctttgggcaatagatttgactttattaccttttcttgtgaatctactaataaattaggcttttctttttcttggaacctcgcaactcacaccccttttcttaccatttccaaaaacaaaatatctactggaatcatcagctttagccctaattgtaaaggatcaaggataggaaaatgttgagcttatcaaataccacttaggtgggaa

SEQ ID NO: 709352 - DNA, 2563 bp, Homo sapiens
tgtgggttcacccacccattgttatcataaatccatcccagctccatttcaagactctcagggtttcagcagaacatctaacacgaaatgaatatatacattcaaggagctggcatgttgtatcacaagggagaagggaaaacacccattgttacagcctcagagctgattgaaaaagaatgcaataaagaatatcagaggttctcagaccagaatcatgattctcattattatcccacaggaggagaaaagggacagtcacccagaattagagagggctctagaagttttgaagtgttgacacctaagcgtccacaaaactgctcggaatagttttattttagaagtatcctgcccagcctgagtctgagaaaccagcaatgcaaaggctctgttaattattatttcacttatctgagacttggtttctttatctatgaaatagggctaagcaaggctcccacatggtattattgtgaggatcaaatgtgataatgtaggttatcactggcagctatatgtggtaatgagcactgcaccaccctgtggggtcaccttgagtagattcaggtctgcagagggtaaacagactccctgatttaaaggttctccaaagccctgcaaccctgaggtctccacctgacctacctatccaactaatagtctaccattagaatcaaggcactgcagggagacaaataaagggagggaggacattgctttcagaaatcccagtgattaggcatctaggcagagagccttcatttaggaactccggaatctggattcaaatctttacgttgtcactgctccaaaagcgctttttcaactctaaagtgcagattccaattcagcaggaccaaatgcgagctgagattctgcatttctcatagcactcagggatggcattgctactcatccgtggaccacattttgagtggtaagatcctgtaagaccatggactcacaaatcattgaaatgactgggcctcagttccttcacctatgaagtaaggtgataaatgaaatgtgatttattgtcttctctggggatcaaatatgtcattactgtgtgatagtactttatccaaatttaaaacagctttttacaaaattcatttttcttgagagatcagatagcaggctcccattagcttgtcactggggatcttgttgacttaagtcttacacagtctgtctcccttgggaaaatagtgagtggggaagcttctgtgagagacaggggtgatgcatgacaacagagatccagggcactggggacatcacagttgttgttggatgattcagtgaagaagcatcattgtaggatgatgcaccaaaggaagcacccaatgctggcaagcaagagctagtaggctatacctggtgcagactgaagatgagagaagcagtcatcactacatcatggatgtattgcagggcccaaacaggggtggtgtttggagtttagatagtttagccacagtaaagccctgtaaagaacagtatcactataggattctttkgttctcatccttaattcattccctcgacaaaatttgttaagcatctattatgtgtcagaccttgaagaaagagcagtaaagacagacacccataaccctatgcctaggacacttgcactagcccattgtgttctaaagaatcaacaacacagaatatctttttaaagttcacatctgtatttggctagctagggctgtcataacacaataccacagattgggtggcttaagcaacaggaattaattttctcacagttctggagcctagaagttcaatatcaaaatgttggcagatttgatttctcctaaggcttctctcctgggtccttggatgaccttcttctcattgtggcctcacaagcttttctctgttcatgcgcatccctgctgtctctttcttttcttataaggacatcagtcattttgtattagggccccacccttatgatctcatttaaccttaattaccttttcaaaggacttattgattgctgaatacagtcccattgggcttaggacttcaatatgcgaattctgaggaaacacaattcagtccataacgatattaatgtccagggttggctttggttgaaaccccagctcttcatctcatcaactatataactttggtcaagttacttaacctctttacagttcagtttactcttctgtaaaggtgactaataatacttttataaagctctcatgaggaattaaataggtagtgtttgtaaagtgcttaatagggtccagcacctagtaggtgccccaatcttacccactatgctgttctttaaatactgaccaaagatatttactttttgctttctttgggcaatagatttgactttattaccttttcttgtgaatctactaataaattaggcttttctttttcttggaacctcgcaactcacaccccttttcttaccatttccaaaaacaaaatatctactggaatcatcagctttagccctaattgtaaaggatcaaggataggaaaatgttgagcttatcaaataccacttaggtgggaa

SEQ ID NO: 709353 - DNA, 2563 bp, Homo sapiens
tgtgggttcacccacccattgttatcataaatccatcccagctccatttcaagactctcagggtttcagcagaacatctaacacgaaatgaatatatacattcaaggagctggcatgttgtatcacaagggagaagggaaaacacccattgttacagcctcagagctgattgaaaaagaatgcaataaagaatatcagaggttctcagaccagaatcatgattctcattattatcccacaggaggagaaaagggacagtcacccagaattagagagggctctagaagttttgaagtgttgacacctaagcgtccacaaaactgctcggaatagttttattttagaagtatcctgcccagcctgagtctgagaaaccagcaatgcaaaggctctgttaattattatttcacttatctgagacttggtttctttatctatgaaatagggctaagcaaggctcccacatggtattattgtgaggatcaaatgtgataatgtaggttatcactggcagctatatgtggtaatgagcactgcaccaccctgtggggtcaccttgagtagattcaggtctgcagagggtaaacagactccctgatttaaaggttctccaaagccctgcaaccctgaggtctccacctgacctacctatccaactaatagtctaccattagaatcaaggcactgcagggagacaaataaagggagggaggacattgctttcagaaatcccagtgattaggcatctaggcagagagccttcatttaggaactccggaatctggattcaaatctttacgttgtcactgctccaaaagcgctttttcaactctaaagtgcagattccaattcagcaggaccaaatgcgagctgagattctgcatttctcatagcactcagggatggcattgctactcatccgtggaccacattttgagtggtaagatcctgtaagaccatggactcacaaatcattgaaatgactgggcctcagttccttcacctatgaagtaaggtgataaatgaaatgtgatttattgtcttctctggggatcaaatatgtcattactgtgtgatagtactttatccaaatttaaaacagctttttacaaaattcatttttcttgagagatcagatagcaggctcccattagcttgtcactggggatcttgttgacttaagtcttacacagtctgtctcccttgggaaaatagtgagtggggaagcttctgtgagagacaggggtgatgcatgacaacagagatccagggcactggggacatcacagttgttgttggatgattcagtgaagaagcatcattgtaggatgatgcaccaaaggaagcacccaatgctggcaagcaagagctagtaggctatacctggtgcagactgaagatgagagaagcagtcatcactacatcatggatgtattgcagggcccaaacaggggtggtgtttggagtttagatagtttagccacagtaaagccctgtaaagaacagtatcactataggattctttggttctcatccttaattcattccctcgacaaaatttgttaagcatctattatgtgtcagaccttgaagaaagagcagtaaagacagacacccataaccctatgcctaggacacttgcactagcccatygtgttctaaagaatcaacaacacagaatatctttttaaagttcacatctgtatttggctagctagggctgtcataacacaataccacagattgggtggcttaagcaacaggaattaattttctcacagttctggagcctagaagttcaatatcaaaatgttggcagatttgatttctcctaaggcttctctcctgggtccttggatgaccttcttctcattgtggcctcacaagcttttctctgttcatgcgcatccctgctgtctctttcttttcttataaggacatcagtcattttgtattagggccccacccttatgatctcatttaaccttaattaccttttcaaaggacttattgattgctgaatacagtcccattgggcttaggacttcaatatgcgaattctgaggaaacacaattcagtccataacgatattaatgtccagggttggctttggttgaaaccccagctcttcatctcatcaactatataactttggtcaagttacttaacctctttacagttcagtttactcttctgtaaaggtgactaataatacttttataaagctctcatgaggaattaaataggtagtgtttgtaaagtgcttaatagggtccagcacctagtaggtgccccaatcttacccactatgctgttctttaaatactgaccaaagatatttactttttgctttctttgggcaatagatttgactttattaccttttcttgtgaatctactaataaattaggcttttctttttcttggaacctcgcaactcacaccccttttcttaccatttccaaaaacaaaatatctactggaatcatcagctttagccctaattgtaaaggatcaaggataggaaaatgttgagcttatcaaataccacttaggtgggaa

SEQ ID NO: 709354 - DNA, 2563 bp, Homo sapiens
tgtgggttcacccacccattgttatcataaatccatcccagctccatttcaagactctcagggtttcagcagaacatctaacacgaaatgaatatatacattcaaggagctggcatgttgtatcacaagggagaagggaaaacacccattgttacagcctcagagctgattgaaaaagaatgcaataaagaatatcagaggttctcagaccagaatcatgattctcattattatcccacaggaggagaaaagggacagtcacccagaattagagagggctctagaagttttgaagtgttgacacctaagcgtccacaaaactgctcggaatagttttattttagaagtatcctgcccagcctgagtctgagaaaccagcaatgcaaaggctctgttaattattatttcacttatctgagacttggtttctttatctatgaaatagggctaagcaaggctcccacatggtattattgtgaggatcaaatgtgataatgtaggttatcactggcagctatatgtggtaatgagcactgcaccaccctgtggggtcaccttgagtagattcaggtctgcagagggtaaacagactccctgatttaaaggttctccaaagccctgcaaccctgaggtctccacctgacctacctatccaactaatagtctaccattagaatcaaggcactgcagggagacaaataaagggagggaggacattgctttcagaaatcccagtgattaggcatctaggcagagagccttcatttaggaactccggaatctggattcaaatctttacgttgtcactgctccaaaagcgctttttcaactctaaagtgcagattccaattcagcaggaccaaatgcgagctgagattctgcatttctcatagcactcagggatggcattgctactcatccgtggaccacattttgagtggtaagatcctgtaagaccatggactcacaaatcattgaaatgactgggcctcagttccttcacctatgaagtaaggtgataaatgaaatgtgatttattgtcttctctggggatcaaatatgtcattactgtgtgatagtactttatccaaatttaaaacagctttttacaaaattcatttttcttgagagatcagatagcaggctcccattagcttgtcactggggatcttgttgacttaagtcttacacagtctgtctcccttgggaaaatagtgagtggggaagcttctgtgagagacaggggtgatgcatgacaacagagatccagggcactggggacatcacagttgttgttggatgattcagtgaagaagcatcattgtaggatgatgcaccaaaggaagcacccaatgctggcaagcaagagctagtaggctatacctggtgcagactgaagatgagagaagcagtcatcactacatcatggatgtattgcagggcccaaacaggggtggtgtttggagtttagatagtttagccacagtaaagccctgtaaagaacagtatcactataggattctttggttctcatccttaattcattccctcgacaaaatttgttaagcatctattatgtgtcagaccttgaagaaagagcagtaaagacagacacccataaccctatgcctaggacacttgcactagcccattgtgttctaaagaatcaacaacayagaatatctttttaaagttcacatctgtatttggctagctagggctgtcataacacaataccacagattgggtggcttaagcaacaggaattaattttctcacagttctggagcctagaagttcaatatcaaaatgttggcagatttgatttctcctaaggcttctctcctgggtccttggatgaccttcttctcattgtggcctcacaagcttttctctgttcatgcgcatccctgctgtctctttcttttcttataaggacatcagtcattttgtattagggccccacccttatgatctcatttaaccttaattaccttttcaaaggacttattgattgctgaatacagtcccattgggcttaggacttcaatatgcgaattctgaggaaacacaattcagtccataacgatattaatgtccagggttggctttggttgaaaccccagctcttcatctcatcaactatataactttggtcaagttacttaacctctttacagttcagtttactcttctgtaaaggtgactaataatacttttataaagctctcatgaggaattaaataggtagtgtttgtaaagtgcttaatagggtccagcacctagtaggtgccccaatcttacccactatgctgttctttaaatactgaccaaagatatttactttttgctttctttgggcaatagatttgactttattaccttttcttgtgaatctactaataaattaggcttttctttttcttggaacctcgcaactcacaccccttttcttaccatttccaaaaacaaaatatctactggaatcatcagctttagccctaattgtaaaggatcaaggataggaaaatgttgagcttatcaaataccacttaggtgggaa

SEQ ID NO: 709355 - DNA, 2563 bp, Homo sapiens
tgtgggttcacccacccattgttatcataaatccatcccagctccatttcaagactctcagggtttcagcagaacatctaacacgaaatgaatatatacattcaaggagctggcatgttgtatcacaagggagaagggaaaacacccattgttacagcctcagagctgattgaaaaagaatgcaataaagaatatcagaggttctcagaccagaatcatgattctcattattatcccacaggaggagaaaagggacagtcacccagaattagagagggctctagaagttttgaagtgttgacacctaagcgtccacaaaactgctcggaatagttttattttagaagtatcctgcccagcctgagtctgagaaaccagcaatgcaaaggctctgttaattattatttcacttatctgagacttggtttctttatctatgaaatagggctaagcaaggctcccacatggtattattgtgaggatcaaatgtgataatgtaggttatcactggcagctatatgtggtaatgagcactgcaccaccctgtggggtcaccttgagtagattcaggtctgcagagggtaaacagactccctgatttaaaggttctccaaagccctgcaaccctgaggtctccacctgacctacctatccaactaatagtctaccattagaatcaaggcactgcagggagacaaataaagggagggaggacattgctttcagaaatcccagtgattaggcatctaggcagagagccttcatttaggaactccggaatctggattcaaatctttacgttgtcactgctccaaaagcgctttttcaactctaaagtgcagattccaattcagcaggaccaaatgcgagctgagattctgcatttctcatagcactcagggatggcattgctactcatccgtggaccacattttgagtggtaagatcctgtaagaccatggactcacaaatcattgaaatgactgggcctcagttccttcacctatgaagtaaggtgataaatgaaatgtgatttattgtcttctctggggatcaaatatgtcattactgtgtgatagtactttatccaaatttaaaacagctttttacaaaattcatttttcttgagagatcagatagcaggctcccattagcttgtcactggggatcttgttgacttaagtcttacacagtctgtctcccttgggaaaatagtgagtggggaagcttctgtgagagacaggggtgatgcatgacaacagagatccagggcactggggacatcacagttgttgttggatgattcagtgaagaagcatcattgtaggatgatgcaccaaaggaagcacccaatgctggcaagcaagagctagtaggctatacctggtgcagactgaagatgagagaagcagtcatcactacatcatggatgtattgcagggcccaaacaggggtggtgtttggagtttagatagtttagccacagtaaagccctgtaaagaacagtatcactataggattctttggttctcatccttaattcattccctcgacaaaatttgttaagcatctattatgtgtcagaccttgaagaaagagcagtaaagacagacacccataaccctatgcctaggacacttgcactagcccattgtgttctaaagaatcaacaacacagaayatctttttaaagttcacatctgtatttggctagctagggctgtcataacacaataccacagattgggtggcttaagcaacaggaattaattttctcacagttctggagcctagaagttcaatatcaaaatgttggcagatttgatttctcctaaggcttctctcctgggtccttggatgaccttcttctcattgtggcctcacaagcttttctctgttcatgcgcatccctgctgtctctttcttttcttataaggacatcagtcattttgtattagggccccacccttatgatctcatttaaccttaattaccttttcaaaggacttattgattgctgaatacagtcccattgggcttaggacttcaatatgcgaattctgaggaaacacaattcagtccataacgatattaatgtccagggttggctttggttgaaaccccagctcttcatctcatcaactatataactttggtcaagttacttaacctctttacagttcagtttactcttctgtaaaggtgactaataatacttttataaagctctcatgaggaattaaataggtagtgtttgtaaagtgcttaatagggtccagcacctagtaggtgccccaatcttacccactatgctgttctttaaatactgaccaaagatatttactttttgctttctttgggcaatagatttgactttattaccttttcttgtgaatctactaataaattaggcttttctttttcttggaacctcgcaactcacaccccttttcttaccatttccaaaaacaaaatatctactggaatcatcagctttagccctaattgtaaaggatcaaggataggaaaatgttgagcttatcaaataccacttaggtgggaa

SEQ ID NO: 709356 - DNA, 596 bp, Homo sapiens
tgtttcagctttggccattgaaagtgctttcatattggttcacatgtcctgttgacatgtccatgtctcttttaaagcatttttttgacttctgtcaccacaagatattccagagtcatgtagtattttccctgatgcagtgctggaatcaaccacttctccaaggatctctgggtccttttattggaaattgatatgagaaagcaagatctgggtattaactctgctccttgtcactgggrtgccattgcttttaggaaatatatactaacccatggatacagtcatctaaatgattcatctattatatattaagaaccatgagttcgtatgtatcttcctatactttcttttcagtgggatattggaaaagatgagaggcaaacatgtattctttgtttgctaactttaatcagaaatcccaatttttcagataaaattttaaatcagtgctttcacagatttgttttaataaaaattacattgtttttcctacttcgtaccctcaaatgcattattcaatctttcagacacaatagatctttttgaatacaaattaatctagactggcataaatagaacagtgaacacttcca

SEQ ID NO: 709357 - DNA, 668 bp, Homo sapiens
tttaaaatagccagttccaaacaatgtgtcaacaacacatagtatgggcatgctgaccaccagctgtagtaacatcaggtatttatattragaacaacgattggtacaaatttcttcccttcctctggttaaggaatcagcaggcatggtttaaaaagaaaagaaaacagtaaaaaaaaaaaaaaaaaaaaaaaaaaaagaaaagccagcctaagaatcaagaaatcttagtccaggttccaccacttgcatagtgtgtcatttgtggcaaatctgtaacttttctggggctcaatttctggttctgcacaatcatctaggtggaattgataatattgaaggtcatccatggcactggcattttgagctatttgcaaatgaaaagtggatatgaatctcaattataacactatggcatcccaagcggtagatattctgaaatttcagtttgctttgatgaacattccagattgtgcagctgggttatctttctgattgccaagtccattgtaaaagtccaagataggcagaatcataacagaggcactggtactatgctgacaggtcaagagactgaagccctgggttgctaataatttgggtaaggctacagagatgccatgggggaaaagtagaactcacaaatgatttggagccatagtaaagaa

SEQ ID NO: 709358 - DNA, 609 bp, Homo sapiens
gatgaggacctaaaagataagaaatgtgcacaaaaaaagaaaatgccagaaaaaattgtatgacttggaaattttgtttgatgctgaacttgaccatggctaacctcctaacttttgataggtcctttcctttcttcccccaggggatattgatgagctgaaggaattagaagaatgaaccaggcacagggggtgggtttcctgttaatgcttaaatagaacatgtgcagcaaactatatcagcaaattggtatattttttggcacagcatagacctgctcagtggagctcagtgaaaatcatggggactttcagactttccaagtttttaaacaatacatttttaaaaatacataagaaggaattcctcaaatttacaggtattcaaattggctatttctcagattctcttacaaaggaacaaaaatattctgaaattgttggcatgtttggtgtattggaaatcataattggaagaataattatctcaaaatggttttattgttttataggacattttagaaagtatgtcaaagacatagaaatagctctaaaaggtgaacattttgtaatcataaataaaaaaggattgatacttattgaarttta

SEQ ID NO: 709359 - DNA, 1226 bp, Homo sapiens
tgaatagatattactgatctgtgggcaatttttttcccactctgtgactcatagcaaagatcgcttttcttatccctttgatgtttcagatacatttacattcaaataaatccacaaaataccaggaatgactacaggaagagatacttctctggaaatgtatttcagatggcaatgttttagaaaacactaatatacaaatcaatccagttggagaaggagcttcattcagcctcatctccagtcttagacataaacatggaggcaacaaaatgcctggccccactgaagctatccaagttctaatacacaacaaatgagtttcacaccaagggaaaggtcatttctttaatccgtgtcttctgggaatgtacacaaatgtcattcttcccaacctacgtaattaaacagtttaactggtgtggccattcactgtttattttcccattgggtaatggcgggaygttagcagcagatgacaaggaggaaatataggcagttgcaaatgtgttgatgatctctctctccctctccctgcctctctctttctctctctctaccatttccctgctagagaggccattggatttagttcctcacaaaatcaggcaagcagcaggcaggcaggcaggcaggcagggggcattattttgagctcagctgggaggtgtggcacatagtaggatgaaaggagaaagcacaggattggacgtcagatacatcagggttgtagtcctggcttccacatcatgtgaccttggacaaagttccacacttttctgaagttcaactcctgcatctctaaaatggggataatactaccgaattcattggattattgcgaggattaaatgaaataacacacatgaagcatgcttagaacagtcctggcagaaagtaattgctcaataaatgagaactctgtttccatctgtatacaaaggaagactctggtggttatgtttagaggaggggagggctataattggaatgcgggacatggaaggacttctggggtggctggcaaagttttacctcattcctgggtggtagttaaaagggtatttgtcttgtagtaactcattgagccatatatttttaaattttatgtggttttctggatctgtgttttattttttaataaaaatattacaatgaatagagaaaatgaaacaagtatttgttctaggaagaaaggaaagaaagaagaaaacagagaaggaagg

SEQ ID NO: 709360 - DNA, 624 bp, Homo sapiens
taatagaagctactcttatagaacatgatatcaataagaaaatagcagaacacactaataagcaatttctaacatgaagtaatggaggtatcctgaagagtgggtgaagaattgtgtcaaagaatctcaaagcagctgatattcatagattcccctagccaagcaggtatcaggaaactttggcagcagggacttaggatgaagtgcaggaatatgaagaatytcatgttataagaactcatgaataaaaggcaattcccagactgaggttgctaaaattattaagatagagacaaagtcactaagagcaaggcaagaatgaggcatgattggggtttgtgtggtcaaatgtccctagcaatagggaatggataatgagaaaaaatacttgaaaggattgctttgcatatagttcaatttaataacagtttttcagttgcttagttgaataagagctattttacatgctagggagtaaattatggatcagttcactcaatggataaaacaagtcagaaatttaaacattatttattaaaagaaacaaattctgtgacatttgacaccagagagaactatcagtgaagaagggagtcctgggttggcttcaatgtcagcctgctc

SEQ ID NO: 709361 - DNA, 1979 bp, Homo sapiens
tgttgattagaaatggatccagctgtttttcttgacagggagcgagcaggacttggcagactgcgtgctggcctgatttgtcctgccaccgaaggttatgctctgagaacagagagaagggatagagaagaatttacaaaggttgaaattctaacaaaatactctcagaattaagccaatatatttggtaatgccaatgcctcatgtgtaaggtgggagaaatcttatcagacattcaaatttctatcaactgaatgaggattgaatcggtgagagtggaggctaaaggagaaggaaccgtggtcagagaggccctttgaagctctaattgacccatgaaatgggtgcagcaaaccagcatggcacrtgtatacatatgtaacgaacctgcacgttgtgcacatgtaccctagaacttaaagtataataataaaaaaataaaataaaataaaataaaaatgttatgcaagaatgaaatataaagtggtcaagggatttatactctaagacaattttgtattatggattttctgttagaacttatcaagcctttggcaatagtggaggttattatagctgtttctgctacgaaaatgccgcttttctaactttgtcgtgaagtggctgtacgatttaacatctagaaatgtatggccaaaaaaaatagccggaaacatttttcttgaatcccagcttacttttgagactcagcattgtggttcaaaggccactctgtcctcatatgaggcttaaacaggcaggaacagggggctgaggatacagccagatgacctgggtctgaaactcaattctgctgcacaatggtccatgtgaccatacacgcatctttccaagcctcaattttctcctgtataaaatgggataacaatagtacttaattcataaggttgtgcataaagtacttagaatcgtgcctggtctgcacgggtaaatactatttaagccttgacatgagtgttgcttcttttttttcccctagttccaattctggacaccaggaggcaatgttgtctagagccaagatctcatcctatatcccaattccaatcagagtccctctgttgactcctttgcccagtggattctcattgtgcctagaatctcaggtttcacaaggcttggggccaccatttattgtggcctactgtgtgccagaacatgtgctgagtgtatcacatctcttatctgtaattcccacaacagcaaaaaaagaaagaaaaaaaatcatctgtatcttcatttgagagataatcaaactgtctccgagtgggttagtaacgcgatcaaggtcacagcattaggaccaggtcactggtcccaaagccagctcgttccaatgtcctcatacttcccagatgctaccccgagggactgtcacattaaatcacctggggagctttaaaaatacagattcccagagcgtaatgaagaagggctgcttcaagctcagaaatccagatttgcccacagctctctccaagtggctctgaggccccgcctcactgagtagcccctcagggctaggcgtcagcccctcctacaccccctaccccaccccagtgctcccagctgctggaccctctgatagggataatgctcggacctcacacattgaggctaccagagactcacgccccaggtcaaaccacctgcccacagtacagaccccatcaacctttacaggcctccctgtcacacctgaaatccactgtcctttcagcatgctcagcagatgtcacctcacaaaggattggatacatttgtcctcaccatggctacttgactcctccctctgcccacagcccatccctgggccctctgccccacacctgcttcctggccctcctggtcttcagccctggacagactccagcactgaaacccatctgactcagacaatacaatgcatttccttctgagaggatggaaaccagtggttctcaaacattacagggtga

SEQ ID NO: 709362 - DNA, 846 bp, Homo sapiens
taacgggactttgtgccaggttctatgctaggtactggggcaacagagatgaataagaaatgtattcttcaagtctctctcatgcactgaattcacaatattgtgacagttaactgttctaagcacttcatagaagatgaaggtggatacagtgttttcttaacaatactagcaattaaataactcctgatgatactgcagttttttttttgtccccaggcgattatttggggtgtcaagcaagttgtgaaaataagacacgtagaaacgacgagcagatgataatgacaacattttcaaaagccaggaggaaaattcaatttatgttccatcctgtccttggcaaatagtcggtttcctccccctctgttttcctgctaatcacaagtgaatgtggatctggcttgttaacttctttgatctgtttgctcattgacattyatacagctttgagactggggtttttatttcctttgtcatcttgatgaatgcctgggcaaatacatcgcaaaatgactgtgaagctcaataaaaccaattcaacaggggaacttaggctatggggaaggcaagatgacatcttataaacaagaaaataacctatgatggcacctactgtgtcatgtggagttttggggaaataggtctcaaagtttggactcataaaaagttgtgcagcttaagctggatatcaaaactagatgtaaatgcaactgaagcagagaaccagttatctagacagttcatatctgaactatttctttaggaagtgtctatgtaattaaggaaaaatattttctggtcaattggtcaatcattttgattctctacttcatatttcaacag

SEQ ID NO: 709363 - DNA, 605 bp, Homo sapiens
cactccatgagcacaggatctgaactgagtctctccagccctgtcttggctcctggcacataacaggtactcaaaagaggctgtgaakatgaagagggagtgcaaatcttaaagcctatgggtatacagatgaataacagctctctagtactttccaaacttggcagttgtgtgtacatctacatgcatttgagtttggtttatgattaattaatatccagcagaattatgaacttctttcctataatgaatggcattttttaaaatggtagagaaaagaaaattttgatgaggttcctataatgaaggactcaaagaggtgctgctgacttctgccataagaacagactcttggaatagtttcttccagctatgacttcatgctgacccatcgtagatgcccttgtggtcagtggcacgtgtttgagagatggctgtgtgggctcctggtaaagtgtggggctcagaacaaccacagctgactggccttcaagagaatcaagctcaggaacttgccctaagtagtatcatcagaactatcattgtcattggaaccctattcaggtccataatcttaattcagagactgaaaataggaacatcta

SEQ ID NO: 709364 - DNA, 605 bp, Homo sapiens
cactccatgagcacaggatctgaactgagtctctccagccctgtcttggctcctggcacataacaggtactcaaaagaggctgtgaagatgaagagggagtgcaaatcttaaagcctatgggtatacagatgaataacagctctctagtactttccaaacttggcagttgtgtgtacatctacatgcatttgagtttggtttatgattaattaatatccagcagaattatgaacttctttcctataatgaatggcattttttaaaatggtagagaaaagaaaatttygatgaggttcctataatgaaggactcaaagaggtgctgctgacttctgccataagaacagactcttggaatagtttcttccagctatgacttcatgctgacccatcgtagatgcccttgtggtcagtggcacgtgtttgagagatggctgtgtgggctcctggtaaagtgtggggctcagaacaaccacagctgactggccttcaagagaatcaagctcaggaacttgccctaagtagtatcatcagaactatcattgtcattggaaccctattcaggtccataatcttaattcagagactgaaaataggaacatcta

SEQ ID NO: 709365 - DNA, 591 bp, Homo sapiens
tgccacyctaatattttattgtatacttttcctttttattcaacatttttaatagttgattaaggtacaatttacatacaaaaaaattcacccatttcagttttatggttcgatacatttcagtaaatttatacagttatacaatcatcactataaaccagttttagaacacttgcatcacccccaaaatttccatcatgcctgtttgcagtcactttctgctgtctttccagcccccaagaaaccacccatctccatatgtttggtgttttctagaaactttgtataaatggaatcatacaatatgtcattttttgtgtttagcttctttcatttagcgtgttttgaggttaatccgtggggctgcacgcatccgtggttctgttctttttgttgctgagcagtgtttcactgtatggataagccacattttgtctattcactcaccagctgacagtcatttagattatttccagtttgggctactctttgatgattaatgcatctgaaatttattttatttatgaggtttgaggtagggatctatttttttttctaaatgtgtatcaatcctttcatcactatttaatg

SEQ ID NO: 709366 - DNA, 591 bp, Homo sapiens
tgccactctaatattttattgtatacttttcctttttattcaacatttttaatagttgattaaggtacaatttacatacaaaaaaattcacccatttcagttttatggttygatacatttcagtaaatttatacagttatacaatcatcactataaaccagttttagaacacttgcatcacccccaaaatttccatcatgcctgtttgcagtcactttctgctgtctttccagcccccaagaaaccacccatctccatatgtttggtgttttctagaaactttgtataaatggaatcatacaatatgtcattttttgtgtttagcttctttcatttagcgtgttttgaggttaatccgtggggctgcacgcatccgtggttctgttctttttgttgctgagcagtgtttcactgtatggataagccacattttgtctattcactcaccagctgacagtcatttagattatttccagtttgggctactctttgatgattaatgcatctgaaatttattttatttatgaggtttgaggtagggatctatttttttttctaaatgtgtatcaatcctttcatcactatttaatg

SEQ ID NO: 709367 - DNA, 591 bp, Homo sapiens
tgccactctaatattttattgtatacttttcctttttattcaacatttttaatagttgattaaggtacaatttacatacaaaaaaattcacccatttcagttttatggttcgatacatttcagtaaatttatacagttatacaatcatcactataaaccagttttagaacacttgcatcacccccaaaatttccatcatgcctgtttgcagtcactttctgctgtctttccagcccccaagaaaccacccatctccatatgtttggtgttttctagaaactttgtataaatggaatcatacaatatgtcattttttgtgtttagcttctttcatttagcgtgttttgaggttaatccgtggggctgcacgcatccgtggttctgttctttttgttgctgagcagtgtttcactgtatggataagccacattttgtctattcactcaccagctgacagtcatttagattatttccagyttgggctactctttgatgattaatgcatctgaaatttattttatttatgaggtttgaggtagggatctatttttttttctaaatgtgtatcaatcctttcatcactatttaatg

SEQ ID NO: 709368 - DNA, 591 bp, Homo sapiens
tgccactctaatattttattgtatacttttcctttttattcaacatttttaatagttgattaaggtacaatttacatacaaaaaaattcacccatttcagttttatggttcgatacatttcagtaaatttatacagttatacaatcatcactataaaccagttttagaacacttgcatcacccccaaaatttccatcatgcctgtttgcagtcactttctgctgtctttccagcccccaagaaaccacccatctccatatgtttggtgttttctagaaactttgtataaatggaatcatacaatatgtcattttttgtgtttagcttctttcatttagcgtgttttgaggttaatccgtggggctgcacgcatccgtggttctgttctttttgttgctgagcagtgtttcactgtatggataagccacattttgtctattcactcaccagctgacagtcatttagattatttccagtttkggctactctttgatgattaatgcatctgaaatttattttatttatgaggtttgaggtagggatctatttttttttctaaatgtgtatcaatcctttcatcactatttaatg

SEQ ID NO: 709369 - DNA, 1314 bp, Homo sapiens
tatttgcagtgggaatatggatcatggaggttctgttgcctttttctcacgttagggagactctcttggctccaggctgattttggccaagcaggctgcctcagttctctcttcctccttgctttaggggtctcttttctcttttctgttgaattccagtgttctcttttgaataatctaatagtagtgtgacaatctactcactattttagttcttcttagtggaggaggcatatacaagatgcctctaatcagccatcttgaacctctcattctgacattttttcccagacttattttcaaaacatggtcccagagcctcctcttctgtgcagaataccagacttagcactgtggatctagtggtgccatcaaatacctcatgagagaaaagagcccgcagtccaagtgagtcatttccacagtcaattcaggagagggtggaaggggtgcagttatgtcaaatgaaggaagtagaagtcaactttgctctggagatcagaaaatatgtcatggagaaggaattgtagactcttgagggatgaattcaccaaatgtgtcaggaagagctacattttagctgtgttgacagcaaaggtctgcagactggtatcttgccttggtcctagggttgtacttaagttagggagctggtagtagggttggtccatggaaaaaccatgatgatgaaattatttattcatactccccataaccccatccataccctttgttccctccagacagaagcatttttacttgaacaaagaaagcttatgattttaggtcctggaaagggcctagcaatgtcttcacatggtcatatgtttttgtgaattttgcaaaaataatatattttaaccacaattggttaagactgctgttttttccatgccgsattcttttctgtcacattttctcttgttttgggtggtaccggagtagctgagaggcatttttggggatccagctaaggaagagttgacttataaacacattttgtttgggtctagtgggatatgtttatggagtttgccatcatctctgtgtaaagttattgatagccatctggtgtgagaatggtatccaagcacactgctgttgcactctgccaactctccagacctcatgacaacaaagatgcaggggacttggataagtatgtgcttccggggtctggcattggaagtttgtgtatagtggaggagaaacaagttttaaaaacatagagccaaagactgattcaggaaaaatttgtcatcaggcatgcagaattctagcagagaatttgggtctcattgacaacttatccaa

SEQ ID NO: 709370 - DNA, 1091 bp, Homo sapiens
tgaatcttgcaaatataatgttaagccaaagaagcaagacataaaagactactttaacataattccatttttataaagtttttgaaaacaggcaaagtgtaattatattgtttagaatacagtatagctggaaacactataagaaaaagaagaaattattactgtaaatatctggaatgttattacctctaggaaagagggaaggggctgtgaattggaagggatatgtgggagggttttgagaatgctgtcatctcacttcagatgcaaaaacaaaatttaaaaaaaagagtgctgtcaatgttttatttcttgagttgagtggtggttactcaggtattcacttaataattactgtaatttttaaacattatttatggtttatgcacttataagtatagatattatttcacaccaaaaatatttttaaagaaagccttttaagatccacagaaataaagcttaaatagtgacatttcaggcaccatatatgacaagcagcaggagagatatttttgggtaaggtgggcaggcctatgggcagrcctagtgcagtcccttccaccgcacttcacacccaactgttcactctgctactcagacaacctggccctccgcaatctacctcactagacaggaaagtgtgatcctggtcacttatgcggtctattgatcttgccatatttcagaccaaccaacattgtgattaattcaaccataacacatcataaatttaaattgaaagcacagcaattatttacatgtcttttaaaaaatctgaattatccaaaccaatgaatgtgattcctaaacaactacgatgattattcgctgctttgtagtttgtctgcccatgggccataagaaataagaagaaaaacacaccaaaaaaagtcagtgatagaaaataaaaatgcaaaacttagtatttttttgaatgatagttacagctcatcagagaagagccggcagttaccatggcaacagtaatacaggaaagtgaaactccagcctccaagtctcctttttttctctttcctagtcctggcactaaatagtaaagaatggtcccagacgatgtgtaaaaccca

SEQ ID NO: 709371 - DNA, 1091 bp, Homo sapiens
tgaatcttgcaaatataatgttaagccaaagaagcaagacataaaagactactttaacataattccatttttataaagtttttgaaaacaggcaaagtgtaattatattgtttagaatacagtatagctggaaacactataagaaaaagaagaaattattactgtaaatatctggaatgttattacctctaggaaagagggaaggggctgtgaattggaagggatatgtgggagggttttgagaatgctgtcatctcacttcagatgcaaaaacaaaatttaaaaaaaagagtgctgtcaatgttttatttcttgagttgagtggtggttactcaggtattcacttaataattactgtaatttttaaacattatttatggtttatgcacttataagtatagatattatttcacaccaaaaatatttttaaagaaagccttttaagatccacagaaataaagcttaaatagtgacatttcaggcaccatatatgacaagcagcaggagagatatttttgggtaaggtgggcaggcctatgggcaggcctagtgcagtcccttccaccgcacttcacacccaactgttcactctgctactcagacaacctggccctccgcaatctacctcactagacaggaaagtgtgatcctggtcacttatgcggtctattgatcttgccatatttcagaccaaccaacattgtgattaattcaaccataacacatcataaatttaaattgaaagcacagcaattatttacatgtcttttaaaaaatctgaattatccaaaccaatgaatgtgattcctaaacaactacgatgattattcgctgctttgtagtttgtctgcccatgggccataagaaataagaagaaaaacacaccaaaaaaagtcagtgatagaaaataaaaatgcaaaacttagtatttttttgaatgatagttacagctcatcagagaagagccggcagttaccatggcaacagtaatacaggaaagtgaamctccagcctccaagtctcctttttttctctttcctagtcctggcactaaatagtaaagaatggtcccagacgatgtgtaaaaccca

SEQ ID NO: 709372 - DNA, 647 bp, Homo sapiens
ttaaagttttgcaacagtttactgataaaattgtctgtgcctgcaggtgtgtgtgtggggcaaggggaggttttaaattatgggttagatttgttaaaaattgttttatgactattcaaatactctatttacttatatgtcagttgtgtatgtttggctagtcccttgtatctaaattttccatttttatttttataatggagaatcctattatatttgaagtctcctttaatattcctgcattatttgtttgaatttactgaacctctttgttctgcatattttttctatttaaataatttctgcagttacctttttaaaaaatttccttcagtttaacttttatttctttttctaagttttgaagtggttggttgcttattgattttgttttcctttatatattgaaaactrtagtttttcctctcagcatattatgctttagtttttcccagttttattatcatccaaataaaataattttttgttttccatttgattccctttttgacttatgagtgtaatacttgtcaaacccacagatgttatctgtttattatttattatgaatttctggattaattccactgggggtataggacatactcagattttaatacttggaaatttgttgagactcctctggt

SEQ ID NO: 709373 - DNA, 720 bp, Homo sapiens
ccagaaagggaaaaaacatactctagaaatgtctgcaagtctagtgaattcaccaaactatgggataggaaaggtcacaaaggagtcaatataggcagtagttaaaacctgtcaggctagaagcagcagtactactgggaagaaaatgaatgataagggtatggttagcatgcgagtcaatttacctaccaagctcaacatcccttttagcttgccctgtgctcagtccattgttccttctgagtaagcctaggggaacctgcagttagctgtagctgattggaacagaggaaggaagaggcaagctactggctggccagtagtctcaaaattctctcttgaaatttcatctaaaagacacagaaactagtagcggtgtcttgaatcaaaaggctacaatttcaccaatgaagtcaagaaagttgctctccagagacaattcagcacaggagactatgctgttactagataagaaatgtagggaaaatcttgcttcctgatttattaatttcaatccatacaaaactgggctgcatttagtttccygtatttgaatgtgtatggaatcctgttatattataaggataagttgtgctaattttaatggtttcttttctttaacaaaggaacttttaatagaacagaagacaaacagacttataaagattgtttgggccaagaagtagaacaacttaaaaactagattaaggaatttagatg

SEQ ID NO: 709374 - DNA, 913 bp, Homo sapiens
cacctcaaagttattccagactcctctctctccttcattcagagactgtcagcttttatcacctgaacctctatagtgcttcttgagttgagtctctatttctacacttgaaatattatattagctttttgatagcttcttccagagttatcttcttcaaacaatatttaaaaatatttagctttcagctgggcacggtggctcacacctgtaatcccagcactttgggaggctgaggtgggcagatcacttgaggtcaggagttcaaaaccagccttgccaacatggtgaaactccatctccaccaaaaatacaaaaattagccaggcgtgktggtgtgcgcctgtaatcctgctactcgggaggctgaggcaggagaatcacttgaacctgggaggtggaggttgcagtgagttgagatcacatcactgcactccagcctgggtgacagagggaggctctgtctcaaaaaaataatatgcatattttttagcttttatattaaaaaatctttggtggctctttaccgtctgcaggataaagtccaattttcctttttttttctttttgttacaacattatcaatgtatttaataccactgaactctacacttaaacatggttaagacactaaattttgttctgtatattttactacaatgaaaacattggagaaaaaataagtaaaccttttttaaagtggttcagtaacttgtctaaaatcacatagctattaagtacagacattattattcaaaaaatccttgtcatactcccaaacgtactccttttctatcatagtcatggttttcatactgtttcatgaatgatgcagtattttatttgaataaaggttctttactgcccttttgtatacttttaacataaaaatgattaatgctcactttttaca

SEQ ID NO: 709375 - DNA, 913 bp, Homo sapiens
cacctcaaagttattccagactcctctctctccttcattcagagactgtcagcttttatcacctgaacctctatagtgcttcttgagttgagtctctatttctacacttgaaatattatattagctttttgatagcttcttccagagttatcttcttcaaacaatatttaaaaatatttagctttcagctgggcacggtggctcacacctgtaatcccagcactttgggaggctgaggtgggcagatcacttgaggtcaggagttcaaaaccagccttgccaacatggtgaaactccatctccaccaaaaatacaaaaattagccaggcgtggtggtgtgcgcctgtaatcctgctactcgggaggctgaggcaggagaatcacttgaacctgggaggtggaggttgcagtgagttgagatcacatcactgcactccagcctgggtgacagagggaggctctgtctcaaaaaaataatatgcatattttttagcttttatattaaaaaatctttggtggctcttyaccgtctgcaggataaagtccaattttcctttttttttctttttgttacaacattatcaatgtatttaataccactgaactctacacttaaacatggttaagacactaaattttgttctgtatattttactacaatgaaaacattggagaaaaaataagtaaaccttttttaaagtggttcagtaacttgtctaaaatcacatagctattaagtacagacattattattcaaaaaatccttgtcatactcccaaacgtactccttttctatcatagtcatggttttcatactgtttcatgaatgatgcagtattttatttgaataaaggttctttactgcccttttgtatacttttaacataaaaatgattaatgctcactttttaca

SEQ ID NO: 709376 - DNA, 2021 bp, Homo sapiens
caagcacaagcacagagctgggcaagcgcatatgcaactgaccattgatggaatctacctttaagtagacatgatgattaatactcatggatatgtgcagctggcagagtaatagaatacccaaagcttaaaggaaaataaattgttgtaaaacgtgtttttgggaagtgagctaaaatctcctagtttacagcrgaagttggcaggtttttttctgtaaagggacagataataaatatttttgctttgtaaagcataatctctttgtcgcaactattcaagtttgacctgtggcctatgcaaaagcagccatagataatagataaacagatgactatagctgtgttttgatgaaactttatatatggatactgaaatctgaattttatatacttttcatgtgaagaagaaatattcttcttttaatagttttcaacaagttaaaaatgtaacagccattcttaactcatgggctgtctaaaaccaggtggtgggcctgatttggcattttgttctcaataggtgacctccgatttagataatccatcttacttgcttgtgtgttttatgaaataagctcttattttaaaaaaatatactttctattctgggaattctgtatatgattttgtttaaaatgaggatttccttctttaaaaaaaagtttgagaactcttgatcatgattttagaccatcatcaagtggttatttttctcttgagttactattagagctttgaactgtataccagagctgtcaatcataaatgtcttgaatacatgggttgagaggatacatatgtagaacatcattattcaagcacttccatattagatggctatatctcaaagactgggtctttttccaatcactagaacagctagagattctgtttcaattaacgtctccttttttttttttgacacagagtcttgcactgttgcccaggctggagtgtagtggcgcgatctgggctcactgcaacctctgcctcctgagttcagcaattctcctgcctcagcctcccaagtagctgggattcaggcacccaccaccatgcccagctaatttttggtatttttagtagagatggggtttcactttgttggccaggctggtctcaatctcctgacctcatgatctacccaccttggtctcccaaagtgctggggttacagatgtgagccactgtgcccagccttcaattaacttcttaaatgtatgtctatttgtttgcctttgctttgtcgatgttaaaaaaaaaagaaaaggaaaaacggatataaagaaatgcatgtgcatctgcatctttgccagtgttggaggacttaaaatatatctacattaaatgtgtgcaacatccctgagcttggtatctgatgactttatgaatattatataagcttgaaagccaatattcagaagaatatcttggcttcagactgaaaataatgcaaagctgcaattttcttgcagaaattcctaaagttagagctttatttgcctagggaagaaattcataattcagtattccctgttagcttttctgaatcccaaagatgctggagtctaattcatatgctacccctcaaactttcattttgcatttactcccactaagggtcatttagctttaaaattttatcaaccattttcataaagatatcacaatataatgaagggataatcaaaaatattttttaaaaattatcctgataactcattttatgttgattatatgcctgactcaccatggttacaacacattctaaatttgcccaaaaagcctagagaaagaaatgaggaaagatagaaaaggatgatgataccaggaaagtaaaaatacacttcagtaaacctctgaaaagaggcataggaattttcactcgaatgcaaatacatgtgtctcacagtagaatcaaatagggcatgattcataacccagttcctacccagtgtgatttatcaatataatttgctttcttgttgctatattaaattgtgcttggagaagatgcca

SEQ ID NO: 709377 - DNA, 2997 bp, Homo sapiens
atttgtttcacttgagctattcctttttaacatatgctttccagctgactaacgttatttttaaaattgtaacagtcaaaagggcatcagccataaccatcaaaattgttatagttttttttagcatgataatgctcaaggaagggactagaaatttgttataatttttcattaatgttctagcattcatagtatgtcatgtatatagatagccctataattacctacaaattaactatattaaaagatacctcgatttaaaatatcatgttcaaaaactacctcctatgaaatattaccactggagaaaaaattcttatgttaccattctaagtaagaatatctcattggccttgctgttaaaagaacaatagaagactaattagctcaactatgtattagtcccagtgagggaaccccaaagcccacagtaattttgacatagatgtatgccacatgatacctttattatatgctaatgatatttgaccaggaaacataataaaacttctttaaaaattcagccagaggccggatgcagtggctcacgcctgtaatcccagcattttgggaagccgaggtgggtggatcaggaagtcaggagttcaagaccagcctggccaacatggtgaaaccccgtctctactaaagaaacaaaaaattagctgggcgtatcggcatgcacttgtaatcccagctactcgggaggctgaggcaggagaattgcttgaacctgggaggcggagattgcagtgagccgagatcacgccactgcactccagcctgggtgacagggtgagactctgtctcaaaaaaaaaaaaaaaaaaaaaaaaaagaatgattttattataattctaaataaaaaaaactttatgtttactataagttcttttaacatacttgctaattcagctatgttctgtgcatctctgttttacaatcaatctagtatattttttagctgaaataactattttatcatctctaaatgtccactgataatatgttgaaggatatagaactgtatacagtcagctaacaaaggatttggggtttcattcattttttgtccatgattgttgctacattgaatatggtatattatamcttcccttcttttctgaagaatttcatcaggaggtacgaatatatttaatgtattagacagaaggagactttttggttgttggtgatggtgggtggtttttaaacaatatcagaaatatagcttggaaattttaaaatatgcatcttggatcacaaatgttgaaaactagctgatgacaccctctgttttttttctattctgctacactgaaattctgtgaggtcagagttatttctagtttgtttacctctgtatctttagcattctgcacagcatctagcctttgatcaatatttaccgaatatgtttattattgaataaaggaagaagtgaatgctaaaattctagactgcaaggagcaacgaagcagatattcattttaagaaattttcctggtgtgtcatctaccttccaaaattaaacatcaaataaaattatgtgttgctgttgttggaaaatgatgatgattgtgtaaagcatttcactcacccttggctttatttggaaatcacctggggagttttaaaaaatactgttgtctgagtcccatccccagtaatttcattataattggcttggggtgtggcctgggattgggatttttccactagaatctctaagagtttctagtgtgcaactaagattgagaaccactgttataatatgatgacataaagatgactatgaagaagggacatttcagaacacctagcttacaatcttaatttatgaaaatacaaagaagctttatttttaaagccaattttagataacacaataaatcgattccatttctgggtgacataccagcacacacatacagaaataaatccttaaacaccttcttttgttcttttccttttttatagttcaaagagaaacaaagtataaaaacacactcatcaaaagagctaaatttggcccacttcttgaataataacaacatatttatatgtaaaggtaaaaagcttgggaaggggagaaacgagtggagaggggatactgtttcctaaatctacagttggaaatgacctatttcccacagtatcaaagaatcagaaaatgtaaacacactcgtgcttttctgctcagctatctgcttgctggcctgactcttctaactgttggctttgattacttaactcctcctacctgttcatccaacaactctggaaccaatctcgtcacaaatctagaatttaagaagcctaatcctataactcagaagctcaaccctttgctattccaatctgatttggggctctggttcctgtaagtggattcctatcttgtatcctcatgtgtaagtgtaagtccctgctgtcaaagacttttacctgattatgcaccagtcctttcagcagggttcttttcttacttggtttctcccacttctggggaaccggaaccagaatactgctctttgtactctccagaaggtccaaggttttttgtttgtttgtttgtttgtttgtttgtttttcttagaaacagtataactttggggccaagattaccaagcagcagaattgatagccacctacacagcataacgtatggaactacaaatagcccccacaaaacataccccaaaatatctgctgaagtacctctgctaaaaatggatgcacttctgttcaacaaattcattgagtatgctagggctattattatggaagctatgttttccaaatggaaaattgggatgcatcttgagagtaactagcactaggagagggtatctcatgccaagctcagtaaatccagaagtaactaaccatttttcctaaagtattctttttggtcattcatacactagtccttgaggtttttctcgctccaaatcctggaagtcttactgcatttcagtacagggaagagtgatcta

SEQ ID NO: 709378 - DNA, 1005 bp, Homo sapiens
agaaagactaagaagaagaaaggaatggtggcgtagagaatttcataatgggaaaataaaatccaaatagaggattgatttcaatataatcatatccttcgagaactcagagaagtgagcaacactccctcccccacatgccacaccatctcctgaattcttggtcccccttacccagctcttttcattaatatcagcttctagtatgctgtgtaattcacttattactgtttctcttcctgccgcctcgcttatactagaacataagcttcaccaaggcagggttctttattttgttcctggacatataccaagtattcagaagagtaaagagtgtcagacacacggtagaggtgcaataaatactctcagatgaatgcattaagctaaagtcagtgatgctgagtaaggttaacataatttgagaatggcagtcattaagtacataagacattyagagtttcctgagcttgcaggcctattccaaagacttactgtgacagctcacctgcttgcctgtctgccttacctattggtctccagaaaatggcctgggaattcacttgtatgttagcagagcttcagggaattaaaggccctttaatgtctatatccattttgaatatgccaaccaagtcagcccacttcatccttttcttcaggaacatttttgggcgtgaacattgaggtgctgtttttgcataaggtcttctagtttcaaggtgattcccaaagcattgttttagatcaagtgctccaatactctgagtccccttccagctcctttaaaactttttattttgaaataattataaattcacaggaatttgcaaagaaatatatggcaagattcccatgcacccctcacccaggctcccacaatgttaacatcttgcctagctacagtacaatttaaaaaaacaacacgaaattggcattggtataaaccatagaccttattcacatttcaccagttatacatggacgtgtgtgtgtgtgtgtgtg

SEQ ID NO: 709379 - DNA, 658 bp, Homo sapiens
cacatttctttgctttttgttgaagtcacatcagtttcatgtacggttatattccatagcagaagcactggctgctgttgacctcatagtagtttgaggctatggttgtatgaggtagtcctacataatttttaatatccttggacatgaatctggaatttatagaaatttcttaattttaaaatccttggacaactcagaactccagtaacagtgaacagttcttgactgcatatacacatcattgcttataaaaaacatagaaccctaaaaaatcatttttttwaaattatactttaagttctgggatacatgtgcagaatgtgcaggtttgttacataggtatacatgtgccatggtgtcattctgcatagtgccatcgcagaaattttcttccattctgtaggttgcctgttcactctgatgctagtttcttttgctgtgcagaaactctttagtttagttagatcccattcatcaattttggcttttgttgctttagtgttttagttaattttggtgttttagtcatgaagtctttgcccatgcctatgttctgaatggtattgcctaggttttcttctagggtttttatggttttaggttttacatttaaatctttattccatcttgagctaatttttgcataaggtgtaag

SEQ ID NO: 709380 - DNA, 1365 bp, Homo sapiens
ttcacaaatacttcagaagaaagcctttgactttttgttaattacaaaacagctagtggagagagaccccttacccccattccagagttacttgatctgataggcagaacaatgtgcccctgacaaaggggtccatatcctaatcctcaggaaaatggggaattggggtgtcagatggaattaagtttgctatcatctgactttaaagtagggagcttatacaaggttatccagtgggcccaatgtagtcacaagagtgcttctaagtgaaagaaggaggcagcagagtcagtcaaagacagagatgtgacaatggaagcagaggtcacagtgataccacgtgagaaagactcaaccagccattgttccctttgatgttggaggaaggggccatgagacaaggaatttaggcagcctacataaagtagagaaggcaaggaaacagattctcccctagagcctccagaaacctgtaagtctggacaatgattttggggcagtttgaggccctgggtccattttatatcccttctgcatcctcccctcccttctacaactcaagtttcagggagcatacctacaactgtcttcactcgataacttccttccaactcagcagttgctcaagtactcagacctttatttatttatttttatttttatttatttatttattttttgagacagagtttcactctgtcacccaggctggagtgcagtggtgcgatcttggctcactacaacctccacctcctggcttcaagcgattctcctgcctcagcctcctaagtagctgggcttacaggcgcacgccaccacatccagctaatttgcatatttttagtagagatagggtttcaccatgttggccaggctggtctcgagccctggacttcaagtgatctgcccacctcggccttccaatattgttgggattacaggcatgagccaccacacccagccctcatccctttaatgtatggtacrggtaggatttttttttcatacttccaacattttgctttgtgatcacgtgtctagccatttattcctttaatcaatcagcttggctcctctccatccacgttggctttctggctgttcttcaggtacactcccacttccggggacttgacactggctgctctgcctgggactttcttctctcaggtatcccgatgggtaactctctcatttccttgaagtctttgcttaactgtcactttctcaatgaagcctatcctgactacgctatttaacactgagaccccccttccacccatgtcaccccaccaacacactttcaaactcccttttcctgtccattttttcatagcacttatctctttctaacacaaaatagaa

SEQ ID NO: 709381 - DNA, 584 bp, Homo sapiens
gtggttctcagctgggtgagtttgcctcccagggcatattgcaacgactgcagacatttttccttgaggcaacaggaggtatgggtggggaggtgttgctgacatctagtggttagaagccagtgatgcttctaaacatcctaagatgtacaggacagtcccacattgacagtttccagtagccttaagtgtcaatagtgccaaggttgagaaactcygaaaacagtagcaggttctccattaaggaacacagtgggaagtgttttttaaaaagattctgcctgggcacagtggttcacacttgtaatcctagcactttgggtggttgagacaggagaactgcttgagcccaggagttcaagaccagcctgggcaacacagcaaaactccttatctattttgaaaaaaagtattaaagagtccgggcgcagtggttcacacctgtaatcccagcactttgggaggccagagcgggccaatcacttgaggccaggagtttgagactagcctggccaacatggtgaaacctcatctctactaaaaatacaaaaattaggccaggcgtggtggctgacacctgtaat

SEQ ID NO: 709382 - DNA, 728 bp, Homo sapiens
tagtagagatggggtttcaccattttggccaggctggtctcgaactcctgacctcaggtgatccacccacattggactcccaaagtgttgggattacaggtgtgagccactgcacccggccaaagtgtgaggcatttctgatggagagctttttcaagcttattgccagtttcccagggtccactacacatcaggggatggtaaattaggagttgccatttactgagtactgctatgtgttaagcactgcagtgcacatcatcatgcattatctcgtttaatcctcacaacaaaactgtgtgtgggtatatcagtgtacccatttaaaagatgagaactttgcacaaattgcccaacctctctctgattgagcagcaaaacraagttatgatcatatgtctgtctgattttttttttttttttgtgggacagggcattgctctgtcacccagggctgcagtgcagtggcaccatcttggctcactgcaacctctgcctcctgggttcaagggattctcctgcctcaggctcccgagtagatgggactacaggtgcatgctaccatgcctggctaatttttgcatttttagtagagatggggtttcaccatgttggccagtctggtctcaaactcctgacctcaagtgatctgcccacctcagcctcccaaagtgctgggattacaagcgtgagccactgtgcctggcctgatacattctttttaaaaa

SEQ ID NO: 709383 - DNA, 964 bp, Homo sapiens
taaaaaaataataaaaataaaaattaaaaaaaaatagataaactttccaaaagtgcttctcaaaatttaaagtgctggcagggcatggtagctcatgcctgtaatcccagcactttgggaggccgaggtggacagatcacctgaggtcaggagttcaagaccagcctggctaacatggtgaaaccccgtttctactaaaaatacaaaaattaggccgggcacggtggctcatgcctgtaatcccagcactttgggaggccaaggcaggcggatcacctgaggttgggagttccagaccagcctgaccaacaccctgtcactactaaaagtacaaaattagccaggcgtggtggctcatgcctataatcccagtaactcgggaggctgaggcaggagaattgcttgaacccaggaggtggaggttgcggtgagcygagatcatgccattgcactccagcctgggtaccaagagcgaaacaccatttcaaaaaaaaaagaaaaacacaaaaatatagccgggtctggtggctcatgcctgtagtcccagctacttgggaggttgaggcaggagaatggcttgaacccaggaggtggaggttgcagtgaccaagatgatgccattgtactccagcctgggtgacagagtgagattccatctcaaaaaagaaagaaagaaagaaagaaatttaaagtttgtacaaattacttagggatcttgttaaaatgaagaatctgattcagcaggtgtggggtagggattcagattctgcaagactaacaagctcgcagaccatgctgaggctgcaggcctagagaccagctttcagtagtaagggcctacaaggccctgtgtgatctggtcccttgttacttgtgctttcccactactccttccctctcactgtgctctggccattctgatcttgcttctcctcaaataagtcaggtatagtcctgcctcagg

SEQ ID NO: 709384 - DNA, 941 bp, Homo sapiens
tatgcagagtcagactgagagggtttcccacctgaagtaacagacaatttaaaaggtaacatatttatagctgtacttggaatgtatggatatcgggggaagaacgcctaccaggctgtaaatagcaggaagtcctgttgtcacctggtttcatctgtaatgttaagataaattattggccgggcccagcactttgggaggctgaggctggtggatcacctgaggtcaggagttcgagaccagcctggccaacatggcgaaaccccgtctctactaaaaacacaaaaattagctgggtgtggtggtgcatacctgtaatcccagctattcaggagattgaggcagaagaaccacttgaacccaggaggtggaggctgcagtgagccgagactgcaccactgcattccagcctgggagacagagtgagactccatctcaaaaaaaaaaaaaaagataaattatttattttctaaatgtacatatgcaagtttcatccaagcacttctgacatcttttggtgaggattctccaagaagaaactatttactttttgactgacatagcctgtgggtatgtttctgaaaaatgtaacttggagagatgggtctccaacstaactcaggactgtttttactgtttttgctcccatgcatgaaacattaatagctaacacttatggaatagttatgttccagccacttaattattacaatccccaaatccctagtacttattttatcccctttttaatccatagtacttattttatcccccttttaatgatgaagaaatggagcccagagaggttaagtaacttgaccaaggtcacacagctattaagtggcaaataaaggcttcatactcagtctgattctggagtttgtccttttcctttctttcttcctgttcttctctttgtttttttttgtttgtttgttttt

SEQ ID NO: 709385 - DNA, 1779 bp, Homo sapiens
gctacctaggtacaacttctgcggaggtaaacttccagagaaggtagcatgggcttattgatactccaaacatgtctgtcaaacatgtacttacatatctaaaagtagatagttccctgggcaagaagatcctctggcagaccactgacattgtgaaaggtagtacttagggaaagttaccctaaacacaggcacccagggagagttcactaaacactaactagtactgaaatgttcagttcactgaggttctctacactagttcctggtagaagtaactaaccattaccagtatctcattcatctctcattttggctaatggaagactgmacaactcggccctttgcatttgggaactggagggccatcagactattttctggccaatggattgatctgaggtagcaaatagctccagtctctcttcccctgctgtggccacctagaggtccatgtgttccaggtggtgcaatcaaacgatggtgaagacaccatcaacctgggccacagatgactgtctaggcactatcattcacccgtccttgaatatgcagtatattgagaataaactcttatgttaagccattgagatgttggggttattttttagtgcatgaaaccaagcctgttcccattaaaacactcaatcatctcaattaagttccaggtgaatcaagcccagtccttaagccaacaaaaaaggtttgcaggtctttgacctttgagccacctttcagaattaagaggacttctggttcttccagaattgggaaagagagagtaccatgaaccataagattatgaaacataattctataggagctgaatatacaacagcacttgagactctgccaattaatttaggactggagaaaccaaccatgactaatcaacccagagcatgccagaccacagccacgaatgctcataagaacgatcttcacattcagatcagtgggccatgcaactcaataatttctttcagacaatgacacaaaattgcctccccacttttctgccttaaactgaacactgctctgacctaatttcctacaattttgtttccagtcacttttttaccctcaaacaaccttataattgcgataatgaggcacattagagcccacagaagtttttaaggggaaattagatcagttcagggtattgccctcccaaattaaggtaattatcttgaaattcaaatgccacaaccagaattcagagcatcctactcacacccatgtcactcctcatcatatccactgtgttgtcattaataattgtcattccagaaacaagcatgccatcagccaaggcaggggaaatcacagtgttctctttaattcaactccacacaaacatggcagcccagaaaccttaggatccagcaagcatcttggtctcacttgaccctagggactgcactaaacactttccgtgaaacactctactgccttttcctagcaataggactgactcgtggtcctcctcctaccactgtgaccactccttcttggtctccttaacggagacctccccttacctccccttagttattgacattccccaagggcccattctcagtccattgcttttcctgtgctctcctcgaataatcttacctactctcatctaccaaatacaatgatgcccaaactcccctcctgagatctcaactcatataccttctgcacctctccacccagatattccacagacacttcagaactacatgcttgaaataaactcatcactctctcccaacctctttcctcatt

SEQ ID NO: 709386 - DNA, 1371 bp, Homo sapiens
tcttggtaagtgttttctcatgccaggggttctgcaccttaaggctcacctctccctacttcctgagttcactggaattgaagtagatagaatctggcatctcaccaccaacactgccaaaaggagtaaccaatactctcagggaaaaatgagctcacaagtcaaaacaacaggacaattgaggagcacaaacatttcaatagaaaatagttatgtttctgggcccagaggccaggctgggttggggaccaggatcccaaccctgtgacaatgggagaaaaggggactggaactgttcctgagcaaatacctcatggcaagtaccatgtgggcttctctgtacaccatcttgcttaatctcacctctgtcctttgagataggacttgtcactaccacgtcacaagtcagaagaagctgaggctcggagcagtcacatggcttcttaaaggagacccaatttacaaatagcatgacagattttaacctagacctaagctctggagtcagaccatctagatttaagtcacttcctaactgcatgaacttgaccaaatcatttaacttctctgacctcaacttcctcttctgcaaaacagggctaaaaattgtacctaactcattggattgttgtgaggatgcaatgaatttagaatagctcctgatagttatgtggtactcagtaaacattggttgttattttaattatttccagctgtgtacctgtgcctttaacattcagcctttctggtaaaatgtaataaatctcctctcttcttgtttaagtagcaaccaattggaattgttacacatttgcttcttaaatagagtccacctacatggtctagaaaggaagaaacagggtgagttctgagatcaaatcctaatttttaacagagagctcaaaatgagagagtatgtcctgctttggaaaagagatttctctaagcacccagaaaggacacaggtattaccagagaaaggattctgttccaagatctaaacttatccagaaggaatcaaaagcaaaggctaaaatattaaacattagggaatgcttccttaactaattaaacaccaatgcaacggaatattatgaaactctcaaaacttatctgtacacataaggcattaaacacactcacacacatacttgtgaaacagttaaatgcaaaaaacacagcacaaaacagtgggtagactatgawtcagttctggaaaaatacagctatctgtgtagacacagagagaaaattacaagggaagtgtgctaacatgcagggaatgggggtaacttttttgagactttccttgaagttatagtcctttcaaaagaaatgcaaaatattgaggaatagaactatgttgtacat

SEQ ID NO: 709387 - DNA, 2160 bp, Homo sapiens
catgtttttaaaggctgggaagtccaccatcaatgccccagtttattcaattttttatgagggctcttttccttgtttgcagaatgaagcctgcttgtcatagatagagagagacagcactagtctcttttactttttacgaggacaatcatcatggagtttccagcctcatgactttatctaaacctacttaccttccaaagaccccacttcctaatatactctcccagcaccttgggagttaggctttcgacatgagaattctgggggaacagaaacattcagtccacaacagaaagtaaattatttatcacaaaaagtctttctcttaagaacggtttagtcctatgttataaagcagattttgacctgagaaattcataattgataattatgaattaattttatgacaccagcataacaataatgtcagaaaacacgtatataaattaggaaagcatagagtaaatatttttctttattaataaatgaaaacagattcaaggtaatcttctagcatatttaatatgcagtatttttaaattaaaatataccaacattaaatattctttattttaaaaaggtaaaccttgttggatattgtaaaatcagttaatttatttcaacacagcaatgggccacataatttttttttcttcagtcatgagaaaagtttgtggaatgcatttgtacttatctaatataataaataaaatattcttcaatgtaatagactatgctatatctacaggtaattccccagcatgatattgcccataaaatactacaaattaagaatgtccttaatcactcacattattcagcatttttatgaaaatcctagaatgtgatgtataagaagctcctatatctattcaatatttattattacatatttactggatatgtattattatattgaatatataatatagaatttacaattgcctttataaatataatattgaatttataaatatataatgtgtattatttaatatattgcataataaaatatattagtatattagtgaatatatattatacctatttactatgtatagtatataatacatatgtttaatatatagtattcratatatattatttgatatatttaattaatatatattcaatgtacttatttaatatatattttgaatgcaatttaatatatatactgaatatgtatggaatatatattatattttgaatatatattttcaatatgtatgtattttgtgtgtgtgtatatatacatatatatatggcaaacaatctcacctcactgaaaagtggaaaaaatattcatgagaattttgtgaaattggccacttagaaagtatctcaacaccactagtaatcacaaaatacaaattacatttaaaaaggaatagcatttctcaccgattattttgaaaaaatttcaaatctgacaataaaattgaaatctagggataggtgcaatgataagaaccttataacttcttttgcaaatgtagtttacacaaccattttggaaaactgaatggcgatatctaataaagttgaaagatattgtattgatgaatatatagatcctactaccagacacaaaacatatcattggcttaagtaagagtgcttatttttttcacataactatccaggcataagcagcctggggtctggatcacagattctcttaggactccaccactcctcaggagaggccaacaccctcatgttccaagatgcagaagatacgtaaagcagcacattgaaaacactggagaacagccaatttatcatggcattttagagggcggcatcatatttaacaaaatttaacatattatcttaatgttaactctggcccacattctagaatttaactttatttaaagaaaataattaccatttttatgtagaagaataagaaaataatccaatataatatcctatgaagactttatgaattaaaattttatgaattaaaattattaaattccatttctttcttttaacatcatatgcgcatgttcttaatcacaaatattattaatttgtctctacctctgcatttacattttgctttaatatctagcagtttagggcttttcatttttgatttcccttaagtaatgtaataatggcgatattaaaaatgctgaatcatga

SEQ ID NO: 709388 - DNA, 1447 bp, Homo sapiens
gaaaagtataagccaatgacaggcaatcagttgtttctcaagaagagataaggacatagttaaaagccttaatgttgataagaaatgggcctgctggtactttaggggatgaaatgggttttctgtagaaaaagaggtttaagttttcaagaaaattgtaagtgcaataagatgtcattgaaatgaagtattagggaatgtaaatcttgggtcagagcaataggcccaaaaatcattttctcgggttcatctttgctagattaagtgagctcagttttatacttatcactttccataacttttatgctttaatttcytatatctgccattgatctctgtattcagccttgattttccctctaaccttgagaatcataggtacacattcctgttgaacatcttcacatggatgtcctacatgatcttaaattaatattccactcttcttcctttccaccactgctacccaagaacattcttttgtcccagtatccagtcactgttaatgacatcaccattcattcacttgctcaagatagaaaactgggagttttcctggacagggctgctgcttgcccttgtagtgcttttgtggaagttagaaagagttgaccttttggtcatacagatcctacctgataagcaaagctaaggttgaattttagtcctcacttcccctcctctgctgatccttgttcagcacgtgacatgcataactatggaacaatcttcattctggattattctactttctaactcacatatgatcaattttcaacacacaaatatcctgtaatctgcaacacctttttcttctctgcttaattgtcctttaaattagttaatacagaaaaagtatatatgttatttatgtgtgcttgttataatgatatagtgaacacaagtaaacctagaacttttccaagagccagaacattattagcattttgccatcctttttggcccttcttatccctgccctagttcatgcccccattgtatctcactttattgctatagccttgtgatagacttcagtgcccccattgtatctcactttattgctataaccttgtgatagacttcagtgccccagtatgtccatgttaatccacaaagcatgttaccacaaatttactgtttcactcccttgcataaaactctttgtagattttcattccttagaaaagagctcctctaagttgctcagcataccagggaatgctgtctgagttctgtcacccacatgtgtgccaagcccaatcttgccacttcacagtttaggcggaaccaaactgtggttccccaaacagcacactcagctgctggctctgcatgagcccagctgcatgtgcattgtcctgcccagccaatcatttcctgttttctggagcatctccctctatgtttctctcttagtagactgctagctctttgaagacagcaa

SEQ ID NO: 709389 - DNA, 1447 bp, Homo sapiens
gaaaagtataagccaatgacaggcaatcagttgtttctcaagaagagataaggacatagttaaaagccttaatgttgataagaaatgggcctgctggtactttaggggatgaaatgggttttctgtagaaaaagaggtttaagttttcaagaaaattgtaagtgcaataagatgtcattgaaatgaagtattagggaatgtaaatcttgggtcagagcaataggcccaaaaatcattttctcgggttcatctttgctagattaagtgagctcagttttatacttatcactttccataacttttatgctttaatttcctatatctgccattgatctctgtattcagccttgattttccctctaaccttgagaatcataggtacacattcctgttgaacatcttcacatggatgtcctacatgatcttaaattaatattccactcttcttcctttccaccactgctacccaagaacattcttttgtcccagtatccagtcactgttaatgacatcaccattcattcacttgctcaagatagaaaactgggagttttcctggacagggctgctgcttgcccttgtagtgcttttgtggaagttagaaagagttgaccttttggtcatacagatcctacctgataagcaaagctaaggttgaattttagtcctcacttcccctcctctgctgatccttgttcagcacgtgacatgcataactatggaacaatcttcattctggattattctactttctaactcacatatgatcaattttcaacacacaaatatcctgtaatctgcaacacctttttcttctctgcttaattgtcctttaaattagttaatacagaaaaagtatatatgttatttatgtgtgcttgttataatgatatagtgaacacaagtaaacctagaacttttccaagagccagaacattattagcattttgccatcctttttggcccttcttatccctgccctagttcatgcccccattgtatctcactttattgctatagccttgtgatagacttcagtgcccccattgtatctcactttattgctataaccttgtgatagacttcagtgccccagtatgtccatgttaatccacaaagcatgttaccacaaatttactgtttcamtcccttgcataaaactctttgtagattttcattccttagaaaagagctcctctaagttgctcagcataccagggaatgctgtctgagttctgtcacccacatgtgtgccaagcccaatcttgccacttcacagtttaggcggaaccaaactgtggttccccaaacagcacactcagctgctggctctgcatgagcccagctgcatgtgcattgtcctgcccagccaatcatttcctgttttctggagcatctccctctatgtttctctcttagtagactgctagctctttgaagacagcaa

SEQ ID NO: 709390 - DNA, 1844 bp, Homo sapiens
tgattcaattttagattattatttgttacagaagaagatatttttatttgaaatattatatccttccttttaacaagtagcagaagaaatcaaatgcatcaaacacaaatcttatgtaagtttcatcatattagacatatttatttcttatgaagttaaccatttaaatctttaagttttttataaaataatttaagtagtggtattttaaagcaaaagactaagtatgagtatagtctataaagcaaggaagcgtgatgacccttgtctgtgtgtgtattcatcaagcctgaatacttactgtgaaaagaagagtaaaaggatacttcatagaggaataatgtaattgaggggaaaaagagtgaactctgagcatgtacagtttgctctatgccaaaccttaaacctcaggatcacaggaatttctcccctgaagaacgaaatccagcattgcaatatcatgggacgtggaaaatctcatgagaaattatggcttctagctgaactaccagttctgtgcccctatctaagggcaaacttaatcataatcttggaacctaaacttttttctacaactgaatcttctactccatatttaatcttactctgacattaggttcaatatctccatattgtacatttttatgacaaaatctctacaaacagagggtgctcccattcctaggatgattcattttagtgatttcaaaggatgtgtgcggggatgactgtcagtgtctctgctcattcttcacccactctttgggaagactcttttgaaacatctttgtttttttctgaaatcaaaatgatcatgatcatctatattctcttctcattatcaatataaaaaatctacttgtttattttaaaaattacatattgggggcattcttataattatagttcttttttggcaaactgtataacaagttttaagaacattttgggaatttttaaatttttggggaatagacaaattatccttaaataggagtttgttaaagaaatgtgcaaaatgcatatgatggaacacgttacgctcatttaaaatgataatggagttctgtatagacacaaaagttatccatgagtttactaagaargaagaaataaactcacaaaatcacctacagtagaatccattttttaaagtattttataagcagataagaaataaaaaaaatactgctaaatattgttgttgattgccccagggaagtgacattttgagtgatttttagtttctttttcttttttcacttgactatacatctatttttttcagtgaccatatatttttattttttgttgttataaggaaacacaactctctgacttgcattgaatcaagaagtttaataattgaaattcaaagatcattaaccattgtttgcatcttaacagatttatttgagtagttaattactctaagactatatccatgcaatgtgtcttactgtggtctgaatggtaagtaataattgtattaattaaattgattgatcataaatcaaagaatgagtaatgagtgggatcacaagttcagttattttagtaattcagtggtagactaaatggcatgcatagtaacatgctacgtggacacttcctctccttttccataaacctgagaaatatcaataataaaaaagtaaatagatttaactgcagaaattctataataccattcattccagtgttattctctggtctggggaaaattctgtgtgtgtgtgtgtgtgtttgtgtgtgtgtgtgtgtgtggttattgtgatgaatcacaggtaatttgcaaagtattaaatgtctttttaaaactcaattaattaatcactgttgat

SEQ ID NO: 709391 - DNA, 634 bp, Homo sapiens
tgaaaatgatattgagtgtgcaatatggagataaaaagagagaaagtctttacagatgtaataatcaaaattagagaagttaattgtagatttcctacttaaacagtatggatcagtgaatactctctgtgctacccagattcttcttaaaactaaaggatatatccctctagctgctggctaatagatcatataaatcagtcctctctgctaatttccctctgctgaaaagagtcaccttcttcaaagaaacatgctcatcctagaggcaggctgcattcatgcaagaagactggttgatttagccttcttcttgctstatcaggtcaactctagaggctaattcagtttcaaggttcccatgggttagctaaggctttgtttttactgcacttccacccaatttctaatctgcccattcttgctctattccatttatcgtaggtattgattccaagaactcacatcaataaatctcctgcatgctaatgtatgtcttgaagtctgttttcctagaaccccaagctacattggttggtaataaataatgtggttaaagaaggcagattctaagatagaattttggacctggatcacctgtagcctgcctagcaatgaagacctcatcagcggt

SEQ ID NO: 709392 - DNA, 998 bp, Homo sapiens
gcactccagcttgggcgacagagcgagactccgtctcaaaaaaaaaaaaaaaaaaaagaatatattatctgaccattaacaaatgaattaaggtagacatacctaacaaaagtacatttagaaaatctataactacctgaaaattaagcaataaactctattgtgcaagggtcaaaaacaaccactgaatgtagaagacattatgaaatgaatgacaatgaagacacgcatatcaaaacagctaacacattacagaggaaaatgtatggtcttacgtacacactgtcaggaatgtaagaccgaaaattaattagttgttccgattttaaaaagctaaaaaattaataaataaaaaatttttaaagtagaaataaaatagtgataaatacatagtagagaaattaatacaaaatttagtaaattgtaaagattaacaattcactccataagtaaaataaatgagtgaaataaatcaataaaaacacagaaaacaagattgctaatatcaggaatgtaaagatgatattgctctcccttattttttattgatatgtaataataatatatatttttggagtacatgtgatattttgaaacgttcatacagtgtgtaatgatcaaaytggggtacttaggatatctatcacctgaaactttagtcttttgattgtgttgggaagatttccagtcttctcttctagctattttgaatatacaataaatgatttgtatctatagtcactctactatgctatcaaacactaaaacatattctttctaactgtatttgcacccattgaccaatctctattcatgttcccttctcccacaccagccatttccagcttctggtaatcattctattctctacttcaatgagatcaacttctgtggctcccacatatgcctgagaacaggtaatatttatctttttatgcttggtttatttcacttaacataaagacctccaattccatccttgttgccttcaattacag

SEQ ID NO: 709393 - DNA, 998 bp, Homo sapiens
gcactccagcttgggcgacagagcgagactccgtctcaaaaaaaaaaaaaaaaaaaagaatatattatctgaccattaacaaatgaattaaggtagacatacctaacaaaagtacatttagaaaatctataactacctgaaaattaagcaataaactctattgtgcaagggtcaaaaacaaccactgaatgtagaagacattatgaaatgaatgacaatgaagacacgcatatcaaaacagctaacacattacagaggaaaatgtatggtcttacgtacacactgtcaggaatgtaagaccgaaaattaattagttgttccgattttaaaaagctaaaaaattaataaataaaaaatttttaaagtagaaataaaatagtgataaatacatagtagagaaattaatacaaaatttagtaaattgtaaagattaacaattcactccataagtaaaataaatgagtgaaataaatcaataaaaacacagaaaacaagattgctaatatcaggaatgtaaagatgatattgctctcccttattttttattgatatgtaataataatatatatttttggagtacatgtgatattttgaaacgttcatacagtgtgtaatgatcaaactggggtacttaggatatctatcacctgaaactttagtcttttgattgtgttgggaagatttccagtcttctcttctagctattttgaatatacaataaatgatttgtatctatagtcactctactatgctatcaaacactaaaacatattctttctaactgtatttgcacccattgaccaatctctattcatgwtcccttctcccacaccagccatttccagcttctggtaatcattctattctctacttcaatgagatcaacttctgtggctcccacatatgcctgagaacaggtaatatttatctttttatgcttggtttatttcacttaacataaagacctccaattccatccttgttgccttcaattacag

SEQ ID NO: 709394 - DNA, 2612 bp, Homo sapiens
tttttttttttttttttttttttttgagatagattcttgctctgtcacccaggctggagtgcagtggcacgatcttggcctcacagcaacctccacctcccggggtcaagtgattctcctgcctcagcctccccagtagctgggactacaggcaagtgccaccacgcccagctaatttttgtatttttagtagagatggggtttcacatgttggccaggatgatctcgatctcctgtcctcatgatcctgcctcggcctcccaaagtactgggattacaggtgtgagccatcaagcccggcctatgaattttttaatgtaacaaaatttgagtggagaaggtacctttttattaaattctctcaacttaaaaatttatatagagtttgagagatcacgcaggtatgataatgagtattgtcattgagtaaaaactatttagaaatgatttagaacattcaataaaattgcaattagaggcataattcatacaactgtgcaaagaaatgcaactgtgtgtgatttttacttgaataaattattaatagagaattacaaaatagtgcttttctcactctattacttattctacacttttcatttctcatgttgctgcaaagaagagcttttgtccttcccccatttaagtgtgtatgtatatagtattttcttagtaacacctgactcatggattttttttaattcaatatattaaattgacaaagttaaacatatatttttaacttgtatttatatctttaacatataaatatgttttaacatataaatatatttaacttagccagtgtgaacttcctgaagtctggctcctatgtacttttgaaattatttaccaatattttacaagtatggtatggtttggctctgtgtcctcacccaaccctcatcttgaattataatccccaagtgtcgagggagagacttgtaatccccatgtggtcaagggagggatgtgattggatcatggaggcagtttccccatgctgttctcattataaagagtgagttctcacgagatctgatggttttataaggtatttttcctgctcttgctcactgtctctcacctgccaccatataagacatgcctacttcctcttccactgtgattgtaagtttcctgaggcctccccagtcacacagaactgtgagtcaattaaacctcttttctttataaattatccattctcaagcagttctttatagcagtgtgaaatcagactaatagagagtactatcttactttctgaaacaaaaagatctcccagatccatccatttctcctttcccaaccctagaatcatcatgcaagggaatggctttaatagagcatagtacttagaaaccaagatttggaaaacaggtgtattcactatgtggttctgtatatatagttatttatatatagttcacttgcaggttcactagttcatcctgatgcctcaaattttagtctaatacaacaaggctctgcctctcctttcycaatttctttccttggttgtaacccactttatcctacagcaaaaaccctgactccaaagagcagcaatatgtttactcatttgctagattgtatactacacacacccacatatacacacacaatagctttagaatatacaaagtaatgttcaagacatttttctatttttttttctttctatctttggactgagcttatactatggaagtgcttagagtagtttattttgttcctacatgttgttatcatttggatatacagttagtttcatgtattttttgcttgttttaaatttatagttgttaccatcccactgattacatttatttttaaactaggcaaagcctttgcatggcttgaaaagacaaaacccttcagatacatacatatacacacacccagagtgaattgtgtgtatattcccccgttcttctttgggcccattctatagataataaactttattaattttttgtttattcatcatcttgtgttcttttttaaaagtaagcatatgtatgtgcacacacacacacactggaaatcactcatcagtttttaaaacagctgctgtttctggattctggcaacaacaacaacaacaaaaaaccaaaaacaaaaaacatctgccatggtgctatgttgaatagcagtaaaatagttcaatcaactatttttttatgtttgggcatttaggttgttttttatattctggaattacaaataattccacagtggataatattgtgtacatgaatgtgttttgcatgattggaagtgtgtctttatgcttaattcatagaataggtatgtcaaaaatgtttctttcttgctgttgtttagatttttctgtaattttattttttcctttcctctatcttttcttcttttggtaactttttttggcaaaatagacaaaccttaagtgttagtacaatacatttcttaaaattatattccaatatccaacacataatatagaacacttccattactctagagagttctctcatgcccctttctggaaaatttacccccttccacaggcaaccattttcagacttcacttggaataatgtttttttagatagaaccatattgatgtg

SEQ ID NO: 709395 - DNA, 2612 bp, Homo sapiens
tttttttttttttttttttttttttgagatagattcttgctctgtcacccaggctggagtgcagtggcacgatcttggcctcacagcaacctccacctcccggggtcaagtgattctcctgcctcagcctccccagtagctgggactacaggcaagtgccaccacgcccagctaatttttgtatttttagtagagatggggtttcacatgttggccaggatgatctcgatctcctgtcctcatgatcctgcctcggcctcccaaagtactgggattacaggtgtgagccatcaagcccggcctatgaattttttaatgtaacaaaatttgagtggagaaggtacctttttattaaattctctcaacttaaaaatttatatagagtttgagagatcacgcaggtatgataatgagtattgtcattgagtaaaaactatttagaaatgatttagaacattcaataaaattgcaattagaggcataattcatacaactgtgcaaagaaatgcaactgtgtgtgatttttacttgaataaattattaatagagaattacaaaatagtgcttttctcactctattacttattctacacttttcatttctcatgttgctgcaaagaagagcttttgtccttcccccatttaagtgtgtatgtatatagtattttcttagtaacacctgactcatggattttttttaattcaatatattaaattgacaaagttaaacatatatttttaacttgtatttatatctttaacatataaatatgttttaacatataaatatatttaacttagccagtgtgaacttcctgaagtctggctcctatgtacttttgaaattatttaccaatattttacaagtatggtatggtttggctctgtgtcctcacccaaccctcatcttgaattataatccccaagtgtcgagggagagacttgtaatccccatgtggtcaagggagggatgtgattggatcatggaggcagtttccccatgctgttctcattataaagagtgagttctcacgagatctgatggttttataaggtatttttcctgctcttgctcactgtctctcacctgccaccatataagacatgcctacttcctcttccactgtgattgtaagtttcctgaggcctccccagtcacacagaactgtgagtcaattaaacctcttttctttataaattatccattctcaagcagttctttatagcagtgtgaaatcagactaatagagagtactatcttactttctgaaacaaaaagatctcccagatccatccatttctcctttcccaaccctagaatcatcatgcaagggaatggctttaatagagcatagtacttagaaaccaagatttggaaaacaggtgtattcactatgtggttctgtatatatagttatttatatatagttcacttgcaggttcactagttcatcctgatgcctcaaattttagtctaatacaacaaggctctgcctctcctttcccaatttctttccttggttgtaacccactttatcctacagcaaaaaccctgactccaaagagcagcaatatgtttactcatttgctagattgtatactacacacacccacatatacacacacaatagctttagaatatacaaagtaatgttcaagacatttttctatttttttttctttctatctttggactgagcttatactatggaagtgcttagagtagtttattttgttcctacatgttgttatcatttggatatacagttagtttcatgtattttttgcttgttttaaatttatagttgttaccatcccactgattacatttatttttaaactaggcaaagcctttgcatggcttgaaaagacaaaacccttcagatacatacatatacacacacccagagtgaattgtgtgtatattcccccgttcttctttgggcccattctatagataataaactttattaattttttgtttattcatcatcttgtgttcttttttaaaagtaagcatatgtatgtgcacacacacacacactggaaatcactcatcagtttttaaaacagctgctgtttctggattctggcaacaacaacaacaacaaaaaaccaaaaacaaaaaacatctgccatggtgctatgttgaatagcagtaaaatagttcaatcaactatttttttatgtttgggcatttaggttgttttttatattctggaattacaaataattccacagtggataatattgtgtacatgaatgtgttttgcatgattggaagtgtgtctttatgcttaattcatagaataggtatgtcaaaaatgtttctttcttgctgttgtttagatttttctgtaattttattttttcctttcctctatcttttcttcttttggtaactttttttggcaaaatagacaaaccttaagtgttagtacaatacatttcttaaaattatattccaatatccaacacataatatagaacacttccattactctagagakttctctcatgcccctttctggaaaatttacccccttccacaggcaaccattttcagacttcacttggaataatgtttttttagatagaaccatattgatgtg

SEQ ID NO: 709396 - DNA, 2612 bp, Homo sapiens
tttttttttttttttttttttttttgagatagattcttgctctgtcacccaggctggagtgcagtggcacgatcttggcctcacagcaacctccacctcccggggtcaagtgattctcctgcctcagcctccccagtagctgggactacaggcaagtgccaccacgcccagctaatttttgtatttttagtagagatggggtttcacatgttggccaggatgatctcgatctcctgtcctcatgatcctgcctcggcctcccaaagtactgggattacaggtgtgagccatcaagcccggcctatgaattttttaatgtaacaaaatttgagtggagaaggtacctttttattaaattctctcaacttaaaaatttatatagagtttgagagatcacgcaggtatgataatgagtattgtcattgagtaaaaactatttagaaatgatttagaacattcaataaaattgcaattagaggcataattcatacaactgtgcaaagaaatgcaactgtgtgtgatttttacttgaataaattattaatagagaattacaaaatagtgcttttctcactctattacttattctacacttttcatttctcatgttgctgcaaagaagagcttttgtccttcccccatttaagtgtgtatgtatatagtattttcttagtaacacctgactcatggattttttttaattcaatatattaaattgacaaagttaaacatatatttttaacttgtatttatatctttaacatataaatatgttttaacatataaatatatttaacttagccagtgtgaacttcctgaagtctggctcctatgtacttttgaaattatttaccaatattttacaagtatggtatggtttggctctgtgtcctcacccaaccctcatcttgaattataatccccaagtgtcgagggagagacttgtaatccccatgtggtcaagggagggatgtgattggatcatggaggcagtttccccatgctgttctcattataaagagtgagttctcacgagatctgatggttttataaggtatttttcctgctcttgctcactgtctctcacctgccaccatataagacatgcctacttcctcttccactgtgattgtaagtttcctgaggcctccccagtcacacagaactgtgagtcaattaaacctcttttctttataaattatccattctcaagcagttctttatagcagtgtgaaatcagactaatagagagtactatcttactttctgaaacaaaaagatctcccagatccatccatttctcctttcccaaccctagaatcatcatgcaagggaatggctttaatagagcatagtacttagaaaccaagatttggaaaacaggtgtattcactatgtggttctgtatatatagttatttatatatagttcacttgcaggttcactagttcatcctgatgcctcaaattttagtctaatacaacaaggctctgcctctcctttcccaatttctttccttggttgtaacccactttatcctacagcaaaaaccctgactccaaagagcagcaatatgtttactcatttgctagattgtatactacacacacccacatatacacacacaatagctttagaatatacaaagtaatgttcaagacatttttctatttttttttctttctatctttggactgagcttatactatggaagtgcttagagtagtttattttgttcctacatgttgttatcatttggatatacagttagtttcatgtattttttgcttgttttaaatttatagttgttaccatcccactgattacatttatttttaaactaggcaaagcctttgcatggcttgaaaagacaaaacccttcagatacatacatatacacacacccagagtgaattgtgtgtatattcccccgttcttctttgggcccattctatagataataaactttattaattttttgtttattcatcatcttgtgttcttttttaaaagtaagcatatgtatgtgcacacacacacacactggaaatcactcatcagtttttaaaacagctgctgtttctggattctggcaacaacaacaacaacaaaaaaccaaaaacaaaaaacatctgccatggtgctatgttgaatagcagtaaaatagttcaatcaactatttttttatgtttgggcatttaggttgttttttatattctggaattacaaataattccacagtggataatattgtgtacatgaatgtgttttgcatgattggaagtgtgtctttatgcttaattcatagaataggtatgtcaaaaatgtttctttcttgctgttgtttagatttttctgtaattttattttttcctttcctctatcttttcttcttttggtaactttttttggcaaaatagacaaaccttaagtgttagtacaatacatttcttaaaattatattccaatatccaacacataatatagaacacttccattactctagagagttctctcatgcccctttytggaaaatttacccccttccacaggcaaccattttcagacttcacttggaataatgtttttttagatagaaccatattgatgtg

SEQ ID NO: 709397 - DNA, 604 bp, Homo sapiens
caattggccaattgtcacatgaaaaaatacttgacctcactaataatgaaagaaacgcacataaaaataataagctctgccaggtgcagtggctcatgcctgtaatcccaacactttgggaggcggaggaggggagatcgcttgagctcaggagtttaagaacagcctgggcaacatggcgaaaccccgtctctacaaaaatacaaagaattagctgggggtggtggcatgtgcctgtagtcccagctacttcagacgctgaggtgggaagatcacctgagcccaggaggtcaaggctgcagtgagccatgattgcaccattgccctccagcctgggtgacagagttatcccctgtctaaaataataataataataataataagctcttgggtgttcttcatgaaactaacaatattttacaagattgaaaatacccagagctatcaatgttgtttgtcaaagtacaaagtcaaatagtctttttaaaggacattttgtcaatatctatagtttaaaccatacatacctttaaatggagcaattccagtcctgagycaatattccataaaaataattatacaagcattcaaaaacatatgtaca

SEQ ID NO: 709398 - DNA, 539 bp, Homo sapiens
tagagacagggagtggggactgacgacagattgcagcatctgggatctggggctatggcaggaacgaggacatgtggaaggctgggagttgcctgggtcttgggagtctggggttgaaggttactccttcatggtttcagggaaagagtgaagaccactggcaagaagcctggtaaccacacagacacaccctgcaggaagcagttgacaccatctcacaccctgacctgtcccccatgtcctcctctgtgggatgcacaggacttccaggggccaccaaagaagttgggtctaaccggggccctcacagtacagtggcgagtgtagtgcggtggtaaagaccatggactccarccgggcgcgggggctcacgcctgtaatccccacactctggaaggccaaggtgtgcagatcgcttgagtccaaaagttcaagaccagcctgggcacatggtgaaaccccgtctctacaaaaaatacaagcattagccgggcatggtggcgcactgtaatcttgtaatcccagctactcgggaggct

SEQ ID NO: 709399 - DNA, 615 bp, Homo sapiens
tgtaagcatgaatttctatctcccctctcctttttggggtggaagtggtctgttatgatcagcctttccccaagggcctggctgatatcygtgaaggtgctatagagattggcatctccctctgccattggttggctggaccattcagcagtggtaatagctaggtcattgctaagagaaagcccacaataccgagcccacatacagcctttatcctgccacctgagccatctcatccatgggcccattgtgctagcactggttgtctgagaagaagactctggctgacatccacaggggagtcatgcattcaaccagccaccactggatcttctcattcacatggcttgagtgacagggcagattgtaccagagcctgctgctgctgagtcctctcctgctttggaccacatttctgctgtctgctaactgaatacagagcttgaaataaagaattgcatgcaagagacttatttgtcaatgtgatcccaaggagtaggagggacgaggggggatgaaatagggaaggaaggaaagccagtacagcggccatgctaggtacaactgatgttcaatcccatcagatcttctaggagactcatgaaatttatctca

SEQ ID NO: 709400 - DNA, 615 bp, Homo sapiens
tgtaagcatgaatttctatctcccctctcctttttggggtggaagtggtctgttatgatcagcctttccccaagggcctggctgatatctgtgaaggtgctatagagattggcatctccctctgccattggttggctggaccattcagcagtggtaatagctaggtcattgctaagagaaagcccacaatrccgagcccacatacagcctttatcctgccacctgagccatctcatccatgggcccattgtgctagcactggttgtctgagaagaagactctggctgacatccacaggggagtcatgcattcaaccagccaccactggatcttctcattcacatggcttgagtgacagggcagattgtaccagagcctgctgctgctgagtcctctcctgctttggaccacatttctgctgtctgctaactgaatacagagcttgaaataaagaattgcatgcaagagacttatttgtcaatgtgatcccaaggagtaggagggacgaggggggatgaaatagggaaggaaggaaagccagtacagcggccatgctaggtacaactgatgttcaatcccatcagatcttctaggagactcatgaaatttatctca

SEQ ID NO: 709401 - DNA, 608 bp, Homo sapiens
atcacacccgctatttcataagcagagtatacctgagacacagcaccacatccccacaaccacccctttagaagtctggaaacaagcaatgtacaagaaaactcacagaagaaatatatttcccatgaagcacacggtacagcatgtaaaatggacagacccatgrgcactgtggcctttctgtaccaatctgggcactgtactcacagctactctacgtgtgtgcgtgtgagtgaccctacaacggattagtattcggccacaaaaatacgatgacattttgatatatgctataacacggatggactttgaaaacattatgcttagggaaataagccagacgcagaaggataaatgttatatgattcctcttctatggggtacctagaataggcaaataaagagaaaaaagagaagtcaccagggactgagtgtggggaggggagtgtggaagggccagttattgtataatgagcagagagttttggagaaggataatggaaaaatgtttaggtgtaagagggtgatggctacacaacattgtgaatgttttcataccactgaattgtacacttacaaatgtattacgtaatgtatatcttaccaca

SEQ ID NO: 709402 - DNA, 608 bp, Homo sapiens
atcacacccgctatttcataagcagagtatacctgagacacagcaccacatccccacaaccacccctttagaagtctggaaacaagcaatgtacaagaaaactcacagaagaaatatatttcccatgaagcacacggtacagcatgtaaaatggacagacccatgggcactgtggcctttctgtaccaatctgggcactgtactcacagctactctaygtgtgtgcgtgtgagtgaccctacaacggattagtattcggccacaaaaatacgatgacattttgatatatgctataacacggatggactttgaaaacattatgcttagggaaataagccagacgcagaaggataaatgttatatgattcctcttctatggggtacctagaataggcaaataaagagaaaaaagagaagtcaccagggactgagtgtggggaggggagtgtggaagggccagttattgtataatgagcagagagttttggagaaggataatggaaaaatgtttaggtgtaagagggtgatggctacacaacattgtgaatgttttcataccactgaattgtacacttacaaatgtattacgtaatgtatatcttaccaca

SEQ ID NO: 709403 - DNA, 595 bp, Homo sapiens
taatttttagtttttttctagagacagggtctctctctgttgcccaggctggccttgaactcctgggctcaaataacccttccacctcagcctcctcaagtgctgggattacaggcatgagcccctggcaccaggccttgagatccttaaaccacgtccacaaagtccactttgctatgtagaatgacctattcacaggttccaggattaggatggagatacaccttgagggccattattccatctaccacagctaccaaggaccattttgagaaatgtgaaaatgatctggagcccaggaaacaagacacaggcagcaggtgatagcagcagaaacaggagttgtaaaagccagcattcttgcaacgactttgaccagtagtaacaccctttctttacttttggcagattcacacatttstgccttcttttaggactctgtactcacaaggtctatggcctcctactcacctgtagaagattgtgagaggacaggctttagactctgccttggaagtgtcgtggtttaagtcggagtgatacaaagaatcaagcgtcagtgcaagcccagccaactcctcctcaggcaaccttg

SEQ ID NO: 709404 - DNA, 595 bp, Homo sapiens
taatttttagtttttttctagagacagggtctctctctgttgcccaggctggccttgaactcctgggctcaaataacccttccacctcagcctcctcaagtgctgggattacaggcatgagcccctggcaccaggccttgagatccttaaaccacgtccacaaagtccactttgctatgtagaatgacctattcacaggttccaggattaggatggagatacaccttgagggccattattccatctaccacagctaccaaggaccattttgagaaatgtgaaaatgatctggagcccaggaaacaagacacaggcagcaggtgatagcagcagaaacaggagttgtaaaagccagcattcttgcaacgactttgaccagtagtaacaccctttctttacttttggcagattcacacatttctgccttcttttaggactcygtactcacaaggtctatggcctcctactcacctgtagaagattgtgagaggacaggctttagactctgccttggaagtgtcgtggtttaagtcggagtgatacaaagaatcaagcgtcagtgcaagcccagccaactcctcctcaggcaaccttg

SEQ ID NO: 709405 - DNA, 627 bp, Homo sapiens
ggcctctttccagcatgacatttcagttgaaacctgatggattaggagtgacctggggccaggcgctgtggctcacgcctgtaatcctagcactttgggaggccaaggtgggcagatcacctgagatcaggagttcaagaccagcctggccatgttgaaaccccatctttacttgtaatacaaaaattagctgggcgtggtggtgtgcgcctataatcccagctgcttgggaggctgagacaggagaacctcttgaacccgggaggcagaggttgcagtgagccaagactgcaccactgcattccagcctgggcgacagagtgaaactgtgtctaaaaaaaaaaaggagtggcttggcaaggagcaatgagaaaggcattccagatagaggaagcagcaagcgtgcaacggcatgaggccagrcttgttcaaggagcaggatgcaggcacagtgtgaacaagggggataaagaatgaaggaagattaggtgcactggggcagaacaggcctgggccagggtggaggtaggagtggatggttggggtttactccaagggcattatttttataaatagaatgagtacatcatctccatagttatgtagaagcaaaattatccagaggtg

SEQ ID NO: 709406 - DNA, 644 bp, Homo sapiens
tcaacatgtattcctaggttattttgagggtcctagcccagagttcaaaattgcttaaggtctactgttttatcttaaattaatgtgggttttacatcccacactgcaaaatgtttttgtttgtttgtttcagatagggtctccctctgtcacccaggctgcagtgcagtggcccaatctcggctgactgcctcccaggttcaggcaattctcctgcatcagcctcctgagtagctgggattataagcgcctgcggccacgcccacctaatttttgtatttttagtagagatggagtttcaccatgttggctaagctggactcaaactcctagcctcaagtgatctgtccacctcggcctcccaaagtgctgggaatacaggcgggagccactgtatccggyctttattttttaatattagtactttttaaacatttttttttaagtcaagatctccctatgttgcccatgctggcctcaaacacttgggctcaagcgatcctcccaggtagctaggaatacaggcatgtgctgctgcgccctacttgaatgcattttaaatgaccgtaaaatcgttcaccaattttctacctgtcttagtgattagtgggtaagatgtatagattgcatcgggtgtatcaatt

SEQ ID NO: 709407 - DNA, 629 bp, Homo sapiens
cgcctggctaatttttgtatttttagtagaaacaggatttcaccatgttggccaggytggtctccaactcctgacctcaggtgatcaacctgcctcggcctcccaaagtgctgggattacaggtgtgagccaccacgcccagccgtttctgcttattcttaagcaacccacacttttgaatccttaggtaaattatgcattagacaagttaagcaagttctaagtcaagaatagagattttcttgcctccattttccataatttcctatattttaggcaaccccataagacagtgctggctttgtgtatattcctagcctctttccattatgatttctttgctaatggccacttctccaaacctgctcaagttcccaatggcagtctacgaagaaccaatgataactactccttattgagtgccgacactagaaggcagccaggcactgtactaagtacattacacgatcatatttaaatgtgagtaaacctggaaagatgggtattttcattcctatctaacacataggaacatctaggttccgagtagttaaataacttctgatttactaaatgcagggctattcatgctcaacttcccattgacatactccaggagagcgtacatt

SEQ ID NO: 709408 - DNA, 635 bp, Homo sapiens
tccctccttctccacagctgccacatcttacttttacaatttaatcttactcgatgagactgagaccatcaattttcagagagcaggaggtagattttcgtaaaaggatataaggaactcaaagagaaggaattctaaaatgtgaccacctgaagtccaagtctgtggtccgaaactagaggaagggcccatcattgtaaagcagccaactgtagcttgtctgctttggtgagatgatggaggaggagagtgagggtatatgagtccaggtcagtcttctcctcttctacttaaaagagttaagtgtggcaaatgaagatggcccaaactctttgacttttctctcactaaaggaagatctctatgtctccttacttgaatctgagtgggcttcgtgattgcttaaacaatagaattcattgcgatgctgctgtgtcagtttctgggcccagacctcaagaacaggaagcttccacagtctgtcactggraacacccattcttggaacccaatctccatgctgtgagggagccaaagcagctctgtggaaaggaccacattgagagtaactaagactagctagtgtcagcttgccagccacatgaataagccatgttggaattggatcgttttta

SEQ ID NO: 709409 - DNA, 518 bp, Homo sapiens
ctgaaataatatattgtttttagaaagaaggcctttagaagggtggttgtctctgcagattttaacagacacagatagtaacaccaaattttattccttagcccttggctcttcaataacttgtttcttcttttaacatgtttttaaggacattaggacaatatgtcacaagccacattccatgctgtcatttatcttatgctggatgatagtaaataaacttacagcttttcttaaataatttaagaataaatgtcatttacagaagacttattttgatacactttaaaataactaaaaaagtatgwctggattgtttttaagacaaaggataaatgctttagcccgtttaccatgatgtgattattatacattgcatgcctgtatcaaagtgtctcaggtaccccataaatatatacacctactacgtacccacaaaaattaaaaactaaaaaaagaaattaattttaaaagccctcaatgtgcaatgttagctacatgtaactgttcaagtggcc

SEQ ID NO: 709410 - DNA, 3012 bp, Homo sapiens
ttgaaaagtactattggcaagtgcaaccaatgtgaagaaaaacatacagtcaattttacttgaatttgctttcaccttgttatttggtgctatgttttttttcttttttcctttttccttattttttttttttggccttctgccatttttaggaaacagttcattttcttaaatgaagaaagagattctgagaagcagagattccgattccaagcaatctccagaatacaatttccagctactggtctaaagtatttggcactttcagccaagaatttataatcctccatcagaccctgccatttgaaataatcatagttttgttattttactttgaaaattgtgctctctgggactgccattcaaagaaaaataaaccaaaaatatagataaaaccaatcattctgtcattccctgttctgcatcttagtagagatgatggtgacagatgaaaatcatttgaaagaaggattgcttctgtatatcaacccaaacgtaacttgttttgtattgtcagataacaatgctgactggagtaatgagaaaataaacatggacaggggcatcagtggaaaagtccatcactcaatttctaccaataataaataaatggaggaaaaaatatattcattacatggttgaaagacccaaagcccataacatctagaaatgcaatttccaaacatcctggagcatttttagaagctgtagctgaatatcaatacagtatttgctcatctccaaagtcatatttttgttatttttttcttccctgtgtttcagtatggcatacttcttttactgatccagtaaacataaaccttggcaaggtcgcaggtcacagttactataaaattgacaagcatattgaagaagagagatattagtgaaacaaactatctatcatggggagaaccacttatattgtggtcaaactattttcaaactttccaaataaaacaagttgtactattggtcggttgatactgttatcaaaccaagatcccccgtgttcttgcagtcatggtaacaagatgcactgaagtgttttggaatgatctatgtcagaaaaaaagatgattaaatcactgaaaatactgttttgcattttgaggattgtactctggatgtaaatatataaatttagtgaatcttttgactgatttcactagactgaccagttggtagttagaccaacaatcaaaaatggggaagtcagcctttatgaactgaacccagtcttctcgcaaatctggcaactgagtgatacatgaatgcagaatacttagtaggcagaggctatcctttctttttttttaagtaaggcctttctccaatgtgaggttatattttcagttcgtacctaaaatgaaaatattttctctacttagtgtttcattttcctcaaaatgaaaacacacaactttcaggaaatacattgggtatataacttttccaatcttaattcgtttattattgggagagtatcattctcaggatttctttcgaattcttgctggctttataacatggagcaaagtttaaaacaatcttaaggtgtataagctctggagaagtcagctgaatcgagtaattaatcaagatgccgcttttctgctctctggcctctgtttgtgaatactccctgctatcgtgctccccaagaattctactctactttgaagtgagctgtgttcccccaaaatttatatgttgaagccttaagcccctatacctcccaagggttccagcttcaataccatcatataagatattgaaaggataatcattactatacttttatactatatcttcattatactttcaatatcctacatgatgttattgaagatgtgacctttgggaggttattaggttttcatgtggtcatgagagccgggccgtcatgttgggattacttcccttataaaaagaaaccagagagcttttcctctgtcccctaactaactctgtgaggacacaaagagaagatagccaattgcaagccaggtagaaagctctcactagaaaccaaatcagacagcatttaaatagactttctagcctcaagatctgtgagaaataaatgtctgttgttttagcccccaggttatgaaatttttctgttgttatagcaaccagagcagacgaggaaaacctaccactaatgttgaagaaacccaacattatgacaggtaggacaagttccaccatatcacctgtattaaggttttcccagggcacacatgcttatgggtattgcacctcaccaacaagcctgctaaaaagtcattggcttcttgtcttgttcttgccacagagtagttctaggccatcagcgggacaattggaattgagagtatcataaaatctctttgcgtgttattttcttaaggtctaacattaaaagaccactatgaaagcacttttcagattagatataaaagtaattactatcagaaagatttccaccaatgatagaaagaaaaacacaataatttttcagatgagtttgcttttttgggtttaaagaaataagtcaatttaataagaaatgaactgtaacccctaaattcctttggattaatgtcatgtgttgtgtatagattgcaagggaaytaaaactgcatatacacaagcagaattagacaagaaagaacactcagaaatgatgcgctttaaactccctgctagaggttaaagggattgtaaaacaatcacttgagacagaactgggactcaaccacatcattggtctcaagtatgcatattgaagatatttatcagataagaattttattaattcattttccattaatctgaaatatattataatttgacctgccttttatgtagtttggctttatgctctctcttgaaaagcaaagcataaggaatattatagaaaatatgtttaccctatttgaaagaagtgtgtttaactgctttatcacattaattcgttttacgtaactagatgttgttacttaaagatcatggaatcatgggtca

SEQ ID NO: 709411 - DNA, 3012 bp, Homo sapiens
ttgaaaagtactattggcaagtgcaaccaatgtgaagaaaaacatacagtcaattttacttgaatttgctttcaccttgttatttggtgctatgttttttttcttttttcctttttccttattttttttttttggccttctgccatttttaggaaacagttcattttcttaaatgaagaaagagattctgagaagcagagattccgattccaagcaatctccagaatacaatttccagctactggtctaaagtatttggcactttcagccaagaatttataatcctccatcagaccctgccatttgaaataatcatagttttgttattttactttgaaaattgtgctctctgggactgccattcaaagaaaaataaaccaaaaatatagataaaaccaatcattctgtcattccctgttctgcatcttagtagagatgatggtgacagatgaaaatcatttgaaagaaggattgcttctgtatatcaacccaaacgtaacttgttttgtattgtcagataacaatgctgactggagtaatgagaaaataaacatggacaggggcatcagtggaaaagtccatcactcaatttctaccaataataaataaatggaggaaaaaatatattcattacatggttgaaagacccaaagcccataacatctagaaatgcaatttccaaacatcctggagcatttttagaagctgtagctgaatatcaatacagtatttgctcatctccaaagtcatatttttgttatttttttcttccctgtgtttcagtatggcatacttcttttactgatccagtaaacataaaccttggcaaggtcgcaggtcacagttactataaaattgacaagcatattgaagaagagagatattagtgaaacaaactatctatcatggggagaaccacttatattgtggtcaaactattttcaaactttccaaataaaacaagttgtactattggtcggttgatactgttatcaaaccaagatcccccgtgttcttgcagtcatggtaacaagatgcactgaagtgttttggaatgatctatgtcagaaaaaaagatgattaaatcactgaaaatactgttttgcattttgaggattgtactctggatgtaaatatataaatttagtgaatcttttgactgatttcactagactgaccagttggtagttagaccaacaatcaaaaatggggaagtcagcctttatgaactgaacccagtcttctcgcaaatctggcaactgagtgatacatgaatgcagaatacttagtaggcagaggctatcctttctttttttttaagtaaggcctttctccaatgtgaggttatattttcagttcgtacctaaaatgaaaatattttctctacttagtgtttcattttcctcaaaatgaaaacacacaactttcaggaaatacattgggtatataacttttccaatcttaattcgtttattattgggagagtatcattctcaggatttctttcgaattcttgctggctttataacatggagcaaagtttaaaacaatcttaaggtgtataagctctggagaagtcagctgaatcgagtaattaatcaagatgccgcttttctgctctctggcctctgtttgtgaatactccctgctatcgtgctccccaagaattctactctactttgaagtgagctgtgttcccccaaaatttatatgttgaagccttaagcccctatacctcccaagggttccagcttcaataccatcatataagatattgaaaggataatcattactatacttttatactatatcttcattatactttcaatatcctacatgatgttattgaagatgtgacctttgggaggttattaggttttcatgtggtcatgagagccgggccgtcatgttgggattacttcccttataaaaagaaaccagagagcttttcctctgtcccctaactaactctgtgaggacacaaagagaagatagccaattgcaagccaggtagaaagctctcactagaaaccaaatcagacagcatttaaatagactttctagcctcaagatctgtgagaaataaatgtctgttgttttagcccccaggttatgaaatttttctgttgttatagcaaccagagcagacgaggaaaacctaccactaatgttgaagaaacccaacattatgacaggtaggacaagttccaccatatcacctgtattaaggttttcccagggcacacatgcttatgggtattgcacctcaccaacaagcctgctaaaaagtcattggcttcttgtcttgttcttgccacagagtagttctaggccatcagcgggacaattggaattgagagtatcataaaatctctttgcgtgttattttcttaaggtctaacattaaaagaccactatgaaagcacttttcagattagatataaaagtaattactatcagaaagatttccaccaatgatagaaagaaaaacacaataatttttcagatgagtttgcttttttgggtttaaagaaataagtcaatttaataagaaatgaactgtaacccctaaattcctttggattaatgtcatgtgttgtgtatagattgcaagggaattaaaactgcatatacacaagcagaattagacaagaaagaacactcagaaatgatgcgctttaaactccctgctagaggttaaagggattgtaaaacaatcacttgagacagaactgggactcaaccacatcattggtctcaagtatgcatattgaagatatttatcagataagaattttattaattcattttccattaatctgaaatatattataatttgacctgccttttatgtagtttggctttatgctctctcttgaaaagcaaagcataaggaatattatagaaaatatgtttrccctatttgaaagaagtgtgtttaactgctttatcacattaattcgttttacgtaactagatgttgttacttaaagatcatggaatcatgggtca

SEQ ID NO: 709412 - DNA, 639 bp, Homo sapiens
aagaggtctagtcttcagcctgtctcagctttgaacgtgccttcctcactaagtttaattatttttagtttttgatttaaagtgtgagacatgcaattcttcctttcacttgaacacttagaggtaattgtagggttattaattggcctgatttcactattgttgtgcctcagggaacagggaggcctgaggaaagggagagaaatggggsaaccggaggttgatggagcagttggaatgcacattaatcagttaagttggtcatcctatgggtatggtttcatggctgcccaaaacaattacagtagtaacatcaaagatcattgatcacagatcaccataacagatgtaattacagtaataatataaagcttgaagtgttttgagaattactaaaatgtgacacagagacatgaagtgagcacatgctgttggaaaaatcatgctgctagacttgcttgagggagggtagccacaaaacttcaatttgtataaagcaaaatatctgtgaagtgcaatagaatgaggtatgcagcctgcataaataaataatcagctggattcagaaaaatatccctggatttggagctttgtgatggcaaaatgggacttgaaaactacactactccattaatttca

SEQ ID NO: 709413 - DNA, 1298 bp, Homo sapiens
tttcctcacattcaaaatgggggtacgatggcacctcccaccttgctgggtcattctgaagaggaaaaggaaagttgcatgcatggtgagtgggtgacacagggcatctgccagggtctatgggaggctgggcggctgaagataggagagtttggcatctagtattgatggttcaaataagccaactgtctggtctgtgctcacctgaatcgcacgatcaatcactcgggaggccatggacggggcgaccattttaatcatggctatatccaaggctgcagcctgtaaggaggaggagatgcgatcataaaagacccgagggcagcctgggtggcagagtgaggcccccccgtcccccatctctactaaaaatacaaaaactagcagggtgtggtagcatgtgcttgtagtcccagctactcaggaggctgaggtgagaggattgtttgagtctgggaagttgggggctgtggtaagctgagattgcaacactgcactcaagcctggacaacagagtgagaccccctctcaaaaacaaacaacaggccaggcgcggtggttcaggcctgtgattccagcactttgggaggccgaggcgggcagatcacctgaggtcaggagtttgagaccaacctggccaacatatagtgaaacccagtctctactaaaaaatacaaaaattagctgggcgtgatggtgcacacctgtagtcccagctacttgggaaactgaggcaagagagctgcttgaacccgggaggcggaggttgcagtgagccaagaytgtgccactctactccagcctgggccaccgagtgagactctgtctctcaaaaacaaaacgaaaaactaaaccacaaaaaagacccgaaggcagaaagcctggaagaatgatcagattcccagcaagaagtcaaacaccaccgtccaaaacagaggccccaaggtctcgctgatgtgagctgggtgaggctgcccctgcctggtgtacggcttgacagcacccagggatgaagggcgccatgttggcaactattatcttatgtcacaagatgcgaagcaagtgctggcagaatgtggctgtcttcccagatgacggggaacacagccagcacacactgaagggataaggggagggtcctgtgctttgctcagggtcacggccagctctgcctccaagcagcagtggaccaaggccactcagggctctgggaaaccgagctacagtgatctgccctggggcagggtgttcaagggagacacccagcagcctccaccatatctagcacgccagcgtca

SEQ ID NO: 709414 - DNA, 818 bp, Homo sapiens
tttttaatttcccacctgtttttctaaataaagtgaaccacgaggctctggttcagtcacagcactgagattttaaatggcctgtgcattgccttgcatctggctgtttacccaagggggaaatcagtcctggcaggtatcctctgctcaagttatatctaggtgtgtccagtcagcctgatcctaatctttttttaagaactggttttgccgggactagtaatgccttctgtaaaatcccataacctacgacttcttttttacctcatctctaaggaacagtatcttgacaaacaagagctgcttcttatgtaggatcataacttggggcaggctacatttaatgtgacttgggaaaaactcagggctatcttaaggtgtatattctctttaaatgcgtgaactgggaaaaatgacttactataccatacaaacaagttgcctatattaggtaatgtcattctctgaggtagagcaatttactccaatcctgagtattttcatcacattttaaaattaatgggaacgacctaacatagcattacagtcattcatttgagtttcmttccacgagcaaccatttttgagtacctaggacacagaagccaccatctcagacactgtgaataccaagaagataaaaaatggtctttgtccagagactgcgagacaaaggagtctctaagtcatcatgacttagaggaatggtaagattttacattaacgttgatttgctttcagaagataacctgcaagctgtgtttgttaatgttcctttaggcagtggttctcaaagagtagttcctagatccacagca

SEQ ID NO: 709415 - DNA, 604 bp, Homo sapiens
tgaatgaacattacctccaagctctgcctgctggttatcccagctctgcctcctgtcagatcagcagtggcattagcttctcataggagtgtgaaccctacggtgaactgcacgtgacagggatctaggttgtgcgctccttatgagaacctaactaatgcctgatgatctgaggtggaacagtttcatcctgaaaccatctccctcccccaccccttgtccatggaaaaaattgtcttccacaaaaccggtgcctggtgtcaaaaaggctggggaccactgttttacatcatctaaatggcaactgattcctgcatgggtctcagaattttcaagacaggaaggagcctttgagactatctaatactttcaatcactcaactaatgtttttattttgttattatttttttaaaaatagagacagggtctcaactctgtcaccgaggctggagtgcagtagyacgatcgtagctcactgcagccaccaactcctgggctcaagtagtcctcccacctcagcctcctgagtagctgggattacaggtgcatgccactacacctggctaattagagcaatttttgatggggtctcactatattgcc

SEQ ID NO: 709416 - DNA, 604 bp, Homo sapiens
tgaatgaacattacctccaagctctgcctgctggttatcccagctctgcctcctgtcagatcagcagtggcattagcttctcataggagtgtgaaccctacggtgaactgcacgtgacagggatctaggttgtgcgctccttatgagaacctaactaatgcctgatgatctgaggtggaacagtttcatcctgaaaccatctccctcccccaccccttgtccatggaaaaaattgtcttccacaaaaccggtgcctggtgtcaaaaaggctggggaccactgttttacatcatctaaatggcaactgattcctgcatgggtctcagaattttcaagacaggaaggagcctttgagactatctaatactttcaatcactcaactaatgtttttattttgttattatttttttaaaaatagagacagggtctcaactctgtcaccgaggctggagtgcagtagcacgatcgtagctcactgcagccaccaactcctgggctcaagtagtcctcccacctcagcctcctgagtagctgggattacaggtgcatgccactacacctggctaattaragcaatttttgatggggtctcactatattgcc

SEQ ID NO: 709417 - DNA, 599 bp, Homo sapiens
agatattggggtgatctttggcatgactacagaggggttgaggattggaacagaaccaacttccatgtctatttatttactcgattattaattttatttatttatttttctttttttcttttttcttttttttttgagaaggagtctcactctgtagcccaggctggagtgcagtggtgcgatctcggctcactgcaagctctgcctcctgggttcacgccrttctctcgcctcagcctccggagtagctgggactacaggcgcccaccaccatgcccggctaattttttgtatttttagtagagatggggtttcaccatgatagcctgaccttgtgatccgcccgccttggcctcccaaagtgctgggattacaggcatgatggattattaattttaaaagtgggatttgttgttgttgttgttttgtttttgtttttttgagacagtctagttctgtcacccaggctgaagtgcagtggtgtgatctcagctcactgcaacctcagcctcttgggtccaagcgattctcctgtctcagcctccaaagtaactgggattacaggtatgcaccaccatgcctggctaattttttgtatt

SEQ ID NO: 709418 - DNA, 599 bp, Homo sapiens
agatattggggtgatctttggcatgactacagaggggttgaggattggaacagaaccaacttccatgtctatttatttactcgattattaattttatttatttatttttctttttttcttttttcttttttttttgagaaggagtctcactctgtagcccaggctggagtgcagtggtgcgatctcggctcactgcaagctctgcctcctgggttcacgccattctctcgcctcagcctccggagtagctgggactacaggcgcccaccaccatgccckgctaattttttgtatttttagtagagatggggtttcaccatgatagcctgaccttgtgatccgcccgccttggcctcccaaagtgctgggattacaggcatgatggattattaattttaaaagtgggatttgttgttgttgttgttttgtttttgtttttttgagacagtctagttctgtcacccaggctgaagtgcagtggtgtgatctcagctcactgcaacctcagcctcttgggtccaagcgattctcctgtctcagcctccaaagtaactgggattacaggtatgcaccaccatgcctggctaattttttgtatt

SEQ ID NO: 709419 - DNA, 872 bp, Homo sapiens
aaaggaatgcttggttttttttagttgaaggaagtttttttttttttaatctttttcttacatcatcagagaatctggagatataatggggagctttgcagaccacctaagtcattcttccttggagtaaaatggtgcctaaaccatctcgataatgaggccaacctcctggggaaatagtgtgcctggctttccttggtaacttctaatgattagtgcaccttatctctgaaaggactgaatctgtgaagatccttttgcttactaaaatagttttcatcatcttttgttctcattaagtggaaagacatgaaggatctagtcacatccttagttaccttgatggcctttccaaatttagaattcatcttcttagctgtaatcaaatctaaccagattaagcccttaaggcaaccttcctgcacgttccgtccttagtcatgtcttcattacgtttgttcatgtgtttgagagatgcaggagttggaagagaaaggactgatttcccccttgtttagagatccgttttctatagccattgatctctgccattcctacatcccagcccccacaacctagactcctccctgcaaatggagactataagtcaatgttttctgagacatctgaccatacttgcaaratagttccagcgcaaaaagaacaagaacattggaagcgagggtcagaaggagcctagaaaacctgctatattgtatgtgcattgggtcactgttttagatttagaaatgtttcacaatgtcttcccgaaaagaatgtttaaatggtggattttaagatgggtgcttaaattcaggcatctgttccttcacacaatgggcaaagaatggaaatgtaattagcaatgtaag

SEQ ID NO: 709420 - DNA, 636 bp, Homo sapiens
aggttcaagggattctcctgcctcagcctagtacctgggactacaggcgcttgccaccacgtccagctaattttttttttttttttgtatttttagtagagacggggtttcaccatgttggccaggctggtctsgaactcctgacctcaagtgacctgcccgcctcagcctccccaagtgctgggattacaggtgtgagccatcgtgcctggcctgtagtagtaatttgaaagaaccagtaagaggtagggactaaggtatgtcccatcattttttaatagtatttcccattcacttgatttctcactatacaagccactacaaggtttttatcagaacagtggagcatgtggctagaagtgcagaattcctacatgttacagtaagtgttcagttacactatagttgctcacattgcatataaccaggagacagccagataatgtttactgcagtgattttacaaattcatcctggtcaatataacaattattgttcatgtctttattgccttcccatggagggattcataatacctactttcctattaaggttattgaccaaatttgctctagatctgtgctctccaattggctcattaaatgtggctatttatttaaaattgaataaaattta

SEQ ID NO: 709421 - DNA, 636 bp, Homo sapiens
aggttcaagggattctcctgcctcagcctagtacctgggactacaggcgcttgccaccacgtccagctaattttttttttttttttgtatttttagtagagacggggtttcaccatgttggccaggctggtctcgaactcctgacctcaagtgacctgcccgcctcagcctccccaagtgctgggattacaggtgtgagccatcgtgcctggcctgtagtagtaatttgaaagaaccagtaagaggtagggactaaggtatgtcccatcattttttaatagtatttcccattcacttgatttctcactatacaagccactacaaggtttttatcagaacagtggagcatgtggctagaagtgcagaattcctacatgttacagtaagtgttcarttacactatagttgctcacattgcatataaccaggagacagccagataatgtttactgcagtgattttacaaattcatcctggtcaatataacaattattgttcatgtctttattgccttcccatggagggattcataatacctactttcctattaaggttattgaccaaatttgctctagatctgtgctctccaattggctcattaaatgtggctatttatttaaaattgaataaaattta

SEQ ID NO: 709422 - DNA, 654 bp, Homo sapiens
ggtcagattaaagagatataagaaatggggccgggcgcagtggctgacatctgtaattccagcactttgggagaccagggtgggtggattgcttgaagcccaggagttcaagaccagcctgggcaacatagtgacaccctgtcgcttataaaaaataaaaaatataaataaaataagaaatggyttgtgtcaggggaaaggttttgcaagtaaactgtagtatgggcacttctcagaatactcagaaaccagtgaaataggtaaaaggttgcatcaaaactaagaaaaagttctatacaaattatacctaattgttaattatgtaaggaaatataaatacctttttttttcttatatctgaaaggaaatataccagaatcatttgtcactatctttttagatttgaaataattattttttttggagacggagtcttgctccgtcacccaggctggagtgcagtggcgaaacctcagctcactgcaccctctgcctcccgggttcaagcaattctcctgcctcagcttcccaagtagctgggactacaggtgtgtgccaccatgcctggctagttttttttcatagagatggggtttcaccatgttaggcaggctggtctcaaacttctgacctcaggcagtctgcccacctcgg

SEQ ID NO: 709423 - DNA, 1002 bp, Homo sapiens
gacactgtgacttccatggatactttatttatctttgaattccccaaaacctagcattggaaaacattaggtatgtactcaataaacactatctgaaaggaaactactggacatttagcatgccacctattgtaagaatcccagtgtctaatatgcccaaaatgcttcctgaaggaaactgatgaacctacagctactttaatctgaccacttgatcctgggcaatttgccactatggctaagatcacaagtaagctcttggctcaagggcaaccaatccactggttggccaaaatcctataatgtaccctggtatgaaaagatgaactgaactaatctaactctccctctctggactccgaattaccattagttagagataggagattgaggagcttgacaaggcaaagatgtaacggagcaataaatatgagtatgtaggaactatgaagtatagaaaagatatacagggcaaagtgcaggaaaaaggaacacggtacctaagagaaaatggagagtcaatgaatcacattaataagagcaccctggagtgaagatccacaaactgcagttaaggtctcatttgagctgtcttgaatccaattctcttgaagctttgtgcttcttgttattctctgtgtcaatttacaataatgccaaattgctgaggtgccttaagggagtgtctyttttctttacaactcccaaaacctaacaaaaatgccattcttagtttatataattgctgtcacatctagaagagccagggtatttcattttcgtattttctgccaaatgatacattggcgatattcttcacatcctaaggtgattgacccttggagctttgaacaattattaggaagcacaaaggagtgttctttttgtagccatttggttctcctttaaaggttgccctcctgtggcaagctagaatacagttacagtgtgaatgcagcttgctttatttttttatttttttttttttatttttttttgaga

SEQ ID NO: 709424 - DNA, 560 bp, Homo sapiens
tgaagcagggatgggtcagagcctgcgtggcagtcagggacagggagctcaaggggggcagaagctgatcagtgcagtttatgaaggaattctgtcctctttcttgagaggagtaactttgactttaaaaagatcttaggccrggcgcagtggctcacgcctgtaatcccagcacattgggaggccgaggcgggtgaatcacgaggtcaggagatcgagaccatcctggctaacacggtgaaaccccgtctctatgaaaaatacaaaaaattagccaggcttggtggcgggcgcctgtagtcccagctactcgggaggctgaggcaagagaatggcatgaactcggaaggcagagctttcagtgagccgagatcgcgccactgcactccagcctgggcaacagagcgagactccgtctcaaaaaaaaaaaaaaaagatcttaggccctttttaggccaggttcacacctgtaatgccagcactttgggaggctgaggcgggcagatcacctgaggccaggagtttgagaccagcttggccaacacagtgaaaccccatct

SEQ ID NO: 709425 - DNA, 560 bp, Homo sapiens
tgaagcagggatgggtcagagcctgcgtggcagtcagggacagggagctcaaggggggcagaagctgatcagtgcagtttatgaaggaattctgtcctctttcttgagaggagtaactttgactttaaaaagatcttaggccaggcgcagtggctcacgcctgtaatcccagcacattgggaggccgaggcrggtgaatcacgaggtcaggagatcgagaccatcctggctaacacggtgaaaccccgtctctatgaaaaatacaaaaaattagccaggcttggtggcgggcgcctgtagtcccagctactcgggaggctgaggcaagagaatggcatgaactcggaaggcagagctttcagtgagccgagatcgcgccactgcactccagcctgggcaacagagcgagactccgtctcaaaaaaaaaaaaaaaagatcttaggccctttttaggccaggttcacacctgtaatgccagcactttgggaggctgaggcgggcagatcacctgaggccaggagtttgagaccagcttggccaacacagtgaaaccccatct

SEQ ID NO: 709426 - DNA, 560 bp, Homo sapiens
tgaagcagggatgggtcagagcctgcgtggcagtcagggacagggagctcaaggggggcagaagctgatcagtgcagtttatgaaggaattctgtcctctttcttgagaggagtaactttgactttaaaaagatcttaggccaggcgcagtggctcacgcctgtaatcccagcacattgggaggccgaggcgggtgaatcacgaggtcaggagatcgagaccatcctggctaacacggtgaaaccccgtctctatgaaaaatacaaaaaattagccaggcttggtggcgggcgcctgtagtcccagctactygggaggctgaggcaagagaatggcatgaactcggaaggcagagctttcagtgagccgagatcgcgccactgcactccagcctgggcaacagagcgagactccgtctcaaaaaaaaaaaaaaaagatcttaggccctttttaggccaggttcacacctgtaatgccagcactttgggaggctgaggcgggcagatcacctgaggccaggagtttgagaccagcttggccaacacagtgaaaccccatct

SEQ ID NO: 709427 - DNA, 1205 bp, Homo sapiens
tttatgttatgggcacgacagtcatataactgcttgtattttcctctgcatttgctgctagaaagctcagagccacattagtagcccacctcttgttgtacagtgtttcagggcatgtgtattttgtactaaactctctgctgacttagttttatttttttacaactctttactttcctaaacaattattttacatagattataataaactgcttcaaatgcatcttgtaatgagacagtgctgtataccgactgtttgtgtcacccccaccccaagaaaattcatgtgttgaaatcctaacccgcagtgtggtggtattagggaggtcgggcctttgggaggtgattaggccatgacggtggagcccttgtgaatgggattaatgcctttataaaacaggctccagagagttccctcaccccttccaccttgtgaggacacagcaaaaagatggctgtctatgaatcaggaagcaggccctcaccagacactgaatctgctagtgcctttatcttgacttctcaaaatrtaagaactatttttttgttgtttataagccacccagtctatggtattctgttatagcagcccaaatggactaagaccgataagcatatcttttttaaaaacactagaaaaagaaagcaaagtgaagaaagtagtatacgcttctgtttgcattaaaaagaatacatgcatatgcacatttgcataaaaatatctctggaaggttagtaactctagtttcctgcaagggctagggaacagaagacaaagggaatcttattaattactaataactagttaataaaatacaaaataatttttaaaagttgttttatgccatatacatctttaataaatattttttaaagttatccttccctttgctctaaagagccacttgattgctttgagcaccgctctcctggttgctactgttccgccaacaggaagcagtgtaatagaggagaaattgacttactgtcacccactgactttctgctgtaatgtggactcactggttctgtgtattgtgccagagctgctgaaatatctataaatatttttactgtattatgaaaaatgaaaacttggcccatctcccatagtttgcattttttttaaaaaaacgcaattggagataaatatgattttttaaaatgtattgaaagtgaggtccttagtaggggaaagacaaggg

SEQ ID NO: 709428 - DNA, 958 bp, Homo sapiens
tttgctcaccctgcattctccacccttgatagaactgaaggattgtatgaccctgtgaggcgatgtcataaagtcaaattatttctaaaatattactgttaaaattacatggcatctatgactctttaaaattactttattgaattttaagyactaggacttagaaaggaattagcctacattttctctaagaccagcattgaaacaaactttatatactagagaacctaccagtactgaaatccatgtattttgagtccttatttttcccccaaaattacacttgcttttcgaaagcactaagtcaattttacctgtgtctatcaataattgtttgacccagcagacaaaatttttgtaaaagaactatcccacagttcaggaagttgacttcttattaaacatttaatattaaattcagatgtcagtgttaagattgcaatattgaaataccattacacacttttagaaaattatgaaaaaaaagaaaaataaatttatctataaaaatgaaataaagcaatcaaacaggtaagggaacaaaataagtaacagagttcaaaattcaacaaaatgagaaaaaaaaagtagttttcaaaaagaatgagataagcagcttaactcaactccttaaatcactgatatgatttggctgtgtccccacccaaatctcgtcttgaatttcatgtgttgtgggagggacccaatggaaggtaattgaatcatgggggcaggtctttcccatgctgttctcatgacagtgaataagtctcacaagatctgatggtttttaaaaaaaggagtttccctgcacaagctttttttcacctgctgccatccatataagatgagacttgctcctccttgccttccaccatgattgtgaggcttctccagccacgtggtactgtaagtccaattaaacctctttctttgataaattgtccagtctcagata

SEQ ID NO: 709429 - DNA, 958 bp, Homo sapiens
tttgctcaccctgcattctccacccttgatagaactgaaggattgtatgaccctgtgaggcgatgtcataaagtcaaattatttctaaaatattactgttaaaattacatggcatctatgactctttaaaattactttattgaattttaagtactaggacttagaaaggaattagcctacattttctctaagaccagcattgaaacaaactttatatactagagaacctaccagtactgaaatccatgtattttgagtccttatttttcccccaaaattacacttgcttttcgaaagcactaagtcaattttacctgtgtctatcaataattgtttgacccagcagacaaaatttttgtaaaagaactatcccacagttcagraagttgacttcttattaaacatttaatattaaattcagatgtcagtgttaagattgcaatattgaaataccattacacacttttagaaaattatgaaaaaaaagaaaaataaatttatctataaaaatgaaataaagcaatcaaacaggtaagggaacaaaataagtaacagagttcaaaattcaacaaaatgagaaaaaaaaagtagttttcaaaaagaatgagataagcagcttaactcaactccttaaatcactgatatgatttggctgtgtccccacccaaatctcgtcttgaatttcatgtgttgtgggagggacccaatggaaggtaattgaatcatgggggcaggtctttcccatgctgttctcatgacagtgaataagtctcacaagatctgatggtttttaaaaaaaggagtttccctgcacaagctttttttcacctgctgccatccatataagatgagacttgctcctccttgccttccaccatgattgtgaggcttctccagccacgtggtactgtaagtccaattaaacctctttctttgataaattgtccagtctcagata

SEQ ID NO: 709430 - DNA, 958 bp, Homo sapiens
tttgctcaccctgcattctccacccttgatagaactgaaggattgtatgaccctgtgaggcgatgtcataaagtcaaattatttctaaaatattactgttaaaattacatggcatctatgactctttaaaattactttattgaattttaagtactaggacttagaaaggaattagcctacattttctctaagaccagcattgaaacaaactttatatactagagaacctaccagtactgaaatccatgtattttgagtccttatttttcccccaaaattacacttgcttttcgaaagcactaagtcaattttacctgtgtctatcaataattgtttgacccagcagacaaaatttttgtaaaagaactatcccacagttcaggaagttgacttcttattaaacatttaatattaaattcagatgtcagtgttaagattgcaatattgaaataccattacacacttttagaaaattatgaaaaaaaagaaaaataaatttatctataaaaatgaaataaagcaatcaaacaggtaagggaacaaaataagtaacagagttcaaaattcaacaaaatgagaaaaaaaaagtagttttcaaaaagaatgagataagcagcttaactcaactccttaaatcactgatatgatttggctgtgtccccaccyaaatctcgtcttgaatttcatgtgttgtgggagggacccaatggaaggtaattgaatcatgggggcaggtctttcccatgctgttctcatgacagtgaataagtctcacaagatctgatggtttttaaaaaaaggagtttccctgcacaagctttttttcacctgctgccatccatataagatgagacttgctcctccttgccttccaccatgattgtgaggcttctccagccacgtggtactgtaagtccaattaaacctctttctttgataaattgtccagtctcagata

SEQ ID NO: 709431 - DNA, 1275 bp, Homo sapiens
tcaaaatagtccaaatcttgatggtcacatgaatgcatgtatttgccacaatttataaacccatactttcaatgtctagaatttcgctctatgttatctctacctctttttataatatatatggtaatttttaagattcatttcctctgtactgggcaattcccagaaataaacaatagtgggcaaataaaagctgtaaggggaactaaaatagcaccactgcatataatgacactgcatcaaagaaaaaatgaagtacttcaaagttgttgcatggctcagaacagccagaaaatagcatctccagagacagggcaccctggtatagggtaatcagaagtaagatggttcatttctagaaaagagctgcaaaatcactctcaagaaatttttgataaattaaaatgacttcttaatggactatgaagaggagaagtaaaactgttatcagtgaagactttataaaagccacaactatgaattaaacacaaaccttattttttcaaaaaataaaacttttcagttttcaactaccttgtaattagaaacaatcacttcaaatattgctgatcttctttttttaacaaatattcattaacttatccacaataaatgtttacctagttactatagatggataagattatgcactaaatcattaagaattacatagttataggatgctttatgtgaagacacataattaattacaataacaattagaaataccataaatatattttattttgtgtgggattatttaaactctatttatcaacttctgagggtgtagaaascttttagagagccaaaaattccagaatcgtttcctcttcttcactagtaaatattcattgatagcttagtttgtgtaaaattctattctatatgcctagtatacattgaaaaacaatattgataaagatttctaccattatggatctcatataaaatcaaatcagcaaaactttggcctcatttttatatggcctattgtctacattaatggtaaaagataaccaaaattgagagtggaaatgctgaattgatccaaagtatattgtaaaaaatatttagatattatacttaaagattgaaagataaactaatgcttgcagaaatttacatacaataaggattaaaacgactgagttctcactcaaccatcaagtatagttaatgataaatacatattacaccttctaagtcacatattcttaggcttttgtcatcagatagagcaaagttactatttaataattattaataaatgca

SEQ ID NO: 709432 - DNA, 1210 bp, Homo sapiens
tgtaaatgctgacaaaaggaaaaatgtcattccctgcatttgctgaataaattgtgacacattagaagtagttttaaaatatatcactaatggttgggtcaagtcagcaaaaactattctaagtacttaattgtggaaaaatttagtacaggggatagtattcatgtgacggaaggattttaaatggaacccagagattagcagcagcaggaagttttaattacataccaggtgcagagtttaggattcaagacggaaccgtagataaagtctgactctttccagcatagctaggagacatggctaactccacctgtctggaggccttacctagaaatctaacggctccaaaccagataaacagaactattttccaaagtcaaacaatcaattcatgacattaaagcacttctgaactttgacttaaattagaccaaatggataaattttgaagatattkttattttaccaatgattttaacactgtctttacttccccaagattactgaactcacatgaaataaaaggcattagagcttctgtttttctgacaaaatatttaagagctttcattttcttttaagccgagccactagagctcctttatatatacatcacatacacaacacttctagacagaaaaagatctagcagctgttaagattttctttcccatttcatgaaccataacacaacttccacagagcatctatgacatgattaaactttctgacctgtcctgtattttcctctttcgtaattagtcattctactttaggacaacaatttgccatataagatcctctctcatacaacatttctttccttcataacttttcttaccatcaatacatcttcacatctacaactttctttagatctctctcccctactaatttctgatgtccacctaaaccaaaaaggtcagataacgcaaggcaaaacagaggagagccttaggttttgagaaggacctgtctgcttaaagttcttggggttccatgaggaaaacagagtttctcctaaaatggggtttgtcgaaccttctatttttccttaaggagtcccaggctgtcagaaattaccttagatcctctcacgtgagcatcaagagtggcaacaagacagacaagggaaataattcggacaactgagcagaaaaagaaaaacttactactgtcgccaccataaagatggataaactgaggc

SEQ ID NO: 709433 - DNA, 1210 bp, Homo sapiens
tgtaaatgctgacaaaaggaaaaatgtcattccctgcatttgctgaataaattgtgacacattagaagtagttttaaaatatatcactaatggttgggtcaagtcagcaaaaactattctaagtacttaattgtggaaaaatttagtacaggggatagtattcatgtgacggaaggattttaaatggaacccagagattagcagcagcaggaagttttaattacataccaggtgcagagtttaggattcaagacggaaccgtagataaagtctgactctttccagcatagctaggagacatggctaactccacctgtctggaggccttacctagaaatctaacggctccaaaccagataaacagaactattttccaaagtcaaacaatcaattcatgacattaaagcacttctgaactttgacttaaattagaccaaatggataaattttgaagatatttttattttaccaatgattttaacactgtctttacttccccaagattactgaactcacatgaaataaaaggcattagagcttctgtttttctgacaaaatatttaagagctttcattttcttttaagccgagccactagagctcctttatatatacatcacatacacaacacttctagacagaaaaagatctagcagctgttaagattttctttcccatttcatgaaccataacacaacttccacagagcatctatgacatgattaaactttctgacctgtcctgtattttcctctttcgtaattagtcattctactttaggacaacaatttgccatataagatcctctctcatacaacatttctttccttcataacttttcttaccatcaatacatcttcacatctacaactttctttagatctctctcccctactaatttctgatgtccacctaaaccaaaaaggtcagataacgcaaggcaaaacagaggagagccttaggttttgagaaggacctgtctgcttaaagttcttggggttccatgaggaaaacagagtttctcctaaaatggggtttgtcgaaccttctatttttccttaaggagtcccaggctgtcagaaattaccttagatcctctcacgtgagcatcaagagtggcaacaagacagacaagggaaataattcggacaactgagcagaaaaagaaaaacttactactgtcsccaccataaagatggataaactgaggc

SEQ ID NO: 709434 - DNA, 644 bp, Homo sapiens
ccatatttgcattctaaccccaacctttaatacaaccaggatgtttttactttcccttttttgtgtaagtaraaagcaaacattggtgaggaaggtagaagatgtgtgtcccctcctctttaattttttttttttttttttgcgacagagtctcgctctatcacccaggctggagtgcagtggctcgatcttggctaactacaagctccgcctcccgggttcatgccattctcctgcctcagcctccctagcagctgggactacaggcgcatgccaccatacccggctgactttttgtatttttaatagagacagggttccactgtgtttgccaggatggtctctatctcctgacctcgtgatccacctgcctcggcctcccaaagtgctgggattacaggcatgagccaccatgcccagtctaaaatctgactagtttacaaatagcaaagatttctggaaaacaaagttgggttggtttttttttcaggatcagaaactgttatatttgtattccttctctgtggtgatctagaaaaagctaaaggaaagcagattggacctgctgtggatacttcagtgagattcaatcagttcggtttccgtgaaacctgttgagtcttgtggcttgagagtgctaagga

SEQ ID NO: 709435 - DNA, 644 bp, Homo sapiens
ccatatttgcattctaaccccaacctttaatacaaccaggatgtttttactttcccttttttgtgtaagtagaaagcaaacattggtgaggaaggtagaagatgtgtgtcccctcctctttaattttttttttttttttttgcgacagagtctcgctctatcacccaggctggagtgcagtggctsgatcttggctaactacaagctccgcctcccgggttcatgccattctcctgcctcagcctccctagcagctgggactacaggcgcatgccaccatacccggctgactttttgtatttttaatagagacagggttccactgtgtttgccaggatggtctctatctcctgacctcgtgatccacctgcctcggcctcccaaagtgctgggattacaggcatgagccaccatgcccagtctaaaatctgactagtttacaaatagcaaagatttctggaaaacaaagttgggttggtttttttttcaggatcagaaactgttatatttgtattccttctctgtggtgatctagaaaaagctaaaggaaagcagattggacctgctgtggatacttcagtgagattcaatcagttcggtttccgtgaaacctgttgagtcttgtggcttgagagtgctaagga

SEQ ID NO: 709436 - DNA, 644 bp, Homo sapiens
ccatatttgcattctaaccccaacctttaatacaaccaggatgtttttactttcccttttttgtgtaagtagaaagcaaacattggtgaggaaggtagaagatgtgtgtcccctcctctttaattttttttttttttttttgcgacagagtctcgctctatcacccaggctggagtgcagtggctcgatcttggctaactacaagctccgcctcccgggttcatgccattctcctgcctcagcctccctagcagctgggactacaggcgcatgccaccatacccggctgaytttttgtatttttaatagagacagggttccactgtgtttgccaggatggtctctatctcctgacctcgtgatccacctgcctcggcctcccaaagtgctgggattacaggcatgagccaccatgcccagtctaaaatctgactagtttacaaatagcaaagatttctggaaaacaaagttgggttggtttttttttcaggatcagaaactgttatatttgtattccttctctgtggtgatctagaaaaagctaaaggaaagcagattggacctgctgtggatacttcagtgagattcaatcagttcggtttccgtgaaacctgttgagtcttgtggcttgagagtgctaagga

SEQ ID NO: 709437 - DNA, 626 bp, Homo sapiens
ggcctcaccccaggctaagtcttggatctctgcctcacgtaaagcagtggctgacagcatctctgtgttacagatgagcaaactgaggctcagcaagttttagctgcttcctcatgggcacacagctagtgagtgatgagcacagagctgcatggctcaattgtctggtacactttccctcccccatcctgcctccctgcaagccacagaacatggcaggcctcatgcagagcactggcctgcaaactaagtgaaagaaacttcctatgtgaggccaggcacgatggctcatacctgtaatcccagcactttgggaggccgaggcgggcagatcatgaggtcaggagtttgagaccagcctggccaacatggtgaaaccccrtctctactaaaaatacaaaaattagccaggcatggtggcgggctcctgtaatcccagctacttgggaagctgaggcagaagaactgcttgaacccgggaagcggaggttaccgtgagccgagatcatgccactgcacttcaccctgggcgacagagcaagactccgtctcaaaaaaaaaaaaacaaaacaaaacccagaaacttcctatgttgagacccctgtctactagaagcaacagtgaat

SEQ ID NO: 709438 - DNA, 638 bp, Homo sapiens
ctggccgccaccccctctgggaggtgtacccaacagctcattgagaacgggccatgatgatgatggcggttttgtggaatagaaaagggggaaatgtggggaaaagatagagaaatcagattgttgctgtgtctgtgtagaaagaagtagacataggagactccattttgttctgtactaagaaagattcttctgccttgggatgctggtgatctatgaccttgcccccaacccygtgctctctgaaacatgctgtgtccactcagggttaaatggattaagggcggtgcaagatgtgctttgttaaacagatgcttgaaggcagcatgctccttaagagtcatcaccactccctaatctcaagtacccagggacacaaacactgaggaaggctgcagggtcctctgcctaggaaaaccagagacctttgttcacttgtttatctgctgaccttccctccactattgtcctatgaccctgccaaatccccctctgcgagaaacacccaagaacgatcaattaaaaaaaaaaaaaagaaaagaaaaaagaaaataaaaaagatcaagaatctggccaatgattccaaggatgatcaagtttagtgaaaagaatgagatttgtaataagttgatctgagt

SEQ ID NO: 709439 - DNA, 638 bp, Homo sapiens
ctggccgccaccccctctgggaggtgtacccaacagctcattgagaacgggccatgatgatgatggcggttttgtggaatagaaaagggggaaatgtggggaaaagatagagaaatcagattgttgctgtgtctgtgtagaaagaagtagacataggagactccattttgttctgtactaagaaagattcttctgccttgggatgctggtgatctatgaccttgcccccaaccctgtgctctcygaaacatgctgtgtccactcagggttaaatggattaagggcggtgcaagatgtgctttgttaaacagatgcttgaaggcagcatgctccttaagagtcatcaccactccctaatctcaagtacccagggacacaaacactgaggaaggctgcagggtcctctgcctaggaaaaccagagacctttgttcacttgtttatctgctgaccttccctccactattgtcctatgaccctgccaaatccccctctgcgagaaacacccaagaacgatcaattaaaaaaaaaaaaaagaaaagaaaaaagaaaataaaaaagatcaagaatctggccaatgattccaaggatgatcaagtttagtgaaaagaatgagatttgtaataagttgatctgagt

SEQ ID NO: 709440 - DNA, 653 bp, Homo sapiens
ttaaaatgcagggctcygtgaaagggaagtgtaaaaaagatttcttccaggtcggagcctagggagtcgcaaagaccacctgaagaaatcacaaaagatctaaagaacgtttagcttgagagggaggaggagaaaaaaatagcaactcggtagcagttcagcttcaccactttacagcctatgaagtatttggcttccctcatctggttcgatcttcaaagcaacctaatcagaccggcgtctagagttaatatttccattttacaaaagaggaaagtgagacacagcgcggaaaaggacttgttcagaacgagtcataaagcaaagaagccgacctttatggtccattatgtgtgggaaaaatgaacaaacaccgcggggcgttcgtgaaatactaagttataaacatggaacaaagtccaagagttaacgagagcgaagcatcacttctaggggtgggccgggtaggtttcctaggggagctggcattggaataggcttcttcgcctgcttagtgtcaggacccccagggttttacctctctccttcaggcgggtgggcgggttcgctcaggaagtagccgcttggggaagccttaggcaaggttcttcgggagagagacccgtcatgatcccgcagcctcaatccccgct

SEQ ID NO: 709441 - DNA, 604 bp, Homo sapiens
gacttgaggtggaaagcaatttggttcaaaataaccattatttattacttgaaagggaatatttccagtcgttgccagcctcctccccttctagtattggtaaattttttgcaccactgagtgggtgaagagttttatgcgtctttaaatgttttaaggatttttttaaaaaaacaaaaaactctcaggatttgggggacttttgtgtttgagcatcttgatctctaaaccagctttttccatcacctcacacctaggctatgcatagaggtcagaaaaatgtaaatgagagattgagaagttggattgttcatactagtttgtaaatatgaaaacattcacaacactccagttccaaataggctgaaaatgcattagaaaaactagtccttcaatattttttatccttctacagttgtcttttttgacccaattataaaagtagtgtacacttatagaaaaatgaggacaggcatggtggctcacgcttgtattcccaccacttcactttgaaasgctgaggcagttggatcacctgagctcaggagttcgagaccagcctgggcaacagggtgaaaccccatctctaccaaaaatacaaaaa

SEQ ID NO: 709442 - DNA, 1815 bp, Homo sapiens
gaaagatctcaggctctccaggagactctgatctgcagtacagcattctaattttggtctcttggtatcctggatcacacmatcttttggagggggccatttcctatacgtagcggtactgtttctggtgacttgaatacagtatgtaggacctatattgtaaagtcagatcttaacaaaacaatataaggcctctgctgttcatggtacttactacatcagatcccatgtattatagttacatggggtttgtttccacataggttttaagtctgtaaagcagaaattgtgctttattcatttctgaatctcctaaacgcccagcatgttatctagtacggaggaactatattggtgtaagtatgcatacacatatgggcacaaagggttgaaagagacatcacatatgtgcagcttcttaatttaaacagcaagagatcaataggtaagataagtagttgcaaaactgtttttatcttcttcagtacctttcaacaaaatacgcatccttcattcagcaaatatttaccaaggacctgtttttctctggggatacacaagccttagagccttccaagtctaggttccaaaaccatgcaaaactgtacacagttctagctttcatttgcagctctgcctatgacacaatgtgcggcgatgttgaaatctggcatcttctccttgcccctgctgtattttcttacctatttttggcttctgttttctctcggcatgagaatttttttgagattgtgaatctggattagaagtggtcaagcagttgttctccaagcctgttttccctggaagggacaacattattattggccagtgctggctttcttcccagcaacgtagctcctctcttcccacctgcccagctttctaaataagtgtggagtcagaaaacgagcagcttagaaatgtaagactcactctatggtcacttttccttgacattctactttgaaacatttcaaacacatagaaaagcatgaagaattgtatattcgccacctaacattctacaatggctctttgctatacttgctttatcatatagctgtacatctatccatccatcagtcttattttttgatgcatttctaagtaagttgcagacatcagtaactttactcctaaccacttcagcatatgtatcattaatagagttgatatttgggctgggcgcagtggctcacgcatgtaatctcagcactttgggagaccgaggtgggtggatcacaaggtcaggagatcgagaccatcctgactaacacagtgaaaccccatctctactaaaaatataaaaaattagctgagtgtggtggcaggtgcctgtagtcccagctactcgggaggctgaggcaggagaatggtgtgaacccaggaggcggagcttgcagtgagccaagatcacgccactgcactccaggctgggcgacagagcgacactctgtctcaaaaacaaaaacaaaaagaaaaagaaaacagagttgatatttctttgtggttctttttgttgctgtttacaaatagcgaaatgcataaatcttgagtatatttctgccacttttcatataggatgtgattttcctttctagagtctcttattattgaaaggtaatcatgaagatgaaaaaagattctgtaatatccacggtttgtatatttaggtagtgagtattccatttttttctctgcattaggagtatttattcaagtgaggaaggagcaggagagaaaagggctgtgtgaagcttccatgttaagggcctcactcttgcagataaactatgtcagctcctctactcc

SEQ ID NO: 709443 - DNA, 3363 bp, Homo sapiens
aaagaaatacaggtgcaatttcagagaaatttatttttgtgagtcaaaagccaatgttgcaatgtgtcttagttattttcagcaattttcacagtctcctggatacctctgtgcaaagtctatatgacctctatgggattctttactttgaaggttctagaacttagctaaaaccctgccattcatctccgcaaacccctgccactgctccaaagtccatccttttattcacagttcactctgaattaggagatgttatagggattctagagaaattgagatgggaaaaattgaggaatttgtttacccattctgctggggctccctttcatagtatgtattctctcatctgtaacatttattgacaataagcttggaagtgtcatgtaaatgaatggaatacctctctatttattggtgttatagaacggcttcacccttagtaaatgcattcatacttttagtgggaaataaagagacttttaaaatatttatggtttcaggatatcatctcattctgtgtattcaaattccaggctatattttctaaactgaaaatgtaccatacaatttttggtataaaattcttccatgccacccaacataaagagaaaactccttgataacatggtttctatcttttcaaagtcatctctcagaatacaacaaatgctcactaaactctatttttgtatttttttatttttattttaattttattttatattttcgagaccgagtctcactctgtcacccaggctggagtgcagtggcacaatcttggctcactgcaacttccatctcctgggctcaagcaattctcctgcctcagcctcccaagtagctgggactacagtcgtgcaccaccacacctggctaatttttgtatttttagtagagaggaggtttcacgatgttggccaggctggtctcgaactcctgacctcaagtgatccagcttcctcggcctcccaaagtgctgagattaaaggcatgagccactgctccaggcttaaactctacttttaacagttcatcatagttgaacctactgtgatgaactagatctactatgatctttcatactcctgtatttggcttattcagcctgaaatatatttctccattttttttgcctaagaagtatatttctgttcatctttctagactcagctcaaatataatttactctgtgacgtctcttctggcccttctaccagatttggactcccatacgcctttttttataaaactcctttaatagtcctctaatatttttgtatgtgtatttgttccatatgtttcaattttcaccctgcataaaacgtcatatggtggtcaaacaggggggtcagaaatcctaatatttcctctatcctaatgtttccagcctattttatgaactacatagaaccctagaagtattctatgagttctgcttatggcactcctcagagctctatttttatcattatacaattaactaatacaaatactggatgctaaaaacaaaaggtgcacattttaaataacaataaacaaataaataaaacattttgaatgcaggtcttatccaaaacagtgttttccaacttgagagttatcatcaaaatatttatttgacaacctcatttcacctcttctagagtcttcttctcatttctgtgtacatccttttcccaaattccaaatcaattacttggagctcttagttcattatttagttactttattactgttattcctaactctactatgtgcctcacaccttctaagtattttatatgcattaatctatttaattggatgaaaacaatatttaaatgttggtgctactattattcacactataaaaataaggaaacagaggacaaaaggggagatattttgtccttataagtctttccagattccctcaaatcatattattataatattactctagtatttgccattattaattacagtaaaatattgtcaatgttttattattatataattctagaatttgttctaatgttgccttatattacacagtgctttatcacttagcaaacacttttacacacttgcttatctaattctcacaatgacatggtaatacaaggaacatcatatccacgtgaaggatgaaggatgaataaactgaggcctggagaggttaagacagagcaaatttgcaaatttgtatcaaagccctttttttttttttttttttgaggtggagtctcgctctgtcactcaagctggagtgcagtggcctgatctcggctcactgcaatctctgcttcttgggttcaagtgattctcctcagcctccccagtagctgggactacaggtgcctgccaaaatacctggctaatttttgtatttttagtagagatggagtttcactatgttggccaggcttgtcccaaactcctgatctcaggtaatccacctgcctcggcctcccaaagtgctggaattacaggcgtgagccaccttgcctaacccaaagtctttattttaggccagaacaccatcttatgtttaaatttggcactacagtaagctagataatggctcccaattattactactctcttgtacctggaaaagtaaatgttaccttatttggaaaaggggactttgcagttatgattaaattaaagatcctgagataaggagattatccttgatttacctggtatgttctaacaactattgcatatatccttataagagggagacagagatttttatatacacaaatgaaaaggtgatgtgaagataaagaggcagacatttaaatattgtggctttgaggattggagttatacacacccacgagccaaaaactgctggcagccccagaagctgaaagaagcaaggaacaaattatcctatagagccttcagagggagtgtggtccaaccaacattttgatttcaaccaatgaaatagattcaaacatcagatctccagaagtataataaaataaatttatgttatttacagcctctaaatgtgtgataattttttacartgccataagaaactaatacaggcatttactgaaattaatacagatctaaactgattagcctcatgatgctaatttaatcagcagagttttatcttagtttgggctaaagtcaaaaggttaaaataaatataacaaactaaaatttctatgaatttaaaataaatctcttattttttgatttcacaagaaacaacattaacaacaggcaacttgttgctattattctgacccaatttccggctgcaccaatattcacccagtcataatgtacatgagatgcatatataattggcacctctcttttacagtgtcttgctggcctttttttttttta

SEQ ID NO: 709444 - DNA, 1322 bp, Homo sapiens
tcagctgcaagagtctgaacctccccaaattgctgctgggggtaacatcactgttgcaaaacctaagatcagtgcttgagatattttgcagactctgcattccaatgcagcagatgacaccacccagaccagtaatctggctcaaccacttctgcaatcccacccaggaacagaagtcagcaagaaagaactcatttcgaccacctatgatttcatctccaacccaatcaatcagcaacctcacttcccaagctcctatctgccaaattatccttaaaaactctgatccccaagttttcagggagactaatttgagtaataataaaattccagtctcccacacagccagtaatatgtgaattactctttctccattgcaattcccctgtcttgataaattggctcttgtctagcaggaggcaaggtgaacctgttgggtgattacatcaayggccatgaaagccctttctataatttccatagatcatcatttcttcttgctttaaaaagcttagtattgtctacagatttgagatctaattgttaacacagtttttagattgtcccttaccattcttgaacagtgcaccattgctcaggcatctgtgatgaaatctgttacacacagatgtataagcataggattctttggtagctctcaatgatgtcctgttaattagttgtctttccctaggtcagtgccacactatcttaattaaaaatattagataataagttataatacctgatacagcaaatccacttgtcttgtgacacttgttcagcaatgtcttgactatccccaggtctttgctctttcatagacattatagaatcaatgtgttaatttcctataaaacctctatttatatgtgaattagaattgtaattactagatactagtttaaatcttttgacattaacattaaactgtttttcacctacaaagatgacaatttcatatggttcttctactgaatagatcacaagggaaagaattaacgtctttctgatatctactcgtgaacatgatgtatctctccatttacttaggtttcttcaatatctttattaaagttgtaactccatgcaggtattcaatatatgttgtaagatttactcctagatatcttgctttttttttttttttttttttttttgctgttgtaaatggtatctttttcttattattatactttcagtttgtgtgtatgtgctacggtttgggcctttgcacctccaaacctcatgtggaaatttggtccccaatgtggcaatgttgagagggaaggcctgctgggaggtgtttgggttctgggggt

SEQ ID NO: 709445 - DNA, 796 bp, Homo sapiens
tgacattctgatagttgaaaaagtggtcttttccaactatcctttccttaattcttaatgagtttgagcattttttgatatgtttattgtccatttatgatgaaatggtctgaattttttttttgagatggagtcttgctctgtcactcagactggagtgcagtggtacaatcttggctyactgcaacctctgccttccaggttcaagcgattgtcctgcctcagcctcctgagtagctgggactacaggcatgcacctggctaatttttgtatttttagtagagacggggttttaccatgttggctaggctggtgttaaacccccgcccttaagtgatccgtccaccttggcctcccaaagtgctgggattacaggcgtgaggcaccatgcctggcgctgtaattttttttatgatagtaaaccttgagacagatctcttttattccacagtaaaggactatctggcttctatttatatatgtatatatttaaagatcaaaatgatattgctgctgaagagattatcttgcctttctttaggacagctccagaaggaaacgtgatagagatgataactccgttgtaggatcggattttgagccttggaccaacaaacggggagaaatccttgcccggtacaccactaccgaaaagctgtctattgtgagtaccaggagaccctctccagagtctactttggagttagtagtaatttctttttgttatgttgcttcaactcctgggctctgtaagtttcacttatttatttatttttctacttctcttaaaagctc

SEQ ID NO: 709446 - DNA, 594 bp, Homo sapiens
tgtgtgccaatggttactggaaggcttaggccatttctctttctgtcgtccccacctcactgggaaccatttcacctatcatttctcttgtttaggatcagcaatccaaactacggagctcttccactcagggtaccactcgcatttgtgggagttaagtaaaataatagaccatcgactgggagatcaaaagtagtattcttaagatggaaagcggggacaaaaggctgtagtgcatgagacactatttcagccttggcccaatcccctgttgccccccgccttaaaattgctatgtctatgtacaatctttaaggagttcatcttactggggcagtttcaagctcagaaatatgctaactggagccttgtaaaccacctaagaatacaccccaaacttagaacccactcactggaacaaaaactttcgggcgcactggtaagaggccgctaaacccagcagcctggcctccttctttgtggctaagaagggagggaaaagaatgtggtygaaactgctacgtcggtaagcacaattaaatctgataagcagggttccatgggtgattgtgcaccctggaaaatggacactaa

SEQ ID NO: 709447 - DNA, 1740 bp, Homo sapiens
aaatactcatgtatctatttacatgaaatttttactctgatcagtgattcactagatgaggaatagtctaaaagcacatagtgacatctctttgtatgtcttggagtttgatggattgaggttcagaatgttgggtgaatgagttgccagttgacataagttggcatccaaaagtgcctggtggcttctctttccagtctcagagcatcatggattgaggttgggtggacaggtcaccagtctacatgggtttgcctccatgcatggagggtttccccgttagacccccaaaccccaggaccatctacatacagcatgcatggccaatctcagctaaccagacaagcaagggatgggcatggagagcgagtcacattctcacccttagctggtccctccaggtcagggcgtaaacatgctggcagggtactgtgggcaggcctgcactgcagccggaagcacagaacttgttctggggacaaatggaaaactccggttcaatcaccggatggggcccgcccagcaccttgctgagctaccccagcaagaagaactgtggaggtttcaaatgtgtgttggcttcatccttggcttaatcatatgactgataagttccagtctgttggaactgaaagcattgtatcatccatcttggattatatcaatggtactgggaaaggaatccactgctggagcagctttggaatcatgaagaatgtgcacattaatcaccatcagttctacaaagcctccctttgacagattgctagggataaaggtaccccacttcaaagaggaactgacatggctctaaactctccactggatgatgaagctaacaccctgggcataagcctttggtgaaatttktcccctcatttttagtccttattaattccctcctaatgtctctggcaaatggagcacttatgacaggtgaagatcagacagtgttgttttcattatttacagagggcctgataaaaacatcttcaaattaacattctgcaaatttataaagaagctgtgaatcatagtgaaggtgtgaggaaggaaggggtaatgtgatacattctccctccatcttgaatgcctttccatagaaggcatatatgcacacattttagaatttttcattatggaattctctattccacataagctttttctaaaactatctggctggaaagactttcttgaatggagtatgtgtgttgggggaggggggcaggggcagttaatgcttcataatttccagggtattgaggccaacagctaccgccactcaataggactctttgctgttacattgtactggtaaagttagatttcttgtctgaaaatttcctgaaaccctttctgatatgaaaaatcctagtaaaagaaaaacagaaattataatctgtcacataacactccatgtttgtgaaaaaagatatttttaatgatgagctttgaaagattaaaagaaatgatctatgtgatatttggtaagttaaatgtgatacctttaaattagaagaaagcctaatgctcccccagaatgaagaaggcagatttgtcattcaataagatgaacatctagctaaacaatacaattatttttcagtactgaaattttattttttttcagactagtacagatcttcaaccatgctcttgatacactagtcaccagttttgctaatttttaaaattaattttagtttaattttttttccagtaaaaactttgtgaagg

SEQ ID NO: 709448 - DNA, 1740 bp, Homo sapiens
aaatactcatgtatctatttacatgaaatttttactctgatcagtgattcactagatgaggaatagtctaaaagcacatagtgacatctctttgtatgtcttggagtttgatggattgaggttcagaatgttgggtgaatgagttgccagttgacataagttggcatccaaaagtgcctggtggcttctctttccagtctcagagcatcatggattgaggttgggtggacaggtcaccagtctacatgggtttgcctccatgcatggagggtttccccgttagacccccaaaccccaggaccatctacatacagcatgcatggccaatctcagctaaccagacaagcaagggatgggcatggagagcgagtcacattctcacccttagctggtccctccaggtcagggcgtaaacatgctggcagggtactgtgggcaggcctgcactgcagccggaagcacagaacttgttctggggacaaatggaaaactccggttcaatcaccggatggggcccgcccagcaccttgctgagctaccccagcaagaagaactgtggaggtttcaaatgtgtgttggcttcatccttggcttaatcatatgactgataagttccagtctgttggaactgaaagcattgtatcatccatcttggattatatcaatggtactgggaaaggaatccactgctggagcagctttggaatcatgaagaatgtgcacattaatcaccatcagttctacaaagcctccctttgacagattgctagggataaaggtaccccacttcaaagaggaactgacatggctctaaactctccactggatgatgaagctaacaccctgggcataagcctttggtgaaatttttcccctcatttttagtccttattaattccctcctaatgtctctggcaaatggagcacttatgacaggtgaagatcagacagtgttgtyttcattatttacagagggcctgataaaaacatcttcaaattaacattctgcaaatttataaagaagctgtgaatcatagtgaaggtgtgaggaaggaaggggtaatgtgatacattctccctccatcttgaatgcctttccatagaaggcatatatgcacacattttagaatttttcattatggaattctctattccacataagctttttctaaaactatctggctggaaagactttcttgaatggagtatgtgtgttgggggaggggggcaggggcagttaatgcttcataatttccagggtattgaggccaacagctaccgccactcaataggactctttgctgttacattgtactggtaaagttagatttcttgtctgaaaatttcctgaaaccctttctgatatgaaaaatcctagtaaaagaaaaacagaaattataatctgtcacataacactccatgtttgtgaaaaaagatatttttaatgatgagctttgaaagattaaaagaaatgatctatgtgatatttggtaagttaaatgtgatacctttaaattagaagaaagcctaatgctcccccagaatgaagaaggcagatttgtcattcaataagatgaacatctagctaaacaatacaattatttttcagtactgaaattttattttttttcagactagtacagatcttcaaccatgctcttgatacactagtcaccagttttgctaatttttaaaattaattttagtttaattttttttccagtaaaaactttgtgaagg

SEQ ID NO: 709449 - DNA, 1740 bp, Homo sapiens
aaatactcatgtatctatttacatgaaatttttactctgatcagtgattcactagatgaggaatagtctaaaagcacatagtgacatctctttgtatgtcttggagtttgatggattgaggttcagaatgttgggtgaatgagttgccagttgacataagttggcatccaaaagtgcctggtggcttctctttccagtctcagagcatcatggattgaggttgggtggacaggtcaccagtctacatgggtttgcctccatgcatggagggtttccccgttagacccccaaaccccaggaccatctacatacagcatgcatggccaatctcagctaaccagacaagcaagggatgggcatggagagcgagtcacattctcacccttagctggtccctccaggtcagggcgtaaacatgctggcagggtactgtgggcaggcctgcactgcagccggaagcacagaacttgttctggggacaaatggaaaactccggttcaatcaccggatggggcccgcccagcaccttgctgagctaccccagcaagaagaactgtggaggtttcaaatgtgtgttggcttcatccttggcttaatcatatgactgataagttccagtctgttggaactgaaagcattgtatcatccatcttggattatatcaatggtactgggaaaggaatccactgctggagcagctttggaatcatgaagaatgtgcacattaatcaccatcagttctacaaagcctccctttgacagattgctagggataaaggtaccccacttcaaagaggaactgacatggctctaaactctccactggatgatgaagctaacaccctgggcataagcctttggtgaaatttttcccctcatttttagtccttattaattccctcctaatgtctctggcaaatggagcacttatgacaggtgaagatcagacagtgttgttttcattatttacagagggcctgataaaaacatcttcaaattaacattctgcaaatttataaagaagctgtgaatcatagtgaaggtgtgaggaaggaaggggtaatgtgatacattctccctccatcttgaatgcctttccatagaaggcatatatgcacacattttagaatttttcattatggaattctctattccacataagctttttctaaaactatctggctggaaagactttcttgaatggagtatgtgtgttgggggaggggggcaggggcagttaatgcttcataatttccagggtattgaggccaacagctaccgccactcaataggactctttgctgttacattgtrctggtaaagttagatttcttgtctgaaaatttcctgaaaccctttctgatatgaaaaatcctagtaaaagaaaaacagaaattataatctgtcacataacactccatgtttgtgaaaaaagatatttttaatgatgagctttgaaagattaaaagaaatgatctatgtgatatttggtaagttaaatgtgatacctttaaattagaagaaagcctaatgctcccccagaatgaagaaggcagatttgtcattcaataagatgaacatctagctaaacaatacaattatttttcagtactgaaattttattttttttcagactagtacagatcttcaaccatgctcttgatacactagtcaccagttttgctaatttttaaaattaattttagtttaattttttttccagtaaaaactttgtgaagg

SEQ ID NO: 709450 - DNA, 868 bp, Homo sapiens
aagacaatgtcaactcacagggttacaatggatttcttcattattcttactggtggaaagtcagcagtattctccacaattaccacatctacatagattgtcacrtatctgtagacgtcagtgtcacaaaagtcagagataaagttgttttcactagggaatcagcaatttatgagacagtggcacaaggcttttctttattttaattttgaggctcatgtgagagaggacgtcccttttgtaaaatctcaggatgcaaaataccttttcttccattctggaaaacatgacgtgaagcttaaaaacatgacatgggctgggcgtggtggctcatgcctgtaatcccagcactttgggaggctgaggcaggtggatcacgaggtcaggagatcgagaccatctggttaacagagtgaaaccctgtctctactaagaatacaaaaaattagccgggcgtggtggcaggcacctgtagtcccagctactcaggaggctgaggcaagagaatggcgtgaacccgggaggcagagcttgcagtgagccgagatagagccactgcactccagcctgggtgacagggcgagactccgccaaaaagcaagcaaacaaacaaacaaacaaacaaacaaaccatgaagcttatacacagggctgggtaggatgtcaattttgctttctcaggcagtttaatttcactggatcaagagcggaagacaatgcaacttctttgtgtgcttttaactgtgtaaaagaagacccactgcagaaaatggtccctggaatttcccttggttaacagaggcaatgcagagggtgtctatgatgacagggcttcccaagcttgcctttaatagggctgatggtcaat

SEQ ID NO: 709451 - DNA, 1014 bp, Homo sapiens
caagccatatgcctgcaatcaattgatcttcaacaaagtcaacaatggagaaaggacactctattcaataaatgcaaactagatatcaaaggaacatacctcaaaataataatagccatattatgaaaaacccacagctgacatcacattgaatgggcaaaatctgaaggcataccccctaagaatttagaacaagacaaggatgtctaccactctcattattcaacatagtactggaagtcctagcccgagtaaccaggaaagagaaagaaataaaaggcatccaaataagaaaataggaagttaaattatctctcttcactgatgatatgattctatacctagaaaaccctaaatattccaccagtactcgtagaccaaatgacttcagtgaagtttcaggatacaaaatcaactcacaacaatcaaawgtttttaactatcttctcatgctttttatttccatcttatcttccgtgaacacacctacatatacacacgctaacacacaagcattcgcaacatctaggcaatttacaagtagcaagaaaacccaaactaattctgaatgtattgctctatgagccatttgcttagaatgtgctgaccactgtgttgaagtaatgggaaaagtcacaggatgcagtaagcacactgaacacattctgatttagagcttggctgtatcaattatttgcacaaagcttttagaatgccaatatttgcaactaagacaactaatgctgagggttagtctgtttgcttttttaacagattatggtgaaagttagatctcttctaatctgtgtgaaatacatattttcttcacgggctactttatattgataatcacagagcctgaactccagcatctttgggggaacccactctgctcttcttgaaatcaataagatagtaaaattgaattttaatatcttccatttctacccttacgattctggcaattacattttttttcttcctggtctatgcaatcactctgcttgctctatt

SEQ ID NO: 709452 - DNA, 1760 bp, Homo sapiens
gccatggtgatcttgaactcctgacctcgtgatctgcccacctcagcctctcaaagtgctgggattacaggcattagccaccgcacccggcagcatccattattttctttttttttccccccaaaagctatcatactcctagaaatagagaggcccttctgggcaggtctgttgtgattaggagagccttcctctgcctcccagaaaagacaccaagcacacactggacctgtgtgattaagcggaactgagaggcctattttataattttaaaacttgttaagtttctttggtcaccattaatctctgccacaatcacatgtatcactcaggccaccactaccaacattacttcttagtttcattcaaaggaatgttgtcaaatatgtggatttctcctaccctcaaatccagataaagcaatgggcattttgatgaatacaaaatgtggaattagttttttagctaaaaaacaattgctcaagatcttcgttggcccggaaggataatttctttctaagtacagtgtgctgggcttctcccctcccaacttagaatgcagatggcagttcaggaacagtttttaataatctaacttcacaatagacagatgtggtgggtattaatataacagaaataaactattataagctactgctcactgtgagctctgtgctgtgctgggtagttctctcctgttatcgcatttgcttaattgcacaactaatgtttactcagtgtttggcacttcttctaaatgcagcttagcatagtacagaggttgtcaaatgtcagtggactttggaattacctagagagaatgtgacaaatgtgtccccacctccagagttgctgattcagctgatggggatgagggttgagaatctgcattcctaacacattctcaggtgatgttgatgctgctggtctggggaccacactttgagatcactgacattgtagttaaaagcagtgactttgctatcagactgatttggtttgagtcctctaactttggatacattttgtaacctcttgccatttcatttcctcatctgtaaaattatacctccaacattagctattttggggattaaatgatatatatgtgtagtgtttagtacagttttttatgtgttagaactcagtaaatgttaactgctactactgcagcaattactacartgctactgttactactaaatagaattagaaaatgactgatttcaaaatcatttttaaattgtcaatgccacctcttctctctacctagagctgagtgccaacatctgttatgacatcataatgagattaataactaagaccctaaggaataatatattggatttttcatattattatgaaggttctccatcacaacttaagaaaaatatgtaaactatgtgtcattttatattttaaaattattattattattagttattggagacaggttctcactctgtcagccagattagagtgcagtggtgtgctcatagctcactgtaaccttgaactcctgggaccaagtgatactctagtccagctaatttttctttttttttgagacagggtctcactctattgcccaggctggagtacagtggtgtgatcatggctcactgcagcctccatctcccaggttcaagtgattctcttacctcagcctcccaagtagctgggactacagttgtttgctaccacacccacctaaattttgtatttttttgtagagacagggttttaccatgttgcccagg

SEQ ID NO: 709453 - DNA, 1742 bp, Homo sapiens
taggcagggcgctgtggctcactcctgtaatcccagcactttgggaggccgaggtgggtggatcacctgaggtcaggagtcggagaccagcctggctaacatggtgaaactccatctctgctaaaaatacaaaaaattagccggacgtggtggcgtacgcctgtaatcccagctattcaggaggcggaggcaggagaatctcttgaatccaggagacggaggttgcagtgagccaagatcagaccactgctctccagcttgggcaacaagagcaaaactccatctaaaaagaaaagaaaaacaaaaaaagaataaagcagaataataatttaaaaatacttaaaatcaaaccaaagtttcccaagtaactagattttaaaatcctatttaatagaaaagaaaacggtgacttttttttttttttcaaagccttctgaggtggacttttgaaatgataaaggtgttttgggttatccttcctcagactctgttttcacccagcatgtctgagagccttgcaggcacagtggtatcaggacacactgctggtcgtggtttgcagatgttttcctggcgtaattcacatcaggatgcagtgtgtgggcagctcctgtttccttaggtgtcttcagaatttttcctctgcagctggagcaggtggttgcagattagactcacaccctgtggaccgcccagtgcctctgcttctgtctcactcagagatgcgtcagaacggtcagactcagagatgcgtctgcaccgtggcaccaagtgatgctgttctgaacccagtgtttcccctctgcctgaagagagattacagctcaaaatcttttaatcctcaagagagaagaggtggcccctgtgaaggaaggagggctgcaggactacctctgtcttctctcttcatctctgatacctcccttcatgcaacttggaatatatgtttattttcaggggccagaaactctttttaaagaggagcaagagggccgggcacggtggctcatgcctgtaatcccagcactttgggaggctgaggtgggtggatcacgaggtcaggagttcaagaccagtctggccaacatggtgaaaccccatctctactaaaaatacaaaaattagctgggtgtggtggcgggtgcctgtaatcccagctactaaggaggctgaggcaggagaatcgtttgaacccgggaggtggaggtcgtagtgagccgagatcatgccattgcattgcattgcactgcagcctgggtaatagggcgagactctgtctcaaaaaaaaaaaaaaaagggaggaagaggaggctcatctgatcatctgcaatgtcaaggatgggctccttcccacctacacagctgagtacatcccagacacctgcctcatgccttccacctactgcctgttcctttgagaccaaagaaaatcagaagagccctctgctgtacgaaggactaggcagtgtctatgtcattatgcaaaatggaccatgcagagcccaagccagagacacatatcaagctttggagaggtgtgtcaggacgcaaaggatgcaaagcttcagctgtgatgcttaagaattaacaagtgtcatatgttctgagacagaaggaaccatgattttagccaaygggataaaatcctgccagaggatagggtcaagagagggttcctatttagcaaatcaaagggaagaattttaatgcttcaattctctggattatagtgatgctatgtg

SEQ ID NO: 709454 - DNA, 1960 bp, Homo sapiens
acagctgttactgcagattgaggagcctcagagggaacagaagataaagatcattatggaatttaggattgcaggacattctttgacatttcataacagccaggggagatcaactgtggtcaggggacaggggcaggaagaaaccatggccaaggcctgtctggcaggacttgaaggggcagagggacccttgcaaatgaccctgcctggaacccacccccagttggcccctgtatagcactgatccagctggggcttttatcccaggataccctcttcagggatgcctgtatttgttgattatctgccatatgcctggtcactgcagaatacaaggaagaaaatagccttcagcagaagctgagacaggagcctagaggatggacagtaaggagtcgaaggctcaggatgaggctttcctgactttctcccctaggggactgatgttctctactggtacagaccttgttttattcatccttatgtccctaacctggaatgggcccagggtgacagttataataagtgtttgtcaagtgagcaagtgtgtggagtgtgcattgtagagagtaaggtctctacaggatcctgctggagaggcagcccactgggctcaccacttctccagaggagggactggtcccttgccagacaaccctgccagctggagcaggcttcctcaggggtgcctggagctgttgaccatggctgttgccctctggcccctcttgggaagagcaacctgtcaggtgttaaagacggtcttcatttctcttctccaagtaaacatgactagtttccatctcaccatcttctggccctcagcagactggttatccagtctggagaggcaacagtagtatccagatgtgatccgaacagacagaacgatggatgcagacggaaaattcaggtttgtgtgcttcggcagtcagtatatgcaagtcgtaatggggacagtggctggcatggcctttagcactgtgggaaggatcagggtgtctgcccatcatttttctctctttgatagacactgtttacgtagacactgttttggtgtaaaaccctacgttgtagctcttgtcaacagtgttatgtttctcctcaactgtcctggaaactccctgaggtggctggcttgtaggcactccatacctgttagctagtattatttatttattgttttattatttgaatggacaatcaattcatgtcatttaatgaacatgggctatgtgccagaaaccaccaggtgccagaatacaacactgaactacagtaggcctgtccctgggccccagagctcccagacacactaggaagacttgttgatttaatgataaaccttgattgagctcatgattaacatcttcaccaccagacatcattgagtgctctctgtgtgttcaactcagaacatacccttcctgccctcagaggctggaatgtgagagtcattaagggagacaccattgtgggagtgagaaaatcctggacttggagggaactgactagggatcacctcccagctctgccatggacccactgtgtgaccatgggcaagttacttgacctctctgagcctcagttatcttatcagtgaaactgggttaataatatatctctcagtggcacaggaggatcacatagggtcaccacactccacaactccaggagatgctgttaacattttagtctatggatcctctggtggcctaagatttaaatgagagcacttttgctatgtgacctgaagttaatgtcaataagttatagctattgttatgtacratgtaagcaggggtcactgcaggccagaaggctgacacaatttggccaggctttgttcttcaaggaagggcagggctctgagaagtgcagaccgtgatgcaggtgaaggccaggaggcagggactcccagggcaggtctggaaggagcgaggctggtgacggaagtggt

SEQ ID NO: 709455 - DNA, 585 bp, Homo sapiens
tttgaggccacatagctagtaagtggcagagtggggactttttgcagatctggctggcatccagtaactattttttttcctctatacttttttttccagtagtcctagcttttccagagctaaactgagtccccttagtattcccttagtaaggccaaggactgagagtgttatgagtattgyggatgtgtggaggggccatgcaactccttcctgggaatcttaagccaagccctgtggcctctgactagctgtcctaggtggcctgacctcaggcaagcccctccatgaccactcagagccagcacctcagctcactgaggtttggggagggggctcaaagaggcagctgcttcctatagagaggtccagcagaggcactatcctggggggcatccttcttgaccccctccatgccatggaggcccattccctgcccagggctttagagtctgagcttctcccagagggaatggagtctttcacagagaggctgtagagccttgtgaggctgagtccaacccacgtgcagggattttgggcagctgcatcccccaaatggtttcccagtggatcagtttccta

SEQ ID NO: 709456 - DNA, 585 bp, Homo sapiens
tttgaggccacatagctagtaagtggcagagtggggactttttgcagatctggctggcatccagtaactattttttttcctctatacttttttttccagtagtcctagcttttccagagctaaactgagtccccttagtattcccttagtaaggccaaggactgagagtgttatgagtattgcggatgtgtggrggggccatgcaactccttcctgggaatcttaagccaagccctgtggcctctgactagctgtcctaggtggcctgacctcaggcaagcccctccatgaccactcagagccagcacctcagctcactgaggtttggggagggggctcaaagaggcagctgcttcctatagagaggtccagcagaggcactatcctggggggcatccttcttgaccccctccatgccatggaggcccattccctgcccagggctttagagtctgagcttctcccagagggaatggagtctttcacagagaggctgtagagccttgtgaggctgagtccaacccacgtgcagggattttgggcagctgcatcccccaaatggtttcccagtggatcagtttccta

SEQ ID NO: 709457 - DNA, 1014 bp, Homo sapiens
aaataataataataaaatgcagygtcatggtgattgcagaacaaaaagtacccatcccaggggatataggcactttaaagtttgcaaaaactactagtggctttagcagcatcagcaatgtggtgaaacagtaaaacatcaataaaagtgagcagggaatggcgaattgatactgaaagggactgtaaattctctacaaggtactgtaacagctcactgccaatttgtatacctcagttacttatatacacaggtccctgctgaaccccttccctttgacagctctcagagaaatgatagcagaagaaatgaggacttactgttgagttgtggagatatattaattgccatgatttaagaagagaatctcatctagaatctataagctagggagtctaaaaaatacatgtattatagttacttttaaaataatgatttctctatatagtatttccagcattattgttgaatttgctgccaagattacttcttaggataaaaatatgtttgttaaataaaagactaacaagcaaaaatatttattagatcacaaagaaaacgaaaagaaatagttattgtaaagtagttatcctcaaaatttatttggtcttagtaagttagccagtgttgttatatttttgactcccagagcgaagaagtaaaacacaaattatatctgaacaggtaaattgaatttcatgtgttacttttattatttgttccattttattgttcaaagtttatgattgttgaaatgggagcaatttataaataacacacacatgtatttgtttctagctgagatttctatgcctaaaatttagatgcttgtcatgacctgatgctgattaagacaatcagttaaaaccatttaaaaactcagaaaagtcaacaatcctagttgaggttacatgaatagtagagttaaaactcaaaaccatcaccgtaatactcttttataccattcctacagccagttaatgggtgttttttcctcatgagtctcactgataa

SEQ ID NO: 709458 - DNA, 1014 bp, Homo sapiens
aaataataataataaaatgcagcgtcatggtgattgcagaacaaaaagtacccatcccaggggatataggcactttaaagtttgcaaaaactactagtggctttagcagcatcagcaatgtggtgaaacagtaaaacatcaataaaagtgagcagggaatggcgaattgatactgaaagggactgtaaatwctctacaaggtactgtaacagctcactgccaatttgtatacctcagttacttatatacacaggtccctgctgaaccccttccctttgacagctctcagagaaatgatagcagaagaaatgaggacttactgttgagttgtggagatatattaattgccatgatttaagaagagaatctcatctagaatctataagctagggagtctaaaaaatacatgtattatagttacttttaaaataatgatttctctatatagtatttccagcattattgttgaatttgctgccaagattacttcttaggataaaaatatgtttgttaaataaaagactaacaagcaaaaatatttattagatcacaaagaaaacgaaaagaaatagttattgtaaagtagttatcctcaaaatttatttggtcttagtaagttagccagtgttgttatatttttgactcccagagcgaagaagtaaaacacaaattatatctgaacaggtaaattgaatttcatgtgttacttttattatttgttccattttattgttcaaagtttatgattgttgaaatgggagcaatttataaataacacacacatgtatttgtttctagctgagatttctatgcctaaaatttagatgcttgtcatgacctgatgctgattaagacaatcagttaaaaccatttaaaaactcagaaaagtcaacaatcctagttgaggttacatgaatagtagagttaaaactcaaaaccatcaccgtaatactcttttataccattcctacagccagttaatgggtgttttttcctcatgagtctcactgataa

SEQ ID NO: 709459 - DNA, 1014 bp, Homo sapiens
aaataataataataaaatgcagcgtcatggtgattgcagaacaaaaagtacccatcccaggggatataggcactttaaagtttgcaaaaactactagtggctttagcagcatcagcaatgtggtgaaacagtaaaacatcaataaaagtgagcagggaatggcgaattgatactgaaagggactgtaaattctctacaaggtactgtaacagctcactgccaatttgtatacctcagttacttatatacacaggtccctgctgaaccccttccctttgacagctctcagagaaatgatagcagaagaaatgaggacttactgttgagttgtggagatatattaattgccatgatttaagaagagaatctcatctagaatctataagctagggagtctaaaaaatacatgtattatagttacttttaaaataatgatttctctatatagtatttccagcattattgttgaatttgctgccaagattacttcttaggataaaaatatgtttgttaaataaaagactaacaagcaaaaatatttattagatcacaaagaaaacgaaaagaaatagttattgtaaagtagttatcctcaaaatttatttggtcttagtaagttagccagtgttgttatatttttgactcccagagcraagaagtaaaacacaaattatatctgaacaggtaaattgaatttcatgtgttacttttattatttgttccattttattgttcaaagtttatgattgttgaaatgggagcaatttataaataacacacacatgtatttgtttctagctgagatttctatgcctaaaatttagatgcttgtcatgacctgatgctgattaagacaatcagttaaaaccatttaaaaactcagaaaagtcaacaatcctagttgaggttacatgaatagtagagttaaaactcaaaaccatcaccgtaatactcttttataccattcctacagccagttaatgggtgttttttcctcatgagtctcactgataa

SEQ ID NO: 709460 - DNA, 1014 bp, Homo sapiens
aaataataataataaaatgcagcgtcatggtgattgcagaacaaaaagtacccatcccaggggatataggcactttaaagtttgcaaaaactactagtggctttagcagcatcagcaatgtggtgaaacagtaaaacatcaataaaagtgagcagggaatggcgaattgatactgaaagggactgtaaattctctacaaggtactgtaacagctcactgccaatttgtatacctcagttacttatatacacaggtccctgctgaaccccttccctttgacagctctcagagaaatgatagcagaagaaatgaggacttactgttgagttgtggagatatattaattgccatgatttaagaagagaatctcatctagaatctataagctagggagtctaaaaaatacatgtattatagttacttttaaaataatgatttctctatatagtatttccagcattattgttgaatttgctgccaagattacttcttaggataaaaatatgtttgttaaataaaagactaacaagcaaaaatatttattagatcacaaagaaaacgaaaagaaatagttattgtaaagtagttatcctcaaaatttatttggtcttagtaagttagccagtgttgttatatttttgactcccagagcgaagaagtaaaacacaaattatatctgaacaggtaaattgaatttcatgtgttacttttattatttgttccattttattgttcaaagtttatgattgttgaaatgggagcaatttataaataacacacacatgtatttgtttctagctgagatttctatgcctaaaatttagatgcttgtcatgacctgatgctgattaagacaatcagttaaaaccatttaaaarctcagaaaagtcaacaatcctagttgaggttacatgaatagtagagttaaaactcaaaaccatcaccgtaatactcttttataccattcctacagccagttaatgggtgttttttcctcatgagtctcactgataa

SEQ ID NO: 709461 - DNA, 1135 bp, Homo sapiens
ttttctttgggataaattctcatgatgtgttgttgctttaaaatagtggactccagtctccagagctgcgtctctgcagaggacagtgggacagaagaatcccagggcatgttaaaaaggaccgggtcttcctaaacccacatgcctatatttctgacccagtaccagccaggggggcaagtttccatcccccacaagtcacaaacctgtaactgacactaggatgcttaaggtcaaaggcctggacgaggcctagacagtgggtctggggtagtgtttttgacatcactcaggttcatgttcacatgttgtccccttaccagcatgtgaccttgggccagccactaaccctactgaaactcctttttttcatgtatgaaatggggctaataatggtaccctcctcattagggtattgtgaggatagagttttgcacctgataaatattgtctcctgccccttcctcccctggaaattcaggtctctccctgcagcctaattttaaggcccatttttctgcttccagcccacccctgcccttctaccttcgacctcctccctctgcctctccctctggtgcactggcaaatgggacagagagcctcggtagggccytcctcttagagtcttgcacgcatccctcagtggtctccctgtggctgcttcctgctgccaccaacagatacagacccctgtcgcacagatcatggtagagacagtggtgagcaggaccagacagctccagggagcagtgagggctggcttagagaacctctgttaaactgagaggccaccatcaggaagctctgatccaagatccaggaatccctgactctagggaaaggcctccaatgagagcctgggccctctctgcctgattctgattgtggatgtgccctcaaactccttctcatcactttgttccatccctctttaccctgcagcagctcccacaccctgccaaacaggatgcacagtccagggcagtgtctgagaaagagcagagatctgtcttcatggaaatattgatgtggctctgctggggagcaatggatttatcaagatcaaagttttcctgggagttattgatgcttaatttggaaatagacacactgttgatccctggtatcttta

SEQ ID NO: 709462 - DNA, 623 bp, Homo sapiens
ttgccctcctactgcaaaggacatttctgcaagcatcctactatgtggccattgaaactggaattaacttgagaggagcaatacaggtacttggatgattattttttcactttgccataagaaccattattaggaataatgtccatgagtgttattcatcctcatggacactcaagaataattctgctgtaaatttattttttgttgcccattaacgatgttttaaaacagtaaccattgacaaggcagtgtgggatagtggaaaatatcttgggctgaacttgggagacagtgtagctctggctctggttctgccttggactgggtctgaaaatccagctgctcagcccttggcttgaaagtggtagacgtcactaattgatcacagcactctttctgaccaagggtaaatgcaaccttggaatcctctctamgtggctgttccagagttctgctaccagacagtcttctttgggtgtgaaaaaaggaatgtgcttgacatacaaggtctagatagcctctaagacagggtcccctctaagatggggtattggtccatggcctgttaggaactgagccacacatcaggaggtaagcagtgggagcaagcattactacctgag

SEQ ID NO: 709463 - DNA, 623 bp, Homo sapiens
ttgccctcctactgcaaaggacatttctgcaagcatcctactatgtggccattgaaactggaattaacttgagaggagcaatacaggtacttggatgattattttttcactttgccataagaaccattattaggaataatgtccatgagtgttattcatcctcatggacactcaagaataattctgctgtaaatttattttttgttgcccattaacgatgttttaaaacagtaaccattgacaaggcagtgtgggatagtggaaaatatcttgggctgaacttgggagacagtgtagctctggctctggttctgccttggactgggtctgaaaatccagctgctcagcccttggcttgaaagtggtagacgtcactaattgatcacagcactctttctgaccaagggtaaatgcaaccttggaatcctctctaagtggctgttccagagttctgctaccagacagtcttctttgrgtgtgaaaaaaggaatgtgcttgacatacaaggtctagatagcctctaagacagggtcccctctaagatggggtattggtccatggcctgttaggaactgagccacacatcaggaggtaagcagtgggagcaagcattactacctgag

SEQ ID NO: 709464 - DNA, 273 bp, Homo sapiens
gagctaattacattcactgattttcctttatgaattttcatggctgaaatagacattgttgaggtcatcaatgattatttggcatgctttaatatttaattttaacttgaaacatttctttatactttcatggttacactcatcttgttttctttgctcctcattgtactctctttctcaatatttctacccaatgactgtatcttatacatagctgttaatttagaaagacctgttcctctgttctgctgacaatcttttctttagatkatc

SEQ ID NO: 709465 - DNA, 949 bp, Homo sapiens
tgcatgccataattttcctacttatgttccattttgtctcttattctgatgaattatgtgcctccataattttttytttttttccattgaaatggagtctcgctctgtcacccaggctgtactgcagtgatgcaatctcggctcactgtaatctctgcctcccagattcaagttattcttttgcctcagcctcccaagtagctgggactacaggcacccgccaccacacccagctaattttttattttttatttttagtagagatggggtttcaccatgttggccaggctggtctcaaactcctgacctcaagtgatccacctgcctcagccttccaaagtgctgggattatgggtgtgagccaccatgccggacccttccatacattctatggatgacataaaacctttttaaagttaattcatagtaatggcctatgtgaaatgtgtaggtaaacactgctccccaaaataacaaaaaaaccgattcttttagaaagaagaaatatatgtgaattactgatatccgttatcaatttttttctatctatacagtgtttgatatacttttttttcctcataatggttagcactattccaactcattccatttcaatagtaactgaagccaatgcatcatcttatctccaattctgcttcttttaagtcactttagtccacttctagtaaatggttggaagtaggcttgaccttacttcatttcccaaaaatatgtgaccttcagttatttttttcctcctaaatttgaattcaaactattttggaggtctccattatggttattttgtttgctattagcgtacagttattataaaataaagacatatcaaactgaccattaattaaaattaatagctaagtttaatttgaaactgtcagaaaaaaaataaatgagttgtttcttcaagaaaagttactattttagctta

SEQ ID NO: 709466 - DNA, 643 bp, Homo sapiens
tccaaccattataggggaggagcgttactaaccatgaatgctgataatataaggtctgacactatttgcctcttcatgtagctgcaacctaaagcttgaatcctagctccttgatcaccccagagaagaggctgatgctaactccaaccaaaaatagtgtcttggcagaaaagggctggagataattttctgccaagtactactgccactatattctggcctctgattacacagatgacttattaattcttccctstttatgtagtgtaaaagttccaaagcccaagtgtctgagtacatctccccaagtctgacatctcgctctgtcagactgtgctctcccttggaatatgatagacaatgggagaacttcactgttctgttgctgatgttgctaccatgaatttccctagtgaacattgctccagcagccagcagccctaatatgtatgctctctagatatttgccattgtttgcagaacatcttgaatatatagaaaagtctttattctcctgccctacccccattactgcatcaccttcaccactatctaattgatagtttggctgggtataaaattctgggttgaaaataattttccctttataataaataaactcattcatcaatcgtgtactcaa

SEQ ID NO: 709467 - DNA, 678 bp, Homo sapiens
atctaatataagcataactactcttgctctcttttgtttccatttgcatggaataccattttccattccttcactttcagtctatgtgtgtccttataggtaaagtgggttctctgtagactgtgtaaagttgggtcttgttatttattaatttactttgtggtgtggatagagaaggaggattaaataatataaatttattttctcacaattctgaagtctagaaatcaaagatcagggtatctttgggattgccttcattctgaagcctctctccttggtttgcagatggctgccttcttgctgtgtcctctcatgatttttcctctgttgaaaacatccctggtgcctggtcttgtttttttatccattgggccacaatggataaaaaattttgatgggtactagtaggtgtatatattttaaaaatttttaaaacatttttgatgggtactattaggtgtatatatttatggggtatatgagctactttggtacaggcatgcaatgcataataatcacatcatggtaaatggggtatccatcacctcaagaatttatccattgtgttacaaataatccaattatactattttagttattttaaaatgtrcaattaaattattatcaactatggctaccttgttgtgctatgaaatactaggtcttattcattct

SEQ ID NO: 709468 - DNA, 912 bp, Homo sapiens
tttaaaatttcctcacatggtatagttgtcttgaaatattatacatgctaattagcatactgaaattatagtagttatttaatatattaacaaataatttgcatattattatataagaaaactttcttttaagactctgatagctgtatttaaattgcttttcaattacaatttaaattaactattttgttgcttttgtaaacctattttatgcatttctaagcattattccgaggactccataggcttcaccagactgccaaagaggtttatggcacagaaaaatttaagaacttttgccttagttyttagaaagacaactaagatctgagggcagtaaatcatttactcctttagaagactgggttatttagcacatttccttttaagggcataggtaaatgacaataagtaatgtttccattttccaaaatgatccaagctttttttttttttaaattactttacattttatttgtattatatgtaacaactcttttgctatcacattgaacaaaacttattagcttttctgccaaagggtgcactaggttataatcatcaatcattggcaactctcaattttggttttgcatgtgtgaaaatctttactctgcctttctcatatattgacctactgtatttgatttgtcactggaaatgaaaagaagcatgctaccctcagaatgttagtgctagaaggcacaaagtcattttgtaagacaagagaggcaatagaggaaggaaggtcatgtagaaagagtgtcatggaatttcctttacggaaatgaaagtgctccgtatttctatcgctgtgcttttcataatggcaaatgattctgctgatggaatggctttctgagtgtataggtgtggctggattaactctgatatgtcatgtaattgcactcc

SEQ ID NO: 709469 - DNA, 1186 bp, Homo sapiens
tgagcctgttgttttggagaattctctgaggtttctcacaactctgtaagccatcaatagttctaagaaggtcctgacccacactgactgtatttcacatttagcaggagaaactttaagtaaaattatttgtgcctctcatctgcactgtgtaggatccataattatttcctaaatctaaatcaatgctattaaaaacatattttttcttattttcagatttcattagaaactccattttgggttcagatattttcccctcactcagtgaaatatgacgtgatttcaaagagctgttttactgggctgtggttttcatatcccttctgggaaggcggggagcaggttgaggtctaacccccgggggctgcttttgcaaccccagcattcacaccgtcatgtgtaattaatggagttgttgagattttcactgccattcttactaaaaggaattaatttcagtcaaagatgaaatgatataggccaactattgcctcagccaagtgacacaaaacacatctcattcccactccaaatggttgtcaataaraaatgacatttaaaaatgctgactaaattaaagtctgtgaaatgctttcttccataatttaaattcatttttgggaagatgtgcaagtctattttgttataatgccataagcatattaacctccgatgaactagagtatctacaatggttgtatcttttcctgaaagcttttccaagagaaacctaacagcttctactgaagcaaatgaaaactcctctgactcaggggaactgaaataaatgggcctattttcttcaagacacgacaggtttgcacttgtaacctgtcttccctggctttttggtgctggcctgaaggtgaaatctgcatgaacagatggggctccttgttgctccttgagagggagatagaatgcctctgagataacactaataaatgcatcatttcaaagtgcccctttccttacagagaaacatgagactaaaatcctgatatcttagacaaaatagaaggctttcttgagtaaaaacacctttagctttcccctaaaagaaagagatgcagggacccaaggagaggtgggtgagagagaaggtgtggggagtttgtgcacatcacgcgtatgtgtatcatgagcagattttccttggtgcaagctgtgtgaccttgagaaa

SEQ ID NO: 709470 - DNA, 1476 bp, Homo sapiens
tttttgttattttgtgtgtgtgtgtctgtgtgtgtgtgtgtgttttttttttttttttttttttttgagatggagttttgctcttgttgcccaggctggagtgcaatggcatgatctcggcttgctgcaacctccgcctcccggttcaagtgattctcctgcctcagcctcccaagtagctgggattacagctgcccgccaccacgcctggctaattttgtatttttagtagagatggggtttctccatgttggtcaggctggtcttgaactcccgacctcaggtgatccacctgcctagctctcctaaaatgctgggattacacgcgtgagccactgcgcccggccagaagtattttttgtgtaaggttgcaatggccattgtgcaaggttgtggtttttgtggagttttttgtgatagtcttgttatcatacaagtgtgagaatcctctcttacatagccttgcctagctctatgtgtcagggctttttaaaaaatataaaagtgactccattttgattctgacaactttcacagtacacatgcacagaaaaagtattgatgatcttggtgatcttctgaatctccaaggatacctaccttaccatgttccagacaatctactaagggctttgtgctcatattacccctttcttcctctcaagaactctataaagcaggtacttctattatccccattttatagatgaggacatggatgcacaaagaggtaacatgacttacttaagatctcagccagtaagtgacagagccaggacacaaacctaggcgatctgatagtaaggctgtacatttcccctaatgctatgatgcctcccacattttgaggactagaccagtgattcctaaccattcttttttcattggtccctctgaaaattgggtgaaatcaacaaatcctctccccagaaaaatgcccatctgttcacaagcacacagaacatatttaatttcaaggagcttggggactccctgaagctcatccctgaagcccatggagcccaggttaagagcttctattgtgtaggctagcacgctctcgggaagcaatttggcctagaccccacccaactcatcataccccttgcttcccctgggagagctcaccccctgtgctttaggctactctcayagctgaagttcagaatgctctagggctttgtaacctggctttgtaacctgacacttgtgacctcatatttgtcccaacatactatgtccatgccatctcctgctgcaccaggatgaggtctctactgggctagcccagccctggtccagagaagataagctcaaagattgttcacaaagagagcagggcatagtgcttcaactccagaaacagggagggaaatcaagttccctggcagagcaaataaaaactggtgatgcccaaaagccaagacttggaagcaacctaagtgtccatcaacaggcaaatggataaagaaaatg

SEQ ID NO: 709471 - DNA, 893 bp, Homo sapiens
tctggacttggagacgcatgctgctacttctgggtttctctttagttgacaaagtaataagagctgttacaataaacttctttgttatttcatttaaaatgttgcctttttttgccaggcaaaaaaaaaatttagtataatcatgcatgcatgcctctttatgtatggcaagctacttacttcttttttctagagatcatagggtccagaaaacctttcgatgggttaaatagggtcatttaaaagagaaacttaagtctacattggatggttctggaggagtttccccttccctggagctgctcaccagttaatttaggaataaaatagtctcccaacctagcaaatcccaccaccctacccaggggttttcacaaaattatcttgtyttaatcatgttttagcatggaaaaatgacacatatctcaaagtatacattttgaggtttttgatatgtatatggctaatttaggaaggaatattttaccacactcctggtttaggagataactccagtcacagatgtcacactctggtgacaagtgtgtgccagctcaccactgccaccatctgcctagggcctttcctcttcattcttcaagccaaaagcacagctgatttgttgggtaatgtttcttgatagctctctagccaaaaatatatgtggttcagaagtgttgttactatagctctactcagctgggtctcgtttctggaaaccatatttagttgtcaaacagtataatgtgacagaaagattttgatgacttaaaccaataaatttcaaagttttcaatagtaaggtttcatttaagtgataagggcaatgcttaagttatgatggcgagaaaaacattgctcaattgactgtattttgttcttctataatctta

SEQ ID NO: 709472 - DNA, 677 bp, Homo sapiens
ttgccaatgaacaaagcatgacaaaaaagtatttttatcaagcaaagtgtagaatgaaaagtgtaaataaactgacaataagaaaatcctgttatggaaagtgatatatttagggcagaaagcaagaaaaggcaagaccaagattcccctaggggaattccaatgctgaaaacccyggagcatccagcgggcagccaataccaaatgctgaaaagctggagtagctgagtatcaaccagtggggttccccacaccaaatgtcagaaatcttcaagtatctgggggctggccaatgctgaaaaccccaaaacatcagtggggtggccaacaggaaacccaaaggcctggttagggccacagaacaatgtgactctggtgtcccagagtcaacacaacaggggacttctcataaccaagtgtcttgctttacacaattgcccaaatacagttaacagaaagtcaaagcaaaaacaaaaaaccaacaaaaactctgcagacaaaatgtacattttagaactgaaaataaaatggctggttgagcaataagatgaagtcagaagagaaaggaccagggaaagcaatgacaagggtatctttgaattttttgttattagagaagacttttgcaaaaatttcttggtatgacatttatacatggcattcaggacatgttaccc

SEQ ID NO: 709473 - DNA, 677 bp, Homo sapiens
ttgccaatgaacaaagcatgacaaaaaagtatttttatcaagcaaagtgtagaatgaaaagtgtaaataaactgacaataagaaaatcctgttatggaaagtgatatatttagggcagaaagcaagaaaaggcaagaccaagattcccctaggggaattccaatgctgaaaaccccggagcatccagcgggcagccaataccaaatgctgaaaagctggagtagctgagtatcaaccagtggggttccccacaccaaatgtcagaaatcttcaagtatctgggggctggccaatgctgaaaaccccaraacatcagtggggtggccaacaggaaacccaaaggcctggttagggccacagaacaatgtgactctggtgtcccagagtcaacacaacaggggacttctcataaccaagtgtcttgctttacacaattgcccaaatacagttaacagaaagtcaaagcaaaaacaaaaaaccaacaaaaactctgcagacaaaatgtacattttagaactgaaaataaaatggctggttgagcaataagatgaagtcagaagagaaaggaccagggaaagcaatgacaagggtatctttgaattttttgttattagagaagacttttgcaaaaatttcttggtatgacatttatacatggcattcaggacatgttaccc

SEQ ID NO: 709474 - DNA, 625 bp, Homo sapiens
tagaagagtaaatgagaaagatattatattagtctgttttcaccctgctaataacaacatacccaagactgggtaatttataaaggaaagaggtttaattaactcacagttctacatggctggggaggcctcatagtcatggcggaaggtgaatgaggagcaaagtcacgtcttgcatagtggtaggcaagaggtgtgtgcaggagaactcccctttataaagccatcagatctcctgagacttattcctatcataagaccagcacaagaaagacccgcccccatgatttaattaccttccactgggtccctcccatgacatgggaattatgggagctacaatttaagaggagatttgggtggggacacagccaaaagatatcagatatttttcctcccctacagacatgtatttagagagggagaggttgttctttgtatcttattttgtcataatgtgacatgtcaataaaatattgtgattataatkgcatgtgtgtttatttatgttaagaaattctaaataatctctaaaaaatcacattcctgagagtctttcataataactataaggtttttttaaaaagcatttttctctctctctttacataatcaaattgaaggt

SEQ ID NO: 709475 - DNA, 931 bp, Homo sapiens
ttttcctccatgaaacttctctgattactttaaccctatgaagttatagcactgatcatttgagctattagcttggcacaaggacatactttggccctgtgacatactttacactgctatttaagtttccatgtttgtcatcttgagtatctagacccaccagttatatttctttgtctcttctaaagtacctggcacccacgagtatacagtaaccattctcyatacagagcatatgttacagacactctaaaactgaattaacagctgggcacagtggctcatgcctgtaatcccagcactttgggaggccaaggcaggcagatcccctgaggtcaggagttcgagaccagcctgaccaacatggcgaaacaccatctctactaaaaataaaaaaattagctgggcatgttggtgggtgcctgtaatcccaactacttgggaggctgaggcaggagaatcgcttgaacccaggaggcggaggttgcagtgagccgagatcatgctattgcactccagcctgggcaacagagtgagatgctgtctcaaaaaaaaaaaaaaaatgtgcagatgagtttcttaatcttgtggaagtgcatgatactcagatcagatgccctttcacagatgataaggacagactgtaccaacgtactgggggtctaaaatgaggttagagtgaaatactgctaccttgccacctactttactcagcataaaaatgcatttaaatccctcaattcttctctctggaaaaggtatacatctgtgagcacctcctaagagaaaaacgcaaacttcagaacatgaaatcttcccagttagacttgttgtgcttatttaattgaatggcattttcactggaaaattttaatcaattcatgtgtctcctttaaatcacaagactgaaaggacccagggaatccagtag

SEQ ID NO: 709476 - DNA, 1481 bp, Homo sapiens
cctgagactgggtaacttataaagaaaagaagtttaattggctcacagttccacaggctgtacaggaaacattatagcttcttgggatctaaacattctaaacctgtatcagtttcccctcaggaaactttcaatcatggtagaaggtgarggagaagcagacacatcttacatagtcagagaaggaggaagagagagaaagcagagatgccacacacttttaaacagcctgatctcaggagcattcactcactatcacgaaatcagcaccaagtgggaaatccacccccatgatccagtcacctcccaccaatccccactggggactacaattgacatgaagattggtgtgaggacacaaattcaaaccatatcagttccctttcacctctaatcgtgttccttgtctgtagctctgttaggtctttaccacttgagattgtgtgcatcttttcacagtttatctttcccaaccagatggtaaggtccatgagaagagaaatcatgtcataacctaaatttcttgttgtaaacaacacccagcatggggctctgtgtgctcaaaaactcctcactcctacagagtgcatttcaatttacagagtgtcttcacagatttgtctcattgttgatttctgaagtggaagaccaatatttctgactttatgatatacgaatgcttggatgagctgcaaaaggttgagcaaagcaaatgtttccattccatctagttcagccacatagacataacctttttcgttctctctaaaataaactcaactgagtaatactacatttttcttttattactggtggcattttatttaaatgtttgcatccatattcctaagtgagatgatatttcctttttttgtgctatattttctatgttttgtatcagagttatcttagttagaaagtaataactccaagatggcagagtcattcacaggagccccaatctctgagtcttttcttgaaggacaactgccaggagagctgcctggctcaaattggattgtgacatgagtgagaaatggagttttattatgataagtcatattatggtaagtttgtcttgttatagtagctagcattgcttttcctgactcatagattcttgtcatctcaggtcctgccatcatcctaggtgacttctgtgtccacatcaatgacctttccaaaaccttagccattcctcttaacctcattaacatttgtaccttcatttcctctgctgccatttagtcacagccctagagcttgtcgtcccctagagcttcccaatcacatctattcttcaccctcatgtggttctcctatctacttttctgttagacctttcctgccctcaattccttcccatccatcttattctcaatggccatgagctcacttattcttgggctaatctatcacttccccttaactctcattaaacgaccttctctatttcacaaagaagatgtgatcttcaggca

SEQ ID NO: 709477 - DNA, 593 bp, Homo sapiens
tccttcagtatcttagcgtgtttggtacagaacagaatgagttaacaacagtagcctgtctatgcctcctttgttcaagtgactgcaactaactgcaaattttagaggtccatgttgaaactccaataatctaaaataatttaaaatgaataatacataatatttatgaaaaaataaaatgcattttatgccagatatatattttaatgcatgtcggctacatgctcaagactgtagggcactcaagaagatacactatgatkgcaagcacattactctgcctgtgtcaaggttccccctgatgatcagatatattacagatgcatcagtgatgtattgtaaatcaatatcttcagattgtccatggcaattcaactgatttgagtttctggcaaaaaatgacttgactaacatattggtattctggtttcatgaaatgttaatggattttttttttaagaaaatgaatttcttggagggaattgagtaacttgacatttcagcttttttaacatattagtgtacaatatgacagttttcttgatgaatatcaaagagaacagtgctgtatactgggttttcccaatatattt

SEQ ID NO: 709478 - DNA, 695 bp, Homo sapiens
aattgagatgagtaatctttgtttgtttgtttttggtctgtttttcaactatttttcttcttataacattggaagagcacaaatcccaaaacggtatttttttgaacgttattgtgttgtccaaggyagagttatcttaagtgaaaaatctctgaagcagtaaagaaaatatactgaaagtgcctcaatgatcagaatgttttcttcttgagaaagttatatagtacttttaaaagtacaggtcagagtatgtctttgcactcaattttgatttttatataaaatcctagatgtttctaccacagctggatctctaaggaagtagttaagaaaagaaaaatgtaagcgcagataacatatagttctttttagtcccataggaagccatagtgtcatgttactgaataaaatattttgaggttcacacaattcacatataaatctgtcttaaatataattaatatatttaatatttttcaaaataaacatgacggtattaggtttgccattaagtaatggcaaaacagcaattacttttgcaccaacctaatactttctgatgataaattcagacaataaaaaaggtaaaagattatttaaaatccatttgtatctgtaagtatgtataattattattttcatataaaaacttcaggatttttttctaccatttttgatcagttttactttagaaa

SEQ ID NO: 709479 - DNA, 695 bp, Homo sapiens
aattgagatgagtaatctttgtttgtttgtttttggtctgtttttcaactatttttcttcttataacattggaagagcacaaatcccaaaacggtatttttttgaacgttattgtgttgtccaaggcagagttatcttaagtgaaaaatctctgaagcagtaaagaaaatatactgaaagtgcctcaatgatcagaatgttttcttcttgagaaagttatatagtacttttaaaagtacaggtcagagtatgtctttgcactcaattttgatttttatataaaatcctagatgtttctaccacagctggatctctaaggaagtagttaagaaaagaaaaatgtaagcgcagataacatatagttctttttagtcccataggaagccatagtgtcatgttactgaataaaatattttgaggttcacacaattcacatataaatctgtcttaaatataattaatatatttaatatttttcaaaataaacatgacgrtattaggtttgccattaagtaatggcaaaacagcaattacttttgcaccaacctaatactttctgatgataaattcagacaataaaaaaggtaaaagattatttaaaatccatttgtatctgtaagtatgtataattattattttcatataaaaacttcaggatttttttctaccatttttgatcagttttactttagaaa

SEQ ID NO: 709480 - DNA, 695 bp, Homo sapiens
aattgagatgagtaatctttgtttgtttgtttttggtctgtttttcaactatttttcttcttataacattggaagagcacaaatcccaaaacggtatttttttgaacgttattgtgttgtccaaggcagagttatcttaagtgaaaaatctctgaagcagtaaagaaaatatactgaaagtgcctcaatgatcagaatgttttcttcttgagaaagttatatagtacttttaaaagtacaggtcagagtatgtctttgcactcaattttgatttttatataaaatcctagatgtttctaccacagctggatctctaaggaagtagttaagaaaagaaaaatgtaagcgcagataacatatagttctttttagtcccataggaagccatagtgtcatgttactgaataaaatattttgaggttcacacaattcacatataaatctgtcttaaatataattaatatatttaatatttttcaaaataaacatgacggtattaggtttgccattaagtaatggcaaaacagcaattacttttgcaccaacctaatactttctgatgataaattcagacaataaaaaaggtaaaagattatttaaaatccatttgtatctgtaagtatrtataattattattttcatataaaaacttcaggatttttttctaccatttttgatcagttttactttagaaa

SEQ ID NO: 709481 - DNA, 1189 bp, Homo sapiens
cgccaaagaagtaatcgaatttggtctgttcatctatgcaggagaaaagtaaggataaatactgatattaaaaagtctgcaaaaatcattttcttttaaaaattatttgttctttctctcagggagaaatgctgtagatttctttccaatgtgcctaaacatttttccccttagcttcaaatactgcattcctaagtacatccacaagttcaggtagagcaaatcttagatgtgtataaaaagttgaatgattttaattttcaaataataccttcttttatggcacaatggctgtgacaagattagccagaatcacagcactcattttatgaagaaaaatatgaagtcagtgacagtcattttatttatgcrtctgtctgcacattcacgtctaaatccttctggcatttgaatatacagcttccaaattcaggatcttgtcgggaggcatgagtcattcagaatccagcagaaatgacaagcgctggaaaatctttttgtgggtccttaatttcagtcttttatagagttagcctttttataagctgatgtcactgtggaaccaagcaaacaccagtaaacaggcaaacagcttcttggctctctaacatgcaaaggctggtctggtctaagattagacatatggaggccggctccaaattaaatcagaatagaatgatggaatcatttagtttgtgatgtaaggagcccttagagatggcctacttgagcattgacactgtgcagacatgttgtggagtactatggacaaacttatggagtggtaggactgcaatctcacacacacatattttaatcaaagcaatgtcctctgatctgatctaatttaaatacatttctagattttcatctgatgaataattcagaaatctgcaaaccaagtccagcagcttatggaatccaggttctagattcatcttatagattatgcaacagttagaaaaagaataaatggcatgtgtaggatcacaggttatttcccctcagccttctcttagagaagaaaaaatggttaacaatgtagtctgtagtatttatgatagcgtaagttaactttaaatgtcagttctttctcttgttaagttctttatcagtttcgtgttcatgtgatttcatgctttctatttattaataataatttagtgcatatgtttctcttttatttaag

SEQ ID NO: 709482 - DNA, 1087 bp, Homo sapiens
aaaaaaaaagcagaaaactaaagtttcttttctctcttctctccatatacacacatatatatwttttttcctactgccttatctgccttatcctgccgtttagattcaaattgctccctgcctcctttctaagtgattcccctcaaaaacctggaaaattagttgacgggttttttttcttttttttcttttttctttttccttttttttttttttttgcctctgatctcctagaaattcttttagcaagatttccctcaaactacaagattcaagtgattgtcactatataattagtaataatagaactattaataatgatgatattaataacaagtaatactgctagagctcttccgatattccagggtatgctctaagatctttgtacattttagcctatttaaccctcattttggatatcaggaaactgaagcgtagagaaattaagtaactcgtcaaaggtcacacgacttgaaagtgacagctgagattcatgctcaagctaattccaaggtctacacttttaaccactatgtaattttgcctcttcacatagaccatgagaaaaatgttagtggaaacagaattccatatccagaaatagactatgagaaaaatgttagtgaaaacagaattccatgtccagaaatatactttgaatccaaatggcagggcaaggtagtagggtaatacggggagaaaaaggaaaaattttaacttttcatccctatgaaatgcgactgagggtcaggtcaataggctgggctctatctctgatatctcaatgctctaaatattgcttttaccaaatcatcccagatgaagtgcaacatgagaaaaagtgatgctgaatccaagttaaaacagtcatgatgggagagggtatggattcgccagaactagagtcaaatcctagtctaagacttaatacccacttgaagattgggggacaagaagtgtatgcccaatttcatttgaggaaataaatgtctgttcctaaaatcaagctagtaaattacaaatggattctatgggtttttttgttttgttttttgtttttgcagttgcaagatttaatagagtg

SEQ ID NO: 709483 - DNA, 1087 bp, Homo sapiens
aaaaaaaaagcagaaaactaaagtttcttttctctcttctctccatatacacacatatatattttttttcctactgccttatctgccttatcctgccgtttagattcaaattgctccctgcctcctttctaagtgattcccctcaaaaacctggaaaattagttgacgggttttttttcttttttttcttttttctttttccttttttttttttttttgcctctgatctcctaraaattcttttagcaagatttccctcaaactacaagattcaagtgattgtcactatataattagtaataatagaactattaataatgatgatattaataacaagtaatactgctagagctcttccgatattccagggtatgctctaagatctttgtacattttagcctatttaaccctcattttggatatcaggaaactgaagcgtagagaaattaagtaactcgtcaaaggtcacacgacttgaaagtgacagctgagattcatgctcaagctaattccaaggtctacacttttaaccactatgtaattttgcctcttcacatagaccatgagaaaaatgttagtggaaacagaattccatatccagaaatagactatgagaaaaatgttagtgaaaacagaattccatgtccagaaatatactttgaatccaaatggcagggcaaggtagtagggtaatacggggagaaaaaggaaaaattttaacttttcatccctatgaaatgcgactgagggtcaggtcaataggctgggctctatctctgatatctcaatgctctaaatattgcttttaccaaatcatcccagatgaagtgcaacatgagaaaaagtgatgctgaatccaagttaaaacagtcatgatgggagagggtatggattcgccagaactagagtcaaatcctagtctaagacttaatacccacttgaagattgggggacaagaagtgtatgcccaatttcatttgaggaaataaatgtctgttcctaaaatcaagctagtaaattacaaatggattctatgggtttttttgttttgttttttgtttttgcagttgcaagatttaatagagtg

SEQ ID NO: 709484 - DNA, 987 bp, Homo sapiens
acatcaggatttataaagttccttggcttcctgtaggtggattctcaaagtagggagggtgtcccagactgcaaggtatgagactattctccagacacaagacttcccctgcttatgccagaaatttcagcatgagcaatttgctagtttaggaacagcacaactttaaggttttttaaatacaaattactccatgccccctcaaatgcccgctcctcaagatgcttgaagttctattgttaataatttttacctgtgaattagcaaagctctcaccaagctccctttttaaaatgcaagcacatcttaggaagcctcaaatccaagrcccactgatatctcctacctcacagggaaagcagtagtggggttcttgggggttggggagagggtgcacaccctggaatagggggaaagcacaagaaaaagaagacaaggacattagacagacttgaccactgtcacaaagtgccaagggccagctctagtggtatattcctttgaagccatccaatgtccatctgaatcacacacgaccccatccaacacaggcacaaatctatctttgggtctggaggagggtgacctcttatttatcctccagaccagaacacttctgagtaaaatggggtgctgtgaataattaaactgggataataagtataaatggggactgtcctgtcctgggaaaacctaaaagtaggaccctctctgagaccattataggcaggaactgaatccttaccactttggttttttgtttttttcctgtttttgttttgttttgttttgtttttcagtgttacccgaggcttctctgaagagctagttttcccagctgaagagacataacacctcccaggcctggaatctatgacatcaaagaccaatggcctaaacctgaagactgggcagttctcatctgcttcctgtaggagaactcaaggaaaaacagtgagctgagaagcacagggaacccatttgtcc

SEQ ID NO: 709485 - DNA, 597 bp, Homo sapiens
ggattctctgttactgaaaatgtaagatatatgagtctatttttctgctttaatggrtacaatagggaacacataagtgagtcattctttgctgattgaggtgatggaagttccccagggcatgatctgggagaaaattatctctgctctattgcagaggcgtcatggccagcgcatcagctctgacgcagctctgagctctcaggcaagttagacaggcatgcagagcctcagttttctcatctgtaaagagaggttaaatgatattctcaaaatcatacagctcattagtagaaaactaagggtcaggatcttaatttgtggagttgcagtgggaattacaatgagacaatgcctgttgtgtgctttgcagggagcatgacattcaataaaccctcaatcaatgctagccactattacaacatgaaaaaaaaaaaaaggtctcggaatttaggattagtctggatgggctccagacataaatctacaatctgattttactctctcttttttaaaagtaaatttcttaaattagtatgctggactatcatttgtctgtttttcacagaaaggggcagagtggaatggtttagagca

SEQ ID NO: 709486 - DNA, 1171 bp, Homo sapiens
agagtttgttttcaagtgacacatgacggctggacaaacatttatgaaacccccgcagagtgtgcatctagcacctgcttgtaaatgttctgttaacagcctggacccaactttctgggggctcgtggagctggcagggagtgaggaggacgaaggctgcagccctcaccacaacccaacttactggtaagaagactggtggttcctgaagagtgccagtcccatccccaagagggtgagcgcaatcagcttcgccatggtcggggatagacaaagggatcgatgggcgcagacaccgacgggctaggaggctctgcctgcctgcagccgcagccctgctggggcagcgccgattggcccgccccgcccctccccgccgggtcsgcagctagctgggccgaccaggtgcacagaaggcgtggcttgcggtcagcccccaccgcaggagctcagcactttcagccaaaagtcccattttgctccttccaactgtaaagagagaagacagagaataggtgcctagtccagtcggggaggggaaatcaaacaagctgaagtaaattgccatgggaaaggacagtcaagctttggtgagcactcactttgtgccatcccggtccttgcgtctcagagagattcagtagcttgatcatggtgacagccaaaaaggtgcggaagggagggctgtagtaggaacccctaagatctaactgttctcaccaggctactactctgtgtcaccttccaacatctggatttcaagcatttttctctcaacaccactctgactttagagttcactcaagtacatcccccacacagctcattcatttcctcatgcagctggcatttattgagtacctactatgtgccaggcgctgttctagatgctacagaacaggacaaaacgtcttcctcaagcttacgttcattccaatggggggagtcaattgagaaatcagcaaaacatgtcactgtggcatatataatgctctaggtgatgcatgtgtgtgttatggatatgcacatatgttatggagaaaacacataaagcaagaaaggggataaggaataccctctgctgaagaatagcagtcagagaagttctcactgataatggggcatttgagtaaagacccaaaggaggtgcctctgtacaaccatgtctctc

SEQ ID NO: 709487 - DNA, 1196 bp, Homo sapiens
ttttttttatcttaagggagatccttcatctcaggtttgttagacaaaaatacttaagctttgatttcatgtacaaaacatgagattcaaccaaaattaaagggtgtcagtaattgtgacaaaaagtcttatctaaaattttaaaaataattcaacttgaaaatagagatacgaaaaagatcctaaacaattctccaataatcctatgtatcatatttcatttccttaagacagacattgtggttgggcttttaaaggaaagttttgtctatcactcttaggggtacatatctgaggcaaggattgcttcctagtttagggtaacaattctggttctaggcttaggttggacttttgtttctttttacatttcttgtgttctttttaagaagctgtgactaatacattaataaaaaaagaaataatcatatttttaactgaaagacagcaatactggaagtagaaataactgtatgtcctaatttacccactaggccaattactgggtttgaatttgaatttcagtttctcaaatcaccaaatgtggattcacacattttaatttttttcaaattgtactttctcaatgaggcctactctsatctctgactttagtagtaggacctgctcatcctgctgcatatagtaatcctgatcccctttactctgctgagccttttttcccataaaatttgccatcttcaaagttactatgtaatttacttatttcttatgcttattgttcattgtttgtccccctttcttaagatcagggatctctgtatattttttctgatatatcctaaacataagtacaatgtctgacacattacaggtactcaataaatttttgtgaataaatctctgagtatgtgtgcctagaatttatagctatatataaattcactaaagatttttaaattgttaaccttaatgccatagaaaatgcagttgtcttataatgttgtttttaatgtagaaaattcaatggattatgctattgttttagaagagatattttaaaataacacaaatgatatcttgaaaataagacaattttcaacaccatcgtatatgttagaacttacaggcaaaaactcattttattttgaggcgacagttatttaaatcctttaatcttagcttcatgttggacagtgtgaaagaagatggtaccatatacaactctctctttg

SEQ ID NO: 709488 - DNA, 889 bp, Homo sapiens
caatattatgaatgtatttactactactaacctataactttaaaaagactaagatggcaaatgttatgtaatgtgtatttttccacaattaaaaaaaatgaaaaaacaaaaaaattagtaaagctcatataaaatatatacctacctataagccttcagtagattgtaactcttgctttaaaacttgtgcatttttttcttgcttcctctctattttgtaagtctaatggctctagttaaatattcaccttcttaaataataagattaattgtagagcatattataacgggtttaacatgtttaaattcatctcatatccttcagtgagtcatgagaaaagttagtaaaagataatgaacatgcatttcaaataattaaataagatactctatttttctcctctcaccatccccacactctcatcctcattttggactctttttccattaggcttccactttgtgtcctttatgtagtwaggagttaaagatggctgagaaggcagtcacatctataattcaaggcatgtcctgtatcattcttttagtttttaaaaaaatgctgaatttttattttaggattttttatttattgggtaacaaacttaaaagatattattcttttggaattgaattcagaggaagattaagtcaaacctagaaaattgctgtttcagcctagtacttaggggattaaaaacaaacaaacaaaatctccaatactcacttatttgagcagcttcctgctatgagcatgcctagcttcctacttctacatctctctttactacaatcttgctatgtgtacggagtcatggtaactatgatttttgctctctagcatactcttctttttcctttttatgataacaaaatgtatatttggaaa

SEQ ID NO: 709489 - DNA, 1422 bp, Homo sapiens
tggggtctcactgtgttgcccaggctggtctcaaacttccaggctcaagcaatcatcctgcctctgcctccctaattgctgggattgcaggcatgtgccaccatgcccagctgtttatgaaacagagaagactaactagaggatgaaatcatgttaggaaacaataaggactttaaaagcccagtagtaaaaaataaacaaacaaaaaactatattaatatcccctagatatttggtgcaaagaagtaattggataaaattactgyttaaataatatttatttggttagattgttcaaaattttaaatttgcttttgtgtttgtttaattagttaatttgtcctaataggaaacatgaaatctatggatcagaaaacagaccatttacttacagagcatcttagcagggcttcagtcaatttccccaagttttgcacaatgaggacctgatgacatttgtgcatacggcatggtttgcatcacaaggaagaaaccccaaaattctgagacttggagcttctataataaggctgacatgtcatactttcttcccttcagagagcaagagagagaaagagagattggcttttactccataatgtaaacaagtaaatcctttccaggaaggaagagggcactgccctggaagaaagtaactgtctttggcaggggtcgggggaaagtatgtctgggttatattacctttacaatgtaaacaaatggctttgggagatatcttagtttgttcagactactgtaacaaaatactttagactgggtaatttatcaacaacagaaattgattatagttctagagcctggaagtccaagatcaaggcaccagcagatttggtgtctggtgtgggcttgctctctctttcacagatgccaccttctcgttgtgtcctcacactgtggaaagaacaagcaaggtcctttggtcctcttttataaggtcactaatctcattcatgagatctccatattcatgacctaattacctcctaaacaacccacctcttaatactattgcattagggagtaggtttcaacatatgaatttgggggaaggggtggaacaatcacatgatagcaggagatgtcttcaaatttttccagagccgttcattatctttaaattccgaggcagtttacaattcagtcatcctttaacccaggttgtcagcaatctgttcagaaagcccagactgtgtagaaatgtaaaaatattaatagagaattattttctgaataaatactggttataaggaagactcagattaggaatctagctagaaagatgcttagcattttagattctaggaaatgatccagattcagatcatcccattgaaactaaaaagagtaaaatggatataaagcatattttatgtaaaactggccaatactttgtgattgaat

SEQ ID NO: 709490 - DNA, 644 bp, Homo sapiens
tagactgttttactcacagagttgcttatggcacatttttatcttatttacacctatttgactgaaaaataattgtgcaccttttatttaatccctatagttaagaaagatttcctttatataacatttcatttcttgtcttttttctctttttggccgtgtttttgattcataagcaatgataaggtaataggaatatcgaaggattttattctggataagattaagatttaaggtgcttttagaatattttatttggcatttgcttcatttgttaaaaaaccctgccttttctttatcacaaaatctataattctatgaagtatttgttctattgggtatttccctgtgtaactatttgccatctagtggacaatctaaatgctgctcagttttacaamataaagtttccaatttgatcttttcacaatatcttgtagggagaaaactttttttccaagttttcaagttttaagctattttagtacacagggatttataaatcagttctgatttatatataaaagaattgttatcttgaatgaacttgtatcctctcccatatctactacatttcttagcacctagtaggcacgtattaaaattaaatatttgttgaatggaatatttgttgaatgaatgaa

SEQ ID NO: 709491 - DNA, 644 bp, Homo sapiens
tagactgttttactcacagagttgcttatggcacatttttatcttatttacacctatttgactgaaaaataattgtgcaccttttatttaatccctatagttaagaaagatttcctttatataacatttcatttcttgtcttttttctctttttggccgtgtttttgattcataagcaatgataaggtaataggaatatcgaaggattttattctggataagattaagatttaaggtgcttttagaatattttatttggcatttgcttcatttgttaaaaaaccctgccttttctttatcacaaaatctataattctatgaagtatttgttctattgggtatttccctgtgtaactatttgccatctagtggacaatctaaatgctgctcagttttacaaaataaagtttccaatttgatcttttcacaatatcttgtagggagaaaactttttttccaagttttcaagttttaagctattttagtacacagggatttataaatcagttctgatttatatataaaagaattgttatcttgaatgaacttgtatcctctcccatatctactacatttcttagcacctagtaggcacstattaaaattaaatatttgttgaatggaatatttgttgaatgaatgaa

SEQ ID NO: 709492 - DNA, 470 bp, Homo sapiens
ggtttcaagtgattctcatgccttagcctcctgagtagctgagaagacaggcacacgccaccayacctggctaatttttgtattttgcttcaccatattgcccaggctggtcttgaactccttacctcatgtgacccacctgcctcagccttccaaagtgctgggattacaggtgtgagctaccgcacctggcctcatgtgaaggtttttaacttgtgactctgctgagtcagctgaggtctcagcctctctcttccacacacctgcctctcccaccctcagcccagatatgctggagttgccacagctgggcctggcctaggccagactccccaggagagggagcagtccagagggaatgaggggcctgggctgctgggagaacggagtgattcctaagagcatgcagatgggttcatgactggcccttaggaaaggtgagagcaccttctggagtgcttgtttgggga

SEQ ID NO: 709493 - DNA, 2439 bp, Homo sapiens
tagtgtgtcatgttgtctgtaatttaaaatacttcagaaaaaaaatagtgagttgaaggaaaaaaatggacatgccaaggtaaccaggttccattacaaaaaaatttcaactttgtaacaatggaaactataaaactaagataaaagctctaggattggggtggaaaagatttgtaatcaaaatgattaatccctaaaataaaaaggcaaatcagtgaagtctccacttcttagtaaactactacttccaaaaaatatttagtttcactggtgctaaaattaatgaaataaaaaataaaactactatgagatactgttttatacctaatagagaacttctttattctttgttttttgttgttgttgttgttgtttttgtttttgagacagagtctcgctctgttgccaggctggagtgcagtggcgcaatctcggctcactgcaacctctgcctcccgggttcaagcgattctcctgcctcagcctcccgagtagctgggactacaggcgtgcaccaccaagcccagctaatttttgtatttttagtagagacggggtttcactatgttggccaggatggtctcgatctcttgacctcatgaaccaccctcccaaagtgctgggattacaggcttgagccgctgcgcccagcctgagaacctctttattcttacaatactttctaacataattctcccttttttctgatattaatattggtacatgagctttcttttgactagtatggattcgttcttagaaattgcaatttaagggaagtgaaaccaattttatcataggctagttgatataaacaagagacaagttcgtagaacatatttttggtcataaaaatatcatcaaacttataaataaagatgaaaacacttctattcaatattaaacattgaaacaaatgtgagcaatagatacatttaagaaagattcataaaagcaagtaaaataagtatttgcccaactattccagttcaagtttgcaggtggctggagcttttcccatcagctcagggtgcgaggtgggcaccaaccctgaacaggatgccattccatcacagaacacacacacatgcatgcacrcacacacacacacacgcagactgggactatgtagacatgccaattcacctcacatgcacatatttgggatgtgagaggaaactggagtacccagagaaaccccacacagacattaggaaatgtgcaaactccacacagcctggccaagaattaattattgttttctcgtgaatgttataacaaagttattctaggacctgctatgtatctttgcatccaaacttcctatgttgttttgcattgtgtatctcttgaaaatagctgatagatgatttctaatgcaattttatagtatttgccttttaataaatgactttcatctgttttcaattactgtgattgctggtaaatttaggcatatgtcttattcctgtgctttttctttgtttctttgtctcctttcctgctttgtagaatatccaagctttctttattccttgttttactctactgatttggaaaatacacattctatttctattcttttactgggcactcttaaatttttcacattactattttgaagtccagagttaatatcattaggatccttctgaacaatacaaggactgtaaaatgtgccagaagatcaccccccaccttccacattatcactatttagcatttttgttcctcattgtcttcaaataagaaacaaaacaaatgaaatcagttatttttaaaccagcattattcatttaggtttaccagcatatttatcaaactctttgattcccactgcttctgcgtcacttcttccttctgggttcattcgctctccattagcaaaacctttaaagcctggtgctaatggaccttcagagaaagaaatatatctcctggtgctaatatcaagattaaacaaagctatttttgtgaaaatgctttataaattgtaaaaccctgtgaaaatataagagttatttttttctggccaggcgcattggctcacacctgtaatcccagcactttgggaggccgagatgggcagatcacgacgtcaacagatcaagaccatcctggccaacttgttgaaaccccgtctctactaaaaatacaaaaattagctgggcatgatggcgcgtgcctttagtcccagcttctctggaggctgaggcaggagaatcgcttgaacccaggaggcggagcttgcagtgagctgagattgtgccactgcactccagcctggcgacagagtgagactctgtctcaaaaaaaaaaaaaaaaagatttcttttttctgcattggatattttcagagggtaatctggtaaaatgtaacaaagctataaacatgattatacaagttcattagcataaggaaaatttttaaaattttac

SEQ ID NO: 709494 - DNA, 2439 bp, Homo sapiens
tagtgtgtcatgttgtctgtaatttaaaatacttcagaaaaaaaatagtgagttgaaggaaaaaaatggacatgccaaggtaaccaggttccattacaaaaaaatttcaactttgtaacaatggaaactataaaactaagataaaagctctaggattggggtggaaaagatttgtaatcaaaatgattaatccctaaaataaaaaggcaaatcagtgaagtctccacttcttagtaaactactacttccaaaaaatatttagtttcactggtgctaaaattaatgaaataaaaaataaaactactatgagatactgttttatacctaatagagaacttctttattctttgttttttgttgttgttgttgttgtttttgtttttgagacagagtctcgctctgttgccaggctggagtgcagtggcgcaatctcggctcactgcaacctctgcctcccgggttcaagcgattctcctgcctcagcctcccgagtagctgggactacaggcgtgcaccaccaagcccagctaatttttgtatttttagtagagacggggtttcactatgttggccaggatggtctcgatctcttgacctcatgaaccaccctcccaaagtgctgggattacaggcttgagccgctgcgcccagcctgagaacctctttattcttacaatactttctaacataattctcccttttttctgatattaatattggtacatgagctttcttttgactagtatggattcgttcttagaaattgcaatttaagggaagtgaaaccaattttatcataggctagttgatataaacaagagacaagttcgtagaacatatttttggtcataaaaatatcatcaaacttataaataaagatgaaaacacttctattcaatattaaacattgaaacaaatgtgagcaatagatacatttaagaaagattcataaaagcaagtaaaataagtatttgcccaactattccagttcaagtttgcaggtggctggagcttttcccatcagctcagggtgcgaggtgggcaccaaccctgaacaggatgccattccatcacagaacacacacacatgcatgcacacacacacacacacacgcagactgggactatgtagacatgccaattcacctcacatgcacatatttgggatgtgagaggaaactggagtacccagagaaaccccacacagacattaggaaatgtgcaaactccacacagcctggccaagaattaattattgttttctcgtgaatgttataacaaagttattctaggacctgctatgtatctttgcatccaaacttcctatgttgttttgcattgtgtatctcttgaaaatagctgatagatgatttctaatgcaattttatagtatttgcyttttaataaatgactttcatctgttttcaattactgtgattgctggtaaatttaggcatatgtcttattcctgtgctttttctttgtttctttgtctcctttcctgctttgtagaatatccaagctttctttattccttgttttactctactgatttggaaaatacacattctatttctattcttttactgggcactcttaaatttttcacattactattttgaagtccagagttaatatcattaggatccttctgaacaatacaaggactgtaaaatgtgccagaagatcaccccccaccttccacattatcactatttagcatttttgttcctcattgtcttcaaataagaaacaaaacaaatgaaatcagttatttttaaaccagcattattcatttaggtttaccagcatatttatcaaactctttgattcccactgcttctgcgtcacttcttccttctgggttcattcgctctccattagcaaaacctttaaagcctggtgctaatggaccttcagagaaagaaatatatctcctggtgctaatatcaagattaaacaaagctatttttgtgaaaatgctttataaattgtaaaaccctgtgaaaatataagagttatttttttctggccaggcgcattggctcacacctgtaatcccagcactttgggaggccgagatgggcagatcacgacgtcaacagatcaagaccatcctggccaacttgttgaaaccccgtctctactaaaaatacaaaaattagctgggcatgatggcgcgtgcctttagtcccagcttctctggaggctgaggcaggagaatcgcttgaacccaggaggcggagcttgcagtgagctgagattgtgccactgcactccagcctggcgacagagtgagactctgtctcaaaaaaaaaaaaaaaaagatttcttttttctgcattggatattttcagagggtaatctggtaaaatgtaacaaagctataaacatgattatacaagttcattagcataaggaaaatttttaaaattttac

SEQ ID NO: 709495 - DNA, 2439 bp, Homo sapiens
tagtgtgtcatgttgtctgtaatttaaaatacttcagaaaaaaaatagtgagttgaaggaaaaaaatggacatgccaaggtaaccaggttccattacaaaaaaatttcaactttgtaacaatggaaactataaaactaagataaaagctctaggattggggtggaaaagatttgtaatcaaaatgattaatccctaaaataaaaaggcaaatcagtgaagtctccacttcttagtaaactactacttccaaaaaatatttagtttcactggtgctaaaattaatgaaataaaaaataaaactactatgagatactgttttatacctaatagagaacttctttattctttgttttttgttgttgttgttgttgtttttgtttttgagacagagtctcgctctgttgccaggctggagtgcagtggcgcaatctcggctcactgcaacctctgcctcccgggttcaagcgattctcctgcctcagcctcccgagtagctgggactacaggcgtgcaccaccaagcccagctaatttttgtatttttagtagagacggggtttcactatgttggccaggatggtctcgatctcttgacctcatgaaccaccctcccaaagtgctgggattacaggcttgagccgctgcgcccagcctgagaacctctttattcttacaatactttctaacataattctcccttttttctgatattaatattggtacatgagctttcttttgactagtatggattcgttcttagaaattgcaatttaagggaagtgaaaccaattttatcataggctagttgatataaacaagagacaagttcgtagaacatatttttggtcataaaaatatcatcaaacttataaataaagatgaaaacacttctattcaatattaaacattgaaacaaatgtgagcaatagatacatttaagaaagattcataaaagcaagtaaaataagtatttgcccaactattccagttcaagtttgcaggtggctggagcttttcccatcagctcagggtgcgaggtgggcaccaaccctgaacaggatgccattccatcacagaacacacacacatgcatgcacacacacacacacacacgcagactgggactatgtagacatgccaattcacctcacatgcacatatttgggatgtgagaggaaactggagtacccagagaaaccccacacagacattaggaaatgtgcaaactccacacagcctggccaagaattaattattgttttctcgtgaatgttataacaaagttattctaggacctgctatgtatctttgcatccaaacttcctatgttgttttgcattgtgtatctcttgaaaatagctgatagatgatttctaatgcaattttatagtatttgccttttaataaatgactttcatctgttttcaattactgtgattgctggtaaatttaggcatatgtcttattcctgtgctttttctttgtttctttgtctcctttcctgctttgtagaatatccaagctttctttattccttgttttactctactgatttggaaaawacacattctatttctattcttttactgggcactcttaaatttttcacattactattttgaagtccagagttaatatcattaggatccttctgaacaatacaaggactgtaaaatgtgccagaagatcaccccccaccttccacattatcactatttagcatttttgttcctcattgtcttcaaataagaaacaaaacaaatgaaatcagttatttttaaaccagcattattcatttaggtttaccagcatatttatcaaactctttgattcccactgcttctgcgtcacttcttccttctgggttcattcgctctccattagcaaaacctttaaagcctggtgctaatggaccttcagagaaagaaatatatctcctggtgctaatatcaagattaaacaaagctatttttgtgaaaatgctttataaattgtaaaaccctgtgaaaatataagagttatttttttctggccaggcgcattggctcacacctgtaatcccagcactttgggaggccgagatgggcagatcacgacgtcaacagatcaagaccatcctggccaacttgttgaaaccccgtctctactaaaaatacaaaaattagctgggcatgatggcgcgtgcctttagtcccagcttctctggaggctgaggcaggagaatcgcttgaacccaggaggcggagcttgcagtgagctgagattgtgccactgcactccagcctggcgacagagtgagactctgtctcaaaaaaaaaaaaaaaaagatttcttttttctgcattggatattttcagagggtaatctggtaaaatgtaacaaagctataaacatgattatacaagttcattagcataaggaaaatttttaaaattttac

SEQ ID NO: 709496 - DNA, 1898 bp, Homo sapiens
aggcagaggttgcagtgaactgagatcatgccactgcactccagcctggcagcctgggcagtagagtgagaccatgtctcaaaaaaaaaaaaagaagtcattgggagacaaggaaactcaaatgaccaataaatgtattgaaaaaatggttattctcataaatcatcagggaaatgtaaaatgatggcataatcatttcatagagaagacttcacctttatctgtaaagctgcattttatctgacagtttggtacctttacagtgcacccaagcacacagcttatggtctccaaaaaggaactagggctggctggagaaaaggctgaatccaatcatagggctagaaggtataaggtgagcctggaacatcttgctgagccaggaagcaaggaatctttccaagattaacaaaatcttgctggaaagacacaggaatcaccccactggccagctaagaccatttaaacttcaaaaggaaaatactggctgaggtcacttgatacacaataaataagaagagccttggtccatcaagtgactcacaaaaaaagtgaccataaagtactgtattytaaaaaaaaaaggtgtatagaattaagtaccttctgttctgtggtcttgttaggaaaaaaaaaaaaaaagggaagccactgcactccagcctgggcaacacagcgagactccatttaaaaaaaaaaaaaaagaaaggaagaaacattaaatattttccaagaaaagtctcttacccatgacagagtactcttcattttacaaagactattatttcttgaactttgagatttctagcatatcccattagaacgtcaaaggaccgatgaacaatgtacttatcgttaatgtaagctggatatgctcattttttaactaagcatacagcagtggctctccaatgagaaagataaagcacctggctgagtggagtacagtaaaatgcagcctactatttattcccagagtatgtttgccaatgtgttccactgcaaaatcaattcacaggaaaaaaaattgtattcatgaagaaatttttttttttccaaaacctttgatggtggctactacttgtctctactggaattcaattctagatggtatctgttagggattgaatgtctgtgtcctctcaaaattcctatactgaaggcctaaccccaatgctaccatacttagaaataggcatgtgaggaggtgcaaagaatagcagtgtgccttccagatgctctgccaattgaagaaatttgaaaaccaatgaattgaaaatacattccatttagaaaaagctactgtctttctggattctagaatctgacatgtaaattcatagtcattcattctcattcttcttctctctgcctttgtctgtgtgtattcactccatgcagtctgtaagcaacaaattctgttgttcttatgtaacagttcacttcctgagctgctctgctctgtagttctcccttcttgtcactccctggcatgtcttggtttctggtcagagacccaatcacacacagaaagtgtaccaatataatttactcccatcagggatttggtaacaacttaaagagtctttcatcaagcctagaagttttgttttgttttcctttctccttactttcagatgtggcacttccttgggtattttggatttttactatattaaaagaaaggatggggaatctaacttctagtccaaatacttatttttaatctccctttttttaaagtatacataaatgatacaacttaaaattctctaagactcgaaaatgataaattataatttccattctcatcatgcttaactacgcagttgtattgggaaagacagctaatgatatcatcagagctaagatacacaataaaattattcttaacaata

SEQ ID NO: 709497 - DNA, 1434 bp, Homo sapiens
tattttattctttttaatttcccatccaatacatttccatgactaattgcagtattttcctaccatttcaaagatttttctcccaaccttcccctcatgttctttatttaccctaaatgatcctgggcatttgctactttctcattctagtgctttcctcattcacagctgtcttcacatgtatagatacataatcattagtaacctcttcctttcttccctaaatttttaaaactctcctcagttacctcaggaaattccttcttgatctctggttccaattttaaagagtcaagatccagttatattttgaartaacctttttatattacacgaattttatgggaataattctaaaggtgaacactagatggcaacatttttaaattttgctgttctaaaatctagtctgatagatggcaaatgctgagagcctccaaataggagtatatagttctttagtttcttaaacattttttccttctagtttttaaacatcagataagcttttagatctctccataaaggaactgtatggtgtttaattcttaaaaataaagcatttcttttttatatcttatataatccctttttatatcttatataatcgttctaaaatattttctaattttattttttccttaaaataacaaatctaagctgtatctatttattaattgtgccatattctgtttaaggtattttcagtagtttagttctttgaaataataagcttttatttaattttacagagagctagagatgatattttatataatatatataacagaggtatacatactttttcctttcctcatgtgttttcttatggaaatttgagctcagagactaaaaataacaggtgagaatttcctgtcatgaggatgaggaagagtaggggtgtagtttctacgaaaaagtaattgttttgcaaatcttctaattttccttaggaagtgaaaatgtgaactgggatttcattcctggtaaaaatgtaaaattctttaaataaaaatataccttattataaaaatatattttacactaaggagcttttaatacaaaacatcacttaggactccaagaccaaaatggacaaagaataggaacgataaagaagacatgcaaaaagctaattaccacatgaaaaggttaaaaatcactagcagttttacaaagcaagaatcaaatgctcttttgcctttaagtttagcaaaaataaaaacaatgtttgctgtcttcccctccccattatcagactgaatattcaaaatattgtagtaacagcctgagttcaaatcccagctcagaattctacctatctatctggacttggtccaatttttttacttctctccactacagtttcctaatctgtaaaacaggactagttagcaaaatgaggattaaatatgttaatccatgtaaagttta

SEQ ID NO: 709498 - DNA, 1434 bp, Homo sapiens
tattttattctttttaatttcccatccaatacatttccatgactaattgcagtattttcctaccatttcaaagatttttctcccaaccttcccctcatgttctttatttaccctaaatgatcctgggcatttgctactttctcattctagtgctttcctcattcacagctgtcttcacatgtatagatacataatcattagtaacctcttcctttcttccctaaatttttaaaactctcctcagttacctcaggaaattccttcttgatctctggttccaattttaaagagtcaagatccagttatattttgaagtaacctttttatattacacgaattttatgggaataattctaaaggtgaacactagatggcaacatttttaaattttgctgttctaaaatctagtctgatagatggcaaatgctgagagcctccaaataggagtatatagttctttagtttcttaaacattttttccttctagtttttaaacatcagataagcttttagatctctccataaaggaactgtatggtgtttaattcttaaaaataaagcatttcttttttatatcttatataatccctttttatatcttatataatcgttctaaaatattttctaattttattttttccttaaaataacaaatctaagctgtatctatttattaattgtgccatattctgtttaaggtattttcagtagtttagttctttgaaataataagcttttatttaattttacagagagctagagatgatattttatataatatatataacagaggtatacatactttttcctttcctcatgtgttttcttatggaaatttgagctcagagactaaaaataacaggtgagaatttcctgtcatgaggatgaggaagagtaggggtgtagtttctacgaaaaagtaattgttttgcaaatcttctaattttccttaggaagtgaaaatgtgaactgggatttcattcctggtaaaaatgtaaaattctttaaataaaaatataccttattataaaaatatattttacactaaggagcttttaatacaaaacatcacttaggactccaagaccaaaatggacaaagaataggaacgataaagaagacatgcaaaaagctaattaccacatgaaaaggttaaaaatcactagcagttttacaaagcaagaatcaaatgctcttttgcctttaagtttagcaaaaataaaaacaatgtttgctgtcttcccctccccattatcagactgaatattcaaaatattgtagtaacagcctgagttcaaatcccagctcagaattctacctatctatctggacttggtccaatttttttacttctctccactacagtttcctaatctgtaaaacargactagttagcaaaatgaggattaaatatgttaatccatgtaaagttta

SEQ ID NO: 709499 - DNA, 2014 bp, Homo sapiens
tcctggacacaccattttgcttttctgtgccaaatttctacacaaagactgaagtgaaaactggccattgagagagtaatatgggagctgaagggctaaacaggttttcctccaattgtcataattattctggttaagcagcctgatctttctgagtcaagaaagtaacagcttaatgaggtagagggttgacaggcagcagtccccatcaaggagctgattctccatagtggcattaccggaggtcagccttgcccatggaactaatgctactacagcagatggaacctgacctaattgccaaagcattcccaggttcaaatacagaagaacccagaataactaccattttccttcccactgtatctttttgttttcagggccagaaactgaatgccaaaatctatctctgagagagctcctgggagtttctgtgacagtctcaggttatcacattccctgctgggaaggcaaacttaaaagttacctgcatgactcactgatccctaaacaatggtatctttagttagtttttttgtttgttttgtttcgttttgtttttgttttgtttttgccagcaagtcctttgtttctgttaacaataatggaacaggacaagtcaagggatgtctacaagataaatagtatgattaatatcaaaggccagagcagagttgggttctaaatttctccctcaatgtctaaatgtccatcacagttgaaactctgggaagcggaccataaaacctaaaaagcaaggtgtagagctgtcccttggtaatcatgcggatttgttcccggactccctgtgaacaccaaaatgtgaggatgtgcaagtcccttacataaaatggtgtactatttgcatataacctatgttcattcttttatatactttaaatcatctctagattacttataatacctagtacaatgtaaatgttatataaatagatgttatactatatttgttatttatactatttttaaattgctgtattattttatactgtttcttctggaatatatgcaattcacggttggttgaaaccacacatgtggaatgcacagatgtggagggtcagctgtatatattttaacagaatcagtgatatgttaattcaatctaattcaacaatagtacatgaaatgaataagggaccattccaaggatcgtaataaagtacaaggcattatccttatcatcaagatgcttataattcaggcattttttccaatagctatgggatttcctccattttccctggaacaaagaaagtagaattggtggcagcaggcaactgatgtccaacttaatgttaggcacctaattttatcaagtaggttttcgccaactcccgagccccaactctggctagtgaacaggattccaaaaggatcaacaagactcatttagtccagcaccaggcactgctgctatgcctgagagatagaacagtgtaataagactacattctctcctcaaggagctccaagtcactctarcacttccaatctcttagaaaatatcaatcctagatatgggaacataaaatatctaagcaaagtgaaactgggaagaaaatattactgacctttaatttctcctgcccgggcttttttgtagagtcctttgacatccctctgttcacaaacatgcagaggagcatcaacaaatacttcaaaaaacggtaaacttgcaccttcatgaatttgccttgcattgttgcgatccttaaaaaaaaataaaataaaaagtgatcacacaaatcacaaacgtactatattaatattaaagatgagtaaaaagtgcttctcatccaatttagtgggaaatagacaaaatttatgtttttaaatataaactgaaaaaaaaatccaagaaattattaggttaattcctattattcatgacaattttaaaaggcatactgttctactaacccaggatattggggaggtacagaaggaaaacaatgaatgtaccacaaactttttcactcaaattctacgt

SEQ ID NO: 709500 - DNA, 2014 bp, Homo sapiens
tcctggacacaccattttgcttttctgtgccaaatttctacacaaagactgaagtgaaaactggccattgagagagtaatatgggagctgaagggctaaacaggttttcctccaattgtcataattattctggttaagcagcctgatctttctgagtcaagaaagtaacagcttaatgaggtagagggttgacaggcagcagtccccatcaaggagctgattctccatagtggcattaccggaggtcagccttgcccatggaactaatgctactacagcagatggaacctgacctaattgccaaagcattcccaggttcaaatacagaagaacccagaataactaccattttccttcccactgtatctttttgttttcagggccagaaactgaatgccaaaatctatctctgagagagctcctgggagtttctgtgacagtctcaggttatcacattccctgctgggaaggcaaacttaaaagttacctgcatgactcactgatccctaaacaatggtatctttagttagtttttttgtttgttttgtttcgttttgtttttgttttgtttttgccagcaagtcctttgtttctgttaacaataatggaacaggacaagtcaagggatgtctacaagataaatagtatgattaatatcaaaggccagagcagagttgggttctaaatttctccctcaatgtctaaatgtccatcacagttgaaactctgggaagcggaccataaaacctaaaaagcaaggtgtagagctgtcccttggtaatcatgcggatttgttcccggactccctgtgaacaccaaaatgtgaggatgtgcaagtcccttacataaaatggtgtactatttgcatataacctatgttcattcttttatatactttaaatcatctctagattacttataatacctagtacaatgtaaatgttatataaatagatgttatactatatttgttatttatactatttttaaattgctgtattattttatactgtttcttctggaatatatgcaattcacggttggttgaaaccacacatgtggaatgcacagatgtggagggtcagctgtatatattttaacagaatcagtgatatgttaattcaatctaattcaacaatagtacatgaaatgaataagggaccattccaaggatcgtaataaagtacaaggcattatccttatcatcaagatgcttataattcaggcattttttccaatagctatgggatttcctccattttccctggaacaaagaaagtagaattggtggcagcaggcaactgatgtccaacttaatgttaggcacctaattttatcaagtaggttttcgccaactcccgagccccaactctggctagtgaacaggattccaaaaggatcaacaagactcatttagtccagcaccaggcactgctgctatgcctgagagatagaacagtgtaataagactacattctctcctcaaggagctccaagtcactctaayacttccaatctcttagaaaatatcaatcctagatatgggaacataaaatatctaagcaaagtgaaactgggaagaaaatattactgacctttaatttctcctgcccgggcttttttgtagagtcctttgacatccctctgttcacaaacatgcagaggagcatcaacaaatacttcaaaaaacggtaaacttgcaccttcatgaatttgccttgcattgttgcgatccttaaaaaaaaataaaataaaaagtgatcacacaaatcacaaacgtactatattaatattaaagatgagtaaaaagtgcttctcatccaatttagtgggaaatagacaaaatttatgtttttaaatataaactgaaaaaaaaatccaagaaattattaggttaattcctattattcatgacaattttaaaaggcatactgttctactaacccaggatattggggaggtacagaaggaaaacaatgaatgtaccacaaactttttcactcaaattctacgt

SEQ ID NO: 709501 - DNA, 1767 bp, Homo sapiens
tgggcatgtaccaccacggccagctagtttctatatttgttttggtagagatggagtttcactatgttgccctagctagtcacaaacaatctttaccattcttatgacttaacttttatttctccttcctctcgggtcaaaaatccaaattcccagtgttggccagtaactccccatttactttatcctgcaatgcacatgcagaagtcagtggtgatactttatcttttttagactgacaaattattgtgttctctttcatttaaaattctgttattttactttcttcagagccatgttttgtataaaatttaaaaatccagaactatatagaaaaatccaagcatctgcagtctaaggttttaaaaagtggatcttaatttttttaagccagaatttgggaaacattgataatggaatgctatgcttctgtgtttggaagaacatattgagatttctctatgcttaaagaatgctagtcaacaatgcatggaagtaaaaaggctaactacacaatgatacttttaatataaaaatatttatagagatactagaagaaaataaactcaattttttactttttggggggcaaaagcagagaagatgtcttatttattaaattcctatgatttattagaaaataagaccagcctgggcaacatgacaaaaccccatctctacaaaaagtacaaaaattagccaggcatggtgtcacgcacctgtagtcccagctacctgggaggctgaggtgggagggtcacctgagccaggggaggctgaggctgcattgagccattttagcaccactgcactcaaacctgggtagcagagtgagaccctgtctcaaaaaataaatgaacgaatgaataaatggataaataaaaaatttcagcatttgtacaggttggttggtgtggactggcaatttagaagaaaaaaaatttgtgatgtgttattcagaacaaatgaagcaaatataatcatgtggacaactctcaattttgcatattggccatttattattgtttgtgtttttctgcatttaacacatttcctaaaatatacgtacacatgttcatatctaatctcctacacaattctgtagaatttcaagtgagtagttgctttttttttttgaaatccaaatatttcatgaatgaagttgatataaaacattcatcaaaaatatgctcttctggccaggcgtggtggctcacacctgtaatcccagcactttgggaggctgaggtgggcagatcacctgaggtcaggagtcygagactagcctggccaacgtggtgaaactctgtctctactaaaattacaaaaattagccaggcatggtggcacatgcctgtaatcctagctactcgggaggctgaggcaggataatcgtttgaaccctggaggtggaggttgcagtgagctgagattgtgccactgcactccagcctggactacagagcaagactgtctcaaaaacaaacaaacaaacaaaaaactgcttttcacaaacagttgttttaatgagtattaagaaattttctattttggtcataaatgaaaacttcattattataaaggatatatttttgtagaaagttttgagtggctcttacactataattcatgcattttcaactattgtctaatgacaaaaatatagaaattctttgctcaggagatagttcctctattagatggtctgcaatgaggtgatggcccaagggcctatcgcccactccatctccccgtcctttgccacca

SEQ ID NO: 709502 - DNA, 1130 bp, Homo sapiens
atggatctgaggttcaggagagaggtttgggcttttgatatgaatttatgactcatcagtgtaatgggaactctactggagagagtatacagagaagatggaatagacagagacccaaggagcaccaactttcagagaaatgaaagaggaaaagcctgcaaatgagactaaggaacagctagaggttacagaaagagtttgtacattaaaatatttgtacccattatttgggtcctgttattggaaacatgtttaatcacaattaaatgtgacttgaaatttatctgttttaaaatttatttaaaaacgttgtttatatttaaaagaggaacagtaaatcctcacatcgcagggttatgaggttcaaatacaaaaagtatttgaaaatattttggaaagtattataccagtggttctcaaactttagtagtatatatcaaaatcatttggagggcttgttaaaacacagattgctgttttttttwaaattattatttcagtagtggtagtagcagtttctgattcagatctgtggtaggaacctagaattttaatgtccaagttctcaggtgatgctgatgttattggtctaggaccatcctttgagaaccactgtgtaatacaaatgaattatggttttgactttatagccaaattcattgagttttcctccaatgttagtctctttcttcctctaatgctgttatttccttaccttgcttcacacctagcaatatccgtttacacatgtgaaagaccaacttagtgaagtattttgttgactgtttacaatagtaagcaacgacttcaggttagcttaattaaggagaataggaaaaatatatggtttttttttttatagggagataagaaggaactctttggaataagaggtgggatttctgttttccccaaagtcaattagatgtcaaatgctacttgttaccaactttccaaaatcccattagagaccttgtaatttgatccagagagaacagcattaagagtcaggtaaaaggaaaaactgacttcattcttcattcctttcctaaatcctgagaaatgtgtatacctcaacactcccttttccaatcccgcaaaacagggaatcaggaaaacacattagcacc

SEQ ID NO: 709503 - DNA, 581 bp, Homo sapiens
ttaatatatggcttcaaaattgtggctaaatagggagtatgaataaaatgtggctgttattacatttgccttaagagaaaactaaaatagtacatacccttttcttatccaagtacaataaaccaggcatagcaaagcttgacttatttaatgattggctcattcaggatttaataaggataacgtttatatatcccatattgaggctagttattgatatatattttaaatgtgttgctaagtcttataattcttgtccttattacttttaatttcattggttttgtcccgtgaaagttacttcatgattttatgtaatttgttacctttgtttttaagatgaaaaacaaaacagtcaatttggtcaattcagtcaacaaaccasttgggtaaaaaaatggatcaatataatgtcccatattctcaatttccaaggcattttcctaagtttataaactgatttagttagattattatctattcagtggactctgatacaacagaatatgctgttctctggagcaagatattcatgtaaagattggattgccttctcctaaaagaatttcccaaaatgcctg

SEQ ID NO: 709504 - DNA, 581 bp, Homo sapiens
ttaatatatggcttcaaaattgtggctaaatagggagtatgaataaaatgtggctgttattacatttgccttaagagaaaactaaaatagtacatacccttttcttatccaagtacaataaaccaggcatagcaaagcttgacttatttaatgattggctcattcaggatttaataaggataacgtttatatatcccatattgaggctagttattgatatatattttaaatgtgttgctaagtcttataattcttgtccttattacttttaatttcattggttttgtcccgtgaaagttacttcatgattttatgtaatttgttacctttgtttttaagatgaaaaacaaaacagtcaatttggtcaattcagtcaacaaaccacttgggtaaaaaaatggatcaatataatgtcccatattctcaatttccaaggcattttcctaagtttataaactgatttagttagattattatctattcagtggactctgatacaacagaatatgctgttctctggagcaagatattcatgtaaagattggattgcmttctcctaaaagaatttcccaaaatgcctg

SEQ ID NO: 709505 - DNA, 990 bp, Homo sapiens
atttcttttgttaggtgttcaaggccatggagctccctggggcagaggcctccacggggagacaggctacacactttccagactggccctgcagaaggaggcacacccttccccatgctggcctacaaacccatgyacttcacccctctcagtgctctgagagtgtgggctcctcccttgcttgtgtgctagccccatatctgagctcagcactcctgagctccatgccacagccctgggctgtctggactggttctggccccatcctccagacccttacggttgggttccaggtgagctaggagatccaatgtactctcaggctgccaggaatgtgctcaagtagagcaaatcacccagactaagcagcagagactgcactgtgcacatgttcttgctgaatggcaaatcaggggctctgggaggagctggcaagcaagagggcctgtagaacagatgagtcttggctccccattggctgaaaccttgtctctgcctattcacaagggaaattaccctgccatctcaaacattcatgggagatgtggtgtattagtctattctcacattgctctaaagactggccaacttataaagaaaataggtttaattgactcaagtttcacaagatgtatggaaagcatggctggggagccctcaggagacttacaatcatggcagaagggcaaaggggaagcaagcaccttcttcacatgacagacagggagagagagagaggagggcggagctacatacctgtaaacaacgagatcttatgagaactctattaacaggcagcactaggggagtggtgctaaaccattagaaaccaccccaatgatccaatcaccttccaccaggccccacctccaacacctgggatcacaattcaacatgagatttgggtggggacacagagccaaatcatatcatgtgggttctcctgtagctagaatcctagaggtctgtgtgagggtgagcagtcctaca

SEQ ID NO: 709506 - DNA, 1326 bp, Homo sapiens
ttaatgctgaaacgagttaagactttgggagactgttgggaaggcatgattggttgtgaaatgtcaggacatgagatttggaggggccagggatggaatgatatggtttggctgtgcccccagtgaaatctaacttgcattgtatcccccayatttcccacatgctgtgggatggacccagggggacgtaattgaatcatgggggctggtctttcccgtgccattctcatgatagtaaataagtctcatgagatctaacgggtttatcaggggtttccgcttttggttcttccttatttttctcttgctgccatcatataagaagtgccttttgtctcccaccatgattctgaggcctccccagccatgtggaactgtaagtccaattaaaactctttttgttcccagtttcaggtacgtctttatcagcagcatgaaaactagtacaccagctgtatataattggaacttatatatgccttgttctttctcaacttctttatctaatcatttttcagagtcaaccacctgagaaggtatatatacttactacttttttttaacaatctgtttcagtctggattacattctcatctctctgtagaatgtagtgtcacaattgttaactaacattggagatcaggtcccagatttgatcctcattaaagtccttcttgaaacagtattttcactttgcttttctgatagcacattctcctggttttcatcctgtttcttgatcttctctcatcctgccttatccatctctacctagacatcaaatattcatgttgcctgaagcttggaactttagtctggttaaatttgccatattttcaaagtaatttttctgtattaacttctttctttctttctctactcttatgactcccagcactgacttatttttgaatatccacactcatttgttccaatgttcatttcacatctccacattttttccagaggcaccttgaattaaacctatccaaaagtgaatccatgaaactttatcaacagtctttcaaagccaatgttaccaatgactttacaatgataaaattcagaaaagctgcagttctcccagtgtcctcttccgtgctctatttaattcattaccaaaccctatttattttactcattaaatatcattagaatatgttaattgttttctgtatgtttcagtctctcctggttcatgttagtatcacttcctgcctagactactgcagtggtttactaactggtttctctaaacctacttttgcttccttcctttaaattaattttccacacctacatatgtagttaatattataaaatgtg

SEQ ID NO: 709507 - DNA, 1045 bp, Homo sapiens
gacctcaggtgatccacctgccggcttcccaaagtgctgggattagagacgtgagctactgcgcccggccttacattcaccattaagtgcacattctgtaaatgaacgagcagcagattccagcacagtaggcctgtktgttattcatgctgagggacattgaaaagcagtcaagattagctcccctcatgccacccgtttgtgacctcagtgccacctgggcctctaagatgtatgtggcagagactagaacttctatttaacaagagaaagaagtaggagttctgtggctatccagtgcccctaatgggcaccctgcattggttggtgggtgtttgtttataccagtgaggtcctagccaggtggttggtcagggatgtgtctgccattctggcccagggacttgccattttactgtagacttggctcttccctctggtgccaccagcgaagccaggcttttccccgtctgtgagtggggtctgcccagtctcctggtgtggtcaggcacggggatggaggaatcctgcccggagcccagccagtggggcacccaagctctcctggggccctgctgctcccctgctcttgagctcagtgttgccacctatgcacgggtcccccttgtggtgctcacgccactctgagccgctctagaggagacccctgcgtgcccagggcacagtacgcgacgcagccccatggcacaaggcccagtgtgcgtggccagccgctggcggctgtgctgctcggagggcagagttccatttgcattccactcactgccgggagctggccctcctctcctgctgcctttatttgctgcgtggaggctctttgtgggctttttgggtctgagtcactgaacactggctggacattcactgcctgggagatctctttgccagcactgcggtgcccggtgggaagaggttgctggaatctctttccagctcgggtccttcaacctcatggatgcagagtgtgtgtgtgtggcggggatagggtgtccccacatgaggtatcttcctaaaagtgttactt

SEQ ID NO: 709508 - DNA, 1045 bp, Homo sapiens
gacctcaggtgatccacctgccggcttcccaaagtgctgggattagagacgtgagctactgcgcccggccttacattcaccattaagtgcacattctgtaaatgaacgagcagcagattccagcacagtaggcctgtttgttattcatgctgagggrcattgaaaagcagtcaagattagctcccctcatgccacccgtttgtgacctcagtgccacctgggcctctaagatgtatgtggcagagactagaacttctatttaacaagagaaagaagtaggagttctgtggctatccagtgcccctaatgggcaccctgcattggttggtgggtgtttgtttataccagtgaggtcctagccaggtggttggtcagggatgtgtctgccattctggcccagggacttgccattttactgtagacttggctcttccctctggtgccaccagcgaagccaggcttttccccgtctgtgagtggggtctgcccagtctcctggtgtggtcaggcacggggatggaggaatcctgcccggagcccagccagtggggcacccaagctctcctggggccctgctgctcccctgctcttgagctcagtgttgccacctatgcacgggtcccccttgtggtgctcacgccactctgagccgctctagaggagacccctgcgtgcccagggcacagtacgcgacgcagccccatggcacaaggcccagtgtgcgtggccagccgctggcggctgtgctgctcggagggcagagttccatttgcattccactcactgccgggagctggccctcctctcctgctgcctttatttgctgcgtggaggctctttgtgggctttttgggtctgagtcactgaacactggctggacattcactgcctgggagatctctttgccagcactgcggtgcccggtgggaagaggttgctggaatctctttccagctcgggtccttcaacctcatggatgcagagtgtgtgtgtgtggcggggatagggtgtccccacatgaggtatcttcctaaaagtgttactt

SEQ ID NO: 709509 - DNA, 1691 bp, Homo sapiens
gggtgcaagcgatccttccgcctcagcctcctaagtagcttggactataggtacatggcactatgtctggctaattttttaaatttctttagagacggggtctcactatgttgctcaggctggtctcgaactcctggtctcaagtgatcctcctgctgggattacaggcgtgagccactgtgcccagctcatgcaacacttatcatcaggattcccgctcagtgctcggaccccaggggccagagatgcccgcggcaaggttctgccctcaaggtgcccactgctttagggggaagacagtgatactaccacatacgagagaaggagaggacacaactgtcagggagatggactgttggagcttcagaggcagcatcttggggaggggtggctttgaagaaggagcaggacacttgggccaggtggaccttggaagggtgccaggcaggaggagcaatgtgttgctgatgggcaggtaggggagggtgagggatggagaggagaccggaagacaccctgtgccatgtggaggggccctgccctctggggcaagaggtcagggaggagggcgctggctgggttcccaggcgcctgcccctgagaggcgcaaatggccctaatggggttattaggtggagcagatgcgtccggctcctgctgtggaggaaatgctcaaatgatcttgaagctaccaggctgggagaggcaggcaggggatggggcagacaggctgccaacctctgtgagataagccctggcctctccagaaccttttcagaacagctatgagccccaaccctggggctgagtgacccaagacagatcactcacactctctgggcctcagtttccccttacataaaaagcaatggttaggccaggtgcagatggctcacacctctaatcctagtgctttgggaggccgaggtgggaggattgcttgagaccaagagttcaagtccagcctgggcaacatagcaacaccccatctctacaaaacataaatacaaaaattaaggccgggcatggtggttaaggccaggcgtggtggctcacacttggaatcccagcattttgggaggcagaagcaggaggatcacctgaggtcaggagtttgagaccaacctggccaacatggtgaaaacccgtctctatacaaaatacaaaaattagccagccatggtggtgcatgcctgtaatccctgctactgtggaggctgaggcaggagaatcacttgaacccaggtgaaggaggtttcagtgagcccagatcatgccactgcactccagcctgggtgacagagaacaagactgtctcaaaacaaaacaaaagaaaaattagccagacatggtagtgtgaacctgcagtcccagctactatggaggctgaggtgggaggatcgcttgagcccaggagttggaggctgcagtgagctatgatggcacccctggacaccagcctctgtgacagagcaagagcctgtctctaaagtgaaacatttttaaaagggaaggtgaactgggtgaactctaagaccctgcatttcacaaacccttgcccacaccctgtatgcgtcgggccctggcaggraacagatggtacgctgtctcacagggcaattgagagcgtttacaaaggtgtgggcagcattaggggaatggaccagagagggtgacctgggacttggctg

SEQ ID NO: 709510 - DNA, 653 bp, Homo sapiens
aatttcaggttggccagaagtgggatggggttttacagaagaggtcttctgggggaggtgaagggcagagtggagggaaacaggatgtggtaagaaagccacaagggagagcacttgttgcacatattcacagttcagtgtcttctaaattacccgccacaaagtctgcagtgtttggatgggcaggtgaactactgattttcaaccaaaaattgtttttctcattgttctttggagtgttatcagtaattactaattttgaatctataccaagcaaaccccagattcctgcctaaacacaatctggcctgccttcatacttcttgccattgtaaacagtagggatttgggaaagcctgaaatctagctgtaaatgtctaaaaatcttctggctagtatacaaagagtagccatgaccatctaatgatttcagtccctgactgggtttcaaaatagattttctgaccagttttaatttagtcttcatgaattgaatgtcttcctttttgagatactgtaacaaacagtaaaactaactgcagcagtacatttagaacactgaagtgtgatctgatacagtgaagaccttctgtagcatcatattgygcaaaggaacatcctcctcagtggtgccagctttactgcaaaaggca

SEQ ID NO: 709511 - DNA, 588 bp, Homo sapiens
caggcaatgtggcaaagttaggaaatggagtatgagtcgtctttagtcagatgattttatgtcaacttcatggatacagtaggggaaggaaagaaaatgcaagtgtaattaaaccagcttttcttctgcttgtctttaaaacttaaaaaaaaattgtatttatagaaaggttgcaaaaataatacgaagaatttctgtatactrcctttacccagctttaccaattgtcatattttctttatcattctggctccctgtcttcctctctgggtctctgtctctctctgtacacacacacacacacacacacacacacacacacacacacacacatcttttatcctactcctcatttaggaacctgacaacttgtaattttttctaagttagatggaatttaaacattggggttattttattttattttatttttgagatggagtctcgctctgttgccaggctggagtgcagtggcgcaatctcggctcactgcaacctctgcctccagggttcaagcgattctcctgcctcagccttgcaagtaactgggactacaagcacttgccaccacacccggctaatttttgt

SEQ ID NO: 709512 - DNA, 607 bp, Homo sapiens
cagggtcagattctaggccacaatgaattaatcaaagaaccagttagagttcttgggagccaactaactagccttcctctatccatctctaaacaatttcagtcttttaatggcttcagtaattgtaagacttggaataaawtttttccccctttaaatgcaaaaatgaagggttaggagactgttcaaagtagctgtggatttgagttaatttcaccaaggttatcaggtcttcagaaagctggtttatttttcccaaattaatgcgagaatacctagagccagaatacaaatttattcattcacattgtgaaataactccttaagggataattcagtatagcttgggtaggttggtagtcatgcttattcactgtaggaaagctgaccatgagctttctttagctattctggcatcatgtcttcttcataatgctgaaagcactgactaagtttcactccacatcacttcattctgattacatcatccttttctcacgtattcaacacccatacaatcacatttcagagtactgtcctttactttggggagcttttgggggttactaatacttcctttttgtggcccatcttatttattcccagt

SEQ ID NO: 709513 - DNA, 647 bp, Homo sapiens
ttaatgagaaattgctgaggaggatggttgacgtcccaaggatgtagatgctccacagaaatgtctgttggcagaatgctgtgtacccagtgccrtgccaggctcctcactcatgcaaagatggcaaagacaggggccccacagcttcctctttgatataatatcaagatagtggttttcccagtggcccagagaactttttaagggcagggaccatgtcttattgaccaccatatctagtccacagtagaggcataatatttgttgagctgagctgatgtttttgaggtcagctgtggggagggcaatgctattggcatcctctcctaccccttattgtcctcctcctcaatctcaccctctggcagatccactctcacccgtcttatctggcatcacccaggatgagaagggcccgccagggaagcaagtggatgctggcgtggaacctacactgaactgcatggcgtggcattcgggtctcagacacagctctgcctgactctgtatgaaatcagggcctccgtttccccagtccagtgagggtctggctaggagctttagtgatgccactattcaataaggcagttaacaaaacagtccagtgggctagcactgctgtcagacttctacattcaaatcccagc

SEQ ID NO: 709514 - DNA, 647 bp, Homo sapiens
ttaatgagaaattgctgaggaggatggttgacgtcccaaggatgtagatgctccacagaaatgtctgttggcagaatgctgtgtacccagtgccgtgccaggctcctcactcatgcaaagatggcaaagacaggggccccacagcttcctctttgatataatatcaagatagtggttttcccagtggcccagagaactttttaagggcagggaccatgtcttattgaccaccatatctagtccacagtagaggcataatatttgttgagctgagctgatgtttttgaggtcagctgtggggagggcaatgctattggcatcctctcctaccccttattgtcctcctcctcaatctcaccctctggcagatccactctcacccgtcttatctggcatcacccaggatgagaagggcccgccagggaagcaagtggatgctggcgtggaacctacactgaacygcatggcgtggcattcgggtctcagacacagctctgcctgactctgtatgaaatcagggcctccgtttccccagtccagtgagggtctggctaggagctttagtgatgccactattcaataaggcagttaacaaaacagtccagtgggctagcactgctgtcagacttctacattcaaatcccagc

SEQ ID NO: 709515 - DNA, 608 bp, Homo sapiens
ttttaagactttgccccacaatatgatgacagaaaatatattttatcttaaaattttattacactatattatatatataaaataaataataaatataatgtataatatatatgtaagttgtgaagactattgacatataaacacacagaggctggaacattaatatctgggttgttctccatgatgtctgcctctcccaccaaaatacctgctctcctgaattttgcattccccttctttaaaaacaaactactgagttttctgagcttcttcctaaggagtcaggagactcgtggtctggttcctggattttcctcacaacacagctcccatatgcctttctccactcatgcctcaaaaggagaaaccaagaccactttctcctctgagacaggcagagacatcagccyttctgggcttgctgaagaagggagaaaaaaaactacaagaagctattgaacatattgatgaagtaaaaaatgaaatagatttaatgaactagccagtgagaagattttgacagtagaacagaaatataacaaactctgccaaccattttttcagaagaggtcagaattgatcccccaaatcccaaattttggggtaac

SEQ ID NO: 709516 - DNA, 1474 bp, Homo sapiens
caacatggtgaaaccctgtctctactaaaaatacaaaaattagccaggcgcggtggcaggcacatgtaatcccagctacgtgggaggctgaggcaagagaatcgcttgagcccgggaggcgggggttgcagtgagctgagattatgcctcttcactccagcctggacaatggattgagactctagctcaaaaataaataaataaataaataaataaataaataaataaataaataaagaagaaaragaaagagaaaaaggaagaaaaaaagaaagagaaaaacgaaacaaaagaaaagaaattaacatacacctctttaggatatgagaggaaacaagagtacctggtgaaaatccacacagacattagtagatgatgcaaattctacacagaaaagtggccccagccaggaaatcaatttttattttctcatcaaccttataacaaaatgaatggaacaaaatgatgttattaaaggacctgctgtatattgaaaatgatatacctagtagagtaagatactcagctagggaggccagaaaattttgatgactgtttggcagtcttcttattgctccagaatctggaaacataatattgccaactgaaattaaggctgttaaggcagaattaatttgataaaggtctattggaagctaaatatgaggactgacctgggaagtcacagcaacaaatttgggagtattccggagacgtattacaagatagaaggcttttataaaagcgattaggagaaggtggagggattcctcatatgaaagttgtccttctatatagaagttacaatcactggcttcagattgcaatatacaagctaaaatgtctacatgcaagaaaattagtaagagtttctgattccaaaataagtcagtgtttttttcattgccagtatattacatatcaatcagtacatcaactatttgaggaacttatgataaggttctttattcagggacagaatgtggccatgaatcaccagacctccctgaagtgggttaatttggaaagctgccaaatatgacctgtagtctatcagtataatccttaatgtcttctcttcaatatagcaattaacttcttattgaattatatgcaccaagatttctttttttttttgctttctgtacattcatcttatgcaattatgtttttttaagttgacataagaactttaaaccgaactctcaaacaatttttaaacccatatataatgtttcctataagtggaacattgcaaaatagttttctttgtattctggtgttttagtagaaaaatggataatgaacgattttatctatagatgcccagtttttgaaggtagactattctagcaacttgattctggaacgggagaagagctttctgtgattcagtggaattgtggtttcttatctccaaattgaagcaataccaatttgacagtattggtcagctttgtggacagaatcttct

SEQ ID NO: 709517 - DNA, 631 bp, Homo sapiens
caatcagggccgagctttctcattattaaaagcaagcctcagcaatacatacagatctttaacacaactcctgaaaattctaagtccttccttatagcaaatagggacattttcaagaaagccaagaatgaggatgaagatccctcaaaggcatttcttcctgggttttaaaaacacctgactgacagaggtctatacccagggttagatatttaattttgatgaaactgacctcaatttgatgtaagtgcccccaaggacctacattttgaagaaggaagcatgaatcctagaattcaaggatgcaaagaatcaactggactacgattgtgggtgcaaatccagtgaagaattaaccatattacgctttttttatkgggattacttaactggactgattctggatgcgaatccagtggagacttaaccatgttattctttttattaggattgctctggttacaaagttccattggttttgaacgatctgtccctagccctcttcccccatatgatctctattattcttattgtgtgattttgtggaatgcaaagtttttcagcaacacaaatatggtattagagtagaagtacctgaatataacaaagtatttttagggaagaataatac

SEQ ID NO: 709518 - DNA, 1980 bp, Homo sapiens
taattatattaacatgttaaatccatacaacaagccatagcattgttcccattttaaagaagaagaaacaaaagtcttcatttgcagagaaagttgaagactttctcaaggtcacacacacagcaggtggcacaccccaactcaaacccagatctgtttgatttcaaagcacatgcctggaaccattctgttattctgtgtcatcctcagctccagagccctggatctgtctagccaccagcaccccgaaaagtgagcttgcaagctttccccactccctcataccagcccttcagcattcctccctcaagaacctgcttccagtcaacaaaccagctaatgactcctttgcccatcctcatccttccccagctcctgctggggagagcctctcagcccctccaaccaagctctatgagaatgaggtgaaggcatttcttcactccctttcccagatgagatctgagatccaaggtccatcatctgttcctgtaattctactttgaagaattctaatcattttcattgctcatctccaaacttcttcaactatcaaccaaactcatttggcttcttggtccccacctacccttaatccagaatgtaagctccatgagagaagacactgaggtctgttttatttcctgctgtaaacctggcacatagaagagtgaccaacacatagtaggtgctcaatacatatctgccaaataaataagagctttctgttatccaaacagaaatacattgtctccatttctgggcatctcttcatacatgatgctttctcaattgccagaaatgcatcctctatatttctttttatcaaacactttctatagaaacatactccacaacttcataggctggataggtcaatttgtcccttcttagagcacaagatgcatttacatttctaaagcctggccagggccactagctcatgcctgtaatcccaatgctctgggggcccaaggcgggagagttgcttgaggccaggagttcaagaccagcccaggcaaaatagtgagactctgtctctctatttttttttttctttgagacaggatctcactctgtcacccaggatggagtgcagtggcatgatcttggctgactgcaacctccacctcccagattcaagtgattctcctgcctcagcctctcaagtagctgcaattataggcatatgccacttcacctggctaatttttatatttttgatagagatgggttttaccatgttggccaggctggtctctaactcctggcctcaagtgatccacccgttttggcctcccaaagtgctgggattacaggcatgagccaccacgcccggcctttttttttttttttttttttttaatttctaaagcctgacttaggattgcctctatgtcactgtgcagtgcccctctagataaagatgttttcaaattcacctgtgtggtgccctggaaagagagcgttcaaccacacatgtactatgttcaggaggaaacaagattaaaattttatttccatctcttaattggtactgacgtcccaagagaaatactggtccattaagtaaggaatgctaattgcttactcacctcctactgacagtgatracaggcttggttaagggtttttattaaggcccattaaagggaagactgtgtggcaagttgctgggttgcttgggaggcagagacttgaacagagaagctgagggggtgctggtgggagtgcaaagtgtaggaaggtgcaggtgaatgaggaaacagattctggggaagggaggacagctgggaagagtgtaagtcacatagatcacatgcctcgaaaatggttttggatctgaaatagtttgttgtaatttaaaacaaatttaatccttactgattgtgttagttcattttgtgctgctagatgggaatacttgaggctgggtaatttttttttttttaaaggtctagttggcacacaattctgatg

SEQ ID NO: 709519 - DNA, 1422 bp, Homo sapiens
ataaaattcacggcaggccattgttttggactgagttccaacagaccagaccaaaccagaatggagtcagtcatgctaggcgccacataatcaagatgaacttacaaaggggccagtcttctgcaaaaayaggacgttcactgcaaccagtccaaaggggcccagtaaacctgagcctacattctaaggaagtccccactgctttaaccctacaagggaagtaacttcaagtaacctgatgttaaccaatccactttttgcactatactgatttcctgttcctgctcaagctactttacaaaagccaaccgccctgtcatgcctggcaaagcatctttctatttcattgatgggacgctgcccaattcatgattctgttctttgacaaagccttacgtatagtctcaccactgtatctccatcgcctgacaaaagaccagcacacagtaactgaagaatacatatttattgaataagaataaaagatgtgtacatgatgctaactgagatgcagatgagaaggaattctgaaaacagggaaaagctttacaaaaataggtgatttctaaaatttagactgagaaacagttgtcaaattttggcaggcagagaaggggactgaagggaaaaccaaaggtccagcatgagcaacacagaagagtgttgaagtgtgggttaacttccctgagttgatgaagctgctcttctggagtcatcctggtataatcattacgcatatgtttttctgagcccatctcactgaatattcagaaagtgatttgaggcctaagcagctcatagttggcaaagaacaactgcattaatcttcagctgctgtgaaaagtgccccccaataaagccgggtgcaatgtgagtttggacaatttctccttggggtttgggtgtttttgaatgcatgcccggaggctactaaagtaaatccctttttagaatctaaacaaacacacaggaaggcgaggggagtcagaggcaatggcaatggctctcaggggattttggttgacggaaaagatatctggatcggggaggagagggacgctggtgacagtcagaggacttagctcaaagtcctttaccgaacctcctgcctgcttctccaggagacaattaagcaaaacctccctttcttctgtctgggaccccacagaagatccaaataaggctccacatgggacagcataattcaactgggagaacctgcagccctctcctcctgcaaggagtaaaccagataggacaagagatcatttagaagagaaactatacttgttcttgatattatacggtgcttcaagttcaaggtgattcagagtcttaaattctcaaccctgagtcttaaatctcagagtaatgctcaacttttcttctcccccccactgccaaaccctactgactcttgat

SEQ ID NO: 709520 - DNA, 1422 bp, Homo sapiens
ataaaattcacggcaggccattgttttggactgagttccaacagaccagaccaaaccagaatggagtcagtcatgctaggcgccacataatcaagatgaacttacaaaggggccagtcttctgcaaaaacaggacgttcactgcaaccartccaaaggggcccagtaaacctgagcctacattctaaggaagtccccactgctttaaccctacaagggaagtaacttcaagtaacctgatgttaaccaatccactttttgcactatactgatttcctgttcctgctcaagctactttacaaaagccaaccgccctgtcatgcctggcaaagcatctttctatttcattgatgggacgctgcccaattcatgattctgttctttgacaaagccttacgtatagtctcaccactgtatctccatcgcctgacaaaagaccagcacacagtaactgaagaatacatatttattgaataagaataaaagatgtgtacatgatgctaactgagatgcagatgagaaggaattctgaaaacagggaaaagctttacaaaaataggtgatttctaaaatttagactgagaaacagttgtcaaattttggcaggcagagaaggggactgaagggaaaaccaaaggtccagcatgagcaacacagaagagtgttgaagtgtgggttaacttccctgagttgatgaagctgctcttctggagtcatcctggtataatcattacgcatatgtttttctgagcccatctcactgaatattcagaaagtgatttgaggcctaagcagctcatagttggcaaagaacaactgcattaatcttcagctgctgtgaaaagtgccccccaataaagccgggtgcaatgtgagtttggacaatttctccttggggtttgggtgtttttgaatgcatgcccggaggctactaaagtaaatccctttttagaatctaaacaaacacacaggaaggcgaggggagtcagaggcaatggcaatggctctcaggggattttggttgacggaaaagatatctggatcggggaggagagggacgctggtgacagtcagaggacttagctcaaagtcctttaccgaacctcctgcctgcttctccaggagacaattaagcaaaacctccctttcttctgtctgggaccccacagaagatccaaataaggctccacatgggacagcataattcaactgggagaacctgcagccctctcctcctgcaaggagtaaaccagataggacaagagatcatttagaagagaaactatacttgttcttgatattatacggtgcttcaagttcaaggtgattcagagtcttaaattctcaaccctgagtcttaaatctcagagtaatgctcaacttttcttctcccccccactgccaaaccctactgactcttgat

SEQ ID NO: 709521 - DNA, 1810 bp, Homo sapiens
atatctgaagggctgtcatatgaaagagagatttgagatgttctgtgtggcctcaaggaggtagaagtaggagctagaggaaaccaggttttacctcaatataaataactatccaatgtggaatgggaagctttggcaggtgatgggtcttccaacaccaaaaatattcaagaataagcaaactacatcgtttcccaactttgctggtcatcagattctcatgaggaacttttaaaaaattagattatcaggggctccacaactagattccctgcttccataggtctgaggtagaccaggaaaatctgagttttctaaaggtgctccaagcaattatgatgttaaagccaacatgtattggtatttgcactggtattgactatgtgttttaaggatgatcccatcactcaaggaggagaaggatgtttccagttttcatttctgtaggtaagttatatccttctcctccttgagtgacatgatcagccaaaccaagtttaccttgtagctgaatttggcccatgggctgccagttttgagccttgtaaattacctaaatggcatttttaatccaaatttctgatatttttatatttgactcctgaattactctttaatagtcaataatcactttttcaacccttaaaaaatacctaggaaaaaataagctaacctaccagaatatcccttacatttagcacttactatgtgctcaggctgttcgaagaattttgaaaaattaactctttcatcttcaaagcagctcagttgtgtaggtactattattaccctcattttacagatgaggaaactgagccctgggggatttacataacttgcccaaggtcacacacctaaactcagcaggcaatacttaaccttagtcgtgctgcctctctgagtatttgctagaaaacattaattcatgctttggtgggtagcctgctactggtacaaacattagtttgtgaaaatgcccaggcacatgggtttttccattcagaagtttcagatctcagagcactcactgtgcctgtgcagcatcagcagggatgcaggagacaccagacacacacaaacttagaggcagcaaaggacacgctttgcatggagagacaattgacctgtgtagagacacccacactgggaagccaacaagaacgcccaactcattaactggaaagcacgggaggcattcacaaagtagagccctaacctgctgcgtgttatcaatagtggcctgtgaatttgaatgagaacgtgttcaatatgtgactctctcattaagaaaacctcatgaagtcctggagacaatcaaagcaatgtatttagatagcagaaagaccaccagtctagtagtgaggaaccctaagtgttcatcccatttccataacaacagttatgtgaatkgtgaatgttattttccctctttggaccttagtttacccaaatctaaaatgagaaatttagataagattagagtaacaaatccaaatgtttgtgtagatgaggcagctaatgtaaagtatgaaacaagcatttcccaatcctcttagctcaattctcagcaggtttggaggcgggtaacggtagatttgagaagatgtattgtaactgaaactcggtctcagtgtggggcaatagggagtggtgaggactgtggcaaactggaaaacacaagcctcatctgaaggatgactactacttggcttgatttgatttttaccttggagaaatagacaccaagtgtggcccaatattccaagtaaagaaaagccagatgtaaaatatcttgatttttaaaatgcag

SEQ ID NO: 709522 - DNA, 1041 bp, Homo sapiens
tgttaaaaggtcacattcttcaaggtgaaacatgaagtaattttgaaattggagaagggggctgagaatggcagtattccaagtataaaaattccatgtgaatttgattagaataatttaaattttgtagtgacttcactctccagaggctatgcgatcatgagaaaatgctgaaagggagaattttagttgtgagctccctctgagttaytgaagttcagaaaggcctttagctgtgtaatgatgtgcaaatcagtccacattccacggtggctcaacagatgaactatgtcaatggtgaaatgttgtctttataatgtctgctgatacctctatttgagagaaccagctgttggtcctttatactgctgtccatttagaaatctgagcaataaagcaatacttaatacttattgcatattcatttacccccctagctacatattagtgtaaacatgttaaattttaaataaaaggcagtattaagcgtatgtgtctctggcacatacaagtaagtgaagctttcatgcagttgtatatcaaactgtacagagatgacttcagactaaaaagattgtggaacaattttgtttgattaaggagacataaaactagattgtcataaagaatgctaggattacagacttctataaaaagacatgctcactacatctattcatgtgagtaaagaatagtatagttaccagaaaaggaaaagttatgtattcagcaaaaccaaagatatttgatgttatttttatgacaatatgcaagtcttgaaataagtattcatgtattttcaaggttgtttatattatgaaattaaaatagtcctaattaccattgcaaaaatccttgggataatatatgatgaattctaacatgtttcgctcatgacctcttttgattttttacaattattttacagggtagttttgtgtggtgtgtgtttgtattttacagactttaatttttagagcacttttaggttcacagcaaaattaaggggtaagtacagagttccgatatactccctgccgc

SEQ ID NO: 709523 - DNA, 923 bp, Homo sapiens
tagcagaagaaaaagttgcagtctcagaaagccttccattaaaacaatttattttatcactacccagagtctcatatttctgtctctgatactttccctgccatggttccaccgagaacccctggcccctggtctccttggaattttctgtatactccactgggatcctgtagtgtgtcatctaggggtgtagagaggtgggtggccttctcttgccgtcatgctcccagtgtctgtgtaggctttactgctgattgaggtgaagaagagttgaatcccccagtaagactccacaagtcgctcagagggaatctggccagagcaggagctagcacccttttcttccctgcaactcacaggggtaaagtcatagagtcaattcttggtgggtgacatgtgatagaaacagacaaaaagtaggatgaatgaaaactctgcgggtaaattgtttagcctcatttaaagcattaattccagcctttcttcctgccctccttttccttcccttacagctctcagtcactaagtgaatgggctcttgtggacgtcacctcttgcccaagattctctctctggtggggatgctaaggaatacaaatagtccaaacagtaaaaagccaaaggcccagagactccaccagcagggactttaccacaaataattcagtgctgactccagaagaaaggaggatggacctgtcttctttgctgtttccttttttgccaaacagcataggcctactgccctgtggttcttcgcttttaggcagagcatgtcccaatgaargtggaagcaaagattgtgctaaccaggccatgagtgatggattttttcaaaatcccattgtagtgggagattcaattctcagtgagctgggcaaatttactgagtacctagtctgtggccagagcagcaatggatg

SEQ ID NO: 709524 - DNA, 621 bp, Homo sapiens
tgtacggagggtctagcctgggtgtgtacggagggtctagcctgggtgagtacggagggtctagcctgggtgagtacggagggtctagcctgggtgagtacggagrgtctagcctgggtgtgtatggaggatctagcctgggtgagtatggagggtctagcctgggtgagtatggagggtctagcctgggtgtgtatggagggtctagcctgggtgagtatggagggtctagcctgggtgtgtatggagggtctagcctgggtgagtatggagggtctagcctgggtgtgtacggagggtctagtctgagtgcgtgtggggacctcagaacactgtgaccttagcccagcaagccaggcccttcatgaaggccaagaaggctgccaccattccctgccagcccaagaactccagcttccccactgcctctgtgtgcccctttgcgtcctgtgaaggccattgagaaatgcccagtgtgccccctgggaaagggcacggcctgtgctcctgacacgggctgtgcttggccacagaaccacccagcgtctcccctgctgctgtccacgtcagttcatgaggcaacgtcgcgtggtctcagacgtggagcagccagcggcagct

SEQ ID NO: 709525 - DNA, 594 bp, Homo sapiens
tggggcctggggtgccgcatgggtgctctggaggcacgggaagagagacccagcattagtccttgggcagcctctggccgcctctgggcctcagtgcctctccaggcagtggacaagcccgggaggggctgaggcagagcgggaggggagggagagaaaggaggtcttttgggagggcacacaggatagacaagatggcttagggcagccctaagacaccagctggcttgggacccagaaatggaggcccggycttgaatgacttgggtgtaacgatagcagtaataaaaataacaggattagggcccgggtggggtagctcacccctataatctcggcgctttgggaggccaaggcgggcgggtcacttgaggccaggagttccagaccagcctgggcaacatagtgagaccctcatctctacaaaaaaaaaaaaaaaaaaaaaaaagacccaggcatggtggcatgctcctgtggtcccagctactcaggaggcggaggtgggaagatggcttgagcccaggatgtcaaggctgcagtgagctgtgttggcaccactgcactccagcctgggtgacagagtgagactgtttc

SEQ ID NO: 709526 - DNA, 2619 bp, Homo sapiens
tatgctaattaattggaagtataatcctagggcactaacagtgagagaaaaagaaagtgaggcaaagaagattgaaaaataaatgcaaggggatatattatctatcgctatctgacaagccttaaaatgacatgtctggaaaacttgtgtaatgaaacagtccattggcaggaaaaataggaaatttatctgctgtctcttttgtgtctcttaccaactattggtcaaaatttgccctggcctgcctctctttgttgtgtcctggtccctatggcagcctctggtgaagtgagatcccaaattctgcagtggcagctgtagtggggatagtaatacagagtctgaaagctaggcaagtccaggaagctctgaggagacatgtggacagtgtttgacaaacccccatataactccatcagcagatttaatagttaatgcctcctaaacaccaatgcaatttatttctcctctcagcaagaactcacatctatgcttcaatactttcaagtaatgttttaattagaagaaaatagtaatttagaagtactatctggccaggcgtggtgactcacacccataaccccagcagtctgggaggcccaggcaggaggcttgtttgaggccagtagttcgagatcagtctgtacaacatagggagaccacatctgtacaaaaaattgtttaaaaattatctgggcatggtggtgcacaactgtagccccagtgtactctagagtacactgtgtactctagatgaggtggagagtcactttagcccaggaggtcaagactgcagtgagccctgataacgccactacactccagcgcaggtgacagactgagaccctatctcaaaaaaagaaaagaaaagaaaagaaaagaaaagaaaatcaatactatctgatagctgttatttttaaaatgaatatcaacttatatgttgcttacaattgtggaatagcttgaaaatacataggcatttgggactattagttcattgttttatgagtattcacagttagagtttctcactcatttcctaaattatttctcaaataagaaataacctgatactacattttattctaaccgtacttttcaatctctttgatatttagaatgttgatgactaaggcaaatttcatgactttttaatatctaatcataaaatttttccttataaagtttcagtttgaactcctgtagcaaggattttttaccatttccgttttaactatttttggacccagctgactaraataatatttgtatgtgaattagctgtgaagtctacacagatttacaaataaaatatcattgttagaaaacttggccgggcgtggtggctcacgcctgtaatcccagcactttgggaggccgagacgggcggatcatgaagtcaggagatcgagaccatcctggctaacatggtgaaaccctgtctctactaaaaatacaataaattagccagacatggtggcgggtgcctgtagtcccagctacactggaggctgaggcaggagaatggcgtgaacccgggggcggagcttgcagtgagctgagatagcgccactgcactgcagcctgcgtgacagagcgagactcagtctcaaaaaaaaaaaggaaaacttattttggcaccaaattttatggcaggctactactgaatggtaatgttacttgttttaaaggtacctcaagaataaatgagtccacctaagatatttaaaaccgcacctttgacacaatctggtattaactaaagagtaattctaaattctggaatagatgatcaatattaaaaagtgtacagtttatttttcatacaaataattgagttactttaagaaaagtacaaaaataaagattaatatctatttaaattatactgacaggaaaaattttcatattttttaagtgattgtaatattagttcaataaatatcatccattaggcccaaaggtttgaaatagtgcttataatatgaagaactttctttagaaaattctcaattttcacctccatttaacatgttctgtaacattctctttcttgatatgaaggctgattacagaactcctccttgttttacacagtaaatgtggaactaggtgtgaatataaatttgtttaaactaataattgccattcaatagccttctgagttcatttccatcagatttacttaaaatcgtttttagagtacagtaatagtgagagttgagtttcacatataatgttcatgagggaacaaaatgttctcaaacacaaattttgaaagcagtcttacagtgtcttgtattggctagatcatgcagataaatctttatgagggtatcactttgataggaaaatatattcaattattactaataatttctttatatgtaaaagacaatattttatttgcttttcctaaaccaaactggtgcatgccatacttggtcatagtaaataaaagaaaagataatatcaacatctttcttctagtgagcagaattcaggaaagttctcaacatgaatacattgtggtcaggtttatagacaggtttattaggcagtaggtttaaagaatattcatatactattaataccaagtggtgataagcagtgataaaa

SEQ ID NO: 709527 - DNA, 2619 bp, Homo sapiens
tatgctaattaattggaagtataatcctagggcactaacagtgagagaaaaagaaagtgaggcaaagaagattgaaaaataaatgcaaggggatatattatctatcgctatctgacaagccttaaaatgacatgtctggaaaacttgtgtaatgaaacagtccattggcaggaaaaataggaaatttatctgctgtctcttttgtgtctcttaccaactattggtcaaaatttgccctggcctgcctctctttgttgtgtcctggtccctatggcagcctctggtgaagtgagatcccaaattctgcagtggcagctgtagtggggatagtaatacagagtctgaaagctaggcaagtccaggaagctctgaggagacatgtggacagtgtttgacaaacccccatataactccatcagcagatttaatagttaatgcctcctaaacaccaatgcaatttatttctcctctcagcaagaactcacatctatgcttcaatactttcaagtaatgttttaattagaagaaaatagtaatttagaagtactatctggccaggcgtggtgactcacacccataaccccagcagtctgggaggcccaggcaggaggcttgtttgaggccagtagttcgagatcagtctgtacaacatagggagaccacatctgtacaaaaaattgtttaaaaattatctgggcatggtggtgcacaactgtagccccagtgtactctagagtacactgtgtactctagatgaggtggagagtcactttagcccaggaggtcaagactgcagtgagccctgataacgccactacactccagcgcaggtgacagactgagaccctatctcaaaaaaagaaaagaaaagaaaagaaaagaaaagaaaatcaatactatctgatagctgttatttttaaaatgaatatcaacttatatgttgcttacaattgtggaatagcttgaaaatacataggcatttgggactattagttcattgttttatgagtattcacagttagagtttctcactcatttcctaaattatttctcaaataagaaataacctgatactacattttattctaaccgtacttttcaatctctttgatatttagaatgttgatgactaaggcaaatttcatgactttttaatatctaatcataaaatttttccttataaagtttcagtttgaactcctgtagcaaggattttttaccatttccgttttaactatttttggacccagctgactagaataatatttgtatgtgaattagctgtgaagtctacacagatttacaaataaaatatcattgttaraaaacttggccgggcgtggtggctcacgcctgtaatcccagcactttgggaggccgagacgggcggatcatgaagtcaggagatcgagaccatcctggctaacatggtgaaaccctgtctctactaaaaatacaataaattagccagacatggtggcgggtgcctgtagtcccagctacactggaggctgaggcaggagaatggcgtgaacccgggggcggagcttgcagtgagctgagatagcgccactgcactgcagcctgcgtgacagagcgagactcagtctcaaaaaaaaaaaggaaaacttattttggcaccaaattttatggcaggctactactgaatggtaatgttacttgttttaaaggtacctcaagaataaatgagtccacctaagatatttaaaaccgcacctttgacacaatctggtattaactaaagagtaattctaaattctggaatagatgatcaatattaaaaagtgtacagtttatttttcatacaaataattgagttactttaagaaaagtacaaaaataaagattaatatctatttaaattatactgacaggaaaaattttcatattttttaagtgattgtaatattagttcaataaatatcatccattaggcccaaaggtttgaaatagtgcttataatatgaagaactttctttagaaaattctcaattttcacctccatttaacatgttctgtaacattctctttcttgatatgaaggctgattacagaactcctccttgttttacacagtaaatgtggaactaggtgtgaatataaatttgtttaaactaataattgccattcaatagccttctgagttcatttccatcagatttacttaaaatcgtttttagagtacagtaatagtgagagttgagtttcacatataatgttcatgagggaacaaaatgttctcaaacacaaattttgaaagcagtcttacagtgtcttgtattggctagatcatgcagataaatctttatgagggtatcactttgataggaaaatatattcaattattactaataatttctttatatgtaaaagacaatattttatttgcttttcctaaaccaaactggtgcatgccatacttggtcatagtaaataaaagaaaagataatatcaacatctttcttctagtgagcagaattcaggaaagttctcaacatgaatacattgtggtcaggtttatagacaggtttattaggcagtaggtttaaagaatattcatatactattaataccaagtggtgataagcagtgataaaa

SEQ ID NO: 709528 - DNA, 822 bp, Homo sapiens
cccagagtgctgggwctacaggcgtgagccaccatgcccagccttattttatatatatatatgtattggtttttttttttgacatggagtctcactctgttgcccaggctggagtgaaatggcatgatcttggctcactgcaacccctgcctctggggttcaagcagttcttctgcctcagcctcccaagtagctgggattacaggcagctcccaccatggccggctaattttttgtgtttttagtagagatggggtttcatcatgttggccaggctggtctcgaactcccgacctcaagtgatctacctgccttggcctcccgaagccctgtgattacagccatgagccactgagcctggtcagcttttttatttctaagagtcagagtctcacaatgtcacccaggctggagtgcagtggcttgatcatggctccctgcagcctccaactcctggactcaagccatccttccccctcatccacactgggattacagctgcaagccactacacctggctcaatcaactacttcctatgaatgtttcacttctgaccttttatgaatcccctcaacttaaaatccaaaggagtcacatattatgtaattccattcatattaaatttctagaatagggaaatctataggaactgaaaatagattagtggttatttcaggttgatagctaaagggtaaaaggtttcagagtgatgaaaatgttcaaaaattgactgtgatggccgggcacagtggctcacgcctgtaatcccagcactttgggaggccgaggcggacggatcacgaggtcaagagatcgagacc

SEQ ID NO: 709529 - DNA, 822 bp, Homo sapiens
cccagagtgctgggtctacaggcgtgagccaccatgcccagccttattttatatatatrtatgtattggtttttttttttgacatggagtctcactctgttgcccaggctggagtgaaatggcatgatcttggctcactgcaacccctgcctctggggttcaagcagttcttctgcctcagcctcccaagtagctgggattacaggcagctcccaccatggccggctaattttttgtgtttttagtagagatggggtttcatcatgttggccaggctggtctcgaactcccgacctcaagtgatctacctgccttggcctcccgaagccctgtgattacagccatgagccactgagcctggtcagcttttttatttctaagagtcagagtctcacaatgtcacccaggctggagtgcagtggcttgatcatggctccctgcagcctccaactcctggactcaagccatccttccccctcatccacactgggattacagctgcaagccactacacctggctcaatcaactacttcctatgaatgtttcacttctgaccttttatgaatcccctcaacttaaaatccaaaggagtcacatattatgtaattccattcatattaaatttctagaatagggaaatctataggaactgaaaatagattagtggttatttcaggttgatagctaaagggtaaaaggtttcagagtgatgaaaatgttcaaaaattgactgtgatggccgggcacagtggctcacgcctgtaatcccagcactttgggaggccgaggcggacggatcacgaggtcaagagatcgagacc

SEQ ID NO: 709530 - DNA, 822 bp, Homo sapiens
cccagagtgctgggtctacaggcgtgagccaccatgcccagccttattttatatatatatatgtattgktttttttttttgacatggagtctcactctgttgcccaggctggagtgaaatggcatgatcttggctcactgcaacccctgcctctggggttcaagcagttcttctgcctcagcctcccaagtagctgggattacaggcagctcccaccatggccggctaattttttgtgtttttagtagagatggggtttcatcatgttggccaggctggtctcgaactcccgacctcaagtgatctacctgccttggcctcccgaagccctgtgattacagccatgagccactgagcctggtcagcttttttatttctaagagtcagagtctcacaatgtcacccaggctggagtgcagtggcttgatcatggctccctgcagcctccaactcctggactcaagccatccttccccctcatccacactgggattacagctgcaagccactacacctggctcaatcaactacttcctatgaatgtttcacttctgaccttttatgaatcccctcaacttaaaatccaaaggagtcacatattatgtaattccattcatattaaatttctagaatagggaaatctataggaactgaaaatagattagtggttatttcaggttgatagctaaagggtaaaaggtttcagagtgatgaaaatgttcaaaaattgactgtgatggccgggcacagtggctcacgcctgtaatcccagcactttgggaggccgaggcggacggatcacgaggtcaagagatcgagacc

SEQ ID NO: 709531 - DNA, 822 bp, Homo sapiens
cccagagtgctgggtctacaggcgtgagccaccatgcccagccttattttatatatatatatgtattggtttttttttttgacatggagtctcactctgttgcccaggctggagtgaaatggcatgatcttggctcactgcaacccctgcctctggggttcaagcagttcttctgcctcagcctcccaagtagctgggattacaggcagctcccaccatggccggctaattttttgtgtttttagtagagatggggtttcatcatgttggccaggctggtctcgaactcccgacctcaagtgatctacctgccttggcctcccgaagccctgtgattacagccatgagccactgagcctggtcagcttttttatttctaagagtcagagtctcacaatgtcacccaggctggagtgcagtggctygatcatggctccctgcagcctccaactcctggactcaagccatccttccccctcatccacactgggattacagctgcaagccactacacctggctcaatcaactacttcctatgaatgtttcacttctgaccttttatgaatcccctcaacttaaaatccaaaggagtcacatattatgtaattccattcatattaaatttctagaatagggaaatctataggaactgaaaatagattagtggttatttcaggttgatagctaaagggtaaaaggtttcagagtgatgaaaatgttcaaaaattgactgtgatggccgggcacagtggctcacgcctgtaatcccagcactttgggaggccgaggcggacggatcacgaggtcaagagatcgagacc

SEQ ID NO: 709532 - DNA, 1106 bp, Homo sapiens
ggatctgctgttgcaatattacaattatctgattatgtgtaatacatatcatatattatatactatatacaacatatatatcatatagaatatatgatatttgaaagtttctgaaatatatttccccattgttgaatacgcacatctcagaaagacactactaaatgctaagaaatgaattaattagttactacttggtaagcagtaccccataataatgtactcaactgtttatttaaattaatcgtcttacaaaatatattaactcctcaccaaagtaagatgcattacctcattctattgattcttggaaggaaataaaaaaggcaaatattttctctgctttacaaagagaggaactagaacttggtgagtggatgggattgtataagcagatcacagagcaggccagcatcagaaggagaataaactgtggcccagtgaatctatagagctttccattaacactatgcctcttattatctgttacactttgtagtgtatgagtgagtgtgtttatgcattttggggtagtgggtaggaaagccagtagagaggaggtaatcattgagctatgacgtgatctagaaaggttaattcattccctgcactaggggttccagggtatcactaaagactagattcaaaaggttacatagctcttccatttgctctctagctgctgaagttcattaagccatattataatgggaaacgcttaccttataaagatagtgttaatctacaaatataaatgttgcttcaaactttcaaaaaattaccttgctctttctaaagtctacacaaaatgtaaayacaagtctttagggaatgggacaacccggcaacagaattcatcatcccatgaactgcaaagttgtctcaaatattgatcttttcccaaataaaggcccatacatgaatatcttctctcttgggacaatcagataagtcagatcaaagttctcaatattttttcttttcctttcctggcccagctgtttttggactcttatggttgaattaaatgaatttttttcctgttttcctattttctctttaccattgtttgttatctgagcttcaccataagtttaaataaattc

SEQ ID NO: 709533 - DNA, 524 bp, Homo sapiens
tgaacttgttttttttcctacctatctctcagttcaaaaactgattcttttggaaatccagttcaaacatcagctcctctaggaagttttccctgacctctcatcaacccaacagttatctcctacacctcagaacccagtaaacactcccattgttagatttatcaacctgaatggtaattttacttgactttacatctgttcaccttgaaaggagggacttttgtcctttgtaccttcatttatccagcacctagcagaaggaccagaacatggtgaataagcattttttgttaaattgaagttaaaatttaraatcacgctccttaaaattcaatttctcgctcgcatactttgtcattggtggaaacacacaaaatttacaggaagtaattaggcaagaataattttgatgatatttaatcctctaacccattaattctcctctatgaatatttcctaagaaactaatcagaactataaaaaaagttatacaaaagaatgtctataatagtgccagtcat

SEQ ID NO: 709534 - DNA, 913 bp, Homo sapiens
caagatgggagacatggctcagagcttctcccacagagcctctggaatggacgggatgacagaacagaagtgtctcctgagggtcccggctggatggggtggggggtaccaggcacctcccagccagcttacctgccgccaggtgtgaccacagtctgacgtgatgtacatttcttctttatattccaccagctgtgagcccaggttacctggtccaaaagaaaaggggcagtactacccttaggatcgtccagctttacccctttaacaagtctgagcatggaaaaacctcaagcaacggtggccagtgccccgggtctccatatcccccacagacctgctgtggctgctgcgctggggccctgggtctgggtctatgcagtgaaggatcagccctgcccaaagacagccacattcaggggactccagcagaggcccgggacaggtggagctcaggtacctcagagaacccaccagtgtggtccacaaataagaagcatggagtgtggctagggatgggctggagaggacgtgggccaggtgggccaatcatgggcagcccctgtggggcttgaaagcagggcaggacatggccgagtttgtgtttggagacagctcctgggcaccgggtgcagaggagccagaggcaggtgcaggagagaaggcaggtgggcacacascagggtctcactatctgctgggtggacatttgggaggaaggtgaggtgggcaccaaaccaactgggggtgcagaatgtggtttgggtttactggagccccagcactgggctgattgggtccatctccagccttgatgcctactcggaggggctcagacttaatgctgtgggcagtgtcagaatgggaagaactcatggccagcatccaagccaacctcatgttacagatgagg

SEQ ID NO: 709535 - DNA, 913 bp, Homo sapiens
caagatgggagacatggctcagagcttctcccacagagcctctggaatggacgggatgacagaacagaagtgtctcctgagggtcccggctggatggggtggggggtaccaggcacctcccagccagcttacctgccgccaggtgtgaccacagtctgacgtgatgtacatttcttctttatattccaccagctgtgagcccaggttacctggtccaaaagaaaaggggcagtactacccttaggatcgtccagctttacccctttaacaagtctgagcatggaaaaacctcaagcaacggtggccagtgccccgggtctccatatcccccacagacctgctgtggctgctgcgctggggccctgggtctgggtctatgcagtgaaggatcagccctgcccaaagacagccacattcaggggactccagcagaggcccgggacaggtggagctcaggtacctcagagaacccaccagtgtggtccacaaataagaagcatggagtgtggctagggatgggctggagaggacgtgggccaggtgggccaatcatgggcagcccctgtggggcttgaaagcagggcaggacatggccgagtttgtgtttggagacagctcctgggcaccgggtgcagaggagccagaggcaggtgcaggagagaaggcaggtgggcacacaccagggtctcactatctgctgggtggacatttgggaggaaggtgaggtgggcaccaaaccaactgggggtgcagaatgtggtttgggtttactggagccccagcactgggctgattgggtccatctccagccttgatgyctactcggaggggctcagacttaatgctgtgggcagtgtcagaatgggaagaactcatggccagcatccaagccaacctcatgttacagatgagg

SEQ ID NO: 709536 - DNA, 3605 bp, Homo sapiens
aatagtgacaaatgggccccaatgaaaacctgtgaggtgttaagacgttgcccgctgcaatagatttttctgatttcttacagtggaaaagcaggcctacgagtgaatagacttgctggcacctttcagtcctaccctcctgccccaccccagatagctcaggcagaaagacagaggcgacttgctgaggagggaggctgctgtgatcttggtaggcagggttgggcttctgcgctgcagaagggagctctaatcaggagaaggagaaggtgtagtgcaggagtccccagcagcagtgtgcccggcagaggacgccctggctctgccatgctttgctgttctaggtttcctagaaggccagagctcatgggttggtctccgtcaacctctcccgttcccccgatgagctgtgcacatctggtcacttgctgcgtgcacagtggttagagttgaattagagggtgctgcttcacaaaccctagctacctctccccacccctcgccactagtggcctattctggttgcctggcactcaggccagagaagtggaaccctcctcagggttccctgtggggtggccagttacggcctgcaggccactggtgaacacaggcggctctatgaacccttttgcattcgccttgcggcctgctgacggccaaacagacggctcccccttctcctggggcagctgcaggtgccatgctggtgtctgacacacgcactcccacgcaagcctgggacaccaggtgaaaagaagggcaatgccggcaggcttggaggtgcctgcccatggggcaccaggatgtcctgcacaggtggcaggccagtgcgcatcaggagccccagaacccgccttgggtgcatgtggtcagagacagggcttcctctgaggccacccagggacgaggacaggagaaccccggggcaggctgtggccctgggagtgcatgcagaatgctccagtgttgaccgaggtgggcccgggttcctgcagggctggaggcaggccaagctggggactcacactgctccaggactctcccttctctgtccgtttggcacataggggccagagggtgccctaaagaagtgtctagcaaatcatcaaagcctaccagatggaccagggccgggagatgcagcaccagccacctggacgcctggcactcactgcagcctcacgccttagaagagtgaccatggactgcacggtgaatgaagttttatgctgaattcaagatgcaaacagattcaaaccactttccaatgaagctgaatcatcctaaaacagatctgatcacaccactcctgttaaagccatccctgcatttccccattgagggaaggaggtatccccagacgggaagctggtcaagtggcctgagcaaagatttgtgacccagagttcagagaaaaacagagggctgaaaaatcacgcacgtgtgggatcccaatgacaacttcataacgtgtgtatgagcgaaaagattgtaaagaacaaaaatgcccagttattgtttttctggatggtgtgattctggtgataccttatttccctttttatacctttctgtatcttccaagcattctgcaataatcaggcatcacttttatgagcgctaagtcctcaggtacagtttgcccattcattgagaggctgtgtggctgcaggagggacacagtcaggaggtgctgtgagtggcccaacttgtcctgcccctgcactttcacccttggagatgccatggccacacacacaggatagcccaggccttctgagccatacggctgtcatatatatatatatttatttattttaatttttgaggtggaatctcgctctgtcacccaggctagagtgcagtggcacgatctcagctcactgcaacttccacctcccaggttcaagcgattctcctgcctcagcctcccaagtaggtgggattataggcatgtgccaccatgcctggctaatttttgtatttttagtagagacggggtttcatcatgttggccaggctggtctcaaacctgacctcaggtgatctgcctgcctcggcctcccaaagtgctgggattccaggtgtgagccactgtgcccagcccgtgaggctgtaatttgatgtctgttgtacccacgtgggctccatgcacttggctctgcatttccccgtgcccagtcgggttcccacatgcctgcctgaggccacacgctcaccagtttgctcccatttcattatttcaaggccaggacataaatctcaccgaggttatctcctcactgagctgcataatcgcagacaagagtctattcttagcaaaaacttgctttgacagattaatatggcttaactttgccaatgatgatacaaaaattagccctttcacagcaattctgttctgggaagcgtttttacaaagggctggtaattaattctccacacaggtcgacaggtgttatcagcaggagcggggcttgagcagaggcgggcagccrgcccctgagaggtgagtgttcacgagtcagagctcaagcctcagcttagagcaaggggttgccctgggggccacagagtcccaccctggccccagggtcagggctctctgggaggaggaattcctcccctcttagtaccacggcctccatgggccaacactggggctggtggtggtggtggggagggggctcaccattttctgagccctgctgtgtgccaggtggaatcccaggaagacagggaattgtcttctgttttgctggttggtgtgttctgagcctgcagaacagtgcctggcacattgcaagtgctcacgcagatttgctgaatataaacctgtcaaacgggtacttttgttctttctattttacacatgaggaagctgaggaagagtgatgggtggtttcaggtgtccccagggtgcagtctctaagaagggcttatgggtgacagtgggaaacagacagagaagcagtatgcccagtgaagggctcctcagtggaaggaacatgtgggtagggttttcaggtgttagtaggagcttgctggatgaggaaaagggaaagggcattctaggccttggggacagcgtagaaagagggagagcttgaaagggaagggattggctcttccttgcagattgctccatgtcaggcataggccagtctctgcattctttcatctcatcctcactccaatgccaaagggatgtttatcatcttcctccgttttcaacagaggctcagaggcactggttgatgtagccaagatcacatagtcagggggctaagactgcagctctgtgcggctctaacactagacccttctcccaccctgagttgcccagcacctaggaaggggcagggatgctggtggtggtgagctccctgcggtatgcaaggagagaagccccgggagaggccgtgtctcacaggggtgttggaaggggagtgagaagcctggtcagattctcttggcccatttcgcctcttcctcccttgcatccactggtccctggcagctgagtgctcaccttagctaggaccagggctccttacagctctgtctctccttcctcaccagcatgggcctgtgcaccacct

SEQ ID NO: 709537 - DNA, 3605 bp, Homo sapiens
aatagtgacaaatgggccccaatgaaaacctgtgaggtgttaagacgttgcccgctgcaatagatttttctgatttcttacagtggaaaagcaggcctacgagtgaatagacttgctggcacctttcagtcctaccctcctgccccaccccagatagctcaggcagaaagacagaggcgacttgctgaggagggaggctgctgtgatcttggtaggcagggttgggcttctgcgctgcagaagggagctctaatcaggagaaggagaaggtgtagtgcaggagtccccagcagcagtgtgcccggcagaggacgccctggctctgccatgctttgctgttctaggtttcctagaaggccagagctcatgggttggtctccgtcaacctctcccgttcccccgatgagctgtgcacatctggtcacttgctgcgtgcacagtggttagagttgaattagagggtgctgcttcacaaaccctagctacctctccccacccctcgccactagtggcctattctggttgcctggcactcaggccagagaagtggaaccctcctcagggttccctgtggggtggccagttacggcctgcaggccactggtgaacacaggcggctctatgaacccttttgcattcgccttgcggcctgctgacggccaaacagacggctcccccttctcctggggcagctgcaggtgccatgctggtgtctgacacacgcactcccacgcaagcctgggacaccaggtgaaaagaagggcaatgccggcaggcttggaggtgcctgcccatggggcaccaggatgtcctgcacaggtggcaggccagtgcgcatcaggagccccagaacccgccttgggtgcatgtggtcagagacagggcttcctctgaggccacccagggacgaggacaggagaaccccggggcaggctgtggccctgggagtgcatgcagaatgctccagtgttgaccgaggtgggcccgggttcctgcagggctggaggcaggccaagctggggactcacactgctccaggactctcccttctctgtccgtttggcacataggggccagagggtgccctaaagaagtgtctagcaaatcatcaaagcctaccagatggaccagggccgggagatgcagcaccagccacctggacgcctggcactcactgcagcctcacgccttagaagagtgaccatggactgcacggtgaatgaagttttatgctgaattcaagatgcaaacagattcaaaccactttccaatgaagctgaatcatcctaaaacagatctgatcacaccactcctgttaaagccatccctgcatttccccattgagggaaggaggtatccccagacgggaagctggtcaagtggcctgagcaaagatttgtgacccagagttcagagaaaaacagagggctgaaaaatcacgcacgtgtgggatcccaatgacaacttcataacgtgtgtatgagcgaaaagattgtaaagaacaaaaatgcccagttattgtttttctggatggtgtgattctggtgataccttatttccctttttatacctttctgtatcttccaagcattctgcaataatcaggcatcacttttatgagcgctaagtcctcaggtacagtttgcccattcattgagaggctgtgtggctgcaggagggacacagtcaggaggtgctgtgagtggcccaacttgtcctgcccctgcactttcacccttggagatgccatggccacacacacaggatagcccaggccttctgagccatacggctgtcatatatatatatatttatttattttaatttttgaggtggaatctcgctctgtcacccaggctagagtgcagtggcacgatctcagctcactgcaacttccacctcccaggttcaagcgattctcctgcctcagcctcccaagtaggtgggattataggcatgtgccaccatgcctggctaatttttgtatttttagtagagacggggtttcatcatgttggccaggctggtctcaaacctgacctcaggtgatctgcctgcctcggcctcccaaagtgctgggattccaggtgtgagccactgtgcccagcccgtgaggctgtaatttgatgtctgttgtacccacgtgggctccatgcacttggctctgcattyccccgtgcccagtcgggttcccacatgcctgcctgaggccacacgctcaccagtttgctcccatttcattatttcaaggccaggacataaatctcaccgaggttatctcctcactgagctgcataatcgcagacaagagtctattcttagcaaaaacttgctttgacagattaatatggcttaactttgccaatgatgatacaaaaattagccctttcacagcaattctgttctgggaagcgtttttacaaagggctggtaattaattctccacacaggtcgacaggtgttatcagcaggagcggggcttgagcagaggcgggcagccggcccctgagaggtgagtgttcacgagtcagagctcaagcctcagcttagagcaaggggttgccctgggggccacagagtcccaccctggccccagggtcagggctctctgggaggaggaattcctcccctcttagtaccacggcctccatgggccaacactggggctggtggtggtggtggggagggggctcaccattttctgagccctgctgtgtgccaggtggaatcccaggaagacagggaattgtcttctgttttgctggttggtgtgttctgagcctgcagaacagtgcctggcacattgcaagtgctcacgcagatttgctgaatataaacctgtcaaacgggtacttttgttctttctattttacacatgaggaagctgaggaagagtgatgggtggtttcaggtgtccccagggtgcagtctctaagaagggcttatgggtgacagtgggaaacagacagagaagcagtatgcccagtgaagggctcctcagtggaaggaacatgtgggtagggttttcaggtgttagtaggagcttgctggatgaggaaaagggaaagggcattctaggccttggggacagcgtagaaagagggagagcttgaaagggaagggattggctcttccttgcagattgctccatgtcaggcataggccagtctctgcattctttcatctcatcctcactccaatgccaaagggatgtttatcatcttcctccgttttcaacagaggctcagaggcactggttgatgtagccaagatcacatagtcagggggctaagactgcagctctgtgcggctctaacactagacccttctcccaccctgagttgcccagcacctaggaaggggcagggatgctggtggtggtgagctccctgcggtatgcaaggagagaagccccgggagaggccgtgtctcacaggggtgttggaaggggagtgagaagcctggtcagattctcttggcccatttcgcctcttcctcccttgcatccactggtccctggcagctgagtgctcaccttagctaggaccagggctccttacagctctgtctctccttcctcaccagcatgggcctgtgcaccacct

SEQ ID NO: 709538 - DNA, 1247 bp, Homo sapiens
ttattattttattttagagacaatgtcttgctctgttgcccagggtagaatgcagtggcacaatcatagctcactgtaacctcaaattcttggactcaagtgatccttccgcctcaagtctcctgagcagctggcactataggtgcacaccaccatggctgactaatttttaaatattttgtagaaatgcagtctcattatgtgccccaggctgttctgcaactgttggcctcaaaagcaatcttcccaccatggcctctcaaagtggtgaaattataaatgtgagcccctttgcttggccaaccacagatctcctatagcagaagaatcatagcagtaaaaagatactggcccattaccagagtcctgtttagtcattatcaattcgcccattgcagtccaaaaatagcaatggtctcagcaacatatggcttcaacctttcagacatctggtaaaaatgagataaaagacaatatcatcattcgtttatacctcttttgaggagatcatgttatattggattttcctcattacataccccatttattcattcatttcacctcagctactattcttcctcttctgcatttataccaaatatttctcattttggaagggacattaggttttcctgctgtgctggcctatgcagggagctataccatgctagtaacagcgagtgtctcccatcagtccattccagttcatagaggttagggttattcaggcagagaactggttggctatctggcttccaggcaatacagctgcattcaatgttagctccaactttgccagatgcagtgaaggcacatctactccaggcccttaggcagtcttgcataatggtttttaaatatgttaacggtttcttgctcaggaataattcctgtgcctggacttttatttgcatccctagtcctgagaccactgcatcaggtatgagaaaagcaagttgaggtaaagtatagtcataattctagtgtcttctggccttgggaaggattgtttttatttatttatttatttatttwtttatttatttatttatttattattttttagggaagaattgtatgtagaatcacaccagcacctttccctgatccagcagggaaaaagaggacactctctagtggggacattcctttgtccacactcatgtcaagagcgagcacactcatgaaggtgtataggcccgcccttcatgcttatgtctccccgctcctgatttatacactcaatg

SEQ ID NO: 709539 - DNA, 1461 bp, Homo sapiens
taccatgctgttttggttattgtagcactgcagtatagtttgaagtcagatagcataatgcctccagctttgttctttttgcttaggatggccttagctatttttggttccatatgaattttagaatagttttttctttttctttttatttgtttatttattattattattttagatggagtcttgctgtgtcaccaggctggagtgcagtggcatgatctgggctcactgtaaactccacctcccaggttcaagcaattcttatgcctcagcctcccaagtagctgagattacaggcatgtgtcaccacacctgggtaattttatttttattttttgtatttttagtagagactgggtttcaccatgttggccaggctggtctcgaactcctgacctcaagtgatctgcccgcctcggcctcccaaagtgctgggattacagacatgagccaccaagcctgaccttaaaatagtttttttctagaactacatatttaaattggaaaagatgtgttgtattctctgaatcctagtggctcacaggagctgtctagaatagcctgactatagcaattcctagttaagccagaagtttgaaatgagttcaaagtgtagggataaaattccagtgagaggcagaaaactggaaagttaatgcttttccatgttaatcaatcaagtccataaattgtttatatgtgtagctttctctcttaatttgaataatttcttagagatgagtatcactgtgaagtgtggggtggctatgaaagtataagattgcttctagcaactcacacagtcactcatggatgctcggcccaagaccctgatagccacggttccactccaagggaaaagaggccatctgaggagcaaatagaactctrtcacaagatgagtgcaggaaacaccccaaacacagtccctaaggtcgatgcagaaacagcgtaagaagaaagtgtccagatatccagaatcctatgaggtagggattcagaactctcaaaggccaccctcttacatctgtcaataggtcaaggtttctgtggatgtgtgtggctgtggctgacagggaccccagtgatccctatgaggttagacgtagcttaagagagaataaggggcacgcacatgcacacacacacacacacacgcacacacacacgcacacacacacagagtcaagggcagcccttcaaagcttcccatcatcttcctctgtccatatttcattctccatcatctcactttccattttttcctttttaagcaataacaaattagttatatgatgctggctggtgtggtgacttacatttgtaatcctagcattttggaaggcagaggcatggaaatggcttaagcccgagagtttgacagctgtgtgattctagacagagtccttcacttctctgtgtctccattttctcatccattttatgtgaatcactatttca

SEQ ID NO: 709540 - DNA, 1461 bp, Homo sapiens
taccatgctgttttggttattgtagcactgcagtatagtttgaagtcagatagcataatgcctccagctttgttctttttgcttaggatggccttagctatttttggttccatatgaattttagaatagttttttctttttctttttatttgtttatttattattattattttagatggagtcttgctgtgtcaccaggctggagtgcagtggcatgatctgggctcactgtaaactccacctcccaggttcaagcaattcttatgcctcagcctcccaagtagctgagattacaggcatgtgtcaccacacctgggtaattttatttttattttttgtatttttagtagagactgggtttcaccatgttggccaggctggtctcgaactcctgacctcaagtgatctgcccgcctcggcctcccaaagtgctgggattacagacatgagccaccaagcctgaccttaaaatagtttttttctagaactacatatttaaattggaaaagatgtgttgtattctctgaatcctagtggctcacaggagctgtctagaatagcctgactatagcaattcctagttaagccagaagtttgaaatgagttcaaagtgtagggataaaattccagtgagaggcagaaaactggaaagttaatgcttttccatgttaatcaatcaagtccataaattgtttatatgtgtagctttctctcttaatttgaataatttcttagagatgagtatcactgtgaagtgtggggtggctatgaaagtataagattgcttctagcaactcacacagtcactcatggatgctcggcccaagaccctgatagccacggttccactccaagggaaaagaggccatctgaggagcaaatagaactctatcacaagatgagtgcaggaaacaccccaaacacagtccctaaggtcgatgcagaaacagcgtaagaagaaagtgtccagatatccagaatcctatgaggtagggattcagaactctcaaaggccaccctcttacatctgtcaataggtcaaggtttctgtggatgtgtgtggctgtggctgacagggaccccagtgatccctatgaggttagacgtagcttaagagagaataaggggcacgcacatgcacacacacacacacacacgcacacacacacgcacacacacacagagtcaagggcagcccttcaaagcttcccatcatcttcctctgtccatatttcattctccatcakctcactttccattttttcctttttaagcaataacaaattagttatatgatgctggctggtgtggtgacttacatttgtaatcctagcattttggaaggcagaggcatggaaatggcttaagcccgagagtttgacagctgtgtgattctagacagagtccttcacttctctgtgtctccattttctcatccattttatgtgaatcactatttca

SEQ ID NO: 709541 - DNA, 612 bp, Homo sapiens
tgaatggttcagcttagtccggtaggtatcagtctcaagcgatattacctatgcccaataaccagtgtgaaaacaaggagcattctgagcaggcaggcagaatgaagaaaccagactacttttcagttcttcctaagtttaatcttttccatgtggtttcattcatttatgaaaaatatgaccacacataccaatattcacccataagactcacatgtattgcaaaagtcagagagaaattttagggcacttctcaccattgctctttttcaggctagaggacaactgatcacacatactgtgtgcccctgcatatgcagctctgagaatacaaagtgagtagtaggagcttacgatctctacctagggagtatctcatcctctgccgcttctccctttttacccacactgacatcgtgtgtctgcttccccaccttgtactcctgtgtagcrtcgtccagtggcacaacggtgtgggcccggtgggtgtgggaaattgcacatatcaagcatacagcctcctggtcctcataacagaaaaggctgagggcctcatggtgttgggggcagaggctctcatcccggatcttccgcttgacggcctggagctgc

SEQ ID NO: 709542 - DNA, 1021 bp, Homo sapiens
cttttcctggggaagccccttctgcattcatacctgattgcttgttatgaatttcccgttgcatgtttggctggaggtgaggccttgcttcctcctgcagttcagtctagtaatggcttgagctaaatagagcacccgggaggatcttcacttgcagtattgttcaaggatggagagtgtagacacttcatcttcctttttttttctaaaattttacgggcaatccgtttcactggagaaaaatttagtctatttatttatttattttgagacaaagtctcgctctgtcacccaggctggagtgcaatggcrcaatcttggcccactgcaacctcacctccctggttcaagtgattctcctgcctcagcctcccgagtagctggattacaggcatcctccaccagtgtcctccactacgcccggctaatttttgcatttttagtagggacggggtttcaccatgttggccaggctggtcttgaactcctgacctcaggtgatccacccacctcagcctcccaaagtgctggaattataggtgtgagccactgcacctggcctagtctatttatttaaagctgtatacttacttgcttattatatacttaacttgcttactattccatctaaaatgtaagccagttagtttccttctaaatcaattgccagcctttgtctctcctaccaacttcctagttgtttcattacctacaattgttgtatgaccttcagaaaaacctctaagaaaacagcaaagcttctttgtgctggtgatgacttcccctcagccttagacactgaggtacccaaggcaggtagttcttttttttttgagacagagtctcgcactgtcacccaggctggagtgcaatggcacgatctcagctcactgcaacctctgcctcccgggttcacacgattttcctgcctcagcctcctgagtagctgggattacaggtgcacaccaccacacccggctacttttttgtatttttagtagagacagggtttcactgtgtt

SEQ ID NO: 709543 - DNA, 1021 bp, Homo sapiens
cttttcctggggaagccccttctgcattcatacctgattgcttgttatgaatttcccgttgcatgtttggctggaggtgaggccttgcttcctcctgcagttcagtctagtaatggcttgagctaaatagagcacccgggaggatcttcacttgcagtattgttcaaggatggagagtgtagacacttcatcttcctttttttttctaaaattttacgggcaatccgtttcactggagaaaaatttagtctatttatttatttattttgagacaaagtctcgctctgtcacccaggctggagtgcaatggcgcaatcttggcycactgcaacctcacctccctggttcaagtgattctcctgcctcagcctcccgagtagctggattacaggcatcctccaccagtgtcctccactacgcccggctaatttttgcatttttagtagggacggggtttcaccatgttggccaggctggtcttgaactcctgacctcaggtgatccacccacctcagcctcccaaagtgctggaattataggtgtgagccactgcacctggcctagtctatttatttaaagctgtatacttacttgcttattatatacttaacttgcttactattccatctaaaatgtaagccagttagtttccttctaaatcaattgccagcctttgtctctcctaccaacttcctagttgtttcattacctacaattgttgtatgaccttcagaaaaacctctaagaaaacagcaaagcttctttgtgctggtgatgacttcccctcagccttagacactgaggtacccaaggcaggtagttcttttttttttgagacagagtctcgcactgtcacccaggctggagtgcaatggcacgatctcagctcactgcaacctctgcctcccgggttcacacgattttcctgcctcagcctcctgagtagctgggattacaggtgcacaccaccacacccggctacttttttgtatttttagtagagacagggtttcactgtgtt

SEQ ID NO: 709544 - DNA, 645 bp, Homo sapiens
attcttcaaagcactgatcacaatctataattatcttgttaatttatttgtttacttgcttattgttggcctttttcaatggaatctaaattaccagaggacaagggactatggctggcttgctctccactcttcctaactcctagaacaacgcatggtacatagtaggtgcttagtaaatagttgttgaatgattaaatgaatggatgaatgaatgcacagctcttaaaaggaaactgctggccaggtgcrgtggctcacacctgtaatcctagcactttggtaggctgaagcaggcagatcacctgaggtaaggagttcaagaccagcctggcaaacatgacaaaaccccatctctactaaaaatacaaaaattagctgggtgtggtggcatgtgcctgtagtcccagctacttgggaggctaagctaggagaatcgcttgaacccaggaggcagaggttgtagtgaactgagctcatgccactgcactccagcctggtgacagagcgagactctgtcacaaacaaacaaacaaacaaaaaaaaaaaatggaaactgctaagggcttggagaacaagaaggccttgagaaaactgagaagatggggggaggagccaagatggccaaataggaacagctccggt

SEQ ID NO: 709545 - DNA, 2436 bp, Homo sapiens
gtcactgtcacagagttaaagcgtgcgggtgaacgctggccgcggagcgtgcagcccrgcagcagctcagcggggcagctcctgcttccagccctgcctctgctggtgcttcgcccacaaaccctgctgtatgacatttgcaccacatggtgtgtgtccgtgccctttgacatgacagtgccaacaacatctcatgaaatttaaaataaatccccaaggcatcagaaacgtatcaactaagaactctaagtttgaaaatgggggtggggcagtggccagttccgggagcccctggccccccgggacctgacccacagtcataaggtgggccccattccccagtggtcccagcctagcctcctgtcccacctcctctgccaagacagagtggcacaggacccctgtcgctcaggccagcaggtgtgtctctgagctggccgtgggcactgaccgccctcccaggtcccctccagtgccagctcttctggcttcccctcccagcccccttcgtgagcgccttgatccagcccaaccttggagtgggggttggtgatttgggggctggacctcagccctcttctgctctgccacttttggggttcacggtttgtcagccctcccttctgcaaatgagacctggacgtcatgtccagctgcctcctgggccctgcccggcatctcccataagcaccatgcagcacaggtggcagaggggattgtcctccatcctcttgtctgagggaggagaccacaaatgagtgagacagtcatcctcgctgccctgcctgtcctgtgtcccatcagtcatcagggcctgccacctgcctttgtcttttatttatttatttattttttaagatggagtctcgctgtgtcgcccaggctggaacgcgatggcgtgatctcagctcactgcaacctccacctccctggttcaagcgattcacctgcctcagcctcccgagtagctgggactacaggcgcacgccaccatgtccagctaatttttgtattcttagtagagaccgggtttcactgtgtcggccaggatggtcttgatctattgacctcgtaatccacccgccttggcctcccaaagtgctgggataacaggtgtgagccatagagcccggaccatcaatggcttttagtaagttcctagggttgtgcatccatcacaactatctcattccagaacattatcatcaccctgaaaggcagccgcttccccattagcatttcctctcctctgcctgttttcctttattttttttagttttattttttttgaggcagtctcactctgctgcccaagttggagttgagtggtgtgatcgtggctcactgcaacctccacttcctgggttcaagcaattatcttgcctcagcctaccgaatagctgggattacaggtgtgtactaccacacccagctaattttttaacttttagtagacgaagggtttcaaaatcttggtcaggctagtcttcaactcctgggctcaagcaaactgcccccctcaacctcccaaagtgctgggatgacaggtgtgagccaccatgcccggcccctctgtctgtctccttccctcgtgtgctaaggagctgatggggcccctttctctagagtgtaatgctgagaggatctggagaatccggggaaggcactaggacagcaaaggagaccctttcctgggtccccgtattcataaacattcccatccctcagcccctcactcacgcagggcactgccactggcaggtgtggccacatcagtctccaagcctgtcatccctcagcccctcacacatgcagggcacgcccactggcaggtgtgaccacagcagtctccaagcctgtcatccctcagcccggcactcacgcagggcacagccactggcaggcgtgcacagcagtctccaagcctgtctcccgcctgcattgtccctctgccaaacccggccccatcacagctcagcgagaacaggatgagctcagcgcacacgccagctcacacacctgcccaggcacactttccccggcctcctttttgaaacagtctcactctgtcacccaggctggagtgcagtgatgccaccttggctcactgcagcctttaactcctgagctcaagcaatcctcccacctcagcttcccaaatagctgggaccacaggtgtgcaccagcacacccagctagttttttaattttttttttttttttttttgaagcagagtttcactcttgctgcccaggctagagtgtggtggtgtgatctcggctcactgcaacctccacctcccaggttcaagcgattctcctgcctcagccttccaagtagatgggattacaggcatgtgccgccaccacccccggctaattttgtagttttttttttttttttttttttttttttttttatagagacagggtttc

SEQ ID NO: 709546 - DNA, 2436 bp, Homo sapiens
gtcactgtcacagagttaaagcgtgcgggtgaacgctggccgcggagcgtgcagcccggcagcagctcagcggggcagctcctgcttccagccctgcctctgctggtgcttcgcccacaaaccctgctgtatgacatttgcaccacatggtgtgtgtccgtgccctttgacatgacagtgccaacaacatctcatgaaatttaaaataaatccccaaggcatcagaaacgtatcaactaagaactctaagtttgaaaatgggggtggggcagtggccagttccgggagcccctggccccccgggacctgacccacagtcataaggtgggccccattccccagtggtcccagcctagcctcctgtcccacctcctctgccaagacagagtggcacaggacccctgtcgctcaggccagcaggtgtgtctctgagctggccgtgggcactgaccgccctcccaggtcccctccagtgccagctcttctggcttcccctcccagcccccttcgtgagcgccttgatccagcccaaccttggagtgggggttggtgatttgggggctggacctcagccctcttctgctctgccacttttggggttcacggtttgtcagccctcccttctgcaaatgagacctggacgtcatgtccagctgcctcctgggccctgcccggcatctcccataagcaccatgcagcacaggtggcagaggggattgtcctccatcctcttgtctgagggaggagaccacaaatgagtgagacagtcatcctcgctgccctgcctgtcctgtgtcccatcagtcatcagggcctgccacctgcctttgtcttttatttatttatttattttttaagatggagtctcgctgtgtcgcccaggctggaacgcgatggcgtgatctcagctcactgcaacctccacctccctggttcaagcgattcacctgcctcagcctcccgagtagctgggactacaggcgcacgccaccatgtccagctaatttttgtattcttagtagagaccgggtttcactgtgtcggccaggatggtcttgatctattgacctcgtaatccacccgccttggcctcccaaagtgctgggataacaggtgtgagccatagagcccrgaccatcaatggcttttagtaagttcctagggttgtgcatccatcacaactatctcattccagaacattatcatcaccctgaaaggcagccgcttccccattagcatttcctctcctctgcctgttttcctttattttttttagttttattttttttgaggcagtctcactctgctgcccaagttggagttgagtggtgtgatcgtggctcactgcaacctccacttcctgggttcaagcaattatcttgcctcagcctaccgaatagctgggattacaggtgtgtactaccacacccagctaattttttaacttttagtagacgaagggtttcaaaatcttggtcaggctagtcttcaactcctgggctcaagcaaactgcccccctcaacctcccaaagtgctgggatgacaggtgtgagccaccatgcccggcccctctgtctgtctccttccctcgtgtgctaaggagctgatggggcccctttctctagagtgtaatgctgagaggatctggagaatccggggaaggcactaggacagcaaaggagaccctttcctgggtccccgtattcataaacattcccatccctcagcccctcactcacgcagggcactgccactggcaggtgtggccacatcagtctccaagcctgtcatccctcagcccctcacacatgcagggcacgcccactggcaggtgtgaccacagcagtctccaagcctgtcatccctcagcccggcactcacgcagggcacagccactggcaggcgtgcacagcagtctccaagcctgtctcccgcctgcattgtccctctgccaaacccggccccatcacagctcagcgagaacaggatgagctcagcgcacacgccagctcacacacctgcccaggcacactttccccggcctcctttttgaaacagtctcactctgtcacccaggctggagtgcagtgatgccaccttggctcactgcagcctttaactcctgagctcaagcaatcctcccacctcagcttcccaaatagctgggaccacaggtgtgcaccagcacacccagctagttttttaattttttttttttttttttttgaagcagagtttcactcttgctgcccaggctagagtgtggtggtgtgatctcggctcactgcaacctccacctcccaggttcaagcgattctcctgcctcagccttccaagtagatgggattacaggcatgtgccgccaccacccccggctaattttgtagttttttttttttttttttttttttttttttttatagagacagggtttc

SEQ ID NO: 709547 - DNA, 1106 bp, Homo sapiens
cagaatataggttagacctcatggcctgccatttcaagtctgtcccatgtccacctctttaattttcttttccttcattctccctcataattcctcactctgcctgcccactcctccctgttagtcacttggcgggcccctttgaaatccagctaaagttccaacacctctggggactccttccgtgacaccaccaccctactatctgatccatgcctattttttgcagtcagttccatagcatctgtatgtacctctgacgcagggttctcaaccaggggttattttacctctcagggaacatttggcagtgtctgggattcttcgttgtcacaatccatgagaggaagggataatcctggcacctagttggtagaggacagaaatgttgccaaccctcctacaatgcacaggacagcactcttaaaataaattttttggcccaaaatgtcagtagtcccaaggttgagaaaccctgcttaacatattttgttactagtgctttatatatttttttcttctccactgcacaagggaccttgtcttgtttttgcatccctaaatcttgattcagggcctttcacatagtagaagttaaatgttggaagaaaaagaaataaaggaggtaatcgctcaactccagagatgagcagcctgtctgctaccacaggctacctgataatttcagtgatttttctccccattacctttctttaatgttgcctttcaaggatgcttcaacttgtctatttttcatttgtttattcagcaactgatttatttttaaaatattatattgatttttctttattcagcatcagttggctgtcttctgtccatgtatcktggccacttatgaagtggtaaaagataattagctagctttcagaaaaataaaccaaataggcctattcttatcagaggttggttgttcaaaactctgcagaccataatgacttcagcaaataaagcaatcgaattacaactacaagtgaaacaaaatgcagaagaattacaagactttatgcgggatttagaaaactgggaaaaagacattaaacaaaaggatatggaactaagaagacagaatggtgttcctgaagagg

SEQ ID NO: 709548 - DNA, 584 bp, Homo sapiens
tgttggtcaggctggtctcgaagtcccaacctcaggtgaactgcctgcctcgkcctcccaaagttccgggattataggcgtgagccaccacacccagcctgtcatttcgttttttaaaccaacaacatttaaatgggttctggccaactttctagacaaaggtacggaaatatattgtatatcacatcacagatgacaagtgcttccaaagaatataaatgctattttaggcttaggtttctacattgtctaagtttccattacttaaaggagagactttcttgcagaaggtatattacttcatacacaagttgggatttatactgactttcctaacatatgtatctgggagaaacatttgtgtgcagtagaaatgaaaccagtctaattttcccatagaactgatgttttcagtcttttaaaataaacatagaaattgaccctcctggtcttaaagcttgaaacttacaatctgagttcctttctcaggaaatcatcatcaggccttctcagatagtatcaaggaactgaaactcaccagatcactgcatccagacaatgagatgccagatccctcacccatc

SEQ ID NO: 709549 - DNA, 1351 bp, Homo sapiens
tcccataacttcatgggttaaacctcaattgtgtgtatacacaataaaatttattaaaaaaaagaaatttaagaagtctttttttttttttctttttagagacagggccttgctctgtcacccagtctggagtgcagtggcaccatctctgctcactgcaacctccaactcccaggttcaagtgatcctcctgcctcagcctcccgagtagctgcaactacaggcatgtgccaccactcctgtctcattttttaattttaattttttgtagagatggggtctcactgtatagcccaagctgctgttgaacttctgggctcaagtgatcctcccatctcaacctcccaaaaatgctggaattctaggtgtgagccaccatgcctggccaagaagtctttaatcataaggttttcttaccatatgtatttgtcagggcaacatcaaaaggccatatcagctttcattttgctccatcctgttstttctcagaagccccatctttgtatgcctcctaaaccccaagttaccaaagttaagaggaagtaaatgtgttgcagtaaagtatctatctgggccaggcgtggtgactcacacctgtaatcccagcactttgggaggccgaggcgggcagatcacttgaggtcaggagtttgagaccagcccggccaacatggtgaaaccctgtctctactagaatacagtagtaataataataatcaattagccgggcttggtggcaggcgcctgtagtcccagctactcgggaggctgaggcaggagaatcgcttgaatctgggaggtgggggtcacagtgagccaagatggtgccactgcactccagtctgggcgacagagtaaaactccctctcaaaaaaaaaaaaaaaagttgtatctgaagtagggtgattatagttaacattaatctaccatacatttcaaactagctagaagagaataatttgaatgttattagtacaaagaaaagataagtatttaaggtgatagatatcttagttatcctgatttgcttatacgagtgtagcaaatgatcacatgtacctagaaactatgtacgtctattatggatcaattaaaaaacatttaaaaagatctatctgtttccaaatgtatgtcttgacctcggagctccagggtttgtgtaatgttgctttaaatgtggagtcataaaagaagccaggtgggaaattaatgaaatgttagaagtgttatctattgttaaccacataagatttaaaggaaaaagcactgaattccttttttttcccctgagacaggggtcttgctttgttgcccaggctggagtgcagtgatgggatcatagctcactgga

SEQ ID NO: 709550 - DNA, 1351 bp, Homo sapiens
tcccataacttcatgggttaaacctcaattgtgtgtatacacaataaaatttattaaaaaaaagaaatttaagaagtctttttttttttttctttttagagacagggccttgctctgtcacccagtctggagtgcagtggcaccatctctgctcactgcaacctccaactcccaggttcaagtgatcctcctgcctcagcctcccgagtagctgcaactacaggcatgtgccaccactcctgtctcattttttaattttaattttttgtagagatggggtctcactgtatagcccaagctgctgttgaacttctgggctcaagtgatcctcccatctcaacctcccaaaaatgctggaattctaggtgtgagccaccatgcctggccaagaagtctttaatcataaggttttcttaccatatgtatttgtcagggcaacatcaaaaggccatatcagctttcattttgctccatcctgttctttctcagaagccccatctttgtatgcctcctaaaccccaagttaccaaagttaagaggaagtaaatgtgttgcagtaaagtatctatctgggccaggcgtggtgactcacacctgtaatcccagcactttgggaggccgaggcgggcagatcacttgaggtcaggagtttgagaccagcccggccaacatggtgaaaccctgtctctactagaatacagtagtaataataataatcaattagccgggcttggtggcaggcgcctgtagtcccagctactcgggaggctgaggcaggagaatcgcttgaatctgggaggtgggggtcacagtgagccaagatggtgccactgcactccagtctgggcgacagagtaaaactccctctcaaaaaaaaaaaaaaaagttgtatctgaagtagggtgattatagttaacattaatctaccatacatttcaaactagctagaagagaataatttgaatgttattagtacaaagaaaagataagtatttaaggtgatagatatcttagttaycctgatttgcttatacgagtgtagcaaatgatcacatgtacctagaaactatgtacgtctattatggatcaattaaaaaacatttaaaaagatctatctgtttccaaatgtatgtcttgacctcggagctccagggtttgtgtaatgttgctttaaatgtggagtcataaaagaagccaggtgggaaattaatgaaatgttagaagtgttatctattgttaaccacataagatttaaaggaaaaagcactgaattccttttttttcccctgagacaggggtcttgctttgttgcccaggctggagtgcagtgatgggatcatagctcactgga

SEQ ID NO: 709551 - DNA, 1351 bp, Homo sapiens
tcccataacttcatgggttaaacctcaattgtgtgtatacacaataaaatttattaaaaaaaagaaatttaagaagtctttttttttttttctttttagagacagggccttgctctgtcacccagtctggagtgcagtggcaccatctctgctcactgcaacctccaactcccaggttcaagtgatcctcctgcctcagcctcccgagtagctgcaactacaggcatgtgccaccactcctgtctcattttttaattttaattttttgtagagatggggtctcactgtatagcccaagctgctgttgaacttctgggctcaagtgatcctcccatctcaacctcccaaaaatgctggaattctaggtgtgagccaccatgcctggccaagaagtctttaatcataaggttttcttaccatatgtatttgtcagggcaacatcaaaaggccatatcagctttcattttgctccatcctgttctttctcagaagccccatctttgtatgcctcctaaaccccaagttaccaaagttaagaggaagtaaatgtgttgcagtaaagtatctatctgggccaggcgtggtgactcacacctgtaatcccagcactttgggaggccgaggcgggcagatcacttgaggtcaggagtttgagaccagcccggccaacatggtgaaaccctgtctctactagaatacagtagtaataataataatcaattagccgggcttggtggcaggcgcctgtagtcccagctactcgggaggctgaggcaggagaatcgcttgaatctgggaggtgggggtcacagtgagccaagatggtgccactgcactccagtctgggcgacagagtaaaactccctctcaaaaaaaaaaaaaaaagttgtatctgaagtagggtgattatagttaacattaatctaccatacatttcaaactagctagaagagaataatttgaatgttattagtacaaagaaaagataagtatttaaggtgatagatatcttagttatcctgatttgcttataygagtgtagcaaatgatcacatgtacctagaaactatgtacgtctattatggatcaattaaaaaacatttaaaaagatctatctgtttccaaatgtatgtcttgacctcggagctccagggtttgtgtaatgttgctttaaatgtggagtcataaaagaagccaggtgggaaattaatgaaatgttagaagtgttatctattgttaaccacataagatttaaaggaaaaagcactgaattccttttttttcccctgagacaggggtcttgctttgttgcccaggctggagtgcagtgatgggatcatagctcactgga

SEQ ID NO: 709552 - DNA, 887 bp, Homo sapiens
tcagcaacccagaagcttatcaaatctttcagtttttgtagagcttgatctctagcccacccctctgcacctgccaggggtggggctgaaaattccaaccctctaatcacttggtctttcaggtgaccagcctcatcctgagattatctaggagctctatccaaagtcatcttttagcctaaactcaggtatgatcaaaaggggctcatgaggccaggcacagtggctcaagcctgtaatctcagcactttgggaggccaaggctggcagatcacctgaggtcaggagttcgagaccagcctggacaacatgatgaaaccctgtctccactagaaatacaaaaattagcccagcatgctggcgcacgcctgtagtcccatagttgggaggctgaggcaggagaatcgcatgagtccaggaagcggaggttgcagtgagccaagatcgcaccactgcactctagcctgggtgacagagggagactgtctcaaaaaaggggtgcagggagggggcggggctcatgaataacaaaagtcattcctatcactaggaaatcctaagggttttgggtactctgtcaggaaccagggacaaagaccaaatatrtttatcatactacagataccttgtcagttttattctgaatttggggcctgatcctgaaaaagagcaacattctaaagagatgtctggtcagaatacagatacctgagaactccaagtagccacagccttatctatattaataaccaaagtgacgatgctttctgaaaaccacaagagaaggtaacataaccttaaggattttagctcctctagaagttaggaacccttactattgttttgtttgctgatttttgtatagttttctatagcagaagcattca

SEQ ID NO: 709553 - DNA, 887 bp, Homo sapiens
tcagcaacccagaagcttatcaaatctttcagtttttgtagagcttgatctctagcccacccctctgcacctgccaggggtggggctgaaaattccaaccctctaatcacttggtctttcaggtgaccagcctcatcctgagattatctaggagctctatccaaagtcatcttttagcctaaactcaggtatgatcaaaaggggctcatgaggccaggcacagtggctcaagcctgtaatctcagcactttgggaggccaaggctggcagatcacctgaggtcaggagttcgagaccagcctggacaacatgatgaaaccctgtctccactagaaatacaaaaattagcccagcatgctggcgcacgcctgtagtcccatagttgggaggctgaggcaggagaatcgcatgagtccaggaagcggaggttgcagtgagccaagatcgcaccactgcactctagcctgggtgacagagggagactgtctcaaaaaaggggtgcagggagggggcggggctcatgaataacaaaagtcattcctatcactaggaaatcctaagggttttgggtactctgtcaggaaccagggacaaagaccaaatatatttatcatactacagataccttgtcagttttattctgaatttggggcctgatcctgaaaaagagcaacattctaaagagatgtctggtcagaatacagatacctgagaactccaagtagccacagccttatctayattaataaccaaagtgacgatgctttctgaaaaccacaagagaaggtaacataaccttaaggattttagctcctctagaagttaggaacccttactattgttttgtttgctgatttttgtatagttttctatagcagaagcattca

SEQ ID NO: 709554 - DNA, 1167 bp, Homo sapiens
ggtgcctgctgtctgacagacaccctgcccggctttatatccaagtctaggccactggggcacaaaggcctcatgaggagccatgtggtatgggtggcaatgagccacagcatccaggacagttttgtggaagaaaggagacagagggcacggggccctaaaaagggagacggagaagaagggaagggagggtgaggtgcgagccccacacttctgtggcaggctaggcctggggtacagccaccagccaacgggcccatggatcaagactataacccacccaaatgctgaccagggaggagggattccttatttgccgcttagcagtgggcgckttgccctcaagccaccagagccatttgctcccagaaccataagccgggaccaccctagttatgctgagagctgaattagtcccaagtagaagcagcaaaaacttgaccacaaaactcctttctagtagcatatgcaaatcagatgcccctccactccgatgccctgccctctgccatctccctcgatatcatgcagtgttgcgtgggaagggtgtctagcggctggccctaccgagaggtggtatgcttcggggagcaagtctatgcctgcttaccagctgggaatgctgcaggcaggcagatattgggaagaaagaatagaaagggaggttgtaggaaggtggaggaagaagaagctggtgaatttctgaagaggggaaagaactcctggcctgttgggaattaaccaggccccattcaccagccccttgacccttgagtgccacccaccccacccacagatctgcccagatgaaggtgtggactggggcgagatgcttggtgggtgctaaccagcctttactgggcaccccgcccaagccaggcacagtgcctggtgctctgtgcatggatatctcagctaatcctcaccacagcccttgaggtagctcgaggcaactcattagatggtgacagctacagcccagaccttgccttgggacacacggcaagcgaaagagtaggtgacaggcatgcccacctatgaggagggtaaagtgccagagtctccgtggaacccactttggccacagctatcaaaattgtaaatgcccctgccctttgacccaatgattggaccactgagaatatagcgtacggaaatactcacacg

SEQ ID NO: 709555 - DNA, 847 bp, Homo sapiens
taaagagtgagttaggccacgcgcggtggctcatgcctgtaatcccagcactttgggaggccgaggcaggcagatcacgaggttaggagatcgagaccattctggccaacatggggaaaccccatctttattgaaaatatgaaaaattagctgggtgtggtggcacatgcctgtagtaccagctactcaggaggctgaggcaggagaatcgcttgaacccaggaggcggaggttgcagtgagccgagatcgcaccactgcactccagcctggagacagagcgagactccgtctcgaaagaaagaaaaagaaaaagagtgggttaatatacataaagcacttagaacagtgcctgacatttatttatcagaagcattggtctttaatttctaccatctcccaagtactacataaatgttagtggaaaaaaaaggagtttcagccttggaatttaggatgaatttgatcccaagccatgttgagagatgacttggccttcatgtttaacatgcataaattaatgaaagaggccaaagcagttacaagacgcaggtgttctttgaccttctttctgatggtcactttctccacttcaagagatggaagcctgttagcaaaggtggcacagcactccatcagcaggaagttaaaggggtgcgtgggatctgtttatttggtagcaacatctgaacatggaagctaaactgacttaaatttcaggaacaaagctggtgttagcctcctatatgttcttgaattctgattaataatttgtatgccaatgcctttgaggaaagagtgctacatctgmagttaactctgaagtctattttttaaaagttggattg

SEQ ID NO: 709556 - DNA, 2376 bp, Homo sapiens
ctttgaatacttaatactcttacatttctaggagagagagaaaaaagtaacttctgggagaaaactaagaatgatagacactttgccttttccaaagtacgtatagtaccacttaacccaaataccattaagctttgatggaaggaatttactaacaagagtgaggaattaaatgagtatactcacccaatcttttttcctctagaaatttaacagcagcatgagttttcccttgatttgattcagttctgttgggtacttcaagctctttgggcttaaaaggtatgtggagaatttaaagagagtttggaggagaataatgaagatgaattaaggattggaaattgggacctattagaaaaggtcaaaggcacaaggattatttagtttgaggaagaacaggcgatctagtggcacagagatggcttttaataatggaagccttattctgtagagaatattctcagattctcatttgcactgaagaccaaaagaaaggaagatgcataattggaagctggaggaacataagattagatgtgaagataacatttatcttcatgattaaatyctggattttgagtctcctttacagtatttcttattttaaagtaaaatccctgtttggtcgatcagaagtgtggacaagtcagcccatcatgtttgattctctggccctggttgggaggtcagccagccagcccagccaacatggcctcctggggatctggcttgatgggagaaaacattcatttcacctggacctgtggctccaggatgccaaagatgagtacaaaaaactctagccaacagagtgccaggctcgtgccagaaaagtatgcctaattgggttgtccaaacaaggagggcctaaggcagattttgagagccaacatatggagccaaggaatcacggtgccaaagaagatgtagcaaagaagagtgggtgaaagtgagctgctgggaagaagggctggatagaggagtgccactcatggctgggcttttgggtgttcctggaagcccactgtgagaatggatcaaaatcaatgggaaggtgctgccaaggtgtcctaagcttctaggataatatttattctctcagggttttggaactgctgcccaaagtcatagttctcagtcctgggtgtgagtcagaatcacctgtggagcctggcaaaccttacagacaccctggctccagccctggagattttgatttaatggaaatatcacttagaattctattgtaagcaataaaagtctattctcactaaactaagcaaaaaaaaaaaaaaaaaaaaaaaaaaagcagggcctaggagggcggaccaattgtggttagaaggatatgaggaaattccctggatggaaagaaaagctggtcagagggcttgagaaaggatttgaagcaagactgacagaccttgggcaataagaggtgatggttagcgtcagagttccagggtagtccaacctgccctttgcaccttgcttctctgtgcctcagttagtcctctggaaatggatataactgatcttacctcttgggtaatcatgaggatcgacagggttgatatatgtaaagaaagtgcttagaacaatgcctggtacataagttctcaataactattaatgattattgttgttattaggctctgccatgcatgtgaatcaactcttaacagtttcatttaatggtttctactcaagtctcaaattccaggggcagagcatctgggtggcttatgttggttcacatgttcaccctctaaagaatgtgagggacttcgattagcagaatcactggctcgaagtcacagttgttgcctgtggtcttcagtcttcactctggagattcagaaagcagacaggggaacaagttttgtcccgtagcttggaagcataaagcatcaaggtgtgagctaccaccaatgccagtctttccatggataccccttttgaaatttcagtgagccccagaaagggatctgggagcataagcaaacctgcctttcacttattgtgttatgccatgaggctgagctctgtgaacaccgtgagcaatatgctgggacagcagaggtgaagaaacaggagcccttccctcaaggagctcacattgagagctcataaaagccaacaatcccaatcccagtaagatcgccacggccctaactcaggccttttataaagttcagaggcaggagacttccccaggatggcagcatttcagctcttacttttaaattaaatcagtgagattttgccaggctaaggcatagagagactgaagaacaaatattagaattccaggcagaggacataaccccaccaaataatatcctagaagtatgagcagccgagggtgtgctt

SEQ ID NO: 709557 - DNA, 1241 bp, Homo sapiens
ggccatgcctggcagagaaggcccttctaaggaagggagtagttgggccagcctcgggacacagttggtggaggggaaggctgcgaggagggagatggccaggttggagaggggggaggctggagatgggcgggcttgggaagggccacataaagtagtctccaaagtgtggatcttatgcccaaatggcttaaggagctgcctgcagtgtgatttttagaaggatacattggtggcagggtagaggatgggctggagacagagcctggggctctgggacatcaatgcagtaacattgaggcatctgcatttttgctttcaaaacccagttgctgtaggcaaaattttaaaagcccgccttttccatttttaaatgatgacactattaccaaagctaattgtcatcttagacttgtaagtgttgaaggcctaagttggttaaattgttttttgtaagttttactgggtttggggagaagagtgggaggaagcaggaaacccattattccacggggttggataaatgcggccccacagagctgcgttaacctacagggcttctgtgttcaagacataaccttctattctgcaaagccctctgccattttccttaaacatacacttggaataagtgatgaatgaattagcgtgtttgcattctttcttcattctgcctgctacctgcaaagacagaactgtagtatatgcctttctcagaaaagctgtggacttcaaatattatctctgttgaattttatcataaaataaaaaatactcattaacctgaacttcacagtcttaacctttagaagctatgaaaaagttatctactaatgaaatagtttaaaggatattgaaatggaaatgttrttacttaagagagcaaaggttttcttccaactcagagtatacactttaaaatggggtgaaaaagggcagcagtgttgaggctgctaatcatgttggctcaagtccagtagttctcaaattttagcgtacatgagaatcctgtagaaggtttgttagtacacagagttccaggccctctcccatcgtttctagtacagtaggtgtgaccagcggcccagcttcccaggagacagccgatgttgctggtccgggaaccacagtttgaaaccgctggcccgggcagtagagtagcacagttaagtatataaggcaactggagaagtaaggctaaatgacagtgattaattagatgtaatctgtaatcatatgca

SEQ ID NO: 709558 - DNA, 666 bp, Homo sapiens
atgcattccaattcagtaaaatatatgacccataatcgtatatacagggcaattttcagttattgggtgacgtttatagtttatcaataatctgatttccataacctatacacttaactttctgagaatgagctaaattaaccaactgggtatttttaaataactaaatctacatctaaatctatatacccttgggcatgttgaatgtwtttcttgttcatttctgcttaaaggggacaagtattataataaaggaaattatctataattgtaaattcttattcatgataatctgggaattagctgcaaatttctggagacattatcttcttctgatttcaactgcaaaatgcaacaattacaagtagtttttcagagtaaatattattaatattacttctactatatacctaataatgcacttttctcaaacacttattgaaaaaattttacttttaagtttacttttatttaaactattttatgtaatatatgaaattattccaccttttttagatatttaaagttttaatgttattttttaaaaatccaccttagcttcccactgggcggttaatagaaacattccaaagcaatgagcaccagtcagaagtaaagctcttaaaacaggacaagaagaaatgggtgggaagctggaatgagaac

SEQ ID NO: 709559 - DNA, 948 bp, Homo sapiens
acagcaaaatgtaattcattgactaacaaagtaatagtaatttaaatataatatcatagaagcaggagtgaagagcaaacacttttcctaaacaagggcaaaggttgcatcaagaccaaagtaaagtatattataaattttttgcagaaaggcaggggtaagatacagaaaaataataaattatgcttcatgtaaaaatataaaccaaaaatatagcagacaaaatcatgtttttataaagtactattttaattggtcttgtaaagccactaagtcaaaaccataaagtgcaagagttatgtctttagtttgttcatattctttgtgcaaatcacctacccctccttttgtgtcatgcttcccctacttaggaacacaagtaatttatattctcatttttcatttcccgttgtagggggaaaagttatcaccctaaatagatttttgtggtaatctcctataaaaaaatrtgtttccaaaagtcagaactcaaagcaatagtttaagaacagaacaatattaaaaactaaaggaaattagggagccagtcttccttggtccctccaatttcaacctttgtgccaacctcagagatttgctcacaactgacttgtgattatcaatagacccttgctccttcagctgcatcagatgcttgggggcagagaatatacacacagataccgacattttgaatgaaagataaaataattgcaatttcctatcaaggttttttttctaactaaggatctttaaaatgaattcaaaacacaaagttaaaaaaattttctaataagaggcataaaggaagaaataacctttattgctgttgacagaagacgactccctaatcatatttttgatagaccatacatatgtaaagcttacttcaatctaatgtgtaggtgttctggagctctccctttgacacaggagttctgtaatatt

SEQ ID NO: 709560 - DNA, 948 bp, Homo sapiens
acagcaaaatgtaattcattgactaacaaagtaatagtaatttaaatataatatcatagaagcaggagtgaagagcaaacacttttcctaaacaagggcaaaggttgcatcaagaccaaagtaaagtatattataaattttttgcagaaaggcaggggtaagatacagaaaaataataaattatgcttcatgtaaaaatataaaccaaaaatatagcagacaaaatcatgtttttataaagtactattttaattggtcttgtaaagccactaagtcaaaaccataaagtgcaagagttatgtctttagtttgttcatattctttgtgcaaatcacctacccctccttttgtgtcatgcttcccctacttaggaacacaagtaatttatattctcatttttcatttcccgttgtagggggaaaagttatcaccctaaatagatttttgtggtaatctcctataaaaaaatatgtttccaaaagtcagaactcaaagcaatagtttaagaacagaacaatattaaaaactaaaggaaattagggagccagtcttccttggtccctccaatttcaacctttgtgccaacctcagagatttgctcacaactgacttgtgattatcaatagacccttgctccttcagctgcatcagatgcttgggggcagagaatatacacacagataccgacattttgaatgaaagataaaataattgcaatttcctatcaaggttttttttytaactaaggatctttaaaatgaattcaaaacacaaagttaaaaaaattttctaataagaggcataaaggaagaaataacctttattgctgttgacagaagacgactccctaatcatatttttgatagaccatacatatgtaaagcttacttcaatctaatgtgtaggtgttctggagctctccctttgacacaggagttctgtaatatt

SEQ ID NO: 709561 - DNA, 948 bp, Homo sapiens
acagcaaaatgtaattcattgactaacaaagtaatagtaatttaaatataatatcatagaagcaggagtgaagagcaaacacttttcctaaacaagggcaaaggttgcatcaagaccaaagtaaagtatattataaattttttgcagaaaggcaggggtaagatacagaaaaataataaattatgcttcatgtaaaaatataaaccaaaaatatagcagacaaaatcatgtttttataaagtactattttaattggtcttgtaaagccactaagtcaaaaccataaagtgcaagagttatgtctttagtttgttcatattctttgtgcaaatcacctacccctccttttgtgtcatgcttcccctacttaggaacacaagtaatttatattctcatttttcatttcccgttgtagggggaaaagttatcaccctaaatagatttttgtggtaatctcctataaaaaaatatgtttccaaaagtcagaactcaaagcaatagtttaagaacagaacaatattaaaaactaaaggaaattagggagccagtcttccttggtccctccaatttcaacctttgtgccaacctcagagatttgctcacaactgacttgtgattatcaatagacccttgctccttcagctgcatcagatgcttgggggcagagaatatacacacagataccgacattttgaatgaaagataaaataattgcaatttcctatcaaggttttttttctaactaaggatctttaaaatgaattcaaaacacaaagttaaaaaaattttctawtaagaggcataaaggaagaaataacctttattgctgttgacagaagacgactccctaatcatatttttgatagaccatacatatgtaaagcttacttcaatctaatgtgtaggtgttctggagctctccctttgacacaggagttctgtaatatt

SEQ ID NO: 709562 - DNA, 2002 bp, Homo sapiens
tgcatttctaagaagctctcaggtgatgtctacactgctggcaaactgaaatctcagaagactccaatgtcttcttcagccctgaaagtaaatgagtctcaaaaatgtagggacagttcttccctacagaagaattccaattgataaacatagaagaaattaaggaaatacaaaattaccatcagaacacccctgtaataattgtggcaaataaaatccacagatgaatgctaaaattagaagctaaaaagttttaggagaaatacaatatttgcatagtatcaatgtatctcccccttaaatacgtattgattacaaagaaaaaataatgaggttagagcagcgacccccttaaccatgtgatcaaagtcaattatcaccagtaataaaacatattgtcatcatgttgacatatcgatatcacctccagatatgatgcactgagaaagacacatcacttctgtgtattcttatccagaacacacaacctcagtctaatcatgagagaatattagataaacccaaaataagggtcatgctacaaaataactgtccagaattttttgaaatgtccacatcctgagagacaaggaaaggctgaggaattctcatggattagaggagagcaaggagacataacagtataatgtgggatcttggattgaatcttggaacagaaaagtgatgttggtaaaacatgcaaatgtcagtagtttatagtactgtaccaatacttaattttgacaaatgtatcatgatgatgtaagattagatattaacttaagaggatgcttggtggaagataaatggtaactctgccctatttttgcaacttttctataagcctaaaattattcaaaaattaaaagttaaaataaaaatatttacagatatattcttcaaaatttttttcagacatattttatacattaacacactcatacaatagggtttatttagactttatatattgcatgatttgcaaataatgatgattttacttttaattttctactatttttacttcttttttcatcaaaaaaagtaaaactcaaacaattttgaattactgtagtggtcatagatatcttttggcattgctgaatgcaatgcaattctatttcatagaatgtcccttattttgggtttgtctaatattatctcatgatatcttcttgcagtgcaatatatcttatggttaaaaatgatgataactaacatttattgtacttactgcaaatcaggcactgtgctgaattgttttaagtgtcttacttcattgttctgcccaataaccctattattwtcactattttacagaaaaggaaatagagaagtaaaataacttgctgaagttcacatagtaatttgtgaaaccaggatttgaaccaaggttacttaactttctaagaaagcttttagttacgctgtctataacactgtgtattcctctgaccaattgatttcagttagatttgctttaacattggaaggctaccgtcactgaaccagcattttatttcattttattttattttattttagattgagtctcactctgccacccagacaggagtgcagtggtgcaatgtcagctcggtgcaacctctgcttcctgggttcaagtgattcttatgcctcagcctcctgagtagctgggattataggcacctgccatcatgcctggctaatttttgtattttcagtaaagatggggtttcaccattctggccaggcttgttttgaactcctgacctcaagtgatccacctgccttggcctcccaaagtgctgggattacaggcatgagccactgcatcaggcctggatcagcattttaaagatggcgtcacaatggcaaagaaaccagtcagtgctttgtgatcctccgcccagtacaggcacagcagggcatccagagaagataggagtcccaagttgacacctgccacattcttggctcagaacagctgtggctgggaaggtccatgggccagggagcg

SEQ ID NO: 709563 - DNA, 2002 bp, Homo sapiens
tgcatttctaagaagctctcaggtgatgtctacactgctggcaaactgaaatctcagaagactccaatgtcttcttcagccctgaaagtaaatgagtctcaaaaatgtagggacagttcttccctacagaagaattccaattgataaacatagaagaaattaaggaaatacaaaattaccatcagaacacccctgtaataattgtggcaaataaaatccacagatgaatgctaaaattagaagctaaaaagttttaggagaaatacaatatttgcatagtatcaatgtatctcccccttaaatacgtattgattacaaagaaaaaataatgaggttagagcagcgacccccttaaccatgtgatcaaagtcaattatcaccagtaataaaacatattgtcatcatgttgacatatcgatatcacctccagatatgatgcactgagaaagacacatcacttctgtgtattcttatccagaacacacaacctcagtctaatcatgagagaatattagataaacccaaaataagggtcatgctacaaaataactgtccagaattttttgaaatgtccacatcctgagagacaaggaaaggctgaggaattctcatggattagaggagagcaaggagacataacagtataatgtgggatcttggattgaatcttggaacagaaaagtgatgttggtaaaacatgcaaatgtcagtagtttatagtactgtaccaatacttaattttgacaaatgtatcatgatgatgtaagattagatattaacttaagaggatgcttggtggaagataaatggtaactctgccctatttttgcaacttttctataagcctaaaattattcaaaaattaaaagttaaaataaaaatatttacagatatattcttcaaaatttttttcagacatattttatacattaacacactcatacaatagggtttatttagactttatatattgcatgatttgcaaataatgatgattttacttttaattttctactatttttacttcttttttcatcaaaaaaagtaaaactcaaacaattttgaattactgtagtggtcatagatatcttttggcattgctgaatgcaatgcaattctatttcatagaatgtcccttattttgggtttgtctaatattatctcatgatatcttcttgcagtgcaatatatcttatggttaaaaatgatgataactaacatttattgtacttactgcaaatcaggcactgtgctgaattgttttaagtgtcttacttcattgttctgcccaataaccctattattttcactattttacagaaaaggaaatagagaagtaaaataacttgctgaagttcacatagtaatttgtgaaaccaggatttgaaccaaggttacttaactttctaagaaagcttttagttacgctgtctataacactgtgtattcctctgaccaattgatttcagwtagatttgctttaacattggaaggctaccgtcactgaaccagcattttatttcattttattttattttattttagattgagtctcactctgccacccagacaggagtgcagtggtgcaatgtcagctcggtgcaacctctgcttcctgggttcaagtgattcttatgcctcagcctcctgagtagctgggattataggcacctgccatcatgcctggctaatttttgtattttcagtaaagatggggtttcaccattctggccaggcttgttttgaactcctgacctcaagtgatccacctgccttggcctcccaaagtgctgggattacaggcatgagccactgcatcaggcctggatcagcattttaaagatggcgtcacaatggcaaagaaaccagtcagtgctttgtgatcctccgcccagtacaggcacagcagggcatccagagaagataggagtcccaagttgacacctgccacattcttggctcagaacagctgtggctgggaaggtccatgggccagggagcg

SEQ ID NO: 709564 - DNA, 2002 bp, Homo sapiens
tgcatttctaagaagctctcaggtgatgtctacactgctggcaaactgaaatctcagaagactccaatgtcttcttcagccctgaaagtaaatgagtctcaaaaatgtagggacagttcttccctacagaagaattccaattgataaacatagaagaaattaaggaaatacaaaattaccatcagaacacccctgtaataattgtggcaaataaaatccacagatgaatgctaaaattagaagctaaaaagttttaggagaaatacaatatttgcatagtatcaatgtatctcccccttaaatacgtattgattacaaagaaaaaataatgaggttagagcagcgacccccttaaccatgtgatcaaagtcaattatcaccagtaataaaacatattgtcatcatgttgacatatcgatatcacctccagatatgatgcactgagaaagacacatcacttctgtgtattcttatccagaacacacaacctcagtctaatcatgagagaatattagataaacccaaaataagggtcatgctacaaaataactgtccagaattttttgaaatgtccacatcctgagagacaaggaaaggctgaggaattctcatggattagaggagagcaaggagacataacagtataatgtgggatcttggattgaatcttggaacagaaaagtgatgttggtaaaacatgcaaatgtcagtagtttatagtactgtaccaatacttaattttgacaaatgtatcatgatgatgtaagattagatattaacttaagaggatgcttggtggaagataaatggtaactctgccctatttttgcaacttttctataagcctaaaattattcaaaaattaaaagttaaaataaaaatatttacagatatattcttcaaaatttttttcagacatattttatacattaacacactcatacaatagggtttatttagactttatatattgcatgatttgcaaataatgatgattttacttttaattttctactatttttacttcttttttcatcaaaaaaagtaaaactcaaacaattttgaattactgtagtggtcatagatatcttttggcattgctgaatgcaatgcaattctatttcatagaatgtcccttattttgggtttgtctaatattatctcatgatatcttcttgcagtgcaatatatcttatggttaaaaatgatgataactaacatttattgtacttactgcaaatcaggcactgtgctgaattgttttaagtgtcttacttcattgttctgcccaataaccctattattttcactattttacagaaaaggaaatagagaagtaaaataacttgctgaagttcacatagtaatttgtgaaaccaggatttgaaccaaggttacttaactttctaagaaagcttttagttacgctgtctataacactgtgtattcctctgaccaattgatttcagttagatttgctttaacattggaaggctaccgtcactgaaccagcattttatttcattttattttattttattttagattgagtctcactctgccacccagacaggagtgcagtggtgcaatgtcagctcggtgcaacctctgcttcctgggttcaagtgattcttatgcctcagcctcctgagtagctgggattataggcacctgccatcatgcctggctaatttttgtattttcagtaaagatggggtttcaccattctggccaggctkgttttgaactcctgacctcaagtgatccacctgccttggcctcccaaagtgctgggattacaggcatgagccactgcatcaggcctggatcagcattttaaagatggcgtcacaatggcaaagaaaccagtcagtgctttgtgatcctccgcccagtacaggcacagcagggcatccagagaagataggagtcccaagttgacacctgccacattcttggctcagaacagctgtggctgggaaggtccatgggccagggagcg

SEQ ID NO: 709565 - DNA, 2039 bp, Homo sapiens
ctattctttacaactgtgttttcttattctcttacatatggaaccccaagaagagttgaggaaagctatggctcttatttcctggaaaaaaaatggatataaaatattgaaaacaatttttgcagtatcattttttccttgaagtccatccaagaagagccctggtccatgggcaagaggttgagtgtcccagctctataaagacttattttctaactgctgtcttttatgtcttttatttatgcttctcttctccagatcaagtcaagacactgcacttcagtaactgatatgatgaaaaactcagcaggtgagagaagacaagagataccataggcttgtgctttgccaacttaaactctgagtctgatattttgccaaggccaagtcttacacctcgcatttagagtgtggttacacaggtgattccaaagaacaggggagtgggctgtcagtaatcacgggcccagaccacccaagggtgggcctttatacttgcagtttcctcggcccaaaacactgttccccagcatgggtgcttactttttgtcaactggtctcagttcacatatcacctcctaagagggcctattcctaacaatctatcttaagtaactccctcaccaacaaagctccagcacattaccctgttcagagtcttcaaagtgcttaccaccacctgaaattattttctattgctgtttttttttcttgttaaacgtatgtatccgtaactagaatataaattacataggagaagagatttttgtctgcaacactctctactatatccctagcatttagaagagcaaatggaacccagtaggcaatcacaaaatattctgaatgaatattggttatcgtatcatcattttgaatgagtgaatgtgatagatccaaactgagggtcagaggtattttcattatagatttttaaacctatactttaatacaagtttgtagcttattatggatatttgaagagctgtgtgccaaacctaacaaggctcctgaatgtttctaaatgtgcaattgtcgctatatttctgctgtcatttttcacaggtttccaaatgcgtcataaaatattattgggtcagggaccatgcaggctaccagatggttgagaatgatttatttccttgacttcagactactgaagaatgattgcaggaaaaaagccagtttttatctctgagcttacagaatatgaaagataagagagaccttgcggttcatctagtctggattcattcttaatttaaaaacccattctacactaccaatgacatggttatctgaccttgacttcaatatttttartgatgagacactcattattttacaagataacctgtctcacaattggatggattttgatgagcaaggtcttccttctattgattcaaaatttccttcctgtaacttctggcccttggagcaacaacgtgtaagtctagttcctgttctgaattatgaactttgaaatatttgaacacatctcaactatctcccttcagtgctctcaacttctgaataaacatcccaaatacctccagctgttcctcacttatttctccttttggaaccctcatcttcctactgaatgatctctggacacaccgtaattaggaaacatatgttctccagggcaaagtagaattatgtcttatttttaattatggatttaattgtacttatgccataaaactactaaatgatcctcttttgtaaatcaactatacatataattgcatactgtataattaccaatatcagcatatgttattagttgtaaaatgcaaaagcaggttactctgatataataagcccccatcttagctggaagtctgtgtctaaagaacatctcatggctgacaatgccagcttgctattaaaattcttcagataaaaatatgaacaaatttcaaaataatctgggctatcaacttgcacatgcacaatagtatggcttgtttcaatttcaaaattcatggagcaagcaattatagatatcctaaaagtaaagcatcccttta

SEQ ID NO: 709566 - DNA, 1076 bp, Homo sapiens
cttctcctgccctcagacactaggaccccaggtcctccatccttgcaattcttggacttacaccagtggccctcatgagttcgaaggcctttggctttgaattaagaattatactattggctcctctgatttagaggtgtttggacttggactgagccatgctaccagtatcacagagtctccagcttacaggtggcctgggtcttgggacttagcctccctcatcatctgagccaattcccctaataacctcatattcattcatattttttttctctctctctcatctatctatctactgttagttctgtccctctggagaacactaatacagaaatcatcatttactcaaattgtttcaagaacaagaagaaaaaaagaatacttaaagattcatgtggcctaaaattttagtgaaacattcaggcttctctcttgaccgtctgctttatctctcacacatacacatctgtgatggaagctttgcttttctacgaatcttcattatacacttcctactaactggtttggctctggtccctwatactgttagtttgcttcaaatcttatgtttccaactctaaatatgattttatctcccccaaataacagtttaagttcttttgggttttctagaaaccatttcttgagaagccctgtttcattttattttaaataacaggtcctttcaaagatcacttgctaagtatgaattatttgcctttggttcatgtttgcgcctctggtcaaatcatttctgcaggggtcttatagtaaatactgcacctaagaactatgagcattacatttctttgtggaaaaggctgtgggcagggcccacaatgactaaccacctgtgtatctgatatgcaatccttagaatgggacaatttctatagaatcacaatgagtcagacatacaccttgtttcattctaaactagaacatttttatccagtaactaaagtagatgttagtttgcttttaaactaaagaaaaaacatgaaactataaagcaacaaaatattgaaatatttagacttatgccacatcttttcaaactttataattttatc

SEQ ID NO: 709567 - DNA, 1430 bp, Homo sapiens
tttaaattcaggatagcttagccatgttgtttgatttagtaaaatttcctacagtgtttcccaacattaaaaatgctattttgttttcagcaatgaacacatttaaactgaagatacacttaaactaagggattccaaggaaataaaaggactaggttatacaaggaaagagttctaatatggaataagcattttcattgctttttttgctgtgaaattgaattgtcagttttcctatcttcataaattgcaaaacagcattcatttccttgtgccttcttctctctctccctcaccgctccttatgtttttacctttccgtatgcgtgtgcattacttgaaagccatgcatgggctgaaggatgttgcagtagagaaaaataagaaggcaaacaaaagcttattgaattcactgtttgttaacaagaaaaaaatatatatacacatacatatatttatacacatgtatacrtacaaatacatgtatatgtaggtggacatgtacttgcatagacattaatgtatcatttgaaatgagaaagtttattgatgaaaacctatcatcttaaaaatctcactgccacagtagctacagataaatttctagtgtttttcactatctccatcataatgtttataaaaaattatttatataaagatgatgcataatatatatattttcattatacaaaaagaatggggttataaaccccaaattcaaaaatgagaaatacggattgaaaaaaactccttgatcatgtgtcacgagaatctggaataatcttccaatctttcatgctgacctggattaggcactcagaaaatccattgccgctatccatcctctcctgccagtagtagctagacaacccaaatataaggtttttttgcaagtcactgtctgactttttcagacaattcaacaacttctttttaaggggaaaagcagcagcatttgttttccttcaaagcattcttgttctatgattgagatgacatggtttttggactgctccctgcaggaggagaagccagacggaaggtggctttctctcagctctggcaattatagcaaagtcataaaaccccaggtaaatgggaactctttaaacatttgcagatataagtccgacacggtaggaaagtgacccaaagggaagtgcttattgatccatttccccccaaagctgtcagtgatgaatgaacatcatctaatttaataggaacagctctaagcctgcaaccttgcaggtattctccctggtttttcttgtgtgactgtttgaccatgcccaagaaacttaaccttttcagtgtcactcttcccatctgttaatggggataacagtgtttcagttctgagccttcttatctaaggtagctcaggagaaatatgctgttgagttgcattgtatcataaacatatttca

SEQ ID NO: 709568 - DNA, 1430 bp, Homo sapiens
tttaaattcaggatagcttagccatgttgtttgatttagtaaaatttcctacagtgtttcccaacattaaaaatgctattttgttttcagcaatgaacacatttaaactgaagatacacttaaactaagggattccaaggaaataaaaggactaggttatacaaggaaagagttctaatatggaataagcattttcattgctttttttgctgtgaaattgaattgtcagttttcctatcttcataaattgcaaaacagcattcatttccttgtgccttcttctctctctccctcaccgctccttatgtttttacctttccgtatgcgtgtgcattacttgaaagccatgcatgggctgaaggatgttgcagtagagaaaaataagaaggcaaacaaaagcttattgaattcactgtttgttaacaagaaaaaaatatatatacacatacatatatttatacacatgtatacatacaaatacatgtatatgtaggtggacatgtacttgcatagacattaatgtatcatttgaaatgagaaagtttattgatgaaaacctatcatcttaaaaatctcactgccacagtagctacagataaatttctagtgtttttcactatctccatcataatgtttataaaaaattatttatataaagatgatgcataatatatatattttcattatacaaaaagaatggggttataaaccccaaattcaaaaatgagaaatacggattgaaaaaaactccttgatcatgtgtcacgagaatctggaataatcttccaatctttcatgctgacctggattaggcactcagaaaatccattgccgctatccatcctctcctgccagtagtagctagacaacccaaatataaggtttttttgcaagtcactgtctgactttttcagacaattcaacaacttctttttaaggggaaaagcagcagcatttgttttccttcaaagcattcttgttctatgattgagatgacatggtttttggactgctccctgcaggaggagaagccagacggaaggtggctttctctcagctctggcaattatagcaaagtcataaaaccccaggtaaatgggaactctttaaacatttgcagatataagtccgacacggtaggaaagtgacccaaagggaagtgcttattgatccwtttccccccaaagctgtcagtgatgaatgaacatcatctaatttaataggaacagctctaagcctgcaaccttgcaggtattctccctggtttttcttgtgtgactgtttgaccatgcccaagaaacttaaccttttcagtgtcactcttcccatctgttaatggggataacagtgtttcagttctgagccttcttatctaaggtagctcaggagaaatatgctgttgagttgcattgtatcataaacatatttca

SEQ ID NO: 709569 - DNA, 1430 bp, Homo sapiens
tttaaattcaggatagcttagccatgttgtttgatttagtaaaatttcctacagtgtttcccaacattaaaaatgctattttgttttcagcaatgaacacatttaaactgaagatacacttaaactaagggattccaaggaaataaaaggactaggttatacaaggaaagagttctaatatggaataagcattttcattgctttttttgctgtgaaattgaattgtcagttttcctatcttcataaattgcaaaacagcattcatttccttgtgccttcttctctctctccctcaccgctccttatgtttttacctttccgtatgcgtgtgcattacttgaaagccatgcatgggctgaaggatgttgcagtagagaaaaataagaaggcaaacaaaagcttattgaattcactgtttgttaacaagaaaaaaatatatatacacatacatatatttatacacatgtatacatacaaatacatgtatatgtaggtggacatgtacttgcatagacattaatgtatcatttgaaatgagaaagtttattgatgaaaacctatcatcttaaaaatctcactgccacagtagctacagataaatttctagtgtttttcactatctccatcataatgtttataaaaaattatttatataaagatgatgcataatatatatattttcattatacaaaaagaatggggttataaaccccaaattcaaaaatgagaaatacggattgaaaaaaactccttgatcatgtgtcacgagaatctggaataatcttccaatctttcatgctgacctggattaggcactcagaaaatccattgccgctatccatcctctcctgccagtagtagctagacaacccaaatataaggtttttttgcaagtcactgtctgactttttcagacaattcaacaacttctttttaaggggaaaagcagcagcatttgttttccttcaaagcattcttgttctatgattgagatgacatggtttttggactgctccctgcaggaggagaagccagacggaaggtggctttctctcagctctggcaattatagcaaagtcataaaaccccaggtaaatgggaactctttaaacatttgcagatataagtccgacacggtaggaaagtgacccaaagggaagtgcttattgatccatttccccccaaagctgtcagtgaygaatgaacatcatctaatttaataggaacagctctaagcctgcaaccttgcaggtattctccctggtttttcttgtgtgactgtttgaccatgcccaagaaacttaaccttttcagtgtcactcttcccatctgttaatggggataacagtgtttcagttctgagccttcttatctaaggtagctcaggagaaatatgctgttgagttgcattgtatcataaacatatttca

SEQ ID NO: 709570 - DNA, 1430 bp, Homo sapiens
tttaaattcaggatagcttagccatgttgtttgatttagtaaaatttcctacagtgtttcccaacattaaaaatgctattttgttttcagcaatgaacacatttaaactgaagatacacttaaactaagggattccaaggaaataaaaggactaggttatacaaggaaagagttctaatatggaataagcattttcattgctttttttgctgtgaaattgaattgtcagttttcctatcttcataaattgcaaaacagcattcatttccttgtgccttcttctctctctccctcaccgctccttatgtttttacctttccgtatgcgtgtgcattacttgaaagccatgcatgggctgaaggatgttgcagtagagaaaaataagaaggcaaacaaaagcttattgaattcactgtttgttaacaagaaaaaaatatatatacacatacatatatttatacacatgtatacatacaaatacatgtatatgtaggtggacatgtacttgcatagacattaatgtatcatttgaaatgagaaagtttattgatgaaaacctatcatcttaaaaatctcactgccacagtagctacagataaatttctagtgtttttcactatctccatcataatgtttataaaaaattatttatataaagatgatgcataatatatatattttcattatacaaaaagaatggggttataaaccccaaattcaaaaatgagaaatacggattgaaaaaaactccttgatcatgtgtcacgagaatctggaataatcttccaatctttcatgctgacctggattaggcactcagaaaatccattgccgctatccatcctctcctgccagtagtagctagacaacccaaatataaggtttttttgcaagtcactgtctgactttttcagacaattcaacaacttctttttaaggggaaaagcagcagcatttgttttccttcaaagcattcttgttctatgattgagatgacatggtttttggactgctccctgcaggaggagaagccagacggaaggtggctttctctcagctctggcaattatagcaaagtcataaaaccccaggtaaatgggaactctttaaacatttgcagatataagtccgacacggtaggaaagtgacccaaagggaagtgcttattgatccatttccccccaaagctgtcagtgatgaatgaacatcatctaatttaataggaacagctctaagcctgcaaccttgcaggtattctccctggtttttcttgtgtgactgtttgaccatgcccaagaaacttaaccttttcagtgtcactctycccatctgttaatggggataacagtgtttcagttctgagccttcttatctaaggtagctcaggagaaatatgctgttgagttgcattgtatcataaacatatttca

SEQ ID NO: 709571 - DNA, 1557 bp, Homo sapiens
tgatttatttcaacagtgttttatagttttccttgtagagatcttttgctgccttgtgtaacctctctttctctctctctgcctctattcttctctcttacacacacacacacacacacacacactctcacacatacacaaacacacacaaaattataagcttctttaaacaagaatgtgtggttttatccatattcaacaagtggttgttgaatggcttaatgaatgaattagtacatttcataaatactttattgcaaacttatcaaaatatacataattatgcaattacaacaattactctcttaaactgcactgaagatagctcttactgagaactaaatctgggtgtttaggctagaacctggcccttgttgaggaggctgtttcttatttctagagagccattagatataagacactggaccagatattgtgaaagaaacaaatgtggttaaagtaagatgtggactttaatggaattttgatttattaggagagataaaatttacacctgatcatacaaatgtagtcatgtggcagtttgaagacaragcatgtaatgaaggctcagaagagagaaagaatactttttgggaagatcagagacttaaaggatacattgatgtatcaattatgcattgaagaataagtaaacatttggaaaagaaaattgcccacaaaagagatatagaaaacaaagccatgagacgataggaaaaggtatagtctaccttgaacactaatgggagtaaaacttgaacactaatgggagtaaaacttgaacactaatgggagtaaaagagatacagatggaacgatccactgagaacccaggagccagcgaatatgctcaacatttgaaattgtgggaggcaggtgtgcaagcctgtgctcaaatccacactgggtctcatggactaaccttgaaactagttctttagcaaaattaaaatatcagtacctcctttgaagagttctaacagaataacattttgaaaagcactgccacatattatatttcgttaatactgtttcttcattattcagaagacattgtctaagtcatagaagaaatttggacaaatgaatgacacaaccagagcttttccttattgacaaattacctaaaagatttggtgtgatttggttttcccttacttggtatttctgaaatgccaaactcaatttcctattcctctatatgtcaaccacgtacatgatgtcaacattagcctcttctttatacatatgccacaagatggagtatccaaacctaaacattcaaaatagaaacctgaaaaagttatgaggtcatggagccagacagccttggttggatgctgccttttccatgcaatagttatgtgaccttgtaatgccattgaacatctctgtgcctagtggttgatgctataagaattagataagataatgtatgtcaagtacttaacacagacttgacacatagtaaatgcttcatatatattagctattatgttcccattgaagttctcttagattctaaccagacaacatataaaaattagtaattta

SEQ ID NO: 709572 - DNA, 1557 bp, Homo sapiens
tgatttatttcaacagtgttttatagttttccttgtagagatcttttgctgccttgtgtaacctctctttctctctctctgcctctattcttctctcttacacacacacacacacacacacacactctcacacatacacaaacacacacaaaattataagcttctttaaacaagaatgtgtggttttatccatattcaacaagtggttgttgaatggcttaatgaatgaattagtacatttcataaatactttattgcaaacttatcaaaatatacataattatgcaattacaacaattactctcttaaactgcactgaagatagctcttactgagaactaaatctgggtgtttaggctagaacctggcccttgttgaggaggctgtttcttatttctagagagccattagatataagacactggaccagatattgtgaaagaaacaaatgtggttaaagtaagatgtggactttaatggaattttgatttattaggagagataaaatttacacctgatcatacaaatgtagtcatgtggcagtttgaagacaaarcatgtaatgaaggctcagaagagagaaagaatactttttgggaagatcagagacttaaaggatacattgatgtatcaattatgcattgaagaataagtaaacatttggaaaagaaaattgcccacaaaagagatatagaaaacaaagccatgagacgataggaaaaggtatagtctaccttgaacactaatgggagtaaaacttgaacactaatgggagtaaaacttgaacactaatgggagtaaaagagatacagatggaacgatccactgagaacccaggagccagcgaatatgctcaacatttgaaattgtgggaggcaggtgtgcaagcctgtgctcaaatccacactgggtctcatggactaaccttgaaactagttctttagcaaaattaaaatatcagtacctcctttgaagagttctaacagaataacattttgaaaagcactgccacatattatatttcgttaatactgtttcttcattattcagaagacattgtctaagtcatagaagaaatttggacaaatgaatgacacaaccagagcttttccttattgacaaattacctaaaagatttggtgtgatttggttttcccttacttggtatttctgaaatgccaaactcaatttcctattcctctatatgtcaaccacgtacatgatgtcaacattagcctcttctttatacatatgccacaagatggagtatccaaacctaaacattcaaaatagaaacctgaaaaagttatgaggtcatggagccagacagccttggttggatgctgccttttccatgcaatagttatgtgaccttgtaatgccattgaacatctctgtgcctagtggttgatgctataagaattagataagataatgtatgtcaagtacttaacacagacttgacacatagtaaatgcttcatatatattagctattatgttcccattgaagttctcttagattctaaccagacaacatataaaaattagtaattta

SEQ ID NO: 709573 - DNA, 1148 bp, Homo sapiens
cttttgggataggatactatacattaaagatgatacagtgtttattccagaatggtcttagctacagtgttcacagcacagtatttgtatacttaacgctgttatccattctaccttcctttgaggttggcatgagagttgcccgtcagcgtatgtgtgctcttagaaatcggggacaatactattcattttaagcttcttggcagtgacgtgtacttaactagatggtgaactcataggtggagggggagtatctaatgctttcgtattctgcttttcagcaaataaatattaccgtactgtgtgtgtaacatgagctatataagtgtgtgatgattaaattagaagatagggttctctgcaatccagttttccaagataaatttttgccttgtttttcttaggtaataaaggtaccatattgactgttgatatatgcctacttagtcatgcttctcttgcagtaatcttatcaaattgccagctttttacttttttagagagacagtcctagaattgagaatcctcttttgcctacattcaaaatagactatattacgtgggtaggaaatttctggtgacctacttttaatttttaaatttaaaaaaattttagcatagttttagatttagaaaatagttgcaaaggtggtatagagagtttctgtgtaccacacaggcacccagtttcccctgttgctaacatcttacatgattatggtatatttgtcacaactaacaaatcagtattgatatattataactaaactgcatacttttaggggtagtgacccagttttaaagcttatttcccacaatttgttaaaaatgacaatcagcattgaatgcccatgggtggtggcttcctgattcttcaaagaaactgagtaattttgtaaccattgggacttatcaggaaataaggaactcataataatgtgcgcttaaatttccagtggaggaattgtacagcttaaaatatgtttttgtaagttgggtattaataaagaggctgggtggggtttgatcactattaatwctgatttattttgttccctggaaaatatgttactaccacatggtctacccttcatagataatcaatcctaagatcactgggtggaaaagggttgccctgtagtaggaaa

SEQ ID NO: 709574 - DNA, 621 bp, Homo sapiens
aaaaagattgggatcaaatctaggtcacccatgtggtcaggaactcccagggcaagatactcacatacaattattccctggctaaaatagagaaaaaagaatgaacagaaatgaacagagctcccagagaaatgtgaaacaccattaagtacaccaacatatgtgaaacaggagtaacaaayggagaggagagagagaaagaggcaaaaaaaaattagtcgaagaactaacagctgcaaactactcaaattcattgaaaaacaataacctatacatccaggaagctcaacaaattccacattcctaggataaatgcaaaggagccacaaactgacacatcagagtgaaaatgctgaaagtgaaagacaaggcgaaaatacgaaaagcagcaaatgggacgtgacttgttacttctaagggaaccccaataagacaaacaactgacttctcagcagaaacaacagaggctggggcagtgggataactgctcacagaaaaccatcaaccaagatccatatccagcaaagatatcttctgaaaaatgaaagtaaaataaactttcccagacaaacaacaagtgagagaagttgtttgcagatccaccttataagaaacactaaa

SEQ ID NO: 709575 - DNA, 991 bp, Homo sapiens
tattagggctaattatcttaccttgggagaaataattaagcttgtataaacctcaaatgaaacattctgaaacttacattgatataaatcatattcccaataatgttgaaaaattaaatgaaatgaataaattgtctaraaattataattgccaaaatcacccaaaatagaatgaataagaccttctatccgatagcacaacagggtgactatagtcaacagtaacttaattgtatattttaacataacttaaagaatgtaattggattgtttgtaacacaaaggataaatgcttgaggggatagaaaaaataaattaaggaaacaaacgtgacccagaaaatgtacaaacaccagtaatattttaaaaactaaattacatggaaaaaaacaacagcaatttctacttcttaaaagataataaagccggatgattttgcaggcaaatctttactaaatatccaggaaatgtataagacctatcttatacaaaatgtttcaaagaaaaaaggagagaaagttaattaatatttgatgcagttaatataagcttgatataaatattgagcaaaaatatattaatcaataaataacaacaagaacagtaagagaaaaaaattaccaacatacacacaaaaatcttgtatatattttggtaccagcaaagagaattaagcagtgggaaaaaaatgtctgactaggtataacaagaaagtgaaaacttctatttacctgaaaagataaacatgatgattatgacttgcagtccctgcaggggtccctgttatcaaatacactgaaggaagaatttccactcctgccgaccaatggtctctctccgggcactgctgctcacaggaggttctccaggcacctctgggctaagtgtgcttaacttcttgaggtgccggagcatcgcaattatttgagatttcttctacaaatggacagaattacccacttgtcactatgtgttacactgtcttctgggc

SEQ ID NO: 709576 - DNA, 991 bp, Homo sapiens
tattagggctaattatcttaccttgggagaaataattaagcttgtataaacctcaaatgaaacattctgaaacttacattgatataaatcatattcccaataatgttgaaaaattaaatgaaatgaataaattgtctagaaattataattgccaaaatcacccaaaatagaatgaataagaccttctatccgatagcacaacagggtgactatagtcaacagtaacttaattgtatattttaacataacttaaagaatgtaattggattgyttgtaacacaaaggataaatgcttgaggggatagaaaaaataaattaaggaaacaaacgtgacccagaaaatgtacaaacaccagtaatattttaaaaactaaattacatggaaaaaaacaacagcaatttctacttcttaaaagataataaagccggatgattttgcaggcaaatctttactaaatatccaggaaatgtataagacctatcttatacaaaatgtttcaaagaaaaaaggagagaaagttaattaatatttgatgcagttaatataagcttgatataaatattgagcaaaaatatattaatcaataaataacaacaagaacagtaagagaaaaaaattaccaacatacacacaaaaatcttgtatatattttggtaccagcaaagagaattaagcagtgggaaaaaaatgtctgactaggtataacaagaaagtgaaaacttctatttacctgaaaagataaacatgatgattatgacttgcagtccctgcaggggtccctgttatcaaatacactgaaggaagaatttccactcctgccgaccaatggtctctctccgggcactgctgctcacaggaggttctccaggcacctctgggctaagtgtgcttaacttcttgaggtgccggagcatcgcaattatttgagatttcttctacaaatggacagaattacccacttgtcactatgtgttacactgtcttctgggc

SEQ ID NO: 709577 - DNA, 991 bp, Homo sapiens
tattagggctaattatcttaccttgggagaaataattaagcttgtataaacctcaaatgaaacattctgaaacttacattgatataaatcatattcccaataatgttgaaaaattaaatgaaatgaataaattgtctagaaattataattgccaaaatcacccaaaatagaatgaataagaccttctatccgatagcacaacagggtgactatagtcaacagtaacttaattgtatattttaacataacttaaagaatgtaattggattgtttgtaacacaaaggataaatgcttgaggggatagaaaaaataaattaaggaaacaaacgtgacccagaaaatgtacaaacaccagtaatattttaaaaactaaattacatggaaaaaaacaayagcaatttctacttcttaaaagataataaagccggatgattttgcaggcaaatctttactaaatatccaggaaatgtataagacctatcttatacaaaatgtttcaaagaaaaaaggagagaaagttaattaatatttgatgcagttaatataagcttgatataaatattgagcaaaaatatattaatcaataaataacaacaagaacagtaagagaaaaaaattaccaacatacacacaaaaatcttgtatatattttggtaccagcaaagagaattaagcagtgggaaaaaaatgtctgactaggtataacaagaaagtgaaaacttctatttacctgaaaagataaacatgatgattatgacttgcagtccctgcaggggtccctgttatcaaatacactgaaggaagaatttccactcctgccgaccaatggtctctctccgggcactgctgctcacaggaggttctccaggcacctctgggctaagtgtgcttaacttcttgaggtgccggagcatcgcaattatttgagatttcttctacaaatggacagaattacccacttgtcactatgtgttacactgtcttctgggc

SEQ ID NO: 709578 - DNA, 781 bp, Homo sapiens
acttttaaaatcctgaatcatccaacaggatgatgcaacaatattccaatcttagaatgggaggatttgacaaaaccttagtgtttatcccaagctaggggttaactcccaggggaaattatgaactaagtgcagcaattaatcatggtgatgagtaaaaaagtacagtaacatctctgtgaccaactcatgggagtgtggagaaagtccctttggcagctgtctgcccagctaatggtacttactaattaatggagaggccaaatctgaacctaccctacagccttgtgctgaaagctgctttgtagctattcatataaatgtagactggtccaggtcaaaayacagtaaaagtgagggcactttttgtctctatgtctctggaaggaataataaaagaaaattatcagtgagtcacatgaggctccataatccacgatagactaaacagtaaatgtggccttttcctagatcagtgtgattaattcaaaagtcagaaccatctgtagcagttttaagaacagaaataaatttataaaaagtaatcataccttttcaataaaaagtaataagtaataccttttaaatatatcttttatcagcatttgactggtagcagccatttgagtggctatttcatgcaagcatttatcagccattccggaagaggtgggttgcagtgggggcagaattctggtaaccaaagaatcatttattaaatggttccattcttgatcagtttagcttgcttatagtaatcacatcaattatttatggagca

SEQ ID NO: 709579 - DNA, 1190 bp, Homo sapiens
caagcatgtgccatcacgctcagctaatttttgtatttttcgtagacatgaggtttcaccatgttgctcaggctggtctcgaactcccaagcttaagcaatctgcccaccttggcctcccaaagtgctgggattgtaggcgtgagccattgtgtctggcccagacatttaagaattaatcaagcagggataagtgcattttattgtactttcctttctatcactcatttattctataaatatttcctgagcagttgctttacattgcataccagggatacagagctgaagaagagagacagcatctctgctcacgtggctcttacactcttgatgtggaaaaggatgatgaggatgaggatactaatatgtggtctgaatatggtgcttataatgtgccaggcattgttccaaacactttatgaatttgttccaagcattctaccaataatcatgtagttaattcttgtaacaaccatgtgaggtaccattattaatgtttctacagagtattttctctgaaaacaagcaaacagaaaaatcaggtgatctgataccactgagtccatatttcttgcacagagctgaacagagattccctttcagtttaaatgtgtgccctggagttcaccattgtctgcaccactttatggtctgacttccatttgacttatgtcatctacctgcttcttgcagctatttgcatattctggtttaatagaacgggccttccaaggtgtaggtttctttgctctggaaagctcatggaaaaggatggaaatctttttccctagaactctgctagattctgaatttagaatttcaggggaaagtttttctcgttacatttgtacaccttgtcataatttcaaacatgtacaataaataaatgatatgcaaatccttgtgtgacctattagaaatggcatgaggaaagaatctgctacttctaagctgtgtgcttttgagcaaagaatgttagctctctcyaacctcatctctgtcatctgaaaaatggggataatcatatttcctcatagacatgttataaggattaaatgcactaatgtacatatatgcctggtatacagtaggtatataatttaaaatattgatacatataagtacttgctaatcaggttcttatatacgtaagaaccgtatatatataggcaatttacgttcttataa

SEQ ID NO: 709580 - DNA, 1375 bp, Homo sapiens
ttgaaaacactgttttctcctcccggggctttgggactatgcctctgttgtgttgactgctcatccttgctgcttctctgggcagattgtaactgtgaactgtgcccggctsctgaaagccgaccaccatgcaaccaacggggtggtgcacctcatcgataaggtcatctccaccatcaccaacaacatccagcagatcattgagatcgaggacacctttgagacccttcgggtaagggactgccctgggtggaggcccaggcttgggacacattgcctcccaagaggggcctagcaggaactcttctgcaggagaggtagaggatggctcctgtaggggaacatagagcaggttcccctgaatgcccttgaacatggagaattcattgaccagacattcagcttgacctaacctgtgaaattctccatcttctttataaagtgttcccttccttgcctcccctggaaaggtcagtggtgtgtggctgcagcagcacagtgtcctctgagccctggacctgcactgtggcttccagaggtggcagttcccacatggggtactagaataaatggcctatcaggctgtgtgtgctttgggatcacatgtccccaccctaggaccctggttccaaccatacgcatgttctcttggagcccagaacagcagagaagccaccagtgtggacacagaagtcaagggtctgatttccagcctggcttctgactgctctggggccgcaggaatacggttccttcccccatgcccagcaggcatttgtcttacaactggaggggaaggcatgttcctcttggcaaggactgctcaggaggaagtggaggcaggctgccctgtcagggtttttgccttgattcaaggagaacttcctaaccacaaaggatacaagtgggagtgaggcggaccctccctagagatctccaacacagagagacaaacacgctggggctggctggcactgacaggcctcgcaggtgtggatggctgttagctgggagcttcgctgtctaagctcctctcccatgcttttcttctgggttgctcgaaggacgggggtctgcaagaaaatgatgttcccacatagttggcagcacgtgaacagcaattgatccctttgcatcacctcctcttactgtttagatttggtaaatatttcttccttccctcttctgaccctccattttgccgatctttccttcttataacacatacttactaggtacctgctacttcccgggtgggcctatgtgccaggagtatagaggtgaacaaggaaggcaaagttctattctcagtagagctaatactctatctggagagagacaacaaacaaatcaacaaggtagccaggggctgtga

SEQ ID NO: 709581 - DNA, 899 bp, Homo sapiens
ggatgtttagctgcatccctggcctctacctgccagataccagcaacaccgcttctctaggtatagcaaccaaaaatgtcctcaaacgttgtcccatgtcccctggggaacaaaaaccacccccagaactactaagagtattatggtgacccagctgactcctggagtcccattttcttctctagaagaaaccagctgccaaaaataatgatctaattaactcattcaccctgaagtgcaaaggtgagataagagattaggtttttatatttttataggggatgagttcttggtccacctcatrtcagatgaacataagccaagttgtagggtttaaggcaagaagaagcagagagtaagaggtgtcacaattgcgggctcctgagttcacatcacacttgtacctgattcatctacttcccatagggagtaacccaccctgtgagtttaaacccatgtgcacacttcaaccatccaaagcaatattctgtttaaaagataccttgttgttgttctctatggcttgaaagcaaattgggaccagtgagtaaaatctaagttttgaacagaatctaagtgttggatagaaaagcatacttcactgatgcaatcattcattcacttatgggtccaatcattcatttatttattcatatatccaacaaacacttgaacaaggtgggctgggtatagcaatgggatacagtggtaaacaagatagatttgacctgccctctgggagcttacagtcttatctagaggacaatcaagtacatagtaagtacaattgcaaactgaaataaggtatacaaaagaaaaatgggggactgagatagaaaataactttggttgttggtaatttcggaggagtaagtgggggagggtacagtgatcagaga

SEQ ID NO: 709582 - DNA, 899 bp, Homo sapiens
ggatgtttagctgcatccctggcctctacctgccagataccagcaacaccgcttctctaggtatagcaaccaaaaatgtcctcaaacgttgtcccatgtcccctggggaacaaaaaccacccccagaactactaagagtattatggtgacccagctgactcctggagtcccattttcttctctagaagaaaccagctgccaaaaataatgatctaattaactcattcaccctgaagtgcaaaggtgagataagagattaggtttttatatttttataggggatgagttcttggtccacctcatgtcagatgaacataagccaagttgtagggtttaaggcaagaagaagcagagagtaagaggtgtcacaattgcgggctcctgagttcacatcacacttgtacctgattcatctacttcccatagggagtaacccaccctgtgagtttaaacccatgtgcacacttcaaccatccaaagcaatattctgtttaaaagataccttgttgttgttctctatggcttgaaagcaaattgggaccagtgagtaaaatctaagttttgaayagaatctaagtgttggatagaaaagcatacttcactgatgcaatcattcattcacttatgggtccaatcattcatttatttattcatatatccaacaaacacttgaacaaggtgggctgggtatagcaatgggatacagtggtaaacaagatagatttgacctgccctctgggagcttacagtcttatctagaggacaatcaagtacatagtaagtacaattgcaaactgaaataaggtatacaaaagaaaaatgggggactgagatagaaaataactttggttgttggtaatttcggaggagtaagtgggggagggtacagtgatcagaga

SEQ ID NO: 709583 - DNA, 2695 bp, Homo sapiens
tgctgagcagtacctgacagaagtgttgatgaagagatgaaagcatatcataaaagcttaaactgaaagttctccccaatcctttgattcgatcaaattgtaccatgatggaaacacggctcaactcctaagtgtgaggaatggaaatggttcccattcagtgtggtcctcatagcaggctagtaacaatgactgtgctggtggagagtccaacatgaagaagagggttggaaagtcaagcatctgagccatttaaggataccaaggccaggaagccctttcctgaatgagaaattggcccaatgacatgaaaattctttccacttcgggcttctgtgattcttctagagacagcaaagacttttcaccagaaaactaaagtccagcctgctttctgatagtgccaatgtagcttttctgagagaacagtgggtttcttgcttgcttgcttgcttttttttttttttctttctttctttcttcttaatgggtagtggtcacagccatgaacttagcaaaagaagcaagttaaaatttgtccattcttggctaatgcagttagacatttttgagaaaaggcaatgagaagtggtcattatccattatctgcatgaaatatttcagagaaagaagcagcatttgccaaaaaaaggaaaagatgtttgacttcaagccaggcaaaaaggaaacaagatcaccttctagctctgtgggatggctgtgctaatgatgttatttcaagtaaaattggaatatatatctgaaaaaatacagatggtgcagcagcttcatatactttctgaaggtcattttggacaatgattcactgtccctttacttgggaaaaaaaaaacctctccagtcttggaaggaactatatgtgtgtgagtgtgtttatatatccttatgcggaataaacgtatagaaaataagcatgcatgacttgctgaaaatatttgttaccacttgaaaagtcaacacctaaaaatcttaatttgataggagagtctcagttctattgtgtagtttctttgttcctgtttcgtttcactttgttttctcctctgttcctgatttgtgactctctgggtgtaaggataatgtaaggataatgatttctaaactggagctaccaaaaagcttataaagtggtccccttctcacccttctccatgaatattttctcactctgcttttttaaattgtcaccaagacacgtcgcaataataatatacgctggactgaaattccaggtagctgaatataaagcatttttcttggagaccttctgctttaaacatttgtcacctctctcagtgcaaagcccgaggcctctaacaaagaccttttttctcagatggtgggttgctttatttcttgaggattgcagacattaccattatggctaatgacctaataacttgctatttgatgtttgtacatcactttctacggaagttcccggcacacataccactggctccttgtacaagtgatttaatattaaataacaaaccccaaactggaggaagctcttttcttatgcattcttatggatgacacataaacaaagctggttcttatctattgtgaataccatctaaaagctgttggcttggaataagatttagggataacacagaatgccagactcaactgatttcagccatctgtgggttcaggttgaagatcagatgtacagtggttggaaagtgcctagaaccagcactgagaagttgggaggtaaccctgcattcttggtgtttcacatactttatcacatgctatactctaaagcatcttaagaagcagatactattattattcctattttatagatgaggaagctgtgcctttgaaagttttcagtaattttcccaagattgtcttgtccttcccaagacattacacagtacaccaaggtctgcctgatcctaaggctgaggggccatcttatctaccctgttaactgatcagttcttgaatcagcaatttatttctctcttggttggtgttttccagtataaactgggagcaaccatctaagccacaggcatttagtctcttggtctctggagaggacaggggctgaaagtcctcaaagttgtatgatcttttcacaaagctggttcccacatacactggtgaacataggcatagagaagtagattgctaaatatctctctactaattaactgttttgcaatttacatccaaacttctcaaacttcctggcacataggaatcctctagagaccttgttaaatgatttctattctgtaggcttggggtggggctgagagcctgcatttctaacaagctcccaggtgatgccaacaccattcatcaaccctacttgaatagtatgggtttacaatacacttcctcttttgtcctgataggaccctttcagtcagtcaggcttgggatagtcactcctatttgaggttgacagatgaagaaataggtcaaagagctgataggagagagaaccagaaaagcacaccagattctctaacccctggttcctgcggttcagaggttgcaaatggttgggtctcagatgtatttagttttgtccacacagttgggcccaaacaaaatacctggcaatcccaaactccatgaaagtccttcagtagcagctgtgcttttctttctttctttctttytttttttttttttgtttgagaca

SEQ ID NO: 709584 - DNA, 577 bp, Homo sapiens
gaggtttgctttgataggatcccagccaggagctggagatacagagttatggccaagcccctggggaagggacctggtaagagctgggtagggtrccaggatcccaaccatgaactgccttagctctgatgggctcagaagttaggcagggttgagtatgcttgtgggaggcttctctggctaaaatagtaggacccagcctggcgtggtggctcacacctgtaatcccagcactttgggaggcccagatgggtggatcacatgaggtcaggagttcgagaccagcgtggccaagatggcgaaaccccgtctttactaaaaatacaaaaattaacgtgatggcgggcgcctataatcccagctacttgggaggctgaggcaggaaaatcgtttgaacctgggagacagaagttgcagtgacccaagatcacgccactgcattccagcctgggtgacagagtgagacgctgtcttaaaaaaaaaaaaaaagaaaaaatagcagggcctaaacattaactgtcacatcctaatatctaacactataggacaggttggaattgagagtcaggatagtgga

SEQ ID NO: 709585 - DNA, 577 bp, Homo sapiens
gaggtttgctttgataggatcccagccaggagctggagatacagagttatggccaagcccctggggaagggacctggtaagagctgggtagggtaccaggatcccaaccatgaactgccttagctctgatgggctcagaagttaggcagggttgagtatgcttgtgggaggcttctctggctaaaatagtaggacccrgcctggcgtggtggctcacacctgtaatcccagcactttgggaggcccagatgggtggatcacatgaggtcaggagttcgagaccagcgtggccaagatggcgaaaccccgtctttactaaaaatacaaaaattaacgtgatggcgggcgcctataatcccagctacttgggaggctgaggcaggaaaatcgtttgaacctgggagacagaagttgcagtgacccaagatcacgccactgcattccagcctgggtgacagagtgagacgctgtcttaaaaaaaaaaaaaaagaaaaaatagcagggcctaaacattaactgtcacatcctaatatctaacactataggacaggttggaattgagagtcaggatagtgga

SEQ ID NO: 709586 - DNA, 1070 bp, Homo sapiens
cacacagcagcttggtgtgttaaaggcaaacctcatgggtgtctagtaagccttgattgtttctaacagactgctttggcattctctaattagcagcctcagtccctgtgtcagtctgagagctacctcccaattcataatcattgttaaccttaaaaagtaggtacaagtcagacaaagtggtggcacatgtctgtggacccagctacttgagaggctgaggcagaagaattgcttgagcccaggaattcgaggctgcagtgagctatgactgcaccactccactccagcctgggcaacatagcaagacccctgtctgtaaaaacaaaaaaagtggtatagtatctacttggtcctgcccatttagcaagcatgagatgctaaagctctcattatttgttgctaagttctctgtgaatctgagtcagctggttattttccctcttcacagaggaggtatgtgcttctctgtgcttggcagtctgggtgaggagcaaggtggcgaggtgctactaaggccaaatacaaggtctgcctcccttccatgacagtctgcagacatggtttcagggccaggtctgggcactgcttgaaacagtactttctgaaggaaagtatcacagaaggaaactgccttgtaagaataaaaggagaacttcaaacatgctgtcaatatttgatgaagcagccagttcaggtcacgctgggtagtcaactgctcttgggttgagaaaaccatggctaatgagaggaggaagcacacctgagccaacttgctcatgagctgagttattcaaatgtgggcacaaagcagtcacctaagtcttgcacctgctgtgactcagcgcacacccgagtgtcaaattgagatttaacaggatgccagtaccagcggcagaaagagcrtttcacaatgatgccacccaaatggtgccagggaagggaggagagagcccactgcgtcctgccgtcagctatgcaagactttctggagcctttcatctaacagccggggacgggctgatatctggcttccttggagtagcttgcaaaacaaattagcatggacc

SEQ ID NO: 709587 - DNA, 2110 bp, Homo sapiens
aaaagaatctctccgtatgtttgtcaaaccctgaaggctttcttggcttgtatgattttatcctttacaaaacatcttactcaatttaggatgagaaaacaaacccatgacaaactttcactgcccatgggtgtttaccataaactcccctactgcctgcagagactttttgttgtggtcctgtaagttgacgaatgaaaagaacttacttttccaactttctttggcttactttgtagtgaggttttgcaaggttctcagcaggaggaaattaaggaggaccaggaccagacatctatagatctgtccgtttctagagaacaagtacattttacaggactctacaaaagacagttcgcagcactgtacttcagagcagagtcaaaagaccaagtcacgtgaagtggcttacagtgaggagaaaaaatgacctggtgtcttttagttatgaagttgccaatactcatcttgagggagaaattcacgagtttcaccaacactataagcttccaattcaattcaaaaaccctgatgttgccaaatagaaacgtacgcccttattcattctcaagtagaatgaaataaaattgtctataaaatatttatcagctctaggttagtgtttgaattataatatctcctgcaggctttaaaatgtcctctctctgcttatttcattattgagtaggcagacaaaattttttacttaatgcagtgactataatgtgtttactgggattaatttacacacccttgaggattaatttaattcctttatgatagcaatttttcctgggatatttttcccccaaggggtcacatccaaatttattagactgttatatgggccacaattatttgggtgtaactgaataatttatgtccatgtttgccaagcctggctgcccatcagagttacctggggaatgtcttaaaaatatagatttccacgtccttccccagatccagtgaagcagagtacaacccgagaattcttgcatttaaagatgctccctagygatttaggtgtagcagcctagttagtggacgagggtttgggaactgatcaatatagtttagtttcgtgtgattttagggtaaaatgttattgctattagctgtagaattttctgttgctaacaccacatgcccttgtcgcttttcctcctgccactcaccagaattgcccaagcttctctctctatattagaagtagaaataagaggaggagaacaagtgagatgagaaaggtttggagtggaaccgtgttgtcactgatggtggtcactgtgaccagaggagccagcaggagcaagcagaacagaccccagataaggttctcactctccttcctgctggcctagcctgtcccaaactttttgagtcagtgttgccctatttgactgggtcactgtaagccctcaaaaaagtgaggttggtcctgggttacatcccaacctgaattcaccttgctcagtgacgtgaattgttatctgggcacagggcttgaaaaacactgaccagtaaagttgattgatgagtagacatagttacaccatttcaaagccatcaagtctaaaacaaccacaacaaaaactcttaaaaaatccttaggtgttgtttctgtcttcttaatgccaatgagaggctttcctgtattgcacgaaggacatccatctattttatttatttatttatttatttatttatttatttatttatgagatggagtcttgctctgtcgctcaggctggagtgcagtgacacgatctcggctcactgcagcctctgcctcccgggttcaagcgattctcgtgcctcagcctcccgagtagctgggattacaggtgcccaccactaagcctggttaatttttgtatttttagtagagacagggttttgccatgttggccaggctggtcttgaactcctgacctcaggtgatccacccgcctccgcctcccaaagtgcccggggttacaggcgtgagtcaccactcccagcctagatccatctatcttgaactaaaagttaatcttctggtttaatctaggattttatgaaaataaatttgtctgttagaaaagtcttacctgcgctacgaaaacat

SEQ ID NO: 709588 - DNA, 1444 bp, Homo sapiens
cattattcttcaagatgtatgtctttttataattcaatggtaagtgcattttcacaattctattgaactacacctcttcaaaccttcaagattgccaagatgagttaggaagaaacaggatctggatcagtttcctacaaaagtgtcaatatttgttaaaacaaagagtacccccaatagaatgccatctgtccttgtctttgaggacctgccgaaaaatcttttcccagccaagagacgattatttggcataactgacacacattcagcaagatggtttacagatcagaaactggcttatataggccgggtgcagtggctcacgtctgtaatcccagcactttgggaggctgaggtgggtggatcacctgaggtcaggagttcgagaccagtgtgggcaacatggtgaaaccccgtctctacaaaagatacaaataattagccaggcgtggtggcggatgcctgtaatcccagctactcggaagtctgaggcagaagaatcgcttgaacttgggaggtggaggttgcaatgagccaagattacaacacagcactccagcctgggtgacggagcgagactccatctaaaataaataaataaataaagagttgctttgttatgtgaaaactgaaagtatagtaatgtgtttcatttttgaaagtataaattagtgattgtttaccaaagtatttcccataggaagcttttaaacagcaggatacctaattgatttaaacattcaattcactaacaagttatttgttgtacaacattttagaaagtaagcaattgataggtaaaacacaaggcccttctcatggttttattgtttcaactatgctgtctctgaagcaaataaactcactactttctcctattacagatggaaacacagttttgttgcagttttcaggctgaagcataacacacaaagtctagcacctcagagtattgcagttcccagrtctatgctggcacctcacccccatcatcaatagcctttctttttacgaggcaagcgtgttcaacatgcttttgagtatggtcagttatctgacttgagttccaaaggagtgtcttagctatctgaattcctttggagaaaactcaagattccttcaaatagtaacctgaagagtaattcaaaaggtcatctcaggtaggagttgtgaaagttgatcaataaattgggtcatctttgttctacccaactaaaacagttgagaggccactgggagaaggctctcagggcacataacattgctccaagaatgtaattctctgcaagccctgctgctgaaactgcctgctgtagcctaaagccagttttatctactagctaccgaaactacctcctgtgacttgaagaattattttacccattgccatcacttaccaagcaaaacttgccagcttcctaaaaccttactagtgccaatgaac

SEQ ID NO: 709589 - DNA, 1444 bp, Homo sapiens
cattattcttcaagatgtatgtctttttataattcaatggtaagtgcattttcacaattctattgaactacacctcttcaaaccttcaagattgccaagatgagttaggaagaaacaggatctggatcagtttcctacaaaagtgtcaatatttgttaaaacaaagagtacccccaatagaatgccatctgtccttgtctttgaggacctgccgaaaaatcttttcccagccaagagacgattatttggcataactgacacacattcagcaagatggtttacagatcagaaactggcttatataggccgggtgcagtggctcacgtctgtaatcccagcactttgggaggctgaggtgggtggatcacctgaggtcaggagttcgagaccagtgtgggcaacatggtgaaaccccgtctctacaaaagatacaaataattagccaggcgtggtggcggatgcctgtaatcccagctactcggaagtctgaggcagaagaatcgcttgaacttgggaggtggaggttgcaatgagccaagattacaacacagcactccagcctgggtgacggagcgagactccatctaaaataaataaataaataaagagttgctttgttatgtgaaaactgaaagtatagtaatgtgtttcatttttgaaagtataaattagtgattgtttaccaaagtatttcccataggaagcttttaaacagcaggatacctaattgatttaaacattcaattcactaacaagttatttgttgtacaacattttagaaagtaagcaattgataggtaaaacacaaggcccttctcatggttttattgtttcaactatgctgtctctgaagcaaataaactcactactttctcctattacagatggaaacacagttttgttgcagttttcaggctgaagcataacacacaaagtctagcacctcagagtattgcagttcccagatctatgctggcacctcacccccatcatcaatagcctttctttttacgaggcaagcgtgttcaacatgcttttgagtatggtcagttatctgacttgagttccaaaggagkgtcttagctatctgaattcctttggagaaaactcaagattccttcaaatagtaacctgaagagtaattcaaaaggtcatctcaggtaggagttgtgaaagttgatcaataaattgggtcatctttgttctacccaactaaaacagttgagaggccactgggagaaggctctcagggcacataacattgctccaagaatgtaattctctgcaagccctgctgctgaaactgcctgctgtagcctaaagccagttttatctactagctaccgaaactacctcctgtgacttgaagaattattttacccattgccatcacttaccaagcaaaacttgccagcttcctaaaaccttactagtgccaatgaac

SEQ ID NO: 709590 - DNA, 628 bp, Homo sapiens
tgctcactatattgggtaaaatccttattaggagttactcttttaaaaaatcagatggaggaggttgaagctctaagcccaggttgcactgatctcagaaagtgggattcaaggagaggaaaacaatggagaattattacaaatggatggtagggatggggacaccaggaatttgggatgaggatgctaaaagtaagataaatgatggccaggcacagtggctcactcctgtaatcccagcrctttaggaggccaaggtgggcagatcacctgaggtcagaagttcgagaccagcctgaccaacatggagaaaccccaactctactaaaaatacaaaattagccgggtgtggtggcgcatccctgaaattgtggctgctcgggaagctgaggcaggagaatggcttgaacccaggaggcgaaggttgcagtgagccaagatagcaccattgcactccagcctgggcagcaagagtgaaactccatctcaaaaaaaaaaaaaaaagactagaagtaagaattctacaatcattagactgggcagatgaactcttaagacgggaagaaaagttgcaaaacgttagagctttaaaataattttacttggttttggaatacttatgaatgtc

SEQ ID NO: 709591 - DNA, 1306 bp, Homo sapiens
tatacacaatggaatactactcagtcataaaaaggaatgaaataatgtcttttgccgcaacttggatggagctggaggccattattctaagtgaagtaactcaagaatagaaaaccaaataccatatattttcacctataagtgggagctaagctgtgaggacacaaatacatacagagtgatataatgagctttggagactcggagagcaaggttgggagccgggtaagggagaaaagactgcatattggggacagtatacactgcatgggtgatgggtgcactaaaacctcagaattcaccactatagaaatcatccatgtaaccaaaccacttatatcccaaatgctattgaaataaaaggaagtaaagaagagacagatctgcacattaacaatatatctttgggagcttttctttttctaaaaatatgagttttggaaaattagttcgtttttatttttaattggcaaattttaattatatatgtttatggggtgcaatgtgatattatgatatatgtatacaacgtggaatgattaagtcaatttaataaacatacccgtcatctcatatactcatcatttttgtggtgagaatatttgaaatttgctctcttagcaattttgagaaatttattattattaactgtagtcaccatgcatgcaatagatctcaaaacttattccttctaacggaaacttgtaccctttgaccaatgtctttccattctttcttcctcccttctctggtaaccaccattctcttcttggtttctatgatttctgtgttaattatttcagatctcacagktaattaaggttatgtgctgtttgtctctttgtgcctggctcatttcacttagcataatgtcctttaggttcttgcagattgccacaaatgaaagaattttcttctgttttaaggctgactagcattccattttgtatatatacaccacacggaaaatgagttttgaattacaaaagcaatgatgagaacagtttcttcttgcactcaatgaggcatcacagatagacaagggttattcttgacattcctgctatcccacctaatatcctccctttctccaagggggcctgtagagatacttatttgtcatctatctgtctgtctgtttacatctatctacatatctttctatcatcgatctcttcttatattccttatattttttgtcctatggtatttacatatatggacatttgggaacatgtttttttccactcaatactgtgtctgacagatattttttctgagtgctgaatagcattccatgttttat

SEQ ID NO: 709592 - DNA, 610 bp, Homo sapiens
ccaggcagctcacagggaacaggagcccagagcaaagccaccccattgggagatgccaaggcacctgcagagagagaggaagcaggttagtgctgacctgtgcttccagcagagctcatcttattcaatatgcaaccctcccctgccctggccatttatttgtttgtttgtttgcttgtttgtttgtttttccgagacagagtctcgctctgtctccaaggctggagtgcagyggtgcaatctcagctcactgcaacctccacctcccgggttcaagcgattcttctgcctcagcctcccgagtagctgggattacaggtgcccaccaccacacctggctaatttttgtatttttagtagagacggggtttcaccatgttggccaggctggtcttgaacttctgacctcatgatctgcccctctggtcttctcgaagtgctgggattacaggcctgagccactgcggctgcccagccatgccctggccatttgtgtctctgccgacaacaggtcctccacgttcacagagctctctctataatcatgaaacaacacccagacccacaaagtccagagggtgagctacacaacaactgtcctgggagatgc

SEQ ID NO: 709593 - DNA, 923 bp, Homo sapiens
tcaaaatgtcaattgctgttcttatcaggatgaaaatgagaaagaagcaaagtcgaagcctgttgccttggtctgttgcttggttgtgaaatggagatgaacgtggcattgagaagacaggcaaagaaagcacagctgtggtcagaggctaagacattcaggaaatctgggggaagagacttcgggaattctttgtactcttctcccaactttcccgccagtctgaaattatgtcaaattacaaagttaaagaaaacagggcattgttctcgggtgcaagagagataataaatgtcttcttgcatacagtcccactgttcaagttcctgcccaagatgcccagactttatctgtgactgctccrtcagtcctgggagcaggtccaaaggcaccaagatagtaaaacctctgttcccccatctaggggttcccaagtcttgcctcagtataagctcaatcctcattatatcctaacacgcttacttgtttccaagcctttcggtctttaaaactaatagagtttattttttagaaccattgtagattatggaaaaattgagccgatagtactgagagttcccatacatccctctcccccatgcaaaatttcctcttttatcaacatcttgcattagtgtgtagtgccttccttataatgctgatacattattataaactaaagtccatagcatacattgtttcactgtttctcggggttttgttttgttttgttttgttttgtgtttgtttgcttgtttggaaacaaggtctcactctgttgcccaggctggagcagcctggaactcctggactcaggggatcctcctgcttctgccttctgagtagcttgggctacaagaacatgccaccacactaggcttttttttttttatacttttagagacagtcttgctacattgccc

SEQ ID NO: 709594 - DNA, 2026 bp, Homo sapiens
caatttatatgcccaatcactgagtttttgtcatttgctcttacagaataactcttaatggtaagagttgatcttttgtttataattaggtatattgcttcatatctttagctccatgtaatcttatatccttatctctctcttttttttttttttttttgagacagagtctcgctctgtcgccgaggctggagtcagtggtgcgatctcgactcactgcaacctctgcctcccaggttcatgccattcttctgcctcagcctcccgagtagctgggactacaggcgcccaccaccacacctggctaattttttgtatttttagtagagatggggttttatggtgttagccaggatgatctcgatctcctgacctcgtgatccacccacttcagcctcccaaagtgctgggattacaggcgtgagccactgcgcccagccttttttttttttttccccctttggagacagtgtctcgctcagtagcccaggctggagtgcagtggcgcagtcttggctcactgcaacctctgcctccttggttcaagctattcccctgcctcagcctccctagtagctggaattacaagtgcacaccaccacgcctggctaattattgtatttttagtagaaacccggtttccccatgttgaccaggctggtctcgaactcctgacctcaggtgatccacccatctcagcctcccaaagtgctgggattacaggcttgagccacggcgctcagccatctcatttctttatggcgttgagtttgcttatatcaaaaaaccaaaagaaagttgtccagattcctaactcagtctggcgtttcaactttgctgtttagctgtatagaaaccaaaacatttccttatctccattcccagcagccaagtctcaagcagtagtattgaaagaagttctctgtcattccccgatatggagcataagtttgatttaccatcaaattacccaacatcaacctatacttagtcaactgagatttaaacagataaaggttccattgccctatttcaaaaagcaaatgttgctgatmtgcacgcattcaatcctttgctataaatgtttcatgtcaatgcaaaactcttcattctagatctttgatgtttagcaggatcagctactgagctgtattttcttttgtccaacattttctactagcaaatcaacaaaataagagattcatgaacctctcctcctccccctcctgccccagcattaggtcttacttaaattaaacatttgggcagtatttcgttagttaccagctttgaggagaagtggtagtcacttacataaagcaattgtctctgaaaatgcattcttcttgacaaattagcatagcctaattctccatcctaagggggactgttttacaagtctacatataaaagtacctaaatggttgtcttctgaatccctccctagtagaaattgaatttggcatcagtggagccagtgactgtacctgggattcagtgcatatagaattgcattgactgtgaccctttaggcaaatggatgtaagactttggctcttaggattttcccaaacaccaataagagcatcttgaagagaatccatttactttatgatatataaggatatttcaggtttgatattatgatccttattaggtccagtctagctgagctggacatgaattgaagaaccagaattagaactagaaaatgaaacccaggctgagtgcggtggctcacgcctgtaatcctaacacttttgggaggccgaggcaggtggattgcttgagaccagcctgggcaacatgacgaaatcccatctctacaaaaatagaaaaattagccaggcgtagtggcatgcatttgtagtcccagctacttgggaggctggggtgggagaatcacctgagccggagaggtcaaggctgtggtgagctgtgatcatgccactgcactccagtcagggattgagaacctatctcaaaaaaaaaaaaaaaagaaggaaagaaagaaaatgaattaata

SEQ ID NO: 709595 - DNA, 986 bp, Homo sapiens
taagatcagaagttcaacatcagcctggccaagatggtgaaacctgtctctactaaaaatacaaaaaaaaaaaaattagctgggtgtggtggtggacccctgtaatcccagctacttgggaggctgaggcagagaattgcttaaacctgggaggcggaggatgcagtgacccgagatcacatcaatgcactccagcctgggccacagaacgaagccacgtctcaaagaaaaaaaaaccaaaaaaaaacctatatagatctgcggggcatggtggctcatgcctgtaatcccagcactttgggaggccgaggcgggctaatcacgaggtcaggagatcaagactatcctggctaacatggtgaaaccccgtctctactaaaaatacaaaaaagtagctgggcgcggtggcgggckcctgtagtcccagctactcgggaggctgaggcaggagaatggcgtgaacccgggaggcggaagttgcagtgagccgagatcgcgccactgcactccagcctgggtgacagagcgagagtctgtctcaaaaaacaatagcaacaacaacaacaacaaaaacctatatagatcacatagcaatatggaaaaacatgatacgtcaagtgagtatactgtgtttacggcttcgttaaaacgtggaaaatacaaaaaaaaaagggaatatgaaaagaaaatcaaagcagggaaaaggctaacacgttttctttcaatatatatttttaaagttttatcaaacaaaaatatagagaatttgtcacttgaaaaagctactgccagtaaattgtaccaagttttggtacaatagtagcaaatttgatttttaatttgtgttgtttttttttttgatatgagagctttaaattaatagttttttgagattctcacaattaattgcaattttcattaaatatctcaaagtaattacaataacaatgtttgaaatgagataatatgggtctggcctttatacg

SEQ ID NO: 709596 - DNA, 636 bp, Homo sapiens
tggaatatttgggacaacagtattgtctttgcctcagcctgctcttttgatcactgaatgtctatttaccccccatattagtccatttttgcactgctagtaaagacatacccaagagtgggcaatttacaaaataaagaggtttaatggacttaacagttccacatggctggggaggtttcacaatcatggtggacggcaaggaggagcaagttacatcttacgtggatggtggcaggcagagagcttgtgcagggaaactccccttttaaaaaccatcagatctcatgrgacttattcactatcaagagatcagcatgggaaaggcctgcccccatgattcaattacctcccaccgggtccctcccacaacaggtgggaatttgagatgagatttgggtggagacacagccaaaccatatcatttagtccctggcccctcccaaatctcatgtcctcacatttcaaaaccaatcatgccttcccaacagtcccttaaagtcttaacttatttaagcattaactcaaaagtccacagtccaaagtcttatctgagacaaggtaagatccttttgcttatgagcctgtaaaatcaaaagcaagttagttactccctagaaacaatgggggtacagg

SEQ ID NO: 709597 - DNA, 623 bp, Homo sapiens
ttattctaggtggccagctgatcagatgaatattatagtcttcataaataaatatatatagtcttcataaataaatatagtcttctaaataaatatttagaaagtaaatattttgggggtttgaaactgtctttgttaaccccaatagagatattcatccatccagcagccagagaaatcctcttagagtataagttatctgctcaaattttccaagattcctcarcagcccataagactctatatttgagtacatactctggttcttggctccctctctgacatcacttttttctactctctcccttatttactgtattccagccacattgtccaccttgctgtcagccagatactcaattcaatttattctctcacagctctgcaggccgaaagcctgaaatccagacaccggcagagccatcctccttttagttactctagggacactcctttcttgcctctttcagtttctgatggttcctgatattcctgggcttgtgggagcatcactccaatctctgcttctgtctttatatcaccttcttccctatgtctctctgtcctctctcttataagaatgctagtcattaaagttagggcccactctaaatccaggttta

SEQ ID NO: 709598 - DNA, 623 bp, Homo sapiens
ttattctaggtggccagctgatcagatgaatattatagtcttcataaataaatatatatagtcttcataaataaatatagtcttctaaataaatatttagaaagtaaatattttgggggtttgaaactgtctttgttaaccccaatagagatattcatccatccagcagccagagaaatcctcttagagtataagttatctgctcaaattttccaagattcctcaacagcccataagactctatatttgagtacatactctggttcttggctccctctctgacatcacytttttctactctctcccttatttactgtattccagccacattgtccaccttgctgtcagccagatactcaattcaatttattctctcacagctctgcaggccgaaagcctgaaatccagacaccggcagagccatcctccttttagttactctagggacactcctttcttgcctctttcagtttctgatggttcctgatattcctgggcttgtgggagcatcactccaatctctgcttctgtctttatatcaccttcttccctatgtctctctgtcctctctcttataagaatgctagtcattaaagttagggcccactctaaatccaggttta

SEQ ID NO: 709599 - DNA, 623 bp, Homo sapiens
ttattctaggtggccagctgatcagatgaatattatagtcttcataaataaatatatatagtcttcataaataaatatagtcttctaaataaatatttagaaagtaaatattttgggggtttgaaactgtctttgttaaccccaatagagatattcatccatccagcagccagagaaatcctcttagagtataagttatctgctcaaattttccaagattcctcaacagcccataagactctatatttgagtacatactctggttcttggctccctctctgacatcacttttttctactctctcccttatttactrtattccagccacattgtccaccttgctgtcagccagatactcaattcaatttattctctcacagctctgcaggccgaaagcctgaaatccagacaccggcagagccatcctccttttagttactctagggacactcctttcttgcctctttcagtttctgatggttcctgatattcctgggcttgtgggagcatcactccaatctctgcttctgtctttatatcaccttcttccctatgtctctctgtcctctctcttataagaatgctagtcattaaagttagggcccactctaaatccaggttta

SEQ ID NO: 709600 - DNA, 623 bp, Homo sapiens
ttattctaggtggccagctgatcagatgaatattatagtcttcataaataaatatatatagtcttcataaataaatatagtcttctaaataaatatttagaaagtaaatattttgggggtttgaaactgtctttgttaaccccaatagagatattcatccatccagcagccagagaaatcctcttagagtataagttatctgctcaaattttccaagattcctcaacagcccataagactctatatttgagtacatactctggttcttggctccctctctgacatcacttttttctactctctcccttatttactgtattccagccacattgtccaccttgctgtcagccagatactcaattcaatttattctctcacagctctgcaggccgaaagcctgaaatccagacaccggcagagccatcctccttttagttactctagggacactcctttcttgcctctttcagtttctgatggttcctgatrttcctgggcttgtgggagcatcactccaatctctgcttctgtctttatatcaccttcttccctatgtctctctgtcctctctcttataagaatgctagtcattaaagttagggcccactctaaatccaggttta

SEQ ID NO: 709601 - DNA, 623 bp, Homo sapiens
ttattctaggtggccagctgatcagatgaatattatagtcttcataaataaatatatatagtcttcataaataaatatagtcttctaaataaatatttagaaagtaaatattttgggggtttgaaactgtctttgttaaccccaatagagatattcatccatccagcagccagagaaatcctcttagagtataagttatctgctcaaattttccaagattcctcaacagcccataagactctatatttgagtacatactctggttcttggctccctctctgacatcacttttttctactctctcccttatttactgtattccagccacattgtccaccttgctgtcagccagatactcaattcaatttattctctcacagctctgcaggccgaaagcctgaaatccagacaccggcagagccatcctccttttagttactctagggacactcctttcttgcctctttcagtttctgatggttcctgatattcctgggcttgtgggagcatcactccaatctctgcttctgtctttatatcaccttcttccctatgtctctctgtcctctctcttataagaawgctagtcattaaagttagggcccactctaaatccaggttta

SEQ ID NO: 709602 - DNA, 511 bp, Homo sapiens
aaaagtgatctgatgacagttttactagcctggttttatttgtgaaacagaaaaatagcaagtttccatcctcctttaatttttcattggataggtgagaatgctaaatgatagctgtatggattaggttcagcttttcacattgggaaaaatgastgatggaccctcagatgagagtgttgctaccatgtcaacatcacaatagtttccctcctccaaaaagcaccaaaacaagcatgagccacaagaaactgggaacaaaaggaatctttgttattttattcaacaggtaaattaacttcaaattttaaaatatttaacaactgaaataaaaaaggaaagtatcagaatctaaaagttagacttgaaaatggagtttataaacaactgtagctataatctaaggtactgtttatatcctcacaatcataatttttctcaatatatcccattatcaatgatgactagtaataataaatagtaataattcttaaatatctaccccatacca

SEQ ID NO: 709603 - DNA, 1899 bp, Homo sapiens
tggttttgaaactgtaagtctcacatcttggaagtccccatagtccaaagcaaacattccatataactatttgcacacctacttataataaaatattattgcagtaaaaaattaacttcaaataatctgctttacagcattaagtagttttcaattatccagaactagcaacttgctggctaatgtggcttctgaaatgttctgcttaatgtaacatctattgctacatcacaaattgccccaacacttgccatctcaaaacaacacagtttctaagggacaggaatctgggcatgacttaaggttgtttgactgaaggtctcagttccttccttgcaaatggttgaaggttgygctcagttccttgtcaaacgggtctctccaacatggcagtttgctttatcaaaattggcaagagagtgagtttattaataagacagaagtcacaatcttatgtaacataatcataaaaggaatttgctatattttattcattaaaaataactctctgggttcaattctcactcaaggaaggaaatacacaaaagtataaatagcaggaggtgataaccaaaggaggccatcttcaagtctgcctgccatgtctggcactcagagactttaagacaaattagttgtttagatatagatataaatataggtatagataaatatagaatattaccagcatgctccctttcagtcataattttgcttccaaaggttaatcagacatttctgaattctcttactttacacctctgtttcaattctgttaccttcacctctttttggtcttcatatgaatggaatcatagagtaagtactcttttgtttctagcttcttttattcaacattttgtctttgagattcatatatactgcttatgattttgattactatagagtatgtactgtattaatatatcatgacttattagtatatcctactatgtcttaatcaaagaataaatgtcataatgaatcatcttgcattacaaggttttatatctcaatttcctttgttaaaccttctccctacttcagtcctttttcactttcagttcttccatatgcttctgccattctagtcttgactcaaagggagagatttatacaaactcatttccacaaggtgttcctgatttaatattagaagatatttaatatcctctaataccacctttagggattttgccatctaaaattacaaaggaatatctctaaaatacagatctctgtattttaagaaaaggcacctcctaggtgagagagcaatttggtgatgaggtgggggtgctagctgataaaacacattgaaaacaacatactcacttcatttaatagaaatataggttagactttcaaaacttttatcatttagagttgcaaaataatatgtattatagaatacaaaatggaactttgaattgagatgataatgtgatatcagatctttaaccaaacactccaaggtaaggtgctcattctctcagtacaccattgaaatgatattgaaataaaacagcagagatgcacacatgcactcttggaaacaagatgctgaatgtgaaccatagagacagctaaagaggaaacacaaatgaactacagattcaagagagtaatttgaaactttttttgaaaattttaagccctttattaaattccttcaaagcttgttagtatgttaaaagtatcacaggtacttcaaaattatttctccaaaaaatgctgaacgtgtgttctaagttctcccacttagaatccataattctgaataagcctgttgtaaccaaatttagcatttctcattcatgcttggggagccatatccacttttatcttaaaacatctatgtatatgtgcacggattttctaaaaaacaaactgaatatt

SEQ ID NO: 709604 - DNA, 645 bp, Homo sapiens
tttaaaaaaatgttttcttagtatttgatatattgagcttttatagctgtacttcatatttgccttaaattttgacgactgttcctttgatgactttataagcatttcaagaagaaataaaattaataaaaacaattttaattggtgtttagaaaaatgtctttgaaagttaggtgaatggatttataaaaatagtaaatcctttggtgttcttccatgtggtgctggcaaaatttgtaagagaaactacatagaatcatttcaytgtaaatatatgttatgtctctgagcaagaatgtgctttctaatgaaacattgaatatgtataagttgttctactcaaataacctaacgacaaacatacatattttaatcacaccctcaaatcttgtaaagctttttctccttttgcaatgaagtccaccccaatcacatcttttcaggggctgtagagaaaatgctgatttcatcaaatactctgtgtgtggttcaagtgttttttggctggtacaaggtgttttcatatggcttccaatcaatataaaaatacatttaaaaataagaataaaaattaccaaagccatttgttaacgaattaatgtatttaattaacattaagtattaattgtggacacagcaataggt

SEQ ID NO: 709605 - DNA, 1553 bp, Homo sapiens
tgcctccatgattcaattacctcccactgggtccctcccatgacatgtggaaattgtgggagctacaattcaagatgagatttggtggggacacagccaaaccataccacgtatacaaccaagctgtaccctgagcactttgggtacatgtcatcagaacttcctgaggctgtgtcatgggtacatccttcaccttggcaaatatactttctaaatagattgagacctgtctcagatacttttggtttacaggtgatagcgttgctggaaaagagggtcctgattcagatcccaagagagggttcttggatctcatgcaggaaagaattcaaggcaggtacagagtatggtgaaagaagcaaatttattagaaacgactttgttacagggtagggcatcctcagaaaggagaaggaggaatgcgccattctttgttagtgtcttcgttgataagaaattctaaggagctgtcattaaaattggaatgtgcagatgtgctcactaaaggtagggggtattggtgctgttaaatcaagtttagcctaaagctgcctccttacatattttaagtttggcctaaaatttctctgtacatggtgaactataacctaaaaggatgtgtaaacagactgcaacctactcttgtgccaatcactgagtttcggccaatcaaaggtggccaactgttcaaatctcgttcaaataaggccaatgctgagctataaccagtctggctgtttctgtacctcactttcattttcagtacatcattttccttttcctgtccataaatcttcttccaccacgtggctgtgttcaagactctctgaacctactctggctcaggaggcttctagatttgtgaattgtctgctcagttaaactccattaaattcaatttggccaagaattttcttcttaacagtggtattgatgaccattaatccttcaacctaaacctgctcattaatgctgcctttaagtgggctgaacttttaggacacctggacattttgtaggcttagtgggagatgttttgtatggccttaaatattctgcaattataattggtggtcagcttagactgtggctattttcagacccaagtattaagcctgtaggttccttttgagtgcctagctacttgctttaagatggagtcactctagccatcttttattaaaccagaagcctggtaagcagaggttactttaacaatatgcaagagtgtgggaatgtttgctgagacaggagacacaagaggtgggcaggtcttrgggatttaggagttgggttcaaggcaccccctcaagctttgatagttatctatggaaggtcgttgccttgattttgacctggtaggaaggcagacttcaaatgcttgccccagctggacttttcccagatgtctgcctcatcctcttactctaaccaacactgactctggtcaaaacctgcaagcatgatctgcggaccagcagctcatcatggagctggctagaaatatgaaatcctgggctctaactcagacctcctgagtcaggatctgcatt

SEQ ID NO: 709606 - DNA, 1553 bp, Homo sapiens
tgcctccatgattcaattacctcccactgggtccctcccatgacatgtggaaattgtgggagctacaattcaagatgagatttggtggggacacagccaaaccataccacgtatacaaccaagctgtaccctgagcactttgggtacatgtcatcagaacttcctgaggctgtgtcatgggtacatccttcaccttggcaaatatactttctaaatagattgagacctgtctcagatacttttggtttacaggtgatagcgttgctggaaaagagggtcctgattcagatcccaagagagggttcttggatctcatgcaggaaagaattcaaggcaggtacagagtatggtgaaagaagcaaatttattagaaacgactttgttacagggtagggcatcctcagaaaggagaaggaggaatgcgccattctttgttagtgtcttcgttgataagaaattctaaggagctgtcattaaaattggaatgtgcagatgtgctcactaaaggtagggggtattggtgctgttaaatcaagtttagcctaaagctgcctccttacatattttaagtttggcctaaaatttctctgtacatggtgaactataacctaaaaggatgtgtaaacagactgcaacctactcttgtgccaatcactgagtttcggccaatcaaaggtggccaactgttcaaatctcgttcaaataaggccaatgctgagctataaccagtctggctgtttctgtacctcactttcattttcagtacatcattttccttttcctgtccataaatcttcttccaccacgtggctgtgttcaagactctctgaacctactctggctcaggaggcttctagatttgtgaattgtctgctcagttaaactccattaaattcaatttggccaagaattttcttcttaacagtggtattgatgaccattaatccttcaacctaaacctgctcattaatgctgcctttaagtgggctgaacttttaggacacctggacattttgtaggcttagtgggagatgttttgtatggccttaaatattctgcaattataattggtggtcagcttagactgtggctattttcagacccaagtattaagcctgtaggttccttttgagtgcctagctacttgctttaagatggagtcactctagccatcttttattaaaccagaagcctggtaagcagaggttactttaacaatatgcaagagtgtgggaatgtttgctgagacaggagacacaagaggtgggcaggtcttagggatttaggagttgggttcaaggcaccccctcaagctttgatagttatctatggaaggtcgttgccttgattttgacctggtaggaaggcagacttcaaatgcttgccccagctggacttttcccagatgtctgcctcatcctcttactctaaccaacactgactctggtcaaaacctgcaagcrtgatctgcggaccagcagctcatcatggagctggctagaaatatgaaatcctgggctctaactcagacctcctgagtcaggatctgcatt

SEQ ID NO: 709607 - DNA, 1447 bp, Homo sapiens
agagatatgaaagatagagcagggtctaacatacatttaattggaattctagaaggtgaggagagaatgaaggagaatcaatattttagaagaatggctgagaagtttcaaaactgattaaagatatctacccacagattcaggaatcttaacggaatcccaatcaggacaaacaataggaacccatcattaagacacagcagattgaagctaaacaaaatcaaagacaaagagaaaacttttacatgcagccagaagaataagacaggttacttataaaagagctgcagttagactggcaactgactttttaatgatgacactggaagatggaatgatatattcaatatactgaaatgaccacccagcaaaagcacccttcaacaatgaaggcaaaagcatgacattttcagacaaacaataactgagagagtttactaccaatagaccatcatcaaaagaaatcccaaaggatgcatgatcatttaggaaaattaccccagatggaatgttagaggtgtaagamagaatgaatagtgaagaaagtggtaaatctgtgagcagattaactaaacatttggctataaaacaataatacttcgaggcacttgaaaatataaacagacttgaaatatacaagaaatgtagcatataagttggaggtggtgatgatggtggttagtggagttaaattattgttaatcttgtcttgttttaaaggagaacagcatcaagaaagaaagaaaaagacaattcttggctgtgcaggactctcttgatcattgtacaataactagcattcttgtcttctttccactaaatataagtagcacccatgtcctcccatcaccatggttaccaaaaacaccctcattaattttcaatatgtccctgggggcagtgctgcttttgtcaggaactgcttttgtaaattctacaatgctcaggctccatgattacaattcatagaacagcaaacacttagaagtctggcaactaaatgattgtcttttttttacctagaggtgttacttttaaattggaaagtttattcctgattattttcattcattcgttcattcaagaaatatacattgaatgcctattattatcaggcaaactcttaagtcaatagacccaaattcgagtttttgtttgtttgtttgtttgtttgtttgagagaagatcttgctctgtctcacaggctggagggcagtagtgcaatcctgacttactgcaacctcctcctcccaggctcaagcgatcctcccacctcagcctacccagtagctggggctacaggtgctcaccatcacacctggctaaatttttagtttattttgtagagacgaggttttgccatgttgctcaggctagtcttgaactcctgggctcaagcaatctacctgccttggcttcccaaagtgctgggattactggtgtgagc

SEQ ID NO: 709608 - DNA, 1807 bp, Homo sapiens
aagagtgagacaaagtatacgcgtgtgtgttgagggtggagggcggtgtgtacaggtgcgtacatgtgtcctcttttgtctcatggcgcatttggtacttgcaggggtatttaacaggcattttctgaagatcatttgacagatgtactgccacctttgcctttaggacatctatgtcaaattaatacaaagcacaaaacaaaaaccaggcaggcacacttccatttccagccatatactctgggtaggccaatccccagagaggagaattaaccccagagtaaagcaatgctcagccggtgagcttgaggggagagaagggtgggagggccagggcttcagagaatattctccaaagtgcttagtcctaaaatttggagagagccactcatttctattgagagatgaggagtgtgtggttggggcataaaatgtgtaggggaggtgagccagagtcagcagtgggagagccrctgaaggtgttcgagcagatgaagggcatcatcagggcatctgcttctcttctggcattggcagctgcccagatcccaggtttctgagttggagaaatgggcagagcccctacccaagggagaatgacccctggaacatactttacttgctctgcaatggctttgctactcacaggatgaggtggggttggggatttggggcagataaggctattttgggctctgagctgagaaccctgggtatctgccagggcccatgcacccggtttgcagagaagcccaggccatatggtaccttgctggctcccggcaggaggtgcagcttaacgtagggatcagccaagccgtttgaatccatgggcttcaggccctgcaagagaaggaggcaatggtgtgagggcctcaggagggcccagtgctcagctgtcatcggcaatgggcatagcccctggcatctgtcctgcctgttggtccacgctgtgtgcttcctcctccaaagagagagaagggaaatgcagtatcatggaaagagtactgggatgggagacagggttttaaacctggccatgtcacttcctggctatgtgaccttaggcaagtttcttaacctatctgagcctcagtttccccacctgtcaaatggggataagaacagtacccgcttcatgaggtggtgagatttaaatgcaattccacctataaagtgctggcatatggtacacactggatcaaggctggattgttattgctaggatgggaggacatgtcccagaagaataaaggcaaggtcgggggaaggaggatgctcctgcattctggccctgacccctgcattctcttctaagacttcagtgtctccatccatcagggctgggatgaggctcagataagatactatagaggaaggaagcttagggtaggtaggaattaagttgatttgttaaaatgagcaatccccaaattcctggggcttagacatactctgtccatcccctacattcagaccaggcagatgtcccacctctgggctcccgtcatccctctgcacagcacttataccatgcacaattggccgtgaacaacacgggtgtgaactgtgtgggtccacttatatgaggattttcttccacctctgccacccctgagacagcaagaccaaccgctcctcttcctcatcctcctcagcctactcaacatgaagaccatgaggatgaagaccttcatgatgatccacttccacttaatgaatagtaaatatatattatcttccttatgattttctcaataaatgttgaattttctttcagctagcttactttattgtaagaatacag

SEQ ID NO: 709609 - DNA, 1807 bp, Homo sapiens
aagagtgagacaaagtatacgcgtgtgtgttgagggtggagggcggtgtgtacaggtgcgtacatgtgtcctcttttgtctcatggcgcatttggtacttgcaggggtatttaacaggcattttctgaagatcatttgacagatgtactgccacctttgcctttaggacatctatgtcaaattaatacaaagcacaaaacaaaaaccaggcaggcacacttccatttccagccatatactctgggtaggccaatccccagagaggagaattaaccccagagtaaagcaatgctcagccggtgagcttgaggggagagaagggtgggagggccagggcttcagagaatattctccaaagtgcttagtcctaaaatttggagagagccactcatttctattgagagatgaggagtgtgtggttggggcataaaatgtgtaggggaggtgagccagagtcagcagtgggagagccgctgaaggtgttcgagcagatgaagggcatcatcagggcatctgcttctcttctggcattggcagctgcccagatcccaggtttctgagttggagaaatgggcagagcccctacccaagggagaatgacccctggaacatactttacttgctctgcaatggctttgctactcacaggatgaggtggggttggggatttggggcagataaggctattttgggctctgagctgagaaccctgggtatctgccagggcccatgcacccggtttgcagagaagcccaggccatatggtaccttgctggctcccggcaggaggtgcagcttaacgtagggatcagccaagccgtttgaatccatgggcttcaggccctgcaagagaaggaggcaatggtgtgagggcctcaggagggcccagtgctcagctgtcatcggcaatgggcatagcccctggcatctgtcctgcctgttggtccacgctgtgtgcttcctcctccaaagagagagaagggaaatgcagtatcatggaaagagtactgggatgggagacagggttttaaacctggccatgtcacttcctggctatgtgaccttaggcaagtttcttaacctatctgagcctcagtttccccacctgtcaaatggggataagaacagtacccgcttcatgaggtggtgagatttaaatgcaattccacctataaagtgctggcatatggtacacactggatcaaggctggattgttattgctaggatgggaggacatgtcccagaagaataaaggcaaggtcgggggaaggaggatgctcctgcattctggccctgacccctgcattctcttckaagacttcagtgtctccatccatcagggctgggatgaggctcagataagatactatagaggaaggaagcttagggtaggtaggaattaagttgatttgttaaaatgagcaatccccaaattcctggggcttagacatactctgtccatcccctacattcagaccaggcagatgtcccacctctgggctcccgtcatccctctgcacagcacttataccatgcacaattggccgtgaacaacacgggtgtgaactgtgtgggtccacttatatgaggattttcttccacctctgccacccctgagacagcaagaccaaccgctcctcttcctcatcctcctcagcctactcaacatgaagaccatgaggatgaagaccttcatgatgatccacttccacttaatgaatagtaaatatatattatcttccttatgattttctcaataaatgttgaattttctttcagctagcttactttattgtaagaatacag

SEQ ID NO: 709610 - DNA, 1807 bp, Homo sapiens
aagagtgagacaaagtatacgcgtgtgtgttgagggtggagggcggtgtgtacaggtgcgtacatgtgtcctcttttgtctcatggcgcatttggtacttgcaggggtatttaacaggcattttctgaagatcatttgacagatgtactgccacctttgcctttaggacatctatgtcaaattaatacaaagcacaaaacaaaaaccaggcaggcacacttccatttccagccatatactctgggtaggccaatccccagagaggagaattaaccccagagtaaagcaatgctcagccggtgagcttgaggggagagaagggtgggagggccagggcttcagagaatattctccaaagtgcttagtcctaaaatttggagagagccactcatttctattgagagatgaggagtgtgtggttggggcataaaatgtgtaggggaggtgagccagagtcagcagtgggagagccgctgaaggtgttcgagcagatgaagggcatcatcagggcatctgcttctcttctggcattggcagctgcccagatcccaggtttctgagttggagaaatgggcagagcccctacccaagggagaatgacccctggaacatactttacttgctctgcaatggctttgctactcacaggatgaggtggggttggggatttggggcagataaggctattttgggctctgagctgagaaccctgggtatctgccagggcccatgcacccggtttgcagagaagcccaggccatatggtaccttgctggctcccggcaggaggtgcagcttaacgtagggatcagccaagccgtttgaatccatgggcttcaggccctgcaagagaaggaggcaatggtgtgagggcctcaggagggcccagtgctcagctgtcatcggcaatgggcatagcccctggcatctgtcctgcctgttggtccacgctgtgtgcttcctcctccaaagagagagaagggaaatgcagtatcatggaaagagtactgggatgggagacagggttttaaacctggccatgtcacttcctggctatgtgaccttaggcaagtttcttaacctatctgagcctcagtttccccacctgtcaaatggggataagaacagtacccgcttcatgaggtggtgagatttaaatgcaattccacctataaagtgctggcatatggtacacactggatcaaggctggattgttattgctaggatgggaggacatgtcccagaagaataaaggcaaggtcgggggaaggaggatgctcctgcattctggccctgacccctgcattctcttctaagacttcagtgtctccatccatcagggctgggatgaggctcagataagatactatagaggaargaagcttagggtaggtaggaattaagttgatttgttaaaatgagcaatccccaaattcctggggcttagacatactctgtccatcccctacattcagaccaggcagatgtcccacctctgggctcccgtcatccctctgcacagcacttataccatgcacaattggccgtgaacaacacgggtgtgaactgtgtgggtccacttatatgaggattttcttccacctctgccacccctgagacagcaagaccaaccgctcctcttcctcatcctcctcagcctactcaacatgaagaccatgaggatgaagaccttcatgatgatccacttccacttaatgaatagtaaatatatattatcttccttatgattttctcaataaatgttgaattttctttcagctagcttactttattgtaagaatacag

SEQ ID NO: 709611 - DNA, 595 bp, Homo sapiens
aaaagagctactccttcaagtcatacacatatttgattaaagatgtacatttagtaaagctttattaagtaacccttgatccaccagttcacttattttcaccatctcacttcccactcttaaaatcgaaargtgcctggcaaatcttggaatcaaccaagacatccttcagtaggtgaattaataataaactgtgataaaaccaacatggtgaaatattatttagccctaaaaagaaatgaactatcaagccatgaaaagacactgagaaactttaaatgcatatggtgacgtgaaagaagccagtctgaaaaagccacatcctgcaggattccaactatatgacattctggaaaaggcaaaattagagacagtgaaaagatcagtggtttccaggggtcagaagaaagggagggttgaataggcagaacagagaggagttttaggacagcgaaactattctgtttgatactatagtggtggatacttgtcattatacatttgtccaaacccacaaaatgtacaacagtaagagtgaatcctaatgtaaactatggactttggatgataatgatgtgttaatatgggtcccttg

SEQ ID NO: 709612 - DNA, 595 bp, Homo sapiens
aaaagagctactccttcaagtcatacacatatttgattaaagatgtacatttagtaaagctttattaagtaacccttgatccaccagttcacttattttcaccatctcacttcccactcttaaaatcgaaaggtgcctggcaaatcttggaatcaaccaagacatccttcagtaggtgaattaataataaactgtgataaaaccaacatggtgaaatattatttagccctaaaaagaaatgaactatcaagccatgaaaagacactgagaaactttaaatgcatatggtgaygtgaaagaagccagtctgaaaaagccacatcctgcaggattccaactatatgacattctggaaaaggcaaaattagagacagtgaaaagatcagtggtttccaggggtcagaagaaagggagggttgaataggcagaacagagaggagttttaggacagcgaaactattctgtttgatactatagtggtggatacttgtcattatacatttgtccaaacccacaaaatgtacaacagtaagagtgaatcctaatgtaaactatggactttggatgataatgatgtgttaatatgggtcccttg

SEQ ID NO: 709613 - DNA, 588 bp, Homo sapiens
ccataaatttacttcttcagaaaagaaattgccaaaagatatatgtatgttgtatatctattgtgtgtgtatatatatatayacatatatatatagtatatctctgtagatacacaaaaggtatatctatattctataacagtttctttgtttcaaaaagtcctttttcactgcccaaatccatatgtgtaattgttagttatattactatttttgtatatctttatctattttcttactatgtttacctgtatttatccttgcacctaggatatttagcataattttaagttattttattggggaaaaaacatgataaaaaggtcctaaacacacacagttgcgtatacaaacttacagccctctttccttacaggagccatcataaatttcttgtgaaccttctggaaatatccctagcatatatccatatttaaaaaaaaaaatttacttaaatgagtaatatacacactttttacatttgtatttgcagtttgtttatgttttgttagaatatcgtttatgtgcttcaatatcagtgtgtaaggacaggatctatatttgttttaatagctaatattgcaattg

SEQ ID NO: 709614 - DNA, 588 bp, Homo sapiens
ccataaatttacttcttcagaaaagaaattgccaaaagatatatgtatgttgtatatctattgtgtgtgtatatatatatacacayatatatatagtatatctctgtagatacacaaaaggtatatctatattctataacagtttctttgtttcaaaaagtcctttttcactgcccaaatccatatgtgtaattgttagttatattactatttttgtatatctttatctattttcttactatgtttacctgtatttatccttgcacctaggatatttagcataattttaagttattttattggggaaaaaacatgataaaaaggtcctaaacacacacagttgcgtatacaaacttacagccctctttccttacaggagccatcataaatttcttgtgaaccttctggaaatatccctagcatatatccatatttaaaaaaaaaaatttacttaaatgagtaatatacacactttttacatttgtatttgcagtttgtttatgttttgttagaatatcgtttatgtgcttcaatatcagtgtgtaaggacaggatctatatttgttttaatagctaatattgcaattg

SEQ ID NO: 709615 - DNA, 588 bp, Homo sapiens
ccataaatttacttcttcagaaaagaaattgccaaaagatatatgtatgttgtatatctattgtgtgtgtatatatatatacacatatatatatagtatatctctgtagatacacaaaaggtatatctatattctataacagtttctttgtttcaaaaagtcctttttcactgcccaaatccatatgtgtaattgttagttatattactatttttgtatatctttatctattttcttactatgtttacctgtatttatccttgcacctaggatatttagcataattttaagttattttattggggaaaaaacatgataaaaaggtcctaaacacacacagttgcrtatacaaacttacagccctctttccttacaggagccatcataaatttcttgtgaaccttctggaaatatccctagcatatatccatatttaaaaaaaaaaatttacttaaatgagtaatatacacactttttacatttgtatttgcagtttgtttatgttttgttagaatatcgtttatgtgcttcaatatcagtgtgtaaggacaggatctatatttgttttaatagctaatattgcaattg

SEQ ID NO: 709616 - DNA, 632 bp, Homo sapiens
atctcattctgaactcactgttttgtttattctgcctgtgctttattttacaaatgaaaatatagtttaataactgtaatttgttcagttttcttatttcacatgaaatttaaacgtatgacaaataattacattgtttattttataggggtcatattaaatttctacattaacttgtggagaaaagatatatttatatatttagtcttcaaggctaacagcaatcttaggcttctaatagtcttacttcaattgaactttcaaatcttttcatacaaatcttatacatttctaaaatttaatttattttctctccttattataagtgagattgttttmtttcattacattttttaactgggtgctgttcaaatcaaagatcttatacctattcaaggatcggcaacctaaggctatcaggtcatatccagtccactttatatgcttgcgactaaagctttattggaaaacctctatgcccatttgattgtgtattatctatggctactttcaatgctataaaaacaaaattaatgttgaaataaggactgtatggcccagtaagccaaaaatttttaccatctggtcctttacagaaaaagcctgctgacccctgccttcattaattttat

SEQ ID NO: 709617 - DNA, 568 bp, Homo sapiens
ggtcactatttttaaggtttcccacctcttttacctaggaagtgccaaacaatcttttggcagagcattaaaggggagggaaagatggcccgagtgactggaaatgggccagcattttcccatacaaaatgctgtgtgccttaatccattatccattatttcttatgcatttgccaagttggattagactcttgcatagcagatcaccaggctggaagcattcaagggagtcttcctttcttctcttcaatyttttttttttttttttttttttttttttttttttttgaaacagggtgttgctctgttgcccaggccggagtgcaatggcacggtcatggctcgctgcagccccaacctcctgggctcaagcaatcctcccacctcagcttcctgagtagctgggactacaggcacatgccaccatgcccatctgtttttcatttttattgtttgtagagtcgtggtctcccaatgttgcccaggctgatcttaaactgggctgaaacgatcctcctgctcagcttcctgagtagctgggatcacaggcgcgcaccaccatgcccgg

SEQ ID NO: 709618 - DNA, 1666 bp, Homo sapiens
cttggaaccaacccaaatgtccaacaatgatagactggattaagaaatgtggcccatatacaccatggaatactatgcagccttaaaaaatgatgagttcatgtcctttgtagggacatggatgaagctggaaaccatcattctcagcaaactgttgcaaggacaaaaaaaccaaacaccrtatattctcactgataggtgggaattgaacaatgagaacacatgaacacaggaaggggaacatcccacactggggcctgttatggggtggggagaggggggagggatagcattaggagatatacctgatgttaaatgacgagttaatgggtgcagcacatcagcatggcacgtgtatacatatgttactaacctgcacattgtgcacatgtaccctaaaactttaagtataataaaaaaaacaaggcattattaatgttcaccatcaagcaattaggtaagatgatgaatattttaacttattcaaaatattgtaatttattttatagagaaaacaaaatatgttgtggatttcttggaagttttgttggagaacttctactacaatgaattaatattttttgatgatattccattcatctacaatggaatattcattcatctacaatgaatggaattacttatctacaatgaattacttatctacaatgaatggaatatcattaattccaatgaattaatattttttcatatttatttttaagaagaggtttttcaatgcaagtgtaaatttgtggggtaataaattaaaactacataattttcataattctaactataaaatgtaattttcaatcatgtttacaaatatttaattcacatattaaatatgttttatatttctctcctgatttaactatttctatacattgactacatatcatcttgtgttattttgttgtaccgtactcagtcaaaacagagaagcatttagtactaatctcttttgagcactcagttttgagggtaagtctaggtcttggcttttattttatggtgatttgcagattttagaaaacctcaattatttctgagaaaaacagctcccccatgtagagaggtaaacagaaaagttccccagtgtcatattttccttttggtactgagagtgtggtgtgatctggggaactgaaataaaatgcagtgacttttaccccaaactcacaagtttccatccaaaatcaataccactgagtagctgataaaacataattcttccagctgttaatatcacccttggtgatactgaagaccattgttaataattgtgtgtttgttttattacattccttagatactgagttatttagtgaattcaattcaaatgtttaatgtcaacctgcagctgcccccaaattgtccttttggaaaactatgggaaaatattgaacttctattcttttagtaccccttgaaagaaaaagaaattcttacattgcggccatggcattacagtttttaccatgttgacccaattagagttattgtctaaattcgaaataattacaactttaactagccaaaggtaataggacagagagctctgaatgtccaatattaggaagggagttaatttgttgaaaaacagtgcttgcttacatcggcatcagtctgtgtgtgtgtgcgttacacaaaataggctgct

SEQ ID NO: 709619 - DNA, 985 bp, Homo sapiens
ggaatttcaagatctctgattatatgcttggttgaactatttcagagagggagcaaccggaagatcactcccaggtcagctcccagcaacatggcagttagtctgtagcagattttcagtttgcaagacctttcttgcctgtcctctccctacctggtaccccaaggtcttcccttccaccatacataagagaagaaaaactgagaagcccacacatgccagtttccatggctgtggatcccagggagtcatttcacccttcaaggccttagtgtttttgtttaatgaagaaagtttataaagagagggcaatgcttaatacaagtgagtaaatggaatctcaggcacccaagaggacctatctgggtcccaatcttagtgtaggaggtgctgtggcagggaccctccatcaggactaacctcttcagtgacgatcgagacagcacctgtgcagcctggttcatggccctgacccaagcgttcatgtcctcctgggtgtcggcactgaagtagtaggtcctcatgcctgactgctcggcctgagagcccgctgtggagctgttatagatgagcgctcgcatccccgtgtgcacagcctgtagcatgaaggcagaatgcaggtcagagggaggttatcacacatttcctttataggagcaaaagcaaggaggcactatggcccttctagwctaaaagcccaagcaccacccaacttgtttccacacctagaaaacatcataggctagatttatctttcttagtgcagccaggcccagtgacagctgtctgttccccaaagtaaaagccctgcagatgtaactgtttcctatttatcttactcctgctttgggagttgggagtgtgcacaaagtcaaggcttatgtgagaaacaggcttttcagaaaaccctcatttcatagaggcagactcttgggaatccctgttttggttttgctgaagcctgtgattcctgctttggctataa

SEQ ID NO: 709620 - DNA, 985 bp, Homo sapiens
ggaatttcaagatctctgattatatgcttggttgaactatttcagagagggagcaaccggaagatcactcccaggtcagctcccagcaacatggcagttagtctgtagcagattttcagtttgcaagacctttcttgcctgtcctctccctacctggtaccccaaggtcttcccttccaccatacataagagaagaaaaactgagaagcccacacatgccagtttccatggctgtggatcccagggagtcatttcacccttcaaggccttagtgtttttgtttaatgaagaaagtttataaagagagggcaatgcttaatacaagtgagtaaatggaatctcaggcacccaagaggacctatctgggtcccaatcttagtgtaggaggtgctgtggcagggaccctccatcaggactaacctcttcagtgacgatcgagacagcacctgtgcagcctggttcatggccctgacccaagcgttcatgtcctcctgggtgtcggcactgaagtagtaggtcctcatgcctgactgctcggcctgagagcccgctgtggagctgttatagatgagcgctcgcatccccgtgtgcacagcctgtagcatgaaggcagaatgcaggtcagagggaggttatcacacatttcctttataggagcaaaagcaaggaggcactatggcccttctagactaaaagcccaagcaccacccaacttgtttccacacctagaaaacatcataggctagatttmtctttcttagtgcagccaggcccagtgacagctgtctgttccccaaagtaaaagccctgcagatgtaactgtttcctatttatcttactcctgctttgggagttgggagtgtgcacaaagtcaaggcttatgtgagaaacaggcttttcagaaaaccctcatttcatagaggcagactcttgggaatccctgttttggttttgctgaagcctgtgattcctgctttggctataa

SEQ ID NO: 709621 - DNA, 985 bp, Homo sapiens
ggaatttcaagatctctgattatatgcttggttgaactatttcagagagggagcaaccggaagatcactcccaggtcagctcccagcaacatggcagttagtctgtagcagattttcagtttgcaagacctttcttgcctgtcctctccctacctggtaccccaaggtcttcccttccaccatacataagagaagaaaaactgagaagcccacacatgccagtttccatggctgtggatcccagggagtcatttcacccttcaaggccttagtgtttttgtttaatgaagaaagtttataaagagagggcaatgcttaatacaagtgagtaaatggaatctcaggcacccaagaggacctatctgggtcccaatcttagtgtaggaggtgctgtggcagggaccctccatcaggactaacctcttcagtgacgatcgagacagcacctgtgcagcctggttcatggccctgacccaagcgttcatgtcctcctgggtgtcggcactgaagtagtaggtcctcatgcctgactgctcggcctgagagcccgctgtggagctgttatagatgagcgctcgcatccccgtgtgcacagcctgtagcatgaaggcagaatgcaggtcagagggaggttatcacacatttcctttataggagcaaaagcaaggaggcactatggcccttctagactaaaagcccaagcaccacccaacttgtttccacacctagaaaacatcataggctagatttatctttcttagtgcagccaggcccagtgacagctgtctgttccccaaagtaaaagccctgcagmtgtaactgtttcctatttatcttactcctgctttgggagttgggagtgtgcacaaagtcaaggcttatgtgagaaacaggcttttcagaaaaccctcatttcatagaggcagactcttgggaatccctgttttggttttgctgaagcctgtgattcctgctttggctataa

SEQ ID NO: 709622 - DNA, 1430 bp, Homo sapiens
gattgggagacattggcctatctggcctaccacatctatatttttccagtctttctctactattgggaggttgtagaaacttgtccagcccatatgtgcgtcatttactgcagtgaaactgagctttgccccttttctagaaatctgaaagttgagatccagaaccagaagtcctcagggcaattatcaggagcaaaagcaaggaggcaagggaggagaaaaacaggaggaggaagagaagtgaagggtgagcatgccagtggaagggtctgaatgggtgctggggtgaggggtgattgatcaccttcacctttgtgcttgagtatgcctgtttcattgraagggcaagggaggggccgagcaggcagtgaggatgaatgtggttacttagggtcctgaggagcacaggtgggaaaataattcagacctctataagtctcttctggccttagaaatagtaattctcaaacctagccgtgcctcagaagttctttgggatcagattcccaggaagatgcattctgacttcataggtcttgggacgagatcaggagagtatgtgttttaaaagcacactaaaggattctgatacacagctgatttgggctatatgcctctggaaattctttacagtactcacacaatgattaaatgattatattttaatatttaataaagactctggaatatttacaagataccacttctactttaccaaattcctttgctccatataaaggtcatacaaataagaggcaagactttactctcctattcttatatcatctggggaaaaatcacttgaaataagcatcagtggaatcaacatacagatataaaattgaaatataatctcatgcctctagtgcttaatggaaatgagtacccaccaactagactttgggcatgaataaatagaagtattgaccatcagtcagaagcaatcattataacattttataaagaatgagtgatgcttcttcagaaatgcagtacaagatatgccatttaaaggaatgcacacattattaaccttttaatagttcaagtcattagaatgtgatgttgaatattttcaggtatcaagagaagatgaatttaccacaaggcagcttattccagcacaaagagcccttgatttcaattcaagaaatctgggttctagctctcattcagctactaactagctgggtatatttttctgttttgcattaccataaaggaatatcgtgtagcttgtgaagaagaggtgtttatttggcttggagttctgcaaactgtgcaggaaacatgacaccagcatctgcttggcttctggtgaggcctcaagaagcttttatccaggtcgaaggtgaagtgggagcaggtgtgtcacatggtgagagattaaacaagagagatgtcaggctcttttaaacaactgtcttttg

SEQ ID NO: 709623 - DNA, 604 bp, Homo sapiens
aattggtagattcacttgactgtgagtctaactgattggggtgacatatggctctctcagccctagtgtttttccaacccttttgaaagacagggtataatcctaactttccaatgagttctttttagaacttctttattttattttattttttttgagatggagttttactcttgttgcccaggctggagtgcaatggcgtgatctcagtcaccatgacctccatccacctcctgggttcaagcaattctcctccctcagccttctgagtagctgggattacaggcatgcaccagcacgtccagctaatttttgtattttttgtagagacrgggtttcttcaggtttgtcaggctgctctcccattcccgacctcaggtgacccgctctcctcagcctcccaaagtgctgggatcataggcgtgagccattgtatcctgccctttctagaacttcttaatgtcacctctacaaaaacaaattaaggaatttacacaatttggtattggtaaacatgatttttttaaaaagcatatgaattataataaaatattttttgctaccaaatacaattttttaaattgaaaagtagaaatggaaaaat

SEQ ID NO: 709624 - DNA, 904 bp, Homo sapiens
gggaacttaactctcttgtttatatcaattagcctatggagaaatgagttctcttttaacgatcattagtcaaggcttccaagaacctattggtgacgttaaatgaggacttactgtatataataattaaaacataggaatccccaaaggaatcagagcctccttgttagccagtcctctgtatatcttgtgggagagaacagcttttaccctatgaaattactctgtgatcactggactacaaaatggaaagtgagatgtcaagaggttcagctgttggggtaaaaggtaataaaaactcatgctgggaattagattaaggtagttagttgtctacccagaggtaatgtaagagtttttattggagaaacagcttactgatgagacttcaggaagtattcaaccraaaaggcaaagaaacatatcatgaggcagctcagaagtcagataaacatgagtactgtgctttgtacctttgacttggtaggtttttaataaacatttgctgtttgatatatttactgttccctttataaaatggtacaatctcttttaatttgtctgaaaattatctcttgaatatttcaaatatccacccccacttccttaaattctgtttcacaaagaggctatattcgcactcacactgccttttatctctgaatatagaactgtttacacctctgaatttgaatagaggacacatgatctagtccttaaatcaaatgacatgagtcaagattcacacaccttgttttcagtttggacactaatttaagggaacagtttttatttcttttatcttttctaaatatagtatatactttaaaagtcttttaacttctcatcttaaggctattttcaatagaaccccagataggaatcaggaaacctggttttcatt

SEQ ID NO: 709625 - DNA, 904 bp, Homo sapiens
gggaacttaactctcttgtttatatcaattagcctatggagaaatgagttctcttttaacgatcattagtcaaggcttccaagaacctattggtgacgttaaatgaggacttactgtatataataattaaaacataggaatccccaaaggaatcagagcctccttgttagccagtcctctgtatatcttgtgggagagaacagcttttaccctatgaaattactctgtgatcactggactacaaaatggaaagtgagatgtcaagaggttcagctgttggggtaaaaggtaataaaaactcatgctgggaattagattaaggtagttagttgtctacccagaggtaatgtaagagtttttattggagaaacagcttactgatgagacttcaggaagtattcaaccaaaaaggcaaagaaacatatcatgaggcagctcagaagtcagataaacatgagtactgtgctttgtacctttgacttggtaggtttttaataaacatttgctgtttgatatatttactgttccctttataaaatggtacaatctcttttaatttgtctgaaaattatctcttgaatatttcaaatatccacccccacttccttaaattctgtttcacaaagaggctatattcgcactcacactgccttttatctctgaatatagaactgtttacacctctgaatttgaatagaggacacatgatctagtccttaaatcaaatgacatgagtcaagattcacacaccttgttttcagtttggacactaatttaagggmacagtttttatttcttttatcttttctaaatatagtatatactttaaaagtcttttaacttctcatcttaaggctattttcaatagaaccccagataggaatcaggaaacctggttttcatt

SEQ ID NO: 709626 - DNA, 904 bp, Homo sapiens
gggaacttaactctcttgtttatatcaattagcctatggagaaatgagttctcttttaacgatcattagtcaaggcttccaagaacctattggtgacgttaaatgaggacttactgtatataataattaaaacataggaatccccaaaggaatcagagcctccttgttagccagtcctctgtatatcttgtgggagagaacagcttttaccctatgaaattactctgtgatcactggactacaaaatggaaagtgagatgtcaagaggttcagctgttggggtaaaaggtaataaaaactcatgctgggaattagattaaggtagttagttgtctacccagaggtaatgtaagagtttttattggagaaacagcttactgatgagacttcaggaagtattcaaccaaaaaggcaaagaaacatatcatgaggcagctcagaagtcagataaacatgagtactgtgctttgtacctttgacttggtaggtttttaataaacatttgctgtttgatatatttactgttccctttataaaatggtacaatctcttttaatttgtctgaaaattatctcttgaatatttcaaatatccacccccacttccttaaattctgtttcacaaagaggctatattcgcactcacactgccttttatctctgaatatagaactgtttacacctctgaatttgaatagaggacacatgatctagtccttaaatcaaatgacatgagtcaagattcacacaccttgttttcagtttggacactaatttaagggarcagtttttatttcttttatcttttctaaatatagtatatactttaaaagtcttttaacttctcatcttaaggctattttcaatagaaccccagataggaatcaggaaacctggttttcatt

SEQ ID NO: 709627 - DNA, 1751 bp, Homo sapiens
tgttgtatagattcaatatggtgtatggggaaaatatagtagaagatgatcctatttcctgttcatcattttgactcatgtagtcaatgaacaatcatatatagtggttctctcttcttgattacatgatatttttcactcttctttttagtgcattactccagtgtcttgtcagctaagctctgctttatttaacactggtgagaggtaaaatattaaaagaattgggctcatagctatgtgtgtaccttatgaacatgctttggattccatagaaggtgggaaacttagctggaattgagccttgtcctctttgtattactttttgccctttatcacctaaaccccatgaagcaggccaactttccacagcagaaactgagtttcaagaaagtttccaggctgggcatggcagctcatgcctataatcccagcactttgggagggtgaggcgagaggatcacttgagcccaggagttcaagaccagcctgggcaacatagtgagacctaatctctacaaaaaatacaaaaattagttgggtgtgatggtgcatgcctgtggtcccagctactcaggaggctaagcagggaagaccacttgaacccaggaggttgaggctgcagagagctgtgattgtgccactgtactccagcctgggcaacagagcaataccccatatcaaaaaaaaaaaaaaaaaaaaaaaaaaaaaagtaagaaagaaagaaaaaaagaaactttccaaaattttcaaggaataggaaaaaagaggwtaaaccatgcaatgttccattccaaagtttttttcctattacctagtggtactttggtcttattaaaacaagatgggaacttaaatattccacaagcaaacacagtgacaacaacaataatgtcccctttacaaagaagaggagactcacagaagacattgaatgcattcaagaatacagtcagtgagagtaaaatccaggtatcttgagaccaaagcttcaacctgcattcagacactgttaactgaggtgggagaagctgtcaatatctacttgacattattttatttagtgagttcaaattcatggaatcatggtgcaaaactccccgaaatataatgctgcaaagataagtgaaattcaagggcatgaagctttatttcatgttaaggaccatgaacctcctcagtgggtaaaattccaagtaagagaagaaagaggtgcattttttccaatcatgagctcagcagtttcctgcagagtataataaaggggaaggaaggtgttgactactgcaagctgggtggggaaaggaggtcccagtgtgtagacgtgagatccttagaggtgagatagaagcatagaaaggtctctctctctctctctcaagacagggtctggctctgttgtccaggccagagtgtggtggcacaatcttggctcactgcaacctctgtgtcctgggctcaagccatcctcctacttcagccttctaagtagctgtgactacaagcacacaccaccacacctggctaatttttgtatttttagtagagatggggtttcaccatgttgcccgagctggtcttgaccttctgagctcaagtgatctacccgcctcggcctcccaaagggctgggattacagatgtcagccaccacaccctctaggcctcatgttttgaggtcaggcacacttcacgttgcccgctggctatcccagagaagttaccaagctttttggaagctcaaactcttca

SEQ ID NO: 709628 - DNA, 620 bp, Homo sapiens
tggaaaaacatgtaggaaccttttaatatataaataatggaagtgatactttaaaaaaatacagtcttctgaattataagaggagagtgtcttttctttttctccctgatttttaataaagtagcatttttcttaatatatatttattatacaaaatgttgaaatgtgaagaaagccaaacacaaattttcctaactctaccatcagctattcttatacagaaacttcctccaggcattaggcagcattgtggcttctcataaaacccagaattggccacttattgccggtatatcataagacagaatacttactctaggaaagcctcagtttctttggctataatgaaagtaatactgatgtttgtttaccagacttacactgtgtggtgatattagtcacactgtgctttgcatcttcttgttatgattattattctgtatgtatgtgtatttatatatcatatatatgtctgaagccttatatataaaawgatatgcttgtgtatatctgtgtaaatacacaatatttacacagataaatacacaagcatatcattttatatataaatacacagatatacacaagcatatctttttatatataagtatatattttta

SEQ ID NO: 709629 - DNA, 620 bp, Homo sapiens
tggaaaaacatgtaggaaccttttaatatataaataatggaagtgatactttaaaaaaatacagtcttctgaattataagaggagagtgtcttttctttttctccctgatttttaataaagtagcatttttcttaatatatatttattatacaaaatgttgaaatgtgaagaaagccaaacacaaattttcctaactctaccatcagctattcttatacagaaacttcctccaggcattaggcagcattgtggcttctcataaaacccagaattggccacttattgccggtatatcataagacagaatacttactctaggaaagcctcagtttctttggctataatgaaagtaatactgatgtttgtttaccagacttacactgtgtggtgatattagtcacactgtgctttgcatcttcttgttatgattattattctgtatgtatgtgtatttatatatcatatatatgtctgaagccttatatataaaatgatatgcttgtgtatatctgtgtaaatacacaatatttacacagataaatacacaakcatatcattttatatataaatacacagatatacacaagcatatctttttatatataagtatatattttta

SEQ ID NO: 709630 - DNA, 594 bp, Homo sapiens
tgatcaggataaatgttttcattgttttgtttttcctgggaaaagttggtgggtttttagaaaagacttcaggagatgcctgtacctaaattaaggcacaatggtgttaagttgataggccacattttcaccaagcaggcttagaaagacctactcgaaaaaaatatttgcggccgggtgcagtggttcatgcctgtaatcccagcactttgggaggccgaagtgggtggatcacctgaggtcgggagttcgagaccagcctggccaacatggtgaaaccctgactctactaaaaatacaaaaaattagccgggcgtggtggcgtgcgcctgtaatcccagctactcgggaggctgaggcaggagaatggcgtgaacccgagaggtagaggttgcagtgagccaagactgtgccattgtactccagcctgggtgacagagygagactccgtctccgggggaaagaaaaaggaaaaaaaagaattgtgatttgctcattttaaatattgtgcatttcaccccatgagagctcattaatttggattttgtggtggggttggttgcatgtgtacaaacaggaattcgaaatcctgtc

SEQ ID NO: 709631 - DNA, 636 bp, Homo sapiens
tacccctccccctcccactcccaccatcaaccaagcctaactctggtttttttaaaaaatgaactttttttggccgggcgtggtggcgggcctgtaatcccagcactttgggaggccaaagcgggtggatcatgaggtcaggagatcgagaccatcctggctaagatggtgaaaccccgtctctactaaaaatacaaaaaatttagccgggcgtggtggtgcacgcctgtagtcccagctacttgggaggctggggcaggagaatgacgtgaatccaggaggcagagcttgcagtgagccgagatcacaccactgcactccagcctgggtgacagagcaagactccatctcaaaaaaaaaaaaaaaaagaacttttttgtccccattcttctcctttttcctccccctccccccaggtacacaaactgtcactcccaaaagaaatgacaaatttgtttaaaataaatcctcataaatacactaagtagatgccttaattcactaattaattktaaatacatttttataaacatttatttaaaatgaatgaagcccagctttcctttgggcttggtttgagcctcacccacatgagaggattcatgctacgtctaaagagctgaaagcaagccagtg

SEQ ID NO: 709632 - DNA, 2087 bp, Homo sapiens
gtgtgtgtgtgtgtgtgtgtgtgtgtgtagcaggaaagatgtggaattcccagttgtttcccacttgaactcctgccagatgatataaatcttcatctcagttgtctccagaaactgctgcttctatgcttaaacctgtctcatgtccaggtaatctaaccaaaactcaaaattttgacgaccccatgcagctggtttgctgaattccccctcaagaaaatctgccgcgttccatccactttaccaagacttcatcaagaggtgataaagttgcttgatagagattcattgcagttgtartaagtccaggaagcattgtgcattgcagttataaattgagatagatggttcagagatatggatcaagtactgtgatcagttcactggaatgtgactcgcagatggagacagcctggaagggtggaatgaatgtgaacttctgtttgttcgtgattctgaattaggttacactaattaactaattaaggaaaagtgaaggagatagaacagcctataaaaagatattccagactgcatctgcctttccattctttcacttcttgtcaggtactagatttggcctttaggttttctttgatttccttcctccctttccctatttcttttctgtttgtaagaaaacagtaaaaatagctgtattctcatagaaagccttgagattttcatactcactgcatgtaaaaaaatgcaaaggtttctctctgctattttgtttgtttgtttgcttgcttgctttcccgagatggaaccttgctctgtcacccaggctggagtacagtggcacgatctcagctcactgcaacccccccccactcccaggttcaagcaattctcctgccccagactcccaagtagctgggattataagcacacgccaccacacccagctactttttgtatttttagtagagatggggttttgccatgttgcccaggctggtctcgagctcctgacctcgtgatccacctgcctcagcctcccaaagtgctgatattacaggtgtgagccattgcaccctgcctgctatttagtttttaaaggatatataccatacagcaaaatatgtcacccatattttaaaacatttataagcctcaatttttagatattggtattttgagtctggatttgggaatgaaaaaaatgcacattttgttcctatattttcgcattgtatactttgaagagcagacacaaatgtcttaacatggtattcctgaaagttatcctcaaatactggggtagatactaatttctttttaatatactatttaaaactgcaaaatcaattattttactctaaaaattaacatttttgtgaggctggaaatgaatgaagtcattttgattatttagattaccaaactttggcaaaacatttctcaatggatgaataagcagctttgtgttttatttaaaacaagatagatgcatatgttaatattcctagtatttcaaatcagtccaaatcagaatatattctgagcaccttctgtgtaccattgagcactttttgtgtactcaatttaggatactaatggcaatacaagcacaaatgaaagtgtatataaaatggtcaaattcactaaagcacagttggacaaaatttttctgtaaggggacagtttgtaaattgtttatggtttgtgggctgtacagtctctgtcactaatacccagctattccttcataggacaaaagcagatgtaaaaaatttagaaatgaaccgacatggctgtgcttcaataaaactttattcataaaagaagagaagctagatttgccttcaggttaaccccctgtactgaaggattattttatgcatgctgggcactaaaaacattttgtttcctttgcattcacttcaataaaatttccagtaaatggtatttctaaagacagttgagtttgcctctgtagtcacatttttattgaactttatagttgctttatttttatagtcacttatttagttattaacagtcagatttgtattattaatgtccttggatagttcaacatgtgcaacgcaaggaaccaataaaacaaattttggaaataaaca

SEQ ID NO: 709633 - DNA, 622 bp, Homo sapiens
tttcggttgttttaagccacccagtttgtggtactcggttctgacagccctgggaatctattatggtcactccagtaagaaaataagagaggggctgctaagctaggaagccaaggagccgcctgaggatgcagcactgagaagaggaggagatagacaactcagagatgctgcctgtccccaaacagtgcccacacactcaacaaacaacccagatcaaagrtgtttttctgtttttctttgtgcacaaggccattcccctctgtagcttagctacaaaaccaaacactacctgtagcaggattgagttctacaagtcaagatgtggctgtctcggccaaagaaggttcatatccaacctcttgactggatggccatgaaatgagggtctccccacacacggatctgatttctgtgtgttctgctcttatttatgagccaacctttccttttcctcccgacattgaactagcttctgaacattgcatggatttttctgacactatggacagccagaagtcatttgaggttcttacgcaggggatgtgacaccatatcagtgtcatttaaggatgtcgactctagcagctgtgtacagacctgatgctttgtggattttctg

SEQ ID NO: 709634 - DNA, 622 bp, Homo sapiens
tttcggttgttttaagccacccagtttgtggtactcggttctgacagccctgggaatctattatggtcactccagtaagaaaataagagaggggctgctaagctaggaagccaaggagccgcctgaggatgcagcactgagaagaggaggagatagacaactcagagatgctgcctgtccccaaacagtgcccacacactcaacaaacaacccagatcaaagatgtttttctgtttttctytgtgcacaaggccattcccctctgtagcttagctacaaaaccaaacactacctgtagcaggattgagttctacaagtcaagatgtggctgtctcggccaaagaaggttcatatccaacctcttgactggatggccatgaaatgagggtctccccacacacggatctgatttctgtgtgttctgctcttatttatgagccaacctttccttttcctcccgacattgaactagcttctgaacattgcatggatttttctgacactatggacagccagaagtcatttgaggttcttacgcaggggatgtgacaccatatcagtgtcatttaaggatgtcgactctagcagctgtgtacagacctgatgctttgtggattttctg

SEQ ID NO: 709635 - DNA, 2094 bp, Homo sapiens
cctccctgtccacagggaccattcctttgccgtgtcgtctggggaagaagccatcccctgccataggcaatggcttacagggtgacctgggacatccgtgccttcggctgggttcagccgtgaagcactcttcttcccaactcctcctgctgctcccagcgtgcgacattcatctttcccttcccaagttaacgctcagttctgtcttggccgccttggcaccttcccggcccctcagtctcggtctccacagcacttggtcggctcagccttgttcgtgcgagtcaagaacttgagccgcgctgctctgaagagggagagtcagatgtgggcaaaaaaagtgcatcgaatgtctgagaaacttccataacaaaaagccatctctggcatctgaaagaattcacgctcgaaagatggttcctgcttggtttgtcttgggcttacacttttttattactatgattttattcttcagggttgtgggaatctgcatcttgacttggacctggcccgtgtgcaggatgtaatgggctgatgtgcctggactcctccctctgcatttgtgcagtgctcccgtgccgggaacacaacccaggaacaaggacttccgtgcgacggtgccccggccaccaccacgcctcccgcagcagccaggcccgggccttgaggtcagcagtaaaccccaggacacaggcagtgaccctagacgagcagggcaggtccaggtgacgggaggcgtgccacgtttctccatcccgaagttcttcttggtttttatcctaagtactgatgtcaggatgactcggcagctttgacgagccatctggccctttaggcaggaagccagttggccttcctcctcccactgtcccgcctgggcactcccatggggctggctgcagggggactgaccttctcaggggaggctgcctccggcttcaccgctcctccccgagcacagcctttgtggggcctacggggcagtaggagacaggacgcttgtcctgcggaatggcaaggaatcagctctccatttcagggcaaagtggggcctggattgtgggccttgaacatgaaggcaggtgggcgagggactaggggaccgcgtgaggcccgacgtgcacacggcagggcccggcacccatggttgcgttcggtcggccttggccggctggctcctgcttggaaacttgctgggtggtgtctgcggtaagtcggtggcattattcccaggggctgtgaggaaaccctcatatcgtttgtcctaaagcctaggatcttggaaacaggaccatcacccttatagaggtcatccccctctgaccagaccctattccaaggccatttcctgcgtctaaaatcctccgtgggtgtagaaaccagctagagatgggagcactgaggcctgcaatgggagctctcctggagacgtgagggcgttgccggcctcttcacgctacccctgctccaagaccacctccagccctcacagaggcctctgggcctgccctcctgagagrccactccgggcagggctgtggtgcccaccccatccccaagaggtcagataccaacaatcagattgtttctgcttgaggagggaaaaaaagcccagatgccaatccaccagcctcatcatctggggccgcgtcatcctcctgcagggatggtctctttttattttcttttttattttttatttatttttaatcttttttttttttgagatggagtctcgttctgtcacccaggctggagtgcagtggcacaacctcagctcactgcaacctccgccttccgggttcaagctattctcctgctccagcctcccgagtagctgggattacaggtgcctgcggccacgcccagctaattttttgtatttttagtagagacggggtttcaccatgttggtcaggctgatgtcgagctcctgacttcaggtgatccatccacttcggcctcccaaagtgctgggattacaggcgtgagcaacagcacctggctgggatgttctcttgaatgagagctttgtctgccctgcctgtcagtcactgtgacaaaggggacccaggcagactggagcccaacatt

SEQ ID NO: 709636 - DNA, 2821 bp, Homo sapiens
gcagaggattccagaagaaagtttcctctgtgaaaaccttctcttaccattttttacattatatataatttctatttttgtccccaggcttttttctttattgtgtgtgattgtatcaaattaattttaatgaaatatttcaaacatttggaaaaatatggagattaatataacattacctttatacccagaattaacaaatattactttgtcttatcttcttcagatcctttttaatgctaaatatagtatgatattgtgatataataagaaatacacatttggtctcggtccctagttccttatacacagctcctgaaactcttggaatcccctgagtgatgcgtgtttgtttttttaatgctaatagatgactggtggctgggagctctggatggagactggttaccaagggaaccaaccctgtgatagatggttgggactctccagcccacaccccagcctctagagagaggaggggagctgcaggttgagttgattgcccgtggccaatgatgtaattaatcatgcctacttaatgaatcttccgtaacactctaaaggatagtgtccagatgggttccagatagccagccgaacacacggaggtgctggaggtgcccagagaggtcacggaagctccacacccctctccatgtgccttgccctgtgcatctcttcatctgccggttcatttgtgttatcctttgaaatatcctttgtaataaatgggtaaacatgagtaaagtgtttccccaagtcccataagccattctatcaaattaacctaatccgaggaagagatcctgagaactccggtttatagctggtcagtcagaagcacaggtcacaacctgtgattggcatctgaagctggagggtggatactgtgggactgagcccttaatctgtgaagtccgacactgtctccaggtaactagtgtcagaattaaattctaggacacccggttggcgtctgctggagaatctgggtcaggagagttgtgccgactctgtgagattaggaaaaacactttgttttttcctgcctctaataataattaaagtcttctttgtatctcttctcagctgtatttttcttttttcaactacagtggcacagccaccatcctaaattggtgtgcatttttacagtccatatttttagcgttttaatacatatatgtttccataaacaatgtacaatactgttgagtgtgatataaatttaaaatatatcgtctcatactacttaggctgtcagttcattattacttactgaactcaggccctctagtcatttgataatagaagaaaacatattcttgacatttttcagagagggtgattcttagaccatttttttaggggcctaagccctaaagaagccttctttaaaggaaatagattgaggtaatgtcaaggtggaacacaattatggtacgaagtgtcttgacccagcactaagaaaaaggttttattaaattcaggagttttttaaattgctgcgcaatagaaatacttatttttggagtgtggataatttgatacattcatatgctgtgtaaatataaataagaataattgggatatctgtcaccctaaatactttcctttcttaatgctaggaaccttgaaattctcttctaatcttcatacaatgtacaacagattaacattaactgtagtcaccctattgatctgtggaacactaggtcttacttctatctaactatattttaacccactaatcagcctctcttcagcacgccccaacccccttcctggcctctcaagttcagttttagatttcagcatcttctctgtttactttaggatgctcccgtatctgaccactgttacttagctttcagaatcgccgatcactgaaattccaggtccaggggttctgcactgcgcttagaatttctcctcatgtataagatgtgctggttgcaccgccaagccctgttgccgtctgtgggacaggaagccttgttagtgcctccatgaatccagcactgacattagctcacgtagaactaacatctactcagggagttgcgttagtggctcttaagaaactccatgaaaattgtgagaaaacttcaatgagaacgtttttgacaagtcgcctttcccttgtatataaatgcgaaccgtttttcattttcaaaatttcaaactttttcatagaactcaaggatttgagtcctgcttcctttgagaggggtaacagtgagttttacataaacactgtgtatgattttaaaaggcagtactgaacatgtgctacacattaattccttagtttcgaaagatgcgacggagtgggaaagttcgatatccacaggtgcagatattggaaagaccacactcaggtrtatgatctttctcatagctgcaagtgactgtgttcagctttccaatgaggtgaggaaacatttatgggcctcctatggctctcttattcattcaccactgtgctgtgtaacacaatttccctgcaacaataaacttcaactttgcaatttgtcaccagtgcaatggctcatgtagttataaagtgaacgtggtgaccaatttggggcgtaatattgttctgcagtcaaagtatcctaatttgaagaaattttatgtatcgtgattttacaccaactggccaaagtcagatagtctgattaaatagatttggttttggctaactatatgtagttaattctacacactttaaatattttggtttgcaggtattttttgaaggcttaagtatttggtttctgtttctttgggtttcctgtctgtagattctaccaagcgt

SEQ ID NO: 709637 - DNA, 2821 bp, Homo sapiens
gcagaggattccagaagaaagtttcctctgtgaaaaccttctcttaccattttttacattatatataatttctatttttgtccccaggcttttttctttattgtgtgtgattgtatcaaattaattttaatgaaatatttcaaacatttggaaaaatatggagattaatataacattacctttatacccagaattaacaaatattactttgtcttatcttcttcagatcctttttaatgctaaatatagtatgatattgtgatataataagaaatacacatttggtctcggtccctagttccttatacacagctcctgaaactcttggaatcccctgagtgatgcgtgtttgtttttttaatgctaatagatgactggtggctgggagctctggatggagactggttaccaagggaaccaaccctgtgatagatggttgggactctccagcccacaccccagcctctagagagaggaggggagctgcaggttgagttgattgcccgtggccaatgatgtaattaatcatgcctacttaatgaatcttccgtaacactctaaaggatagtgtccagatgggttccagatagccagccgaacacacggaggtgctggaggtgcccagagaggtcacggaagctccacacccctctccatgtgccttgccctgtgcatctcttcatctgccggttcatttgtgttatcctttgaaatatcctttgtaataaatgggtaaacatgagtaaagtgtttccccaagtcccataagccattctatcaaattaacctaatccgaggaagagatcctgagaactccggtttatagctggtcagtcagaagcacaggtcacaacctgtgattggcatctgaagctggagggtggatactgtgggactgagcccttaatctgtgaagtccgacactgtctccaggtaactagtgtcagaattaaattctaggacacccggttggcgtctgctggagaatctgggtcaggagagttgtgccgactctgtgagattaggaaaaacactttgttttttcctgcctctaataataattaaagtcttctttgtatctcttctcagctgtatttttcttttttcaactacagtggcacagccaccatcctaaattggtgtgcatttttacagtccatatttttagcgttttaatacatatatgtttccataaacaatgtacaatactgttgagtgtgatataaatttaaaatatatcgtctcatactacttaggctgtcagttcattattacttactgaactcaggccctctagtcatttgataatagaagaaaacatattcttgacatttttcagagagggtgattcttagaccatttttttaggggcctaagccctaaagaagccttctttaaaggaaatagattgaggtaatgtcaaggtggaacacaattatggtacgaagtgtcttgacccagcactaagaaaaaggttttattaaattcaggagttttttaaattgctgcgcaatagaaatacttatttttggagtgtggataatttgatacattcatatgctgtgtaaatataaataagaataattgggatatctgtcaccctaaatactttcctttcttaatgctaggaaccttgaaattctcttctaatcttcatacaatgtacaacagattaacattaactgtagtcaccctattgatctgtggaacactaggtcttacttctatctaactatattttaacccactaatcagcctctcttcagcacgccccaacccccttcctggcctctcaagttcagttttagatttcagcatcttctctgtttactttaggatgctcccgtatctgaccactgttacttagctttcagaatcgccgatcactgaaattccaggtccaggggttctgcactgcgcttagaatttctcctcatgtataagatgtgctggttgcaccgccaagccctgttgccgtctgtgggacaggaagccttgttagtgcctccatgaatccagcactgacattagctcacgtagaactaacatctactcagggagttgcgttagtggctcttaagaaactccatgaaaattgtgagaaaacttcaatgagaacgtttttgacaagtcgcctttcccttgtatataaatgcgaaccgtttttcattttcaaaatttcaaactttttcatagaactcaaggatttgagtcctgcttcctttgagaggggtaacagtgagttttacataaacactgtgtatgattttaaaaggcagtactgaacatgtgctacacattaattccttagtttcgaaagatgcgacggagtgggaaagttcgatatccacaggtgcagatattggaaagaccacactcaggtgtatgatctttctcatagctgcaagtgactgtgttcagctttccaatgaggtgaggaaacatttatgggcctcctatggctctcttattcattcaccactgtgctgtgtaacacaatttccctgcaacaataaacttcaactttgcaatttgtcaccagtgcaatggctcatgtagttataaagtgaacgtggtgaccaatttggggcgtaatattgttctgcagtcaaagtatcctaatttgaagaaattttatgtatcgtgattttacaccaactggccaaagtcagatagtctgattaaatagatwtggttttggctaactatatgtagttaattctacacactttaaatattttggtttgcaggtattttttgaaggcttaagtatttggtttctgtttctttgggtttcctgtctgtagattctaccaagcgt

SEQ ID NO: 709638 - DNA, 614 bp, Homo sapiens
gtacgtagtacagtcacatgctgtacaggtttgtagcctaggagcaataggctgtaccagacaccctcggtgtgtagcagctataccacctaggtctgtgtaagtcagtctgtgatgttcccacaacaagacctcctgacgatgcatttctcagaatgtatccccaccattaagtgacatgtctgtagtatgcagtttatagtaccccacgatattaaaacagaaacagaaaaagaaattcctccctcatgggtcctcataaagaatctgatcgtaagcaacatcttcagcatccttccatatgtacagccgtgaggttcagaagacttctttttttaagaaacatctcagcaatataataaggccaaagttcatctcataaaaascgttttctaggagaccgtaaatattgctactcaaatatctaatatattatttaatattgggaataaattttcaagtctttggaaagatttaggcagtactctctaaatattagttgtctcaaccatttttttatacattaagcagcaatatgtttaggatctagtctttgacagataccagaatgcagctattcagtgttcaagtatagagtcatacactttaaaagt

SEQ ID NO: 709639 - DNA, 614 bp, Homo sapiens
gtacgtagtacagtcacatgctgtacaggtttgtagcctaggagcaataggctgtaccagacaccctcggtgtgtagcagctataccacctaggtctgtgtaagtcagtctgtgatgttcccacaacaagacctcctgacgatgcatttctcagaatgtatccccaccattaagtgacatgtctgtagtatgcagtttatagtaccccacgatattaaaacagaaacagaaaaagaaattcctccctcatgggtcctcataaagaatctgatcgtaagcaacatcttcagcatccttccatatgtacagccgtgaggttcagaagacttctttttttaagaaacatctcagcaatataataaggccaaagttcatctcataaaaaccgttttctaggagaccgtaaatattgctactcaratatctaatatattatttaatattgggaataaattttcaagtctttggaaagatttaggcagtactctctaaatattagttgtctcaaccatttttttatacattaagcagcaatatgtttaggatctagtctttgacagataccagaatgcagctattcagtgttcaagtatagagtcatacactttaaaagt

SEQ ID NO: 709640 - DNA, 935 bp, Homo sapiens
ttttccagcaaaacttcagagcaaaaaggaaggttttaccttggcctctgcaatgataatgagttcagatgtaacatgaaaaatttaggaaagattgggagaattttttttaaagatccaggaatttatcttaggggaaaaaaaaggaatagtactggaaggaggatgcaggaagaatgagagagagagagagaaagggagattggggcaagtgaggaggaaggagggtttgtggacgtctgacatgctggagagataatgaggagaccagttgggggaatatgagcttaagaggttctagtgtgtgcctattcgagacactggagaaacaatggaattattttttagagcttctctggatatagaagatggtttccatttgaatgggatgccaccatgttgagccaggaaataaggctttccttaaaggggctgcttaccacagacattgattctctcgcagtcctggaggctggaaatctgagacaaggtgtgagcggggctggttcctcctgaggcctctctcctgggcttggagatgctgtcttctccctgtgttctcccatggtggttcctctctgtgtaggtctatgtcctcatctcctcttcttataaggacaccagtcctgttggattagggcccactctagtgacctcgttttaccttaatccaatcttgtccattctgcagccctagggccacatgcagcccaggacagctttgaatgttgcccaacacaaatacgtacttttttaaaacatgagatttatacayggacctgttttttcgctcatcagctattgttagtgtattttatgtttggcccacaacaattcttcttcttccattgtggcccagggaagccaaaagattggactcctttgccttaatcacttctttaaaggccctacctacaaatacagtcacattctga

SEQ ID NO: 709641 - DNA, 628 bp, Homo sapiens
ggaaccaaccctgccaacaccttgctctcagacttctggcctccagagctgcgagacaatacatttctgttgttcaaccacccactttgtgacagtttgttacagcagcctagaaaacctgtaacaaggcctgaatcagctaatcagtttcatytgggatcaagaccgccaccaaaggagagggaatccaaccagaagaggggacaaccgagggaggcatccgaggagccgtggagccaggagtctgcccctcatcctatgctgaggacgcggcagaaaccaggctctttcagtcagcacagccttgccacccagcccgcaggggcaggccacacagatggccccggggggacaggcattcaaataggacaggcattcaaataggtccgttcctagcccactgctgcccatctgcagccaggggcggccttgttccccttctttagggcctgagaggtcacttcgcagttttccctacatggaaacgctgcgcgtggagcagtgaagcaaacgccgccctctttagtgcaaaccttgttctattctgcacttcccccaccccccacgtggcagctggaacagccctgccatctccaccacaagcaccttcaccgaggcgcacatgtgg

SEQ ID NO: 709642 - DNA, 1738 bp, Homo sapiens
tctctctctcactctgtctctctctcacgccttcagcctgcaaacctgaagacttcctttttctgagaagacatcaggtaacttgttcccgtgcccctgccctccacgacccccactgctactgggcgtctcgctttggcggaaggtagtgcgagatccgagcaggcagctccaccatcagagctgaggaaatgaaaccaactcggtcctgagttccaggaactcggaccgggccaccctcacccctggttcttcccatcaccgtccaggaattcggctgcagcccctcggccccgccgcctcctgggaagaccccatgctcaccttcgcgcctcccgaggggtgtgcgtccaatctgtcccgtgcacagttccaaaaagctcgctcttccaccttctttcccacgaccgcctcctgcccaggcgagaagtttgcaaacgcgaggcccgcgggagttcccctgcgccccctttcctggtgcccgcaccctgcactctgctgactgtaccggacgccacacgtggctggcggcgacaaggcgccccgatccctacctgagggaaaccccggccactgcagctgcacttgagcagggtccctccactcagccacttggatggctgtttctgtccagtgccctccggaggccactgcctcaggtctgtgatgcctgcagagaatgctgcgacacttccccctccgacgtggctccagctgccaaccaccaggctcacggtgccctggctccctggagccgctttctaggcagctcggagccacggcccctcccttccttcctcctgtcctttccacactcttcctgccttccccaaagtcactgggtaactacgctgtacacgtcagtaccaagccttctttaggggctggggattcagaatagaataaggtcccagcaactattataaccaggacacagtatgagaaggactggaagtttagagaaaaactgaaagttggagagaagcttctggtgtttgcttctctgtgctggataatattggcggggtggggagggtacgagggaagagacaccaaagtgggaaaaaagtcacttcctcttctaaggtcattgcagaacatcctgttacagtgtgagtcaggttttcttaagattaactacatcttcagctagaaagtctaagtagtgttatgcatttactcaacagactatttgcctctaaaagaacagaactgggagctgggtgtggtggctcatgcctgtaattccagcactttgggaggcggaggtggccagatcacctgaggtcaggagttcaagaccatcctggccaacatggggaaaccctgtctctactaaaaatacaaaaattagccaggcgtggtggtgcatgcctgtaatcccagctactcgggagcctgagaggggagaatcgyttgaagccggccttggagattcatttcttcgccttgctattgttcttcgtctcctgcatcatcagttttcttcctgtcttaggtgaagagattgaggtgaggcaggagaatagggtctgcaggcagggaacataaagctgattcacgctgacttcttagaactaaataaaatggacacatttcagctatgacaggaaatattttcttcatttacatatggcgttcactgagtaagtgactgagcaacttcacttcatcttcttcatttacatagggtgtacaccaattaaccaatgggagcctctagagggtatttaaatcc

SEQ ID NO: 709643 - DNA, 1738 bp, Homo sapiens
tctctctctcactctgtctctctctcacgccttcagcctgcaaacctgaagacttcctttttctgagaagacatcaggtaacttgttcccgtgcccctgccctccacgacccccactgctactgggcgtctcgctttggcggaaggtagtgcgagatccgagcaggcagctccaccatcagagctgaggaaatgaaaccaactcggtcctgagttccaggaactcggaccgggccaccctcacccctggttcttcccatcaccgtccaggaattcggctgcagcccctcggccccgccgcctcctgggaagaccccatgctcaccttcgcgcctcccgaggggtgtgcgtccaatctgtcccgtgcacagttccaaaaagctcgctcttccaccttctttcccacgaccgcctcctgcccaggcgagaagtttgcaaacgcgaggcccgcgggagttcccctgcgccccctttcctggtgcccgcaccctgcactctgctgactgtaccggacgccacacgtggctggcggcgacaaggcgccccgatccctacctgagggaaaccccggccactgcagctgcacttgagcagggtccctccactcagccacttggatggctgtttctgtccagtgccctccggaggccactgcctcaggtctgtgatgcctgcagagaatgctgcgacacttccccctccgacgtggctccagctgccaaccaccaggctcacggtgccctggctccctggagccgctttctaggcagctcggagccacggcccctcccttccttcctcctgtcctttccacactcttcctgccttccccaaagtcactgggtaactacgctgtacacgtcagtaccaagccttctttaggggctggggattcagaatagaataaggtcccagcaactattataaccaggacacagtatgagaaggactggaagtttagagaaaaactgaaagttggagagaagcttctggtgtttgcttctctgtgctggataatattggcggggtggggagggtacgagggaagagacaccaaagtgggaaaaaagtcacttcctcttctaaggtcattgcagaacatcctgttacagtgtgagtcaggttttcttaagattaactacatcttcagctagaaagtctaagtagtgttatgcatttactcaacagactatttgcctctaaaagaacagaactgggagctgggtgtggtggctcatgcctgtaattccagcactttgggaggcggaggtggccagatcacctgaggtcaggagttcaagaccatcctggccaacatggggaaaccctgtctctactaaaaatacaaaaattagccaggcgtggtggtgcatgcctgtaatcccagctactcgggagcctgagaggggagaatcgcttgaagccggccttggagattcatttcttcgccttgstattgttcttcgtctcctgcatcatcagttttcttcctgtcttaggtgaagagattgaggtgaggcaggagaatagggtctgcaggcagggaacataaagctgattcacgctgacttcttagaactaaataaaatggacacatttcagctatgacaggaaatattttcttcatttacatatggcgttcactgagtaagtgactgagcaacttcacttcatcttcttcatttacatagggtgtacaccaattaaccaatgggagcctctagagggtatttaaatcc

SEQ ID NO: 709644 - DNA, 1738 bp, Homo sapiens
tctctctctcactctgtctctctctcacgccttcagcctgcaaacctgaagacttcctttttctgagaagacatcaggtaacttgttcccgtgcccctgccctccacgacccccactgctactgggcgtctcgctttggcggaaggtagtgcgagatccgagcaggcagctccaccatcagagctgaggaaatgaaaccaactcggtcctgagttccaggaactcggaccgggccaccctcacccctggttcttcccatcaccgtccaggaattcggctgcagcccctcggccccgccgcctcctgggaagaccccatgctcaccttcgcgcctcccgaggggtgtgcgtccaatctgtcccgtgcacagttccaaaaagctcgctcttccaccttctttcccacgaccgcctcctgcccaggcgagaagtttgcaaacgcgaggcccgcgggagttcccctgcgccccctttcctggtgcccgcaccctgcactctgctgactgtaccggacgccacacgtggctggcggcgacaaggcgccccgatccctacctgagggaaaccccggccactgcagctgcacttgagcagggtccctccactcagccacttggatggctgtttctgtccagtgccctccggaggccactgcctcaggtctgtgatgcctgcagagaatgctgcgacacttccccctccgacgtggctccagctgccaaccaccaggctcacggtgccctggctccctggagccgctttctaggcagctcggagccacggcccctcccttccttcctcctgtcctttccacactcttcctgccttccccaaagtcactgggtaactacgctgtacacgtcagtaccaagccttctttaggggctggggattcagaatagaataaggtcccagcaactattataaccaggacacagtatgagaaggactggaagtttagagaaaaactgaaagttggagagaagcttctggtgtttgcttctctgtgctggataatattggcggggtggggagggtacgagggaagagacaccaaagtgggaaaaaagtcacttcctcttctaaggtcattgcagaacatcctgttacagtgtgagtcaggttttcttaagattaactacatcttcagctagaaagtctaagtagtgttatgcatttactcaacagactatttgcctctaaaagaacagaactgggagctgggtgtggtggctcatgcctgtaattccagcactttgggaggcggaggtggccagatcacctgaggtcaggagttcaagaccatcctggccaacatggggaaaccctgtctctactaaaaatacaaaaattagccaggcgtggtggtgcatgcctgtaatcccagctactcgggagcctgagaggggagaatcgcttgaagccggccttggagattcatttcttcgccttgctattgttcttcgtctcctgcatcatcagttttcttcctgtcttaggtgaagagattgaggtgaggcaggagaatagggtctgcaggcagggaacataaagctgattcacgctgacttcttagaactaaataaaatggacacatttcagctatgacaggaaatattttcttcatttacatatggcgttcactgagtaagtgactgagcaacttcacytcatcttcttcatttacatagggtgtacaccaattaaccaatgggagcctctagagggtatttaaatcc

SEQ ID NO: 709645 - DNA, 1738 bp, Homo sapiens
tctctctctcactctgtctctctctcacgccttcagcctgcaaacctgaagacttcctttttctgagaagacatcaggtaacttgttcccgtgcccctgccctccacgacccccactgctactgggcgtctcgctttggcggaaggtagtgcgagatccgagcaggcagctccaccatcagagctgaggaaatgaaaccaactcggtcctgagttccaggaactcggaccgggccaccctcacccctggttcttcccatcaccgtccaggaattcggctgcagcccctcggccccgccgcctcctgggaagaccccatgctcaccttcgcgcctcccgaggggtgtgcgtccaatctgtcccgtgcacagttccaaaaagctcgctcttccaccttctttcccacgaccgcctcctgcccaggcgagaagtttgcaaacgcgaggcccgcgggagttcccctgcgccccctttcctggtgcccgcaccctgcactctgctgactgtaccggacgccacacgtggctggcggcgacaaggcgccccgatccctacctgagggaaaccccggccactgcagctgcacttgagcagggtccctccactcagccacttggatggctgtttctgtccagtgccctccggaggccactgcctcaggtctgtgatgcctgcagagaatgctgcgacacttccccctccgacgtggctccagctgccaaccaccaggctcacggtgccctggctccctggagccgctttctaggcagctcggagccacggcccctcccttccttcctcctgtcctttccacactcttcctgccttccccaaagtcactgggtaactacgctgtacacgtcagtaccaagccttctttaggggctggggattcagaatagaataaggtcccagcaactattataaccaggacacagtatgagaaggactggaagtttagagaaaaactgaaagttggagagaagcttctggtgtttgcttctctgtgctggataatattggcggggtggggagggtacgagggaagagacaccaaagtgggaaaaaagtcacttcctcttctaaggtcattgcagaacatcctgttacagtgtgagtcaggttttcttaagattaactacatcttcagctagaaagtctaagtagtgttatgcatttactcaacagactatttgcctctaaaagaacagaactgggagctgggtgtggtggctcatgcctgtaattccagcactttgggaggcggaggtggccagatcacctgaggtcaggagttcaagaccatcctggccaacatggggaaaccctgtctctactaaaaatacaaaaattagccaggcgtggtggtgcatgcctgtaatcccagctactcgggagcctgagaggggagaatcgcttgaagccggccttggagattcatttcttcgccttgctattgttcttcgtctcctgcatcatcagttttcttcctgtcttaggtgaagagattgaggtgaggcaggagaatagggtctgcaggcagggaacataaagctgattcacgctgacttcttagaactaaataaaatggacacatttcagctatgacaggaaatattttcttcatttacatatggcgttcactgagtaagtgactgagcaacttcacttcatcttcttcatttacatagggtgtacaccaaktaaccaatgggagcctctagagggtatttaaatcc

SEQ ID NO: 709646 - DNA, 1738 bp, Homo sapiens
tctctctctcactctgtctctctctcacgccttcagcctgcaaacctgaagacttcctttttctgagaagacatcaggtaacttgttcccgtgcccctgccctccacgacccccactgctactgggcgtctcgctttggcggaaggtagtgcgagatccgagcaggcagctccaccatcagagctgaggaaatgaaaccaactcggtcctgagttccaggaactcggaccgggccaccctcacccctggttcttcccatcaccgtccaggaattcggctgcagcccctcggccccgccgcctcctgggaagaccccatgctcaccttcgcgcctcccgaggggtgtgcgtccaatctgtcccgtgcacagttccaaaaagctcgctcttccaccttctttcccacgaccgcctcctgcccaggcgagaagtttgcaaacgcgaggcccgcgggagttcccctgcgccccctttcctggtgcccgcaccctgcactctgctgactgtaccggacgccacacgtggctggcggcgacaaggcgccccgatccctacctgagggaaaccccggccactgcagctgcacttgagcagggtccctccactcagccacttggatggctgtttctgtccagtgccctccggaggccactgcctcaggtctgtgatgcctgcagagaatgctgcgacacttccccctccgacgtggctccagctgccaaccaccaggctcacggtgccctggctccctggagccgctttctaggcagctcggagccacggcccctcccttccttcctcctgtcctttccacactcttcctgccttccccaaagtcactgggtaactacgctgtacacgtcagtaccaagccttctttaggggctggggattcagaatagaataaggtcccagcaactattataaccaggacacagtatgagaaggactggaagtttagagaaaaactgaaagttggagagaagcttctggtgtttgcttctctgtgctggataatattggcggggtggggagggtacgagggaagagacaccaaagtgggaaaaaagtcacttcctcttctaaggtcattgcagaacatcctgttacagtgtgagtcaggttttcttaagattaactacatcttcagctagaaagtctaagtagtgttatgcatttactcaacagactatttgcctctaaaagaacagaactgggagctgggtgtggtggctcatgcctgtaattccagcactttgggaggcggaggtggccagatcacctgaggtcaggagttcaagaccatcctggccaacatggggaaaccctgtctctactaaaaatacaaaaattagccaggcgtggtggtgcatgcctgtaatcccagctactcgggagcctgagaggggagaatcgcttgaagccggccttggagattcatttcttcgccttgctattgttcttcgtctcctgcatcatcagttttcttcctgtcttaggtgaagagattgaggtgaggcaggagaatagggtctgcaggcagggaacataaagctgattcacgctgacttcttagaactaaataaaatggacacatttcagctatgacaggaaatattttcttcatttacatatggcgttcactgagtaagtgactgagcaacttcacttcatcttcttcatttacatagggtgtacaccaattaaccaatgggagcctctagagggtayttaaatcc

SEQ ID NO: 709647 - DNA, 595 bp, Homo sapiens
gggtccgtgctcactccccgccctgggcagcccctgcctgctgccacctggtggccctgcttgctgcccaccagcagctcccattccacgctgcctgcctccatcagcagaggtggggccgggcctccgggctccctcacctgcctcctcccacccacattccactgctttgctgcttctgctgatcaggactgggatgcacaatattctatcactagtcgcctgttgcggcctgtgggcagggtcgccctttcctctgcatagctagtaatggcttcaggacgctgactgtgatgccatgtccagggttacctgccctgatgctgacgggaggccctcctctcgcgggctcctcagccaactccagtcccctctactccattcatctactcgcrggctggggctggggcctcccctcctgccctccctcccactgtgggggtgtctgaggtctccagcaggctgggccgaggctccgggagaggaatgctgtgctcctgcgctgctgtgctgcttacgctgatggggcagagctgggggagcacgagcccaccagagggatggtgtgttacttttgccatctgttgccctcttt

SEQ ID NO: 709648 - DNA, 1333 bp, Homo sapiens
ttggcttcacaattactcagtattactaaaccctggtgcaaggcacaatgctgggccctggagagggcctgaaggagcataagataacaaacattcctgccctcaaggtgcttactaacggagcccttcagatactgtagatatgtactagagaactctaccttgagaatttataataagtgctaaataagatatacagtgagtttctatgggagtttacaatgagaaagaacagcagtgtggagaagagtgatcagggaaacttcattctgtgaaaaacaaaaagtttcagtcctttgtttaaaatttgcttttctttcatgtttctcatccattttcttttgcctttttcattaaattgctactttcgctaagcaatattgagtattctaggcacttagtaaacgggatcattaaacctcttttagaatttagctgaggagctagaatttgagtatgctggtatcaaaggatggtgcaggaaaaccaagtacaactgattgtaagcatcttaatttcagaagacccttttctgattactatttctaaagatgttcatatagttttaaggctactgttactgaaacagtgtagattaggccacaggttttaagtagcaggtgaaataaaatcctacactcactggtattcaaggtgagcatcgaagttgcaggttttactctttacaccagaatcccaagtgtaaagcagctagactcttttgctctagaaaacaatatcttaacatttgcctcactttcttcaactaaagaaaaatgatagggccacgtgacattcttctagaaaattttttttaaaaaaaggatctaccttatataacttgactggggcccttataacttattagttagaaagctctgatctcatgccttctgttttctttgttttgtattccattttgctcagctttcggggcaccatttcattccctttacatattctggatttggggtttgtctcgttcccaccttccacattttctttgctgattctgaatgtagctttggaggagcatggataaaataaaagagtgcagagcttgaggatgaggacatgctgccctgcamcccgtcatgtgctctgcttctgatttaccaactgcagagataagcagtgtatcctttctttcatctaagacgagtaatactttcttccatggaaaaagcagtagttcaatcttaaaaagaaattaggtcctttagaagaattgaagcactaaagcaaactaaatcaagttttgttaccattttgtccagcattgttgtttgttcaatggtacacaggacagtagttatttgaaagcatgtgttag

SEQ ID NO: 709649 - DNA, 638 bp, Homo sapiens
tagctctgcagtatttaacctgttgggtgagaaaagacagccctttgcccagtcaattaaaggaagatttaatcttttgaaatgttagtgtgtgaacctgtctgtgtgtgtgtgtgtgtgtgtgtgtgtgtgtgtgtgtgtgtggtgttttaatctcagcaaattcaatctttgagacacaatctcagtctgttgcctaggctggagtgcagtggcaccatcttakctcactacaacctccaactcccaagctcaagtgatcctcccacttcagcctcccaagtagttgggactacaggcgcacaccaccaaacctggataatttttaaaattttttatagagatggggttttgttatgacatccaggctggtctggaactcctgggctgaagtgatctcgccacgtcgacctcccaaactgctgggattacaggcttgagccatgcacctggacttattgctcagcatttggttaaattaataacatatttctctagtgtaatacaaatgaagcatatacttcatggaacagttttcaagaaaatacagcatttattataaaagaaaaataatttctcctttaaaaattaacaaaacaaattaaaattaacattttcaaaatgataaaacaggttgg

SEQ ID NO: 709650 - DNA, 584 bp, Homo sapiens
tctgcttctgctgagggcctgctcagcttcaaagacagtgccctcttgctgtttctgcgtaggaccagaggggccaaaggggctggggtgccccttcaacctctcttacaagggcattaatcccatttaaatcatcatcccatattttaaaaacacrcaggggctcctgatgatacataacagaaaatctaagcagccaaccttactgacagtttgtaatgactccccccttgaccatggtgaggtgaacctcacacaggtaggggctgtcgggatctgcctcctcactctgggcttcagccagtggcttctaagccagaggcagcatgatggccacggtgacttggggctcaaccccacgcccagggaggccctctggactctgagattctgtttcttcatctataaaatgaaagtgatatatgtcctccacaaggcggccccatgaagatgacctgaaaaaactcaggagaagtgcccagccatgtgtcagggacagtaagagctcagtcaacaccagaccccctgccataattagagggctgtgaattaggaattacaggtgtcactctgagaggaaacag

SEQ ID NO: 709651 - DNA, 1813 bp, Homo sapiens
ggatgtagaaagaacataatagtgattaaagagcaagattaaaggcacggcagggtggagctgagaagtacaggaaagataagtgcttagactttatgtagtctatgaaccatttatattattattattattattattattattatcattattattttagttttaggatgacatgataaaacggatttggggccaggcatagtggctcacacctataatcgtagcattttgggaggaagtggcggaaggatcactagagcccaggagctcaagaccagcctgggcaacaaagtgagacctccatctctacaaaaaataaaaatttaaaaatgttagctctgtttggtggcatgcaccagtagacccagctacttgggaagctgagatgggagaatcacttgagctggggaggtctgcagtctagcctgagctatggagcaagaccttgtctcaaattaaaaacaaaaaacaaaaaacaaaaaaaacaagggtttgtgactattcgtgcaaggcaacttcagggaaacatatccaccttcagcaatcccagtcaaggcctgcaacatgggacacagaagaagcagtgaactagaggggctgcggttgctgctggtccctgtctgaactgcatggggctgccagaggccaatctgactgaacacggccaatgagacaatggcgtgtggcagtggagggcccagcccacgtgggaagacaagacgcaggcgtgcagtcacttctcagcacatcaaggattccattgcatctgggggacatcaaaattgacctgcagtgcatggaggtctcagtccctcagattaaataacaaagcatgactgagcgttattacagaaaacagccagaaagatataaccggaacattccattcagattcgcagcaatacaaaacgatggtgccggcttccagtcagatacatgtcagatcttcccaatgagaagaaaacactcaatcgacataaataaagggtcaaggccctattaacccaaagtcacacttttctggattaaccttaagttgccaagtcggtgtgagaacataacagatacagctgtctctcttagccctattgtgctggaggcctgctggggatcgtgctggtctccaggggctcagatctagacatgcaggctccgtccctgcatgccraggttctggcattacactggggagacaagcatgtacttctttttgtgctttgtgtgaaatagtaagaggaggagccctagcctgaccttggggcaaagacctaatcacctccaagttacaggaactcggccagttgggaaggaaggtctgggctcagggccaagtggcatacaggggtgggaaggggtgaggctggggtaggtgagacagaattggaaaagaaacattccagggaaggagcccagggtcagaggttctaggcagtttagacatatgcctgcagagcacacagagctatgcaaatgctttaagtagaaaaagcattccgattaggcttgcattctagaaactgcattctggcagaagtgtggcgagaagactgtaaggtgctgatattagaggcttgagaccaccaagaaactatggcataaaaacaggtgagaaacaaagaacacctggaatgagaaaaatggaaggggctgattcagaaagaggcttaggaggtaagatcaacatggcttggtgaggaactggatgtgtgcctggggagaggaaaggggcagaaggagaatcagctgcctctacggcacatcatccaagactgaggggtcagaaagggggcgagtttggggattgaagacacca

SEQ ID NO: 709652 - DNA, 593 bp, Homo sapiens
tacaaaaaaattagccgggcgtggtggcgggcgcctgtggtcccacctgctcgggaggctgaggcaggagaatggcgtgaacccaggaggcggagcttgcagtgagccaagatggcgccactgcattccagcctgggagacagagcgagactccatctcaaaaaaagaaaaagaaaaagaagtgtggagcctgggcagaggtggaagccctgcagctctggccttgctgtccacagggctcttcagacctcaccaggccttactcgacctacccaaacatcagaatcatgaggctggggctgggcgtggtggctcacacctgtaatcccagcactttgggaggcagaagtgggcagatcacttgaggtcaggagttcaagaccagcctggccaacatggtgaaaccctgtctctagtaaaaatacaaaaattagttgagtgtggtggtgggcacctgtagtctcagttacttggaagcctgaggcaggagaattgcttgaagccgggaggcagaggttgcagtgagccgagattgcaccactgcactccagcctagggacagagcaagaatccttctsaaaaatgaaagaaag

SEQ ID NO: 709653 - DNA, 1101 bp, Homo sapiens
gatgaggtttcaccatgttggccaggctggtcatgaactcctggcctcaagtgatccgcccacctcggcctcccaaaatgctgggattacaggcgtgagccgcygcgcctggcccctcaggcctcatttcttctttctccacgctcctccccagtaatcccatccatgcaataatctttccgtgccaatgagacctaaacaggtatcttcctccctatctctcctaagtaccaatatctcatttccgacggctcgttgatagttgccacctgcacctcatattcatggcaaaaccttaattcccattgtcccccaactctttcctatttctattagtggttttctctgacacacagatttaaaatctgggtatcatttaaaaatcttctttgtcctttgactctcccaaaataagaaatataactgctaccaaatgtagttttatgtatttatttatttatttatttatttatttttgagacgaagtctcgctcttttcccccaggctggagtgcagtggtgcaatctcggctcactgcaacctccacctcccgggttcaagcaattctcctgcctcagcctcccaagtagctcggattacgggcaccagctaccacacccagctaatttttgcatttttagtagagatggggttttaccatgttggccagcctggtctcgaactcctgacctcaggtgatccgcctgcctcggcctcccaaagtactgggattacaggcgtgagccactgcacccggacagtacttatttataatattcccatttttgttttgttttgccatgggaaatgagaatttttaatgtttgttttgttcttgagcactccatccctggacacagacacccacgagaagctaaataattgtcagaggttgctttgtgagtatggaaccagagcataggggttggctgatgtgaagagttaatggttttagggaagttaatggtctccagctaagacggtgcaggtcttcttatggaattgcaatatttgaagtcattgctaaggctcctccttcgccaagaaagcttgcatggtccctactgatgcttctgcaacatttctttctatgctcccat

SEQ ID NO: 709654 - DNA, 1101 bp, Homo sapiens
gatgaggtttcaccatgttggccaggctggtcatgaactcctggcctcaagtgatccgcccacctcggcctcccaaaatgctgggattacaggcgtgagccgctgcgcctggcccctcaggcctcatttcttctttctccacgctcctccccagtaatcccatccatgcaataatctttccgtgccaatgagacctaaacaggtatcttcctccctatctctcctaagtaccaatatctcatttccgacggctcgttgatagttgccacctgcacctcatattcatggcaaaaccttaattcccattgtcccccaactctttcctatttctattagtggttttctctgacacacagatttaaaatctgggtatcatttaaaaatcttctttgtcctttgactctcccaaaataagaaatataactgctaccaaatgtagttttatgtatttatttatttatttatttatttatttttgagacgaagtctcgctcttttcccccaggctggagtgcagtggtgcaatctyggctcactgcaacctccacctcccgggttcaagcaattctcctgcctcagcctcccaagtagctcggattacgggcaccagctaccacacccagctaatttttgcatttttagtagagatggggttttaccatgttggccagcctggtctcgaactcctgacctcaggtgatccgcctgcctcggcctcccaaagtactgggattacaggcgtgagccactgcacccggacagtacttatttataatattcccatttttgttttgttttgccatgggaaatgagaatttttaatgtttgttttgttcttgagcactccatccctggacacagacacccacgagaagctaaataattgtcagaggttgctttgtgagtatggaaccagagcataggggttggctgatgtgaagagttaatggttttagggaagttaatggtctccagctaagacggtgcaggtcttcttatggaattgcaatatttgaagtcattgctaaggctcctccttcgccaagaaagcttgcatggtccctactgatgcttctgcaacatttctttctatgctcccat

SEQ ID NO: 709655 - DNA, 1035 bp, Homo sapiens
tgagaatgaagtaagcagtgtctccaaatggactctaactcggacctgtgttagtcctccttgattcagatactgaactgtgtccagaagatacacatagaattcttgcaagaccttgagatttgaggctatcctagatgcatctggcccttcacaagtcagaatacacacattcttagtgtgtgtgagagaagacactcacacacrctagggagtctgctaagtgccccattttccggaaacaggatcacaggtataggcccatgtctgccatgtatgttgtgcattccatggccatagccaattggactggaccaagtaatgaccacctgacccaagatggaccaatgaggttgtcgttcctgggtctttggcattaggccaaaggactctcagtgagtatcaactcataatctacaaactcaaaaaagcattaggaaccagactatatgacaccaactaagagaagctgtctacagcagaaggaggaaatgtccaagacacaaacaaaagctaaagatacaataaaagacttctgtctcctttctagccccgtctagccacatttgtaccactgagtttcattagacactcctatattttaaaaataaacaatctttttatgtttaggctgacttgagtgtgtttctgttatgtgcaacccaggaatgctaacaaagccttggtataaaacaatgttcttccaaattgtgacccgacctccttgatggccaacatgcaacataacataatacggtggcaaggcttaaatatgaatggaaaggtttgtggatatacggaaatgaaatcgtaatacctcagcattcttattcctcttatgaactaaacaattttcttctgactgaatgaacaacaggatttaatgaaaccacacatttcataatgtgtttggtcatgcatttcagttttgtttggaatcagaatcactcctctcctagaatatgacagattcaactcttaaaaatgtataggctgtaattagcgtatcattgccagaaacataagaatattttc

SEQ ID NO: 709656 - DNA, 1531 bp, Homo sapiens
actacatttagatggtatgaagagaaataatctcattgcggttatcctaagaacaccatatttaaaacataaagtagggcaactgataggtaaattctgaattgtaacaataagcacacaatctgtgctggggtggtagagaggtgaggatgaaaaggtacgtacaggccaggtgcagtggctcatgcctgtaatcccagcactttgggaggtcgaggcgaggagatcacctgaggtcaggagttcgagaccagtcaggccaacatggcaaaattccgtctctactaaaaacacaaaaactagctgggggttgtggcacatgcctgtaatcccagctacttgggaggctgaggcaggagaatcgcttgaacctaggaggtggaggttgcagtgaaccatgatcatgccactgcactccagcccgggcaacagagtgagactccgtctcaaaaatttaaaaaattacgtacaaataacattattggatcaccagttttttctacgcagctactcatatagatgaatcaaggtacaggagagggtcacctgctataacacaggaagcagaattgtttctgggggcattataaaaaaggcccaaagccaggaatcactgcgctaagtgagtgggaagcaattctatgaacatgccaggcaaactcaaagcaatcagctatgaataatctcaaatgatggtttggagaaagaaagaaaatggatccctaaagctgcccatttagccagttaggttatttaaaaaaaaaaaaaaaaaggcaactttgtgacctacaacatgaatagcaccaaagggctaggagctaagtcattttagcccagcatgagggctctgacagccaaggctcctgaaagggattactaacagtggttcacagtgacatccttggttacaaagggttcactttaagaagagaaagaraaaaaaaaacttgctttaatgggccaaagtcataagtagttaagtaataagagtgaaaaatatctttaggcatcaacagaaccccaggtagcactaagcagagatgtaatataacatcccagagcttattttcagatcgtacagtggagcacagcaaggcattctctggtacttacaaggacaatctataaactgatatttgcacaacagtaattgagagggaggcagctcttcgcattagcaatggtaaaaagacgatgctgcatattcacaaatcccaaaatgacaagtggaagaattgaattgctggtctgatacacaaagggatgagacagttcatctgtactcggaagtaataaaaaatattaataaagcaaaatctcaagaaagataagaattctgtttccatttgcatatttggcacaatgttacctgatagaactttctgcaatgagagaatgtcctctgtctgggctgcccaatagggtagtcactagccgtatgtggcagataagcacgtgaaatgtacctaatacaactgagggaccaaattttaatattatttaatttttaattaaaacttaaatggaaata

SEQ ID NO: 709657 - DNA, 1327 bp, Homo sapiens
caagataaattaggatgcatccatactatgaaatattatgcaggtattaaaaagaactatgttgattctgtatctgatatgcaaaaaaagccaatgataaggcaagttacagaactccatgtattatgatcatcccatatttcagataaaggagggcagaaaaccttaaacaatctataagatatttaacttcggttacctctgagaactgaaaatgcaggcaagaatagagataaaacaatgacttcaatttctactccataccttcagtattgtttaaagatttatcaaggagaatttcttttgtaaatatttgaaacaagaaatacaagacaacaacaacaaagaaagactaaaacaagaaccacatagcacaggatgacaagatttcttttcaaactttactaaatactgacatacagacagaacagtgcatagctgtaagtgcaactgtgagtgatctcaatgaagtctcagagtgagcacatccacgtaactggcawcctgatgaggaaagagaacgcttcttgctcctccagaagccttgtgcaatctcatctggtcactaccctccaaccaagagtaaccatctactgactttctatttacctattactgcttgcaggaagtgtaacagtagccagtagccattaaatgatagtccctgatctgcagttcttcagtttccttcttaggctacagccactaaaggtgcaactcattctcatcaagatacaggaaatcagcaggaaggatttttttttttttttttttttgagacagggtctcactctgttgctcaggctagagtgcggtggtgtgaccatggctcactgcagcctcgacctcctgggctcaaacgatcctcctgcctggggaatagctggggctacaggcttgtgccatcatgcccagctaatttttgtatttttttgtagagatggtgtgtattaatctgtcttcatgctgctaataaagacatatccaagactggtaatttataaaggaaagaggtttaattgactcacagttcagtacagctggggaggcctcaggaaacttacaatcatggtggagggggaagcaaacacgtccttcttcacatggcagcagcaagaagtgccaaacaaaagtcggaaaagccccttatgaaaccatcagatctcgtgagaactcactcactatcatgagaacagcagcatgggagtaacggcccccataattccactacctcctactaggttcctcccatgacatgtgaggattatggaaactataattcaagatgagatttgggtggggatacagccaaaccatatcatggggt

SEQ ID NO: 709658 - DNA, 1287 bp, Homo sapiens
gattatttacatctggaaggcaaacattatgtaaatgtttattcttctcacatttgtttagagggactcagaattatccccaggtggggaaatctacattttattgtctctttttgtagtgatcctgtcccatttgtcaggctatgaaaggggaccacttgaaaggcaatcgcagaagggcttccaatgtcttcagtgacctttttggattttcaagaattcctgaaactgctagaacattcttagattctcgagatgctttaaaaaaaagttgtgttgggatgcttttataggaagcatacaataatgtaattgatgagrtcacaagcaaaattaactttaaagctagagatctcttttctgaaacattactgtcatttatataatttttcttctaatttgtttacattaaaaatccagagaatacaaatatctgagaaaaagagaaaaatggaaaaatatatgcaaaaaaagatgagaaagaaagattagaagaagttttgttttcatgcagataggatattagagtgttagaattgagatctctcaatttaccaagaagagagtcgaccaagaattggagtcgtttctctaaagcacagcagtcagcacgtggtccatgggaaggagatttccacgtgcttctctttcatctcattcattcccagctggaaggtcggaagaatgacaaaaggtcctggcaagagagatgcctcattgccattcttttctcatatatttggtaggttttagcaaatgatagaaagattttaaattagtttgcccacgctgccacaacggaatacttatttatgtattatgactgggtggcttaaacaacagaaatttattttctcacagttctggaggctggaagtcgtccagatctaggtcctgtggggtctctgaggaggcctgtcttcctggcttacagatgtctggcttcttgctgtgtgctctggtgatggagagagggagagagaggaagaaaggcagagagggagatggaggaggaagtgggacagggaaagggagagggagagagagcacactcttataaggacactaatcctgttagatcagggccacacccttatgacctcatttaaccataattattgccttagaagccctatctccaaatacagccacactgggggttagggatttagcatttgaatggggaaggccccaatattccatccttaacagactcgtagtaccttctaattttaaagaggattgatagtgctatagaaattctttccaaaaaatagacaggaaggt

SEQ ID NO: 709659 - DNA, 2341 bp, Homo sapiens
cacaaacagtttcagcaccgtgagcccctctcatcagttctggaaacaatgggaaccctcctgtaatcccagttcccagacgccagccaagggccagccttgcaagcagccttgctaaagagagccgtcccaggcctactgggttaagtcttttttgcacagaggcaaaaacatggctgccaatagcatctgggctttatattttagagtaatctttctcagttttatttccaaaattcccaaggaattggggatgtgcccagcttagacttgtcagggctgcttcttcggtgtttgtgcagactaaggtgggagaacgtgtccctccccatctgctgtgcgaacagtctgacaggtctctacacactttgatatttttgttcagaaagccacttttattccttgaagtttcatacctctgggcatgcacacaccactgagagtgggagtgggagcgggtgccccacagcacactggctcgtgagagaaaaccaaccagaaacacggccaccaggagaggactgtgtctcccacaacatgggaaagccttgcatctttattttgcaaacaaactccactgttgtcacaggttgtaggacaacacctgtgccactgaaaatgtcttcacagaccactgtgtcagaaacggtacagaagcagagaaagtgggtagaaaaggcctcaatagagtggaagcccacagtgccgcgcatctgctattgagactctatcatctaagtcagggaaaggaccactctratggcagtaaataaatcaaaggctttatgttctttgaattgtgcgtgtagccttcaagagatctgtctcaaaaaagaatataagaaacagagccccaagtgacctgatattttagaggctgcttgctattggctaagcagattttagtgcttgtttgtgggaactcagagacagaacaacagaagttgcctgcaacatgggtgttctttccagattcaaagcaaaattcagtgtggacacacaaagactgatttttttttctccaaaagagaagaagatataggtctgagctaacaggttaaaacctggttcaaagacgtcatctgtcccttaatgatagtgtaggtgtcgcctgctatctgaattcttgccatacaatttcaaaagtggaacagatacagatacattttcaagtaaatccctatctaaactcttctttcttttgatctgaaatgcaagaaccaaacaggaattcaagtaacagtaaataccggtatatattttcgtctaaaagatacttgcaagtatcttcatgccacccatggaggtgaagggtagctgtgcctcatcatgcctcctgggaggtaacagaggactcaggagagacttagagctgaattccacatgttcatcagagtgacttccagcccaagatcccccagctgagggaaagcagaaggcaaagcaaactgagcgtccctggcctggctgaggtctgagggcatcaggacagaggaggagacaaaggacccggtggcactacacacaacttgcagttgtcaacctcaaaactccagagcacccacatggcaatttctgggcacggccaggacctcagcactaatgctttagtgctagaaagtccctgtttcctgctggctgccagccagggggcccttcttggctccttctcacgtgccccctccctcttcaaaccaccaagaacaatcagagtccttctcatgctttgaatttccccaacttctgccacaagccagagacatcacttggcttctacaggggtttgtgattagtgggcatatccagaccatctccctgtgtcatataaagaggaggacattctaccatggagagtcatgggggttatcttcagaattcttcctgtcacacctaccctcccgactttctgtcccttcagaattcttactggaaattacaaatggaaatctctccatcgtaacagaaaactaggagcttaaactagactttcagatgaaagaaagggaggggtaggagttatctgagtcaggcctgcccttggcttggaaaacagccaacacacatcaggagtatgaaatttgaggactgagagtaatttagagggcctttccaggagtgacttattccaaaaagacaccagtgtgtatgagttgagcagaatgtgaggaagggcctcctaggagcgccattttgagcttagtgaactgggcctcacttcgtagtgagggcaaactcacatcctttcactgggtctcaatcctgggccactcgagatgtcaggcagttggcccggagctcggcaggtgggtctggctgcgatgctcacttcccagtgctgctg

SEQ ID NO: 709660 - DNA, 580 bp, Homo sapiens
tcctccctttgaatatttccagtgcctctggagtagccacggtgccacaattgatggtgcatcactggaggagctcccaccacgtaatgtattccagcctgagaagcctccagtcagggcttcagggtctgcaaaatgatttagagtcctgcctctccctcaccataaatccagaagcctgtacatcacatttcctgcaataaggatacgtgtacctgagcctgataaatagayagtcccccatctacccaccctagccttctgcctgctcttctccagaagaaacagcctcagctctttcaactcagcatattttaccctcttcctaccacccttctggctcccagagaagcatcccaggtacgcttgcttctgtcctgatgatcaggtattacaggctcattcatcgtgctgatgcgtgtcaacttcaggcccatgaggccaatttgatagccagaaaacatccttgtgggtggctcccacttgacctcccttctcaccctccactgggcctgggagttcactggtgtttcacacaggactgtcacgggaactgtgaaacgggttcctactccttcgc

SEQ ID NO: 709661 - DNA, 2349 bp, Homo sapiens
ggtgcagtggcacacaactatagcttgggccccagaattcaagactgcagtgaactacaatcacaccactgcgctctagtctgggcaacagagcgagattccatcaataaactttttaaaaatttttttaataaaataagtaaataaccatgcttaagcataatgcaaagggtcttgataataataaaactcagataaattgaagatgaaaataacttttatctgtaatttaatgttagttccaagcttcaacagaaaatgtcatcttattgtatagcttggtcaaactttgaagaaataaaaggaaatgatacatgcaatctccccacaaaagctaattaccctcaatgagttttccataggctacagtattaacagcttttcgtagactacagtattccttttattaagaaataaaaggaaatgatacatgcaatgtccccacaaaagctagttaccctcaatgagtttttcgtaggctacagtattaacctagttaacccatctttcatgagcttgttgcagaaatgaggcctggccaaccatctctgcatgtgtttggttgcctgtacatgcttgcttttgtggttgaaactcaagtgcttcctcccacacaatggaacagaaaatactttcatttcctgaaaaggtaaagtatcggcaaaatttcatatttattttatatatttgttttcttttatttaggtttacatttacctatttgatagattcttctatttctatcttagcagaatcagaagtttacatttatttaaccagtttctcaaatttgccgagtatcatttacatatttttaaaaactattcatctacacaagttctctgggttttgcctaaattctctaaatattttctgaaaataggcaaaacaaggtaaccaaaatctatcttttgtgatttgtagtctcagtctaacatatacttcaatttggccaaagtatgtttttgttttcctactacatacggagcaaggcaacattttaacatttatttatgttaagcctcaatataaaaaggatttgagtagtttacaaatgacaatgtaattatataatagtaatacacacctacattatgtgccagggagtgttcaaagatttctgcatgtattatttcatttaattttcctatgaccttatgaggtctctctattgttaccctcctctattacaggagagaaagctgagagaggctaactaacttgcccaagataaaaaattgaacagcaactaggatgagatttgaaccctagtggtctaattctagatccatgctcttgccattaatgacagagaaagaaaagatagccagggttaaagtcagcataagaaatgtgcattgaaaatgttgtctaacagcaaaaagtaaatcagacatttggctctgattttctggaaatcgaagaaagaaaacgacattatcaggaacaaaatacacagtgcccataaaataaaagacatatcaacaactcagaagacacttggcttctcctagctctaaaatctggtggacattatgagaaaaaaaaagagtattctaaaaataataataaataaacaaaaaatggagcacctactcaaattgccctagaagaaaactcagggaataacaccagaacctagctcagaggaggcacattttttaatgctcccaagcaatgttatccaagtakgtatgcctgatgatgtggcttgatcccagagtaaaatttagattatctcaaggaatgtatagactacatcttctatggcaatcttcccacatataacaatatggaatctcagaagttactgaacatctcatgagttaggaagcaaatactaatgttacattcactggtaggagagatggacctattttatcctgctgacttggaacatagctatctagtcaattgttcagcaaagcagaaggtaggaaggacacaaatcacttaactactctaagtttcagtctcctcagctgtaaaatagagaataatagtacctccttcatcatgttaccgtgaggattagataaaaatcatgtacaaaaagctcttagaatggtgtctggtactatacgctgattaaaatgttaattgttaccaatagtaggactactcctaaacccatatttagaaactctaaggtggcccttcaaaactttataaaacctagcaaattggaaccgaatattatggcttaaggaattaaaagtaaaatcttcattttgtcccaggaattaattactactcaagatccagctctggaaaattatatgtagattttgtgatctttgttactttttcaaaatgttttaaattaggtttaaatttttgtgaaaaaag

SEQ ID NO: 709662 - DNA, 442 bp, Homo sapiens
cagctactcaggaggcgaggcaggagaatcacttgaacccaggaggtgccggttgtagtgatccaagatcatgccattgtactccagcctctgtggcagagtaagactccatctcaaaaacaaacaaacaaataaacaaaacaaaacaaaaaacaccaccaccaacaaaaagaattcattgccaaaagacctacactacaaaataaaaagtgctttaggctgaagggaaattaaaatgtatggaaagaccttcagtaaaaactctggacactaaagctcaggtgagctacctggcakgtgatcatacatcaatgtgctaggaaggtgatgcatccccaagcataaattaaaatggaattcaaaaaaatattcaaagaatccaaaagaaggcaagaaaagaggaacacgggaacaaaacacaagaggcatacaggaaaaatga

SEQ ID NO: 709663 - DNA, 442 bp, Homo sapiens
cagctactcaggaggcgaggcaggagaatcacttgaacccaggaggtgccggttgtagtgatccaagatcatgccattgtactccagcctctgtggcagagtaagactccatctcaaaaacaaacaaacaaataaacaaaacaaaacaaaaaacaccaccaccaacaaaaagaattcattgccaaaagacctacactacaaaataaaaagtgctttaggctgaagggaaattaaaatgtatggaaagaccttcagtaaaaactctggacactaaagctcaggtgagctacctggcaggtgatcatacatcaatgtgctaggaaggtgatgcatccccaagcataaattaaaatggaattcaaaaaaatattcaaagaatccaaaagaaggcaagaaargaggaacacgggaacaaaacacaagaggcatacaggaaaaatga

SEQ ID NO: 709664 - DNA, 892 bp, Homo sapiens
gcacacactggttggggagagacacgggagtagggagagcagctatggcctgggagcactaccaggggaaaggcagctggtggagcaccttggaggaaattcaagcctccttggcaattagggaagattgattgtgtgtttacagccgtaatcacccatgtgctctgtggtctcagacttccatgtccctgcacttatcacacaggggccctgaaacatggcagtcactgaggactcagtctgcagtcgagatagacattagggagtggtgaggtttgtggtgaaccaaagctgcagacgcctttgtaagaagaaggtgacccctcaacttcagccaactgttgtcatgtcagaacactagcaaatcatcttgttttttcaaatatgaaaagtaggaattctatggagaacttcctggtttaaaaatgcaagaaaaattagctctttatctacaagcaagttgcagcctgcagatcacagtcgtgaacccccagatgagaggctcgtaacataatcctcttgccacgccctttgatgtgcaagcaccactggcaagaagtctggatagttttctcrtaagattctaaccagtcccagaggaaaaaaaactatttcttacttttctctgggagaatttatacactgattaaaggagtattaccatcttaagaccacttttctgccacttttactgcctcagtctgcagctcaacaacctgttcaaggctaggagttggaagtcatttgctatccccttctcctcgccctcacagccaatccatgacagagtattaagaatggatcacttcggtatctcatagatctatccttcccactcacatttcaggccatgccatcctcttgctgaagccctaactgatgcttcctaaca

SEQ ID NO: 709665 - DNA, 892 bp, Homo sapiens
gcacacactggttggggagagacacgggagtagggagagcagctatggcctgggagcactaccaggggaaaggcagctggtggagcaccttggaggaaattcaagcctccttggcaattagggaagattgattgtgtgtttacagccgtaatcacccatgtgctctgtggtctcagacttccatgtccctgcacttatcacacaggggccctgaaacatggcagtcactgaggactcagtctgcagtcgagatagacattagggagtggtgaggtttgtggtgaaccaaagctgcagacgcctttgtaagaagaaggtgacccctcaacttcagccaactgttgtcatgtcagaacactagcaaatcatcttgttttttcaaatatgaaaagtaggaattctatggagaacttcctggtttaaaaatgcaagaaaaattagctctttatctacaagcaagttgcagcctgcagatcacagtcgtgaacccccagatgagaggctcgtaacataatcctcttgccacgccctttgatgtgcaagcaccactggcaagaagtctggatagttttctcgtaagattctaaccagtcccagaggaaaaaaaactatttcttacttttctctgggagaatttatacactgattaaaggagtattaccatcttaagaccacttttctgccacttttactgcctcagtctgcagctcaacaacctgttcaaggctaggagttggaagtcatttgctatccccttctcctcgccctcacagccaatccatgacagagtattaagaatggatcacttcggtatctcatagatctatccttcccactcacatttcaggccatgccatcctcttgctgaagccytaactgatgcttcctaaca

SEQ ID NO: 709666 - DNA, 882 bp, Homo sapiens
tcgccaagaaaattaggtaccacatattttgattattcattctaatacattgacagtgtttatttagtattttattttacctatgagttatctcccattggaaatataataaaaagtaaaatcaacaaaatcagcattcctttgttcttttctagtatcagttgttacttctaagaccagttcccagaactacagatataataatattagtaataataataggaagaggaggacgaataagagtaaagaataacaataacatagaggaagaggaggagaagcaagacatcactcactcaaaaacacatatacaaaacataaatcaagcacagttctgacaaggagtaggtgtcaaatatacttgcctctcatctcccagggaaaatctgatttcattcttattactctagaatgtgtgagagtgtgctctgtgcattgctggtatggaaccatggagataactgattatgctttagtcaattacatagttacttgtaacattcccctgcaacaaaggaaatcatgtccattttcaaattgtcctcaaaagttggataaattctgaggattataaattcacttctcattgccctaaataatactctgtgtgtgtgtgtgtgtgtgtgtgtgtgtgtgtttaaaacaacagaggattagctatactcacaaattttatawacaagaaacatggaaattgctcctgtatttatgtaaaacacatttgacaagaacatatggtgaaattgcaggcactgtccattcctcattcttgcctgtgccaccattttgccttggttggcataataagaaattctaaaaagacctcaattcactaagtaagggataatccctagagtggggaaaagtgaaagtggggctaca

SEQ ID NO: 709667 - DNA, 1170 bp, Homo sapiens
tttttttctttagaaccaccataacctcagattcatctctccagagatcaaagataggcaaattaagaatgtcaaaagactttgctgaatgcagctccttataaagtatgtcaggattaaatgttctaaagccaagattatctagccccacctccaccctccaaaaaaggaaaaaagacaagaaaaaaaggcaccaatcctttaacagcatctgtgtatttacggagaacttactttgctttctcayccatccgattcaaaattgtccatgtggattttagttttgtggaagaaagctcattttttttgagacagtacccctaaatgtacacatttaagcccctgacacagacaatttgtatcattaaaatacttcatctgaagcacagggctttgattctttgatttgatttgacctgtatttacctcttgctttccctgtctccttttcttccatttagctacaattaactataacatgtctaagtcttcttcattcctgggctagcacgtccaagtatgaccatccatcattccattcctgtaagttttcctgtctcttggtatccacttgggtaaaacttgaattaagaaaagtgatttttgttttacatcattgggcatcttctattgcttctttaaaaaatgattcttagaagtcttgtgtacctcaccccagttatgctgttatatctgagatatttttcctctccaaaactaaactgagtcttttaaaaaggaatagagacctttgtagaaaaaaaaaaaatctatggtcccaagaatgggtaaacattccagagaggttcttgtttttccccctacaggtctgcccatccctacaaattgcattcttgtaagaatactctcaaagtgagtcacaacaacaaagtaaacagagggtttctcaacgtgacagaggaagaatttttttgtttgaatttgcatgttgtttatattttcaagcaggaactggaagaaagaggtttcactctcattgaggatatccagtcatgagttctttttaagctttgctgttggctcaattcccttcagcagtgcatatttggactgggggactatgactcaatttcccttcctttcacctcacttactctttcatccatctttcccaacacgccatgaggagattctttgccaatgttcatt

SEQ ID NO: 709668 - DNA, 1170 bp, Homo sapiens
tttttttctttagaaccaccataacctcagattcatctctccagagatcaaagataggcaaattaagaatgtcaaaagactttgctgaatgcagctccttataaagtatgtcaggattaaatgttctaaagccaagattatctagccccacctccaccctccaaaaaaggaaaaaagacaagaaaaaaaggcaccaatcctttaacagcatctgtgtatttacggagaacttactttgctttctcatccatccgattcaaaattgtccatgtggattttagttttgtggaagaaagctcattttttttgagacagtacccctaaatgtacacatttaagcccctgacacagacaatttgtatcattaaaatacttcatctgaagcacagggctttgattctttgatttgatttgacctgtakttacctcttgctttccctgtctccttttcttccatttagctacaattaactataacatgtctaagtcttcttcattcctgggctagcacgtccaagtatgaccatccatcattccattcctgtaagttttcctgtctcttggtatccacttgggtaaaacttgaattaagaaaagtgatttttgttttacatcattgggcatcttctattgcttctttaaaaaatgattcttagaagtcttgtgtacctcaccccagttatgctgttatatctgagatatttttcctctccaaaactaaactgagtcttttaaaaaggaatagagacctttgtagaaaaaaaaaaaatctatggtcccaagaatgggtaaacattccagagaggttcttgtttttccccctacaggtctgcccatccctacaaattgcattcttgtaagaatactctcaaagtgagtcacaacaacaaagtaaacagagggtttctcaacgtgacagaggaagaatttttttgtttgaatttgcatgttgtttatattttcaagcaggaactggaagaaagaggtttcactctcattgaggatatccagtcatgagttctttttaagctttgctgttggctcaattcccttcagcagtgcatatttggactgggggactatgactcaatttcccttcctttcacctcacttactctttcatccatctttcccaacacgccatgaggagattctttgccaatgttcatt

SEQ ID NO: 709669 - DNA, 1340 bp, Homo sapiens
acataaatgagttaggtttcataggagaaaagttaattttacttggtgtattttctactgaataagtttcatctgtgtatttgtgaatatttattaattataaactgtgaccaagcactatactaggtattggggatataccaagtcaaaaagttgtgcctcacctggagtttacattcagttttgttaaaaaaaaaaaaatgttgatagaagtcagtaagttggctgggcgtgatagctcacgcctgtaatcccagaactttgggaggccaagactgggggatcacttgaggtcaggagtttgagaccagcctggccaacatggtgaaaccccagtctctactaaaaatacaaaaattagctgggcatgatggcatgtgcctgtagttgcagctacttgggaggctgaggtaggagaatcacttgaacccaggagacagaaattgcagtgagctgagatagcgccattgcactccagcctgggtgacagcaagacttggtctaaaaaaaaaaaaaaattgataactctattagagtgataaggtttgtgtctagaatagatgggagataaagggtgagaagctgaactaggtttattgttacagcacagcaaattcaatcatttctttttgcccgaaatgtatgactaggtactaatacaatctgacttttttattaaaacatgtaatgaagtaattagggaggaaatataagccagtagattcaaaactgaggggaaaaataacaaaagttgtagtggatcaaagtagatttgtagatcaacatgctatatgagtgataytgctaaacagtaacaggtgtttctgttatgtgactcctgagccttaatttcctcatatgattatggtagtcataactgccaggcctactaaggttgcgaaaaacaaatctgttgaaattatataagaaagtacatttgaaaaagttgagaaatatatttgttgtatttgacatataactagattgactctgaaatgtcttctatctcaatagattcttgatgtttcagaagggtttgacttaggctttctgctacaaaagattgggaggatagtagcactaactggctttcttaagtgtaatgaggctcatatttgcacagaagttacaaaatctgtgattgtgatatattcaaggaattttatttttaaaaatgcctccaacttttcaataaaaaagtaaatagatggcaaattattctgtgtagagatgaatatctagatattaaaacttaaaagtatgattctgattacataatcaagtcataggctttcagtagtccttaaagtctgctttctatccttcagtgaatttttgaa

SEQ ID NO: 709670 - DNA, 576 bp, Homo sapiens
tgggcaacacttcattccataaaatagaatacgtgttccctggggtcagcttttctttcatgtgggacacygtctgaattaggaagggcctaatctgagaggcctgcaaaatgctagtcttttattgttgttgttgttgttgttgtttgagacagagtcttgctatgttgcctgggcttgtctggaactgctgggctgaagtgatcccctgcctcagccttccgagttgctgagatgacaggcagctgtcaatgtgcctggctcaaagtgctgtttatttttatttttatttttattttttatactttaagttctagggtacatgtgcacaacgtgcaggtttgttacataggtatacatgtgtcatgttggtttgctgcactcattaactcgtcatttacattaggtatttctcctaatgctatccctccccctgtcccccaccctctgacaggccccggtatgtgatgttccccaccctgtgtccaagtgttctcattgttcagtttccacctgtgagtgaggacatgtggtatttggttttccgtccttgtgatagtttgctcagaatgatgg

SEQ ID NO: 709671 - DNA, 576 bp, Homo sapiens
tgggcaacacttcattccataaaatagaatacgtgttccctggggtcagcttttctttcatgtgggacaccgtctgaattaggaagggcctaatctgagaggcctgcaaaatgctrgtcttttattgttgttgttgttgttgttgtttgagacagagtcttgctatgttgcctgggcttgtctggaactgctgggctgaagtgatcccctgcctcagccttccgagttgctgagatgacaggcagctgtcaatgtgcctggctcaaagtgctgtttatttttatttttatttttattttttatactttaagttctagggtacatgtgcacaacgtgcaggtttgttacataggtatacatgtgtcatgttggtttgctgcactcattaactcgtcatttacattaggtatttctcctaatgctatccctccccctgtcccccaccctctgacaggccccggtatgtgatgttccccaccctgtgtccaagtgttctcattgttcagtttccacctgtgagtgaggacatgtggtatttggttttccgtccttgtgatagtttgctcagaatgatgg

SEQ ID NO: 709672 - DNA, 611 bp, Homo sapiens
ggtgtcttccaggtgcaagtttctccagggctacaaaaagaatagcaggggctgagaattaccagagcgggcgtccttttcacttctcaagagggaaaagaggaggtacctgaagtgggaattgtggctgtcggaaatataatagcactcaaaatcaaattcatgacacaccccctatagktatctgcaacgatgtaaaactgtcaatgttttcatccacaaaggggaaaaaaactcagctatgatcatgtccttgggagacaattctcagggatctcttagggttagagctgggtagccatgcatcccaggctgcctaggacagcaccagttatgcaaactgtcccaaaataacgattaatagtgccccaacacactctcaaaagtatcccgatgtatgtggtcatcccataatcaaaatatgggtacacattaaaatcacacaggagctttgtaagcagcttgagtaaatctgaattcatgggggtgagatccaggcattggtagcggcgatttttttttaagcatggttttaatgagcagccaaggttgaaggcagctgtcctcggtagaagacacgagcctccttggtgagcaaaggggcatggggt

SEQ ID NO: 709673 - DNA, 611 bp, Homo sapiens
ggtgtcttccaggtgcaagtttctccagggctacaaaaagaatagcaggggctgagaattaccagagcgggcgtccttttcacttctcaagagggaaaagaggaggtacctgaagtgggaattgtggctgtcggaaatataatagcactcaaaatcaaattcatgacacaccccctatagttatctgcaacgatgtaaaactgtcaatgttttcatccacaaaggggaaaaaaactcagctatgatcatgtccttgggagacaattctcagggatctcttagggttagagctgggtagccatgcatcccaggctgcctaggacagcaccagttatgcaaactgtcccaaaataacgattaatagtgccccaacacaytctcaaaagtatcccgatgtatgtggtcatcccataatcaaaatatgggtacacattaaaatcacacaggagctttgtaagcagcttgagtaaatctgaattcatgggggtgagatccaggcattggtagcggcgatttttttttaagcatggttttaatgagcagccaaggttgaaggcagctgtcctcggtagaagacacgagcctccttggtgagcaaaggggcatggggt

SEQ ID NO: 709674 - DNA, 1677 bp, Homo sapiens
tcccccaggcacttgtatggctggatccctcatttctttccttcactgggctcaacacctgatcagggaggcattctccaactgccctttgttaaacagcaccctttccgctctcaacacaccttcccttctttatgttcttcatagcatctatcatcatatggcattctatatatttacctgttggctgccgctcccattaagtgtgagttccatgcgggcaacactgttcgtgcccctggtgcctagaacagcaccagacacatagtaggtattacaacataagcattcattgaataagtcagtacatgagtaactccctctctttttttttttctttctcacccccgtgattgcctggagagagtagctccctctcaatgattctcacagaatcctctctaggatggaggcgggtgctcaccttggcctggaactttgatctcatggacagcagaggtcctggtgcaactttaccatgccacaagcagttgtagcagtgcaattgtaaatctcaccagaaggtgacagttgccaaggtgacagcttctcatggtacgtgataaggaactgggtggagaggagacctagccttggaaagggagcaccataggagttggtgggagcaggtgaaaggcttggttccttgctccctgcctggtgcctggtcactgcagacactgagtcagggaccaaggggaggagggaggcagtcatcgtcatgacaggagcatcagtgaaactgctggcctggtatcgcctcctgggcctggactccatgtcctttgtctgtccttggtaccccagatgagtcagcaagatccagcctctgaggttcattgcagcacttcccctggaggcagattagaggatgttgcaggacattaagtaatacatctggagcaggcgcggtggctcaagcctataatcccagcactttgggaggtcaaggcgggcggatcacctgaggtcaggagtttgagaccagcctggccaacatgctgaaactctgtctctactaaaaatacaaaaattagccaggcgtggtggtgcacgcctgtaatcccagctactcaggaggctgaggcaggagaagctcttgaacctgggaggcaaagtttgcagtgagccgagattgcgccacaacactccagcctgggcgacacagccaggctctgtctcaaataaataaacaaacaaacaaataaataaataaataatacatctggtagggaaggaggctgggaaagccagcttgcagcctggggataagggtcatctggactgaacttgtctctgtatggaaccctacagtccaggaaacagatggggctgggaactgaggtggggcttccctagcctcagctgaaaatcagcattttagccgggcgcggtggctcatgcctgtaatcccagcactttgggaggccgaggtgggcggatcacaaggtcaggagaccgagaccatcctggctaacacggtgaaactccatctctactaaaaatacaaaaaatacaaaaaattagccgggcctggtggcgggtgcctgtagtcccagctactcgggagsctgaggcaggagaatggcgtgaacccgggaggcggagctggcagtgagccaagatggtgccactgcactccagcctgggcgacagagcaagactccgtctcaaaaa

SEQ ID NO: 709675 - DNA, 2423 bp, Homo sapiens
gccagggccacactcaagcaaggcaggccccagtcatttccaaggacctggacttctgggccagacttcaccactaccagagatatgctttcatctttcttagagggaaggcgttctgattccagcgtcctgctgagtccagcaccaacagtagtgcctggtaatccagctgcattccctgcacccacccacctcygccacccaggatgatagtacttacacggctgagtcatttaggcacagagagacccaaaccctactctctggagcttgtggatgcaaacgctgacatacctcccagatgctcagaagtagaacaagtagggacttagtggtccaaacaacatttacagcccagcctaccttctttcacggggagggagctgggaaagggagctgtggcctctccaaaggctgcacttggctctagatgtctgactgtcaaggagctgaagggctcatgtcagaatccagggctcccagtgtggatctggagaaagtcagctccaaaggggaggaagcaatattcctaagtaacaattattaataaggattcccaaacagatgagacatggaagacagatagggctctagttctgtctctgccatgaacagctgtatggccttgggaagtcactacacctctctgaactttggttatgtcagctctcacatgagacatgatctgctccacctcctttgaaggtggttgggatctgacatatatgaaagtggtttgaaaaagtttaaatggaaggatgttttcttattccgaatgaatgttctagaagggtaccaggcaaggtcttttaataaggaatattttctattttctggagaatgtgcttgtttaaatatagctgtgtggaagcaggctctggaacacaggacctcggcctcccactgtgtctgtctcttggtgggacgaaagaagcttgtgaaatacagctggggctttttagggggagtctgtccactccaaggaacctgctggagtcgcagcagagattctaggatgccgtgcaaataccagtggagctcctacactgatgggtgcttagtgtcagggttttaaaaggcaaagaccctgcccgggaagatcttggagtgcaatggatgaggcagagggtctcagaaagcaacaaaaggtaagagccaaagcagaggcttatgtgtacggaggagattaatcaatgctagagaaaccagggaaggcttcaaagaagaggagccaagtggcctatacagatgccaatggtcgtgacagactcatctgagccaaggccagggcagaggattcgtatttgagatcatgggaagaagttgggtctaggaagctgtgaggcaaaagaagccacaggaggaaggtgctgcagaagcacaagcagatcaccagccagggaaacaggggccagagattgcagtcagcatccctgagtctagagcttggaccacgtgagagtggagcccacctacaaacagctcgggaacatccaaagcttctaggttgacccatggatctatggcctgcattttttcctcagtttcacgggccacctggtgtagggcacatggaatgatcctcctgacttaaaggaccaggttcagcacagacagtgaataggacttccaaagatggagatgggagatgatgggtgggaaggtaggggatgaaatgccagtgaaggcccctgtgtgatgacaggcccggcatgggatggtagaggccactgtcagaatcagggaaggctgcgaaatctgatgtgattttatttggtgagggtgggggttaaaatgaaaggcaaggatggaaagtcagggaaggccagcgcttaatgcacacccagaaatctggactttatgctgcaggcagtggggagccgttggctggttttgagaatatctcacatggctgattcttctggcaacaatgtggggaaactcaggtgaaaaagacctcttggcaagaagaaatagagaccttaacaagagcaggagtagtagagaataaaatatttcaaagaaattctggaggcagaatcaataatacctcgtgataggttgaaaatgggaaccaggcatgaagaaaaagcccaaggagattttaaattgcaaaagctcgtgttgaggaagatggtgatataaacagagaaaatacaggactcaaaattggaaatatgaaaagcagaggatgtttatgagaaaaaaatgatgaattcagttgtaaatatgttgaaattgaggtatgtgtcaggtcacctgtgtgtcagcatccattagatatttcgaaacacaagtctccagcgaaagagggaggtagattggagatgagcaacaaagtcatggaaataactgatatttaaaaggagagggtgtaaaataaaaggagaaaagggcttgaaaagaaaaccatgagacatgca

SEQ ID NO: 709676 - DNA, 2423 bp, Homo sapiens
gccagggccacactcaagcaaggcaggccccagtcatttccaaggacctggacttctgggccagacttcaccactaccagagatatgctttcatctttcttagagggaaggcgttctgattccagcgtcctgctgagtccagcaccaacagtagtgcctggtaatccagctgcattccctgcacccacccacctccgccacccaggatgatagtacttacacggctgagtcatttaggcacagagagacccaaaccctactctctggagcttgtggatgcaaacgctgacatacctcccagatgctcagaagtagaacaagtagggacttagtggtccaaacaacatttacagcccagcctaccttctttcacggggagggagctgggaaagggagctgtggcctctccaaaggctgcacttggctctagatgtctgactgtcaaggagctgaagggctcatgtcagaatccagggctcccagtgtggatctggagaaagtcagctccaaaggggaggaagcaatattcctaagtaacaattmttaataaggattcccaaacagatgagacatggaagacagatagggctctagttctgtctctgccatgaacagctgtatggccttgggaagtcactacacctctctgaactttggttatgtcagctctcacatgagacatgatctgctccacctcctttgaaggtggttgggatctgacatatatgaaagtggtttgaaaaagtttaaatggaaggatgttttcttattccgaatgaatgttctagaagggtaccaggcaaggtcttttaataaggaatattttctattttctggagaatgtgcttgtttaaatatagctgtgtggaagcaggctctggaacacaggacctcggcctcccactgtgtctgtctcttggtgggacgaaagaagcttgtgaaatacagctggggctttttagggggagtctgtccactccaaggaacctgctggagtcgcagcagagattctaggatgccgtgcaaataccagtggagctcctacactgatgggtgcttagtgtcagggttttaaaaggcaaagaccctgcccgggaagatcttggagtgcaatggatgaggcagagggtctcagaaagcaacaaaaggtaagagccaaagcagaggcttatgtgtacggaggagattaatcaatgctagagaaaccagggaaggcttcaaagaagaggagccaagtggcctatacagatgccaatggtcgtgacagactcatctgagccaaggccagggcagaggattcgtatttgagatcatgggaagaagttgggtctaggaagctgtgaggcaaaagaagccacaggaggaaggtgctgcagaagcacaagcagatcaccagccagggaaacaggggccagagattgcagtcagcatccctgagtctagagcttggaccacgtgagagtggagcccacctacaaacagctcgggaacatccaaagcttctaggttgacccatggatctatggcctgcattttttcctcagtttcacgggccacctggtgtagggcacatggaatgatcctcctgacttaaaggaccaggttcagcacagacagtgaataggacttccaaagatggagatgggagatgatgggtgggaaggtaggggatgaaatgccagtgaaggcccctgtgtgatgacaggcccggcatgggatggtagaggccactgtcagaatcagggaaggctgcgaaatctgatgtgattttatttggtgagggtgggggttaaaatgaaaggcaaggatggaaagtcagggaaggccagcgcttaatgcacacccagaaatctggactttatgctgcaggcagtggggagccgttggctggttttgagaatatctcacatggctgattcttctggcaacaatgtggggaaactcaggtgaaaaagacctcttggcaagaagaaatagagaccttaacaagagcaggagtagtagagaataaaatatttcaaagaaattctggaggcagaatcaataatacctcgtgataggttgaaaatgggaaccaggcatgaagaaaaagcccaaggagattttaaattgcaaaagctcgtgttgaggaagatggtgatataaacagagaaaatacaggactcaaaattggaaatatgaaaagcagaggatgtttatgagaaaaaaatgatgaattcagttgtaaatatgttgaaattgaggtatgtgtcaggtcacctgtgtgtcagcatccattagatatttcgaaacacaagtctccagcgaaagagggaggtagattggagatgagcaacaaagtcatggaaataactgatatttaaaaggagagggtgtaaaataaaaggagaaaagggcttgaaaagaaaaccatgagacatgca

SEQ ID NO: 709677 - DNA, 1224 bp, Homo sapiens
tgacctctctctcaaacaaacatccaggaactatctttattatctaaaggaatttatcactaaaattttattagaacacctagtaatgaaaacaggacagtccaattaactgaatatgacttacaagcataatagggaggaacagcctagttgggaaaggctccaaagaaaagacaggatttgaggtgagtcttagagaatgggtaggatttgaatacaaaaggggagaggaagagaaagaagacaatagtctagacacgggtaatagcataaggagaggcaaaacagtcatgatgattgtgagtgagtaggacaaagaaactagcttggtttgcggggaggctatgtactgggaagtagcagaaaaatcaaactgaactggtagagcgcatcctagggtacaacagataatgggatacaatagggaaccactgcaaatattcagtaagagaatgacatgatgacatgggagctttaagaataagtttggaaacaggccaggtggaatggctcaagcctgcaaccccagcactttgggaggctatgggaaaggatcccttgaggccaggagtttgacaccagccctgacaagagagtgaaacctcatctccacaaacaaaaaaragaaagaaatagtttggaaacagtatagagatgacttggaaatggaagtataaaaatgggaaccctagatagaaagtacccattacttataagtaatccaaatttgagatgacaactgagatgataaaggaaaccaagagaaagagatgtatacaagaaagtaactatggttatgtctcatgacagactagataaaggcagataagagaaaaggaagacacaagtatgactctaatgtgtcaagactggatgtcgttaatagcgatgctagtaaaagtctatcaagttgggagaaataatttagtaggcaagacaaggaatttggttttgctattttgaatccagagattgtttaacaaaccttcaatgaaagtctagtaggcagttacacataggtgaataaaagtaaaccaagataagatttcagatacagatttagtgacataaatcactactgggggaaatcaacaagactttaaggccaaaaaaaggaagtgtattgttgcttccattaactactgaagaacagcaaaataaacactatagacaatatcctctactaatggctaataaaatgactggagtttaagaacaacttag

SEQ ID NO: 709678 - DNA, 583 bp, Homo sapiens
tcatttaatttttacaacaaatatccccattttagaaggaggaagctgagaatcagagaggttaattcagttgctcaaggtcacacagctggtaagtggcaaagatttgayttgaaacaagttctgtctgaagagcccacactcaactgctatatcatattgccttccagaaactagtgacacaattaaggcaatgtgatggcaagagggcagtgattaaaaacacgcacactccagagccagaatgcctagaattgtacctgctctaccacttacaagctgtgtgaccatgatacagtgtcctcatcgagaaaatgaggatgataacagtatctatctcacagagctgtcatgaggattaaatggattaatataagaaagtaaataaagaatgcctgccacacggtaatcactatataaatattggctattactattattattccttcatatgtccaaaagaagccattatcacacatctcaatatgagtgtctatcaggtgttggctagcttgtcacctagcaaagctccgagaagacgtagtataggatttgtgtgggagggggattatgacgaagggca

SEQ ID NO: 709679 - DNA, 2071 bp, Homo sapiens
cagaagatgaatgaaagttggaatagtgataagtaaagtcatgggagtggataagagtgaatttgaaactgaaagtgtaaaacacatttacatacactgatatagaataccaggaaactggagaaagttagagaggcaatagcctagatatcttggccgtgccatgagatatgacagagtccagagcctccttctgaattcatctaccctatacccttactacttatccccttctcaattttcattctgccagagagccccacagagcaaagcatcaaggtaaatcaaatatgaactagcgcagtgtatcactgtgtagatcacaaatattcaatgccttaaatacgtccacttagaatttgtatgaaagtgttcactcattcatttgttcaacaaatattgatgaagcacctaactatggagcaagcactgttttaaacactagagatagaaaagtgagcaaactctgcctctgagagtttacattgaggtagagatactcagacaacagtaaacaaacaagaaacagaggatgagagttctctgtgtactatgagagaaataagcaaggtaacaggagcagacaggaggctgatttaggtagcttgatcaagcctttgcttgcctcaggccccaaagggaagctaatactaccatatcacctgcctgggccgctaacacacaccttgtttatgtgatcccattctttctcactggtgatagagacagctgtcctctcaagaatccccattgctcagtaccaagttggtaacaaattaatctactgagcagaagagttcaaaaggggttgtacaggagcatagtatttaacagatgaaagcttttagcatcccagccctcacgctggtttgttgatgagtttttaatttcttcctcatggcttctaggatgaaataccaagtaagagaaaaagcaagaaagtcattcatttgacccctaaaaacctggaaatttttacccttccctgacacaaataaaaaagaaatctcatcaaataatgcctaagtatttctatagcatatattcttccatggaaagaataacctatttcataatagacaattgtattattgttctggaattccaatttggaaattcagatcttaggccactggattaatactaaagttaaacatgaaaaaatatgtaagtacttgggttggagtccaacactgtgctttataataagatctgagaggaatcacaaaacctctctatcatcgagccaaaggggttaaatgttcaccactagacctttgttttagtgttatctccataagatctctattaaaatgtatttgttaccttgtcaaggggatgataccaagaaccaatgcattttgaggcaaaagtgaaaggctgagacagcattgggaggcactttgtaggcagaacagattcaggtggcaaatgccacaaactgtgacaaggcagtgtgatgtcattggcaccttgaagaaggaatatcactaggaagcatggaagataccaggagaaacattgactcctggaaactagaattggcagaaccttaaagttgagaaggtcaaggctctttcttgaggaaaactgggtccctgggagaaaaggtattttagaacatagaaactgaaaattgaaagaaactcttgagattgggcacaattctcaatattactcagtcataatagaccccagagaggcttctgaaaagtacagattcccagacccttccccttcccaccaccagcaactttgattcattatatcttgggttattctcagaaaactttttttaaaaattgaaataccatttgacccagcaatcccattactgggtatatacccaaaggattataaatcattccactataaagacacatgcacacatatgtttattgcagcactgttcataatagcagagacttggarccaacaaaaatgcctgtcaatgatagactggataaagaaaatgtggtacatatacaccatggaatactatgcagccataaaaaaggatgagttaatatcctttgcagggatgtggatgaagctggaaaccatcattctc

SEQ ID NO: 709680 - DNA, 2074 bp, Homo sapiens
cttcctcttttagattagtatatggctaacatagggcttctatattcagaactgtcattcatagaaagcaagctgctgggagagtaaaaacaaatgattcaaaccttaaaaagctttgcttaaattaaaaaataaaaycaatataaattaagttaaaatgaagagattataaaatttatgctgcattttagagtgaataagaatgtatactttgcatgtcacattatttagaaattattgccaaattaataaaacagaatgatatttcaaattaaagaaatatacactagaggaaaaacaattcagaattactgtctctattttcaagagtcaaatactttttttttcactcggatcttcaaatcactattctttcaaaatgcttttgatttccaatgcatgtaaatgttactccatttcttttattttaatggcattttttcttattatttattattcaacacttagtcaattcactctccagaaataagctgtaggggaaaatattaacaaatttcaggctatgaataatttatttagatgctattgtcagaggcatgtgaaccagaacaactccatcttgaataggggctgggtaaaatgaggctgaaatctactgggctgcattccccgatggttaaggcattctaagtcacaggatgagatgggaggtcagcacaaaatacaggtcataaagaccttgctgataaaatgggttgcagtaaagaagccagctaaatgccaccaaaaccaagatggccacaagagtgacctctagtcatcctcactgctaccctcccatcagcctcatgacagtttacaaatgccatggcaacatcaggaagttaccctatatgatctaaaaaggggaggcatgaataatccaccccttgtttaccatatcatcaagaaataaccataaaaatgggcaaccagcagccctcaggactgctctatggagagaagccattctttattcctttactttcttaataaacttgtttttgctttgcactgttgacttgccctgaattctttcttgtgtgagatccaggaaccctctcctggtgtctggattgggacccctttcctgtaacacagtattatgagcttgatattagtgctataggctctgctgctagtatgtaatcttttgcatcttatatcttgttttacaggtgtctgggtcacatttgttagatgatttgccaagaaaataactcattgatgagttcagataccacctactctgggaaagcagtatggattctgctaaagcgcttcaatactcacttcctctgtgcttctctagtactgtcttcatacctctatagtacaaatttaactcatttttttatttaactttttatataactgtctctctccttcattagcctatgatatctttgacagtagactgccagtcttatgaaattttggacctcagtgagtggcgcaaaatctgacacaggtgtcatcaatacaaatttcctgcacccctggttaaattaaagtcttttaaaaaatgtgcctcatttctgacattctttacctaaagttcagagacagttacctttcactccctctatatattgcaaatatttgcaattcatagtggtaaaaagactgcattccagagtttgaatatctgcattcaaatttcaactctgctgctgagtaaccttgaagaagtttactgaacatcttcccaagtctcaatttcttcatctgtaaagtttgaagctaatagaagttactccatgggggttttgtaagaatcaaataaaaacaattatgtaaatctcttagtagggtgcctggcatgtaatacgcattttcacctttacgtagatgacaatgtttctgtgtttaacataagctgtcattattactgttgttcctattagctactgaaatatttaactttctgtgtaattagatattaaattttaaataacaatgcaattgtattatgggaggaaggctgtgaacttaaggtagctttggaaaaattccaggtaattttctagctgaaagttaacaatatcaacaagaagaagtcatgccaggattg

SEQ ID NO: 709681 - DNA, 1579 bp, Homo sapiens
ggattgcatatattctcaagcagtagtaagtagggagattgagataaagcccattcttgttccctcgtccttgctttaggtccactgtgttttgacrtgttttatattataagcttttgtataaagctttctttgacaaaacaaaggttcctataatgaatctcattgtttttaactggaacacctgaaatgacagagagggaggccaaaatgttcaagtaattatgaaaatttaaagttacatgattaaattgtgcaacactgtaagaatccctataaagtttgatcaccatatcttagagtcctaggctttgaactttatcctttttctttcctttaaatcaccttaaaactatgtaagagataagcaatgtggggctatacagattaatccaccacagatcttggtataagaagctgaaatctaataggtaagatgttaactttgtgatccttcaaataaagagagatttttacaagtcagttgtttggagctcaggggagagatttgggcacaagagttaaatttgagtgttgtcatatgtatggtgattggaaccatgggtttggataaggaagcccaagaaaagagagtctagcaaggagaagattttaaggactggtcttaaagaactactggatttaagactggaaagaaggctgagctggagaaggaaatggagaagaagtagccagatgtattagaagaaaactaggatggtccatgtcacagaaactaatgaaagagctacttaacaggatgagtagaaaacaatgtcaggtgctactgaatgatcaagtaagatggagattgaaaatgttaattggattttgcaatatggagattacccttaacattggtgacccagggaactcattttaggttctatttcacacaagccacgttttcagacattgacattcctaaaccgtattttgtatgctgaatctagcctttctttctttagcagaggaacagcttgagttattacttggtggctttgctgctcaacagttaagcttcaacagtgttgtgtttttatatcctgttttttttttgtgggggggaatactgtataaatataaatgtacatatgcatgtatttgttgtgcttttgttttataataattaaaaattgtcagtgataagcatatattttgaatgtggtacaactgagatcaagatcatgaagtatcctgcaaatagaaaatccttgatattgagtacttaagattggttgtttttcatttcatttgagaatgaaaagagaaaactcaacatgtgaaaatgctggaatacataagtcaaaaagtgggatgaaaccagggtgtaatttttttttttttcccagcactgtggcaatctctcccctcctccgttgtcccctgtcttcctttgtttgacttttccattttcagttttctatcttaggaccctatctgcagtaaagatctactcttctttgtcctttctaaattgctgtatcttcatcaataaagtgattaatatttgcttcagtgagatggtgggaagatacataaaataatttctgaaaagcacttagttcagtgtctgacc

SEQ ID NO: 709682 - DNA, 650 bp, Homo sapiens
gacttgctacccactgtagcaatttcatcatgagaagttaactactctaaagattatcatttgttcctctttactcttttgtttatgtgtatttaatacaggcaatatttcctttgcataagtgtgccaaagaggcagaaggagataagcattgagaaactggctctatatgataaacagctagcaatgaggaagaatgagagggagaaaagcctctctggccaagacttgaggagaaatttgaaggtttggaatatgtgagactggagtagctccagagtacaagagaactgaaagaaataaaaatttatgggctgggcgtggtgcttcatgccggcaatttcagcactttgggaggctgatgtgggtggattgcttgagctcagaagttcaagaccagcctgggcaacatgatgagaccctgtctctacgaaaaatacaaaaattaaccaggcatggtgctgcacgcgtgtagtcccagatactaaggatgctgaggttggaggatcgcttgagcccagraagtcaaggctgcagtgagttgagataacaccactgcacttcagactgggttatagagtgaaacctttctcaaaaaaaataaaaaagaatttatgagaaggaatgccgttggctatctgttgggacca

SEQ ID NO: 709683 - DNA, 844 bp, Homo sapiens
gtatgaatggggaaatacacatgtaataaaaatattgcaagatatttgttcatactcctggcataaaagaaagtatttcataagtgagatcctagagataacccactaaagtgtattaaaatcccaggactgggagaaacttcttaaagtttcaccttagctcagggtccagatagtctttcacaactcctaacttgctccttacctgcctggatttctgctctcttctgtccttctctatcagctaagctaagctcagtaagttgtttcttactaaagaaaaaaaattgaatcatactgtagggtctttgatcttatttgatccattccacccatgttctatatatcacgtactgagacccaggagggcaagtagcctacggttacctagctggtaagtgacagattctagaaaaaaatctggctcttagtccagtgttctttctactccatcatgctgcctctcatcctgtaggttttgtttcaaactcagtaacaccctgttttgctttttggtaatatttgcaatgatagaatcctatatactcaagagaaagaaagattttgtatataaacatctaatttatagataaggcttaagggtttgcaaagaaggaaaaattgtcagttgatctttactccatcagagtgatctgtaacttatggatcaatatttttcttcctgccaaataaaaattttacccatcctsatcaagtagctattagatagatgtgtgtatatttgcatatgatatataaatgtgttctcatgtacagatataaagaaaatacggtatgtatgcacgcagatcatttacaatatgtcctatgtgtgtatccacat

SEQ ID NO: 709684 - DNA, 1619 bp, Homo sapiens
gatagagtcactcacaggacaaatacaccaaggagatggaagggaagaaataaagaagtccaggacccggaggagagctttgtgcctgctgctgcacccctaggtcatcagagagagctgcagaagtactccagtgattctgagagcaccagaagaaccggcgatgctgcgttgccaagtgagcagaagctggaggagttgaaggcagaggagccaggtcacttcagcagcaaagtagtgcagaggggccgagagttctttgacagcagcgggaacttcccgtgcagaatctgagtcggggcttggcacgtggagatgcctcgtgaaacacagctgggcaagtattaatatatatggagcggcctggatttctgcgtatagataagcccccttggaatagaaataagtgatgagcctggactgtgggaggaaagagctgcgtggatagattcaaacttcctgcaaaagtgctcccagtctgagctctgtagatcttcagcactcacttcttcttgcatgggctctctgtatgttgaaaaccagcctgtgttgcatgtgttgttacaattctctgtgatatttgcaatatatgttgtttttttgttttgttttgttttttgagacagagtctctctctgttgccaggctggagtgcagtggcacaatcccagctcactgcaacctctgactccccagttcaagtgattctcctgcctcagcctcccgagtagctaggattacaggcatacaccaccatgtccagctaattttttgtatttttagtagagccagggtttcaccatgttagccaggacagtctcgatctcctgacctcgtgatctgcacgtctcggcctcccaaagtkctgggattacaggcgtgagccacagtgccgggccgatacttgcaatatatgtttgagaggaagtgaaaagtttgccttctgacctcatttccttcttgatcagtgaacactaacagttttgggacaacttagtcgattggttttccttacaagcaaaataaaggaaaatgtagcagtcaaaataaataaataaataaataaacaggaaaaaaagaagaaactcattttttaagtttagcctcatttaaattattgatgaacttcagtgtctgatggcttcattatatctttttaatacacattacaatgaatgtatagtctttaaaattaaaaagattttaaaaggtttgtccattaactttttttttttttttttttggagagagggtcttgctctgtcaccctggctggagtgcagtgatgcaatctcagcgcactgcaacctccacctcccgggctcaagtgatcctcccacctcagcctcctgagtagctggactatgcctggctaatttttaaatttttggtagagacaggcgttttaccatgttacccaggctggtctcaaactcctggcctcaaaccatcttcctgctttggcctcccaaagtgctgggatcacaggcgtgagccaccgcgcccagcccccgttttcttagtctataggtggagaaaacagttcacctccccgccacgtggcgtaagtgtgtttttgttctgtgttgagacagggtcttgctctgttactgaggctg

SEQ ID NO: 709685 - DNA, 1619 bp, Homo sapiens
gatagagtcactcacaggacaaatacaccaaggagatggaagggaagaaataaagaagtccaggacccggaggagagctttgtgcctgctgctgcacccctaggtcatcagagagagctgcagaagtactccagtgattctgagagcaccagaagaaccggcgatgctgcgttgccaagtgagcagaagctggaggagttgaaggcagaggagccaggtcacttcagcagcaaagtagtgcagaggggccgagagttctttgacagcagcgggaacttcccgtgcagaatctgagtcggggcttggcacgtggagatgcctcgtgaaacacagctgggcaagtattaatatatatggagcggcctggatttctgcgtatagataagcccccttggaatagaaataagtgatgagcctggactgtgggaggaaagagctgcgtggatagattcaaacttcctgcaaaagtgctcccagtctgagctctgtagatcttcagcactcacttcttcttgcatgggctctctgtatgttgaaaaccagcctgtgttgcatgtgttgttacaattctctgtgatatttgcaatatatgttgtttttttgttttgttttgttttttgagacagagtctctctctgttgccaggctggagtgcagtggcacaatcccagctcactgcaacctctgactccccagttcaagtgattctcctgcctcagcctcccgagtagctaggattacaggcatacaccaccatgtccagctaattttttgtatttttagtagagccagggtttcaccatgttagccaggacagtctcgatctcctgacctcgtgatctgcacgtctcggcctcccaaagtgytgggattacaggcgtgagccacagtgccgggccgatacttgcaatatatgtttgagaggaagtgaaaagtttgccttctgacctcatttccttcttgatcagtgaacactaacagttttgggacaacttagtcgattggttttccttacaagcaaaataaaggaaaatgtagcagtcaaaataaataaataaataaataaacaggaaaaaaagaagaaactcattttttaagtttagcctcatttaaattattgatgaacttcagtgtctgatggcttcattatatctttttaatacacattacaatgaatgtatagtctttaaaattaaaaagattttaaaaggtttgtccattaactttttttttttttttttttggagagagggtcttgctctgtcaccctggctggagtgcagtgatgcaatctcagcgcactgcaacctccacctcccgggctcaagtgatcctcccacctcagcctcctgagtagctggactatgcctggctaatttttaaatttttggtagagacaggcgttttaccatgttacccaggctggtctcaaactcctggcctcaaaccatcttcctgctttggcctcccaaagtgctgggatcacaggcgtgagccaccgcgcccagcccccgttttcttagtctataggtggagaaaacagttcacctccccgccacgtggcgtaagtgtgtttttgttctgtgttgagacagggtcttgctctgttactgaggctg

SEQ ID NO: 709686 - DNA, 1619 bp, Homo sapiens
gatagagtcactcacaggacaaatacaccaaggagatggaagggaagaaataaagaagtccaggacccggaggagagctttgtgcctgctgctgcacccctaggtcatcagagagagctgcagaagtactccagtgattctgagagcaccagaagaaccggcgatgctgcgttgccaagtgagcagaagctggaggagttgaaggcagaggagccaggtcacttcagcagcaaagtagtgcagaggggccgagagttctttgacagcagcgggaacttcccgtgcagaatctgagtcggggcttggcacgtggagatgcctcgtgaaacacagctgggcaagtattaatatatatggagcggcctggatttctgcgtatagataagcccccttggaatagaaataagtgatgagcctggactgtgggaggaaagagctgcgtggatagattcaaacttcctgcaaaagtgctcccagtctgagctctgtagatcttcagcactcacttcttcttgcatgggctctctgtatgttgaaaaccagcctgtgttgcatgtgttgttacaattctctgtgatatttgcaatatatgttgtttttttgttttgttttgttttttgagacagagtctctctctgttgccaggctggagtgcagtggcacaatcccagctcactgcaacctctgactccccagttcaagtgattctcctgcctcagcctcccgagtagctaggattacaggcatacaccaccatgtccagctaattttttgtatttttagtagagccagggtttcaccatgttagccaggacagtctcgatctcctgacctcgtgatctgcacgtctcggcctcccaaagtgctgggattacaggcgtgagccacagtgccgggccgatacttgcaatatatgtttgagaggaagtgaaaagtttgccttctgacctcatttccttcttgatcagtgaacactaasagttttgggacaacttagtcgattggttttccttacaagcaaaataaaggaaaatgtagcagtcaaaataaataaataaataaataaacaggaaaaaaagaagaaactcattttttaagtttagcctcatttaaattattgatgaacttcagtgtctgatggcttcattatatctttttaatacacattacaatgaatgtatagtctttaaaattaaaaagattttaaaaggtttgtccattaactttttttttttttttttttggagagagggtcttgctctgtcaccctggctggagtgcagtgatgcaatctcagcgcactgcaacctccacctcccgggctcaagtgatcctcccacctcagcctcctgagtagctggactatgcctggctaatttttaaatttttggtagagacaggcgttttaccatgttacccaggctggtctcaaactcctggcctcaaaccatcttcctgctttggcctcccaaagtgctgggatcacaggcgtgagccaccgcgcccagcccccgttttcttagtctataggtggagaaaacagttcacctccccgccacgtggcgtaagtgtgtttttgttctgtgttgagacagggtcttgctctgttactgaggctg

SEQ ID NO: 709687 - DNA, 2104 bp, Homo sapiens
attttccattaaaatatttaaatcttgtatgaatttttatcagattagaaatttagggcgtttcttaatttctctatactctagcttttgacttttttttttctgacctaagaggtatttagagcacattttagattttttattttgactaatcatttaaaatgtatactaatcttcaatttaaataaaaaactggtctatagtgacaaaaattacaaatgagcctaactaataaattatcagctgtgtttatatgtataggcatgcacagattttggtaaatatgtacatagtatattggtgagcttatttttgtcgttcttaactcattgtgtagtctaaacgttggggaaaaaataaaatacaataatcagatggcgtgaataagaaaattgttctaatgtttgtaaaccaagcaacggttttaactgctcccctcttcctgattgacttccaaaagggattaatccatattaggtcctgtcgtatatgtcacggtataacatctccagctataaaatggaaatttgagaataactttgctgctactcagatacattttatttcaaaaacatacactaaggtgttgctgttggatctttccaaaaacatattcacacagaactttcaatcacactgagccatatttgaacaatctttcaaggtgagctctggcataagctaacattataccatttaactcggaaatttctgtagtatttgattaatgggtttatgtttgatatgtaatgtaattttctaatgctaaatcaagtggtaattttgttagtcaagttgatttagtggcttgggaagaaagcttttaatgttcccctaatttttcttacctttgacatgatycttcacatgtcttattttgcttagtgatttttcttttttttttttttttgagacagggtcttactctaccacccaggcttgagtgcagtggtgcgatcacagctcattgcagccttgacctcccagactcaagctattcttccacctcagcctcccaagtagctggtactacaggcacatgccaccaaacttggctaatttttgtattttttgtagagacagagttttgccaaattttcaggctggtctggaatttctgggctcaagtaatcctgccttggcctcccaacatgctgatattacagacataagccacagtacccggccagttttctttttttaaaaatctattggttattaatttgaagccttccttttcatagctgtgctccttaattgggagcaaacatgaatggaccacaacttagccaattttctatatacgatctttgccatcctaatttaaaggaatattaattctttcttttcctctttcattccacaaacctgtattgactacatctaagttctaaatggtgcactggatgttgaaaaagttgatgatgagcaagaacaaaattccacctttcaggagacttacagttcaatatgggaaatataatttgttaaaatataaaagtgcaattgtgttacatgctgtacgaagtacatgttgacatgtgagcatataataaatgggctggaggccagaggattgccaaagagaatgggcctcctgctgagatgaaaagttgagcagggattagttggcgaaagtggagggacgaccctttctaggcaggaggaagaacatgtacagaatctctgaggtgtgatgcgacaaagtctatatgaaaaactgaagaaaggtctaatgtggcttaaatacagaagccagtaggagaggagtcgaaaagaggctggagaagtagaaagtgtctgcattctgcaggaacttatattgtataaaaagaatttctctttattctaagtgcaatgtgaagccaatgaagtgccttaaacaggtgatgtgatttgattgaatttattacttcacttaacaaatattcattacatgcccactgtttgtcagatattgctgtagcccctggtgatacagtagggaataaaacaggcaaaaatccctgtcctcttgcagcttataatggactgcaatgtttaatatgtcagaggaggtccacggaggagtgacttctaagcaagaatctgaaaaaaatgagga

SEQ ID NO: 709688 - DNA, 2104 bp, Homo sapiens
attttccattaaaatatttaaatcttgtatgaatttttatcagattagaaatttagggcgtttcttaatttctctatactctagcttttgacttttttttttctgacctaagaggtatttagagcacattttagattttttattttgactaatcatttaaaatgtatactaatcttcaatttaaataaaaaactggtctatagtgacaaaaattacaaatgagcctaactaataaattatcagctgtgtttatatgtataggcatgcacagattttggtaaatatgtacatagtatattggtgagcttatttttgtcgttcttaactcattgtgtagtctaaacgttggggaaaaaataaaatacaataatcagatggcgtgaataagaaaattgttctaatgtttgtaaaccaagcaacggttttaactgctcccctcttcctgattgacttccaaaagggattaatccatattaggtcctgtcgtatatgtcacggtataacatctccagctataaaatggaaatttgagaataactttgctgctactcagatacattttatttcaaaaacatacactaaggtgttgctgttggatctttccaaaaacatattcacacagaactttcaatcacactgagccatatttgaacaatctttcaaggtgagctctggcataagctaacattataccatttaactcggaaatttctgtagtatttgattaatgggtttatgtttgatatgtaatgtaattttctaatgctaaatcaagtggtaattttgttagtcaagttgatttagtggcttgggaagaaagcttttaatgttcccctaatttttcttacctttgacatgatccttcacatgtcttattttgcttagtgatttttcttttttttttttttttgagacagggtcttactctaccacccaggcttgagtgcagtggtgcgatcacagctcattgcagccttgacctcccagactcaagctattcttccacctcagcctcccaagtagctggtactacaggcacatgccaccaaacttggctaatttttgtattttttgtagagacagagttttgccaaattttcaggctggtctggaatttctgggctcaagtaatcctgccttggcctcccaacatgctgatattacagacataagccacagtacccggccagttttctttttttaaaaatctattgkttattaatttgaagccttccttttcatagctgtgctccttaattgggagcaaacatgaatggaccacaacttagccaattttctatatacgatctttgccatcctaatttaaaggaatattaattctttcttttcctctttcattccacaaacctgtattgactacatctaagttctaaatggtgcactggatgttgaaaaagttgatgatgagcaagaacaaaattccacctttcaggagacttacagttcaatatgggaaatataatttgttaaaatataaaagtgcaattgtgttacatgctgtacgaagtacatgttgacatgtgagcatataataaatgggctggaggccagaggattgccaaagagaatgggcctcctgctgagatgaaaagttgagcagggattagttggcgaaagtggagggacgaccctttctaggcaggaggaagaacatgtacagaatctctgaggtgtgatgcgacaaagtctatatgaaaaactgaagaaaggtctaatgtggcttaaatacagaagccagtaggagaggagtcgaaaagaggctggagaagtagaaagtgtctgcattctgcaggaacttatattgtataaaaagaatttctctttattctaagtgcaatgtgaagccaatgaagtgccttaaacaggtgatgtgatttgattgaatttattacttcacttaacaaatattcattacatgcccactgtttgtcagatattgctgtagcccctggtgatacagtagggaataaaacaggcaaaaatccctgtcctcttgcagcttataatggactgcaatgtttaatatgtcagaggaggtccacggaggagtgacttctaagcaagaatctgaaaaaaatgagga

SEQ ID NO: 709689 - DNA, 2104 bp, Homo sapiens
attttccattaaaatatttaaatcttgtatgaatttttatcagattagaaatttagggcgtttcttaatttctctatactctagcttttgacttttttttttctgacctaagaggtatttagagcacattttagattttttattttgactaatcatttaaaatgtatactaatcttcaatttaaataaaaaactggtctatagtgacaaaaattacaaatgagcctaactaataaattatcagctgtgtttatatgtataggcatgcacagattttggtaaatatgtacatagtatattggtgagcttatttttgtcgttcttaactcattgtgtagtctaaacgttggggaaaaaataaaatacaataatcagatggcgtgaataagaaaattgttctaatgtttgtaaaccaagcaacggttttaactgctcccctcttcctgattgacttccaaaagggattaatccatattaggtcctgtcgtatatgtcacggtataacatctccagctataaaatggaaatttgagaataactttgctgctactcagatacattttatttcaaaaacatacactaaggtgttgctgttggatctttccaaaaacatattcacacagaactttcaatcacactgagccatatttgaacaatctttcaaggtgagctctggcataagctaacattataccatttaactcggaaatttctgtagtatttgattaatgggtttatgtttgatatgtaatgtaattttctaatgctaaatcaagtggtaattttgttagtcaagttgatttagtggcttgggaagaaagcttttaatgttcccctaatttttcttacctttgacatgatccttcacatgtcttattttgcttagtgatttttcttttttttttttttttgagacagggtcttactctaccacccaggcttgagtgcagtggtgcgatcacagctcattgcagccttgacctcccagactcaagctattcttccacctcagcctcccaagtagctggtactacaggcacatgccaccaaacttggctaatttttgtattttttgtagagacagagttttgccaaattttcaggctggtctggaatttctgggctcaagtaatcctgccttggcctcccaacatgctgatattacagacataagccacagtacccggccagttttctttttttaaaaatctattggttattaatttgaagccttccttttcatagctgtgctccttaaytgggagcaaacatgaatggaccacaacttagccaattttctatatacgatctttgccatcctaatttaaaggaatattaattctttcttttcctctttcattccacaaacctgtattgactacatctaagttctaaatggtgcactggatgttgaaaaagttgatgatgagcaagaacaaaattccacctttcaggagacttacagttcaatatgggaaatataatttgttaaaatataaaagtgcaattgtgttacatgctgtacgaagtacatgttgacatgtgagcatataataaatgggctggaggccagaggattgccaaagagaatgggcctcctgctgagatgaaaagttgagcagggattagttggcgaaagtggagggacgaccctttctaggcaggaggaagaacatgtacagaatctctgaggtgtgatgcgacaaagtctatatgaaaaactgaagaaaggtctaatgtggcttaaatacagaagccagtaggagaggagtcgaaaagaggctggagaagtagaaagtgtctgcattctgcaggaacttatattgtataaaaagaatttctctttattctaagtgcaatgtgaagccaatgaagtgccttaaacaggtgatgtgatttgattgaatttattacttcacttaacaaatattcattacatgcccactgtttgtcagatattgctgtagcccctggtgatacagtagggaataaaacaggcaaaaatccctgtcctcttgcagcttataatggactgcaatgtttaatatgtcagaggaggtccacggaggagtgacttctaagcaagaatctgaaaaaaatgagga

SEQ ID NO: 709690 - DNA, 1058 bp, Homo sapiens
tgaggataaggtattgtatggtttgactgctttgccttggctggtcaacacatttgtacacctggataggcacagttttcagaaatcctttcaagcatctaccaattctcctgtctacaagtttaccttcctcccatttctcattcctaatgacaagggaaatatccagtgttatctgaagtggtcataaaagacattttttttctttttatgtgaggaattgaaacttatggctttagattatggggcttaccatcaaggaaagggcgtagcgtggtcagaggacaaaacttcttcctgcatttctcaggaagtctttgattagtgtgtccacctaggagcaattttttttggggggggcgctgggaaatatacttaagtgattaaatccaagtgtagacatgagagctttacctaaagccaggtctaattaccatacctgagaatcagggagtatttaaaatttgagaaataattttctatacttgaaagtcacttatgtaggtaggcctsagattataataaataacgtttattgtgctatactatgtggtaggtatgaggttaagtatttttacctatattatatcacttatttcttacaaatggagcaagggagcaagcaagcaagggaggtattattatccctattttatgtatttatgtatttatttttgatttctattcttttggtttttttgttgttttttattgatgtatcatagttgtacatgttttggggtacatgtgatatttttgatacatgtatacaatgtgtaatgatcaaatcagagtaatttggatattcatcacctcgaatatttatcttttctttgtgttgggaacattataatttttctctgctagctattttagaatatataataaattattgttccctatgatttctccattgtataattgaatactaaaatttattatgtctatctacatatccccagttcaataactataatttctctgctgtgcaatcaaatactagaacttcttccttcgaacgctatatccctaattcaataacaagtaaactgaagctc

SEQ ID NO: 709691 - DNA, 1058 bp, Homo sapiens
tgaggataaggtattgtatggtttgactgctttgccttggctggtcaacacatttgtacacctggataggcacagttttcagaaatcctttcaagcatctaccaattctcctgtctacaagtttaccttcctcccatttctcattcctaatgacaagggaaatatccagtgttatctgaagtggtcataaaagacattttttttctttttatgtgaggaattgaaacttatggctttagattatggggcttaccatcaaggaaagggcgtagcgtggtcagaggacaaaacttcttcctgcatttctcaggaagtctttgattagtgtgtccacctaggagcaattttttttggggggggcgctgggaaatatacttaagtgattaaatccaagtgtagacatgagagctttacctaaagccaggtctaattaccatacctgagaatcagggagtatttaaaatttgagaaataattttctatacttgaaagtcacttatgtaggtaggcctcagattataataaataacgtttattgtgctatactatgtggtaggtatgaggttaagtatttttacctatattatatcacttatttcttacaaatggagcaagggagcaagcaagcaagggaggtattattatccctattttatgtatttatgtatttatttttgatttctattcttttggtttttttgttgttttttattgatgtatcatagttgtacatgttttggggtacatgtgatatttttgatacatgtatacaatgtgtaatgatcaaatcagagtaatttggatattcatcacctcgaatatttatcttttctttgtgttgggaacattataatttttctctgctagctattttagaatatataataaattattgttccctatgatttctccattgtataattgaatactaaaatttattatgtctatctacatatccccagttcaataactataatttctctgctgtgcaatcaaatactagaacttcttccttcraacgctatatccctaattcaataacaagtaaactgaagctc

SEQ ID NO: 709692 - DNA, 935 bp, Homo sapiens
tttattttgctgtcatatataaataaaaatttagccaggtgtggtggcgtacacctgtgatctcagcttctcgggaggctgaggcaggggaatcactcaagcccaggagtttaagaccagcctggacaacatagtgagactccatctggaaaataataataataataattttctgagttataaatgaaaatttatctgacataaaattataggttcaaagtacatttccatcaacatttgaagaaaacactccttcagctttgttcttgggagatataatgtgattctcttgttcctctaaaggtggaagatgtttctcactagaggcttctagagccttctccttgattccatggtctcccatgtcagtgagatgtgtgcaaatggtgttttcttatgtatcacccctgacactctgtggctttttcagaaggaggctcagcatctcttgacagatcctagtgtattgttattactcaatgtttctttgagtattgttccccgtcagtctttctcacatctcctcctgggtagacatcggcaccctgtagttgcatctttcatttgtcttaatgtcttgctgggactttgggagttcggttggccatggtccactcctgctctcagccctgcccctggggcatcactgaatctgtcccctcccaaatttcctggmccttttttcctttggagcagccacctgccactcaaccactttgtccactcaggagctggccagcccgtgtgtacctgctactaccacagatatatactgcccctcgatcctcaaaaggactgggggccagttttgggacctaactaagcaaacaataagctgcaatactgtacacagtgactccctaggagcagacactgtaacatgagaagaatgacctctgtgtcaggggtctccagagaaatagaaccaacaggat

SEQ ID NO: 709693 - DNA, 1277 bp, Homo sapiens
gccagttttggggccagtttatggccagattttggggggcctgctttcaacactttttacttttattataatgtggctcctagaaagcttaaccttctttatgtgggtcgatttctatttctattggatagtgctattctagaccatcagttcccagactttgggatttcaagaacaagtaaaagtcctccatatttttactaccaacttgctactttcttaaataatggtgtctatttgtctatttctttccttcttttcttttcctttctttttttttttttttctttttttgagatggagttttggtctttttgtccaggctggagtgcagtggagcaatcttggttcgctgcaacctctgcctcctgggttcaagtgattctcctgcctcagtctcttgagtagctgggtttacaggcatgtgccaccactcacagctaacgtttttgtatttttagtagagatggggtttcaccatgttggccaggctggttttgaactcctgacctcaggtgatccacttgctttggcctcccaaagtgttgggattacaggcatgagccaccatgcctggcctatttatttctttacatttttcctactgcctgtataattgcagaaattaatgatgttttaaaaagtaatagtctcatcaggaaaggatgaaagggatggtcatcttaataccagaaatgcaggaagccatggttagaatgtagagttaaacaaaaaaactcatctattgccctttgattatttttccacaaatcattgagtgtttgaggagacccaagtgtgagttctctaaggagcctcttgggagkgcatccacatctgtggcttctcccttcctggcctgcgatcatctacaggatagcccagtgttgacacaggccgtgtgctgctgcctgccaggtaccaagctgagaactgtggacacgggaaaggggttgagggatgccgtattgtctaggactggagctggcaccttgctggtccctttatacactggttatcttaattttcacacacaaatgttgttattcatgtggtctggtggagggaacttaagtgtatggtcttataaactgtaaaaggggtggggcgctgtggctcatgcctgtagtcccagcactttgggaggccgagatgggcggattacttgaggtcaggagtttgaaaccagcctgggcaacatggtgaaaccctgtctctactaaaaatacaaaaaaattagccgcacatggtggtgcatgcctgtaatcccagctact

SEQ ID NO: 709694 - DNA, 878 bp, Homo sapiens
tattactttttttgagatggtgtcttactctgttgcccaggccggagtgcagtggcacaatcttggctcattgcaacctctgcctcccaggttcaagcgattcttctgcctcagcctcccgagcagctgggatttcaggtgcctgccacccatacccggctaatttttgtatttttagtagagacagggtttcaccattttggccaggctggtctcgaactcctgacctcgtgatccgcccacctcggcctcccaaagtgctgggattacaggcatgaaccaccgcgcccggcctattttaatttttaattgcagtaaaaaagcaaacgcataacaaaatttactatcttaaccttttaattttggccatgttgcccacgctagtcttgaactcctgggytcaagctgtcctcccacctctgcctcccaaagtgctggaattacagggctgagctacaactcctggccagtcttaacctttttttttttttttttgagatggagtcttgctttatcacccaggctggagtgcaatggcgccatcttggctcactccaacctccacctcctgggtttaagcgattctcctgcttcagcctccccagtagctgggatcacaggcgtgcaccaccaagcctgtctaatttttgaatttttattagagacggggtttcgtcatgttggccaggctgactgtgaactcctgacatcggctgatcggcccacctcagcctcccaaagtgctggaatttcaggcgtgagccaccatgcccggccagtcttaaccatttttaagtgtacagttcaatagcaccaagaatattcatgttgtgcatctggcatctttttgacaagcccttgtctttctttaaacactt

SEQ ID NO: 709695 - DNA, 948 bp, Homo sapiens
tttacacttctggtctgctgcccaggagaaaagtccacttagttcattacatacaggcaccatctttgaggcaaacgtccttctttcyatatttttaaattactttctccctacatctaagatcttaagtttttgcctttttttttttcccatgttatacttgcactgatcttaaacaggctctgctttcctgaacttaaagtacgtatattttcaatagcgttctttttatgttattattttaaagaaattaaggccaattcaaggttaaggctccgctggcattattatatctacttgtattctagagcattcatatgcatataacgatgggtgttcttatgaaagaatgtcacatatgtgcatgtcatctgctagatataagattgggaactgcagctatggcattcaaaatcttagaaaatactatgttacgtgatagtggaatctatgtttctaacatcataatatgacaccgattctaaaataaaaaaaacccaccaccgctaacaactaaaacacactttgcaacacaaaaactcacaaacctgaaagtacatcaaatttattaattgcccgttgaaatatttttgctttgagtatttgctgtagttgagagatggacaatgcccaggtaaatacatctgtatatagaactgatccacttcaaagcaatcacctttcccacagcagacatttgtttccttaagtggaaaactgatagaagtctacatttacagatatatatccaagcagtctaacattaattatattgtttatataacaccttcatagttttgtctaagatattgtcacccaccatgagtaaacatacacacttacacacacacacacacaaaatatatactgtatataggtaatttatttataatttatataaataaatatactgtggatctctctatatattgcattatatatattgca

SEQ ID NO: 709696 - DNA, 948 bp, Homo sapiens
tttacacttctggtctgctgcccaggagaaaagtccacttagttcattacatacaggcaccatctttgaggcaaacgtccttctttctatatttttaaattactttctccctacatctaagatcttaagtttttgcctttttttttttcccatgttatacttkcactgatcttaaacaggctctgctttcctgaacttaaagtacgtatattttcaatagcgttctttttatgttattattttaaagaaattaaggccaattcaaggttaaggctccgctggcattattatatctacttgtattctagagcattcatatgcatataacgatgggtgttcttatgaaagaatgtcacatatgtgcatgtcatctgctagatataagattgggaactgcagctatggcattcaaaatcttagaaaatactatgttacgtgatagtggaatctatgtttctaacatcataatatgacaccgattctaaaataaaaaaaacccaccaccgctaacaactaaaacacactttgcaacacaaaaactcacaaacctgaaagtacatcaaatttattaattgcccgttgaaatatttttgctttgagtatttgctgtagttgagagatggacaatgcccaggtaaatacatctgtatatagaactgatccacttcaaagcaatcacctttcccacagcagacatttgtttccttaagtggaaaactgatagaagtctacatttacagatatatatccaagcagtctaacattaattatattgtttatataacaccttcatagttttgtctaagatattgtcacccaccatgagtaaacatacacacttacacacacacacacacaaaatatatactgtatataggtaatttatttataatttatataaataaatatactgtggatctctctatatattgcattatatatattgca

SEQ ID NO: 709697 - DNA, 948 bp, Homo sapiens
tttacacttctggtctgctgcccaggagaaaagtccacttagttcattacatacaggcaccatctttgaggcaaacgtccttctttctatatttttaaattactttctccctacatctaagatcttaagtttttgcctttttttttttcccatgttatacttgcactgatcttaaacaggctctgctttcctgaacttaaagtacrtatattttcaatagcgttctttttatgttattattttaaagaaattaaggccaattcaaggttaaggctccgctggcattattatatctacttgtattctagagcattcatatgcatataacgatgggtgttcttatgaaagaatgtcacatatgtgcatgtcatctgctagatataagattgggaactgcagctatggcattcaaaatcttagaaaatactatgttacgtgatagtggaatctatgtttctaacatcataatatgacaccgattctaaaataaaaaaaacccaccaccgctaacaactaaaacacactttgcaacacaaaaactcacaaacctgaaagtacatcaaatttattaattgcccgttgaaatatttttgctttgagtatttgctgtagttgagagatggacaatgcccaggtaaatacatctgtatatagaactgatccacttcaaagcaatcacctttcccacagcagacatttgtttccttaagtggaaaactgatagaagtctacatttacagatatatatccaagcagtctaacattaattatattgtttatataacaccttcatagttttgtctaagatattgtcacccaccatgagtaaacatacacacttacacacacacacacacaaaatatatactgtatataggtaatttatttataatttatataaataaatatactgtggatctctctatatattgcattatatatattgca

SEQ ID NO: 709698 - DNA, 649 bp, Homo sapiens
tcttgactatggtggtaaatatgcaaatctacacatatgttaacattgtatagaactaaatacacatatgcacacacacacaagtaaaaccaggaaaatctcaataaaataggtgggttatatcaatatcagtattctgattttgatattctggtatatttttgcaagatattaccactggagaaaactgggaaaaaaggtacacaggatctctgtattattaatattgaaatattacactatttcagaaacaatacagatatgtcagcagcaccaatgttaagtgaaaacatatggaccagataattattgggctgtcaatctacagaaattgtaaaggttcaaacgagggatgatctctgggtagacaaaaggaggttatgtaggtgaatccaacacatgcatatatataggtacacaactcatcagaatttttgtggtgggagagaaaaatcaaatctgattaagrtagaaggtataattggtaatgaacagtacttttgctaattatctttactgtcctcccctgaagtatagtgaacagagaccaagtgagccaatatcttgtgtcatatggctatagaacaataaaaagtgaaaataaagtaacatgtattccgttttgttcattcccttgacgatttaaaat

SEQ ID NO: 709699 - DNA, 981 bp, Homo sapiens
aaatcattgtataaattaaagtagattttcattgtgttctatatggctaaactgtcatcaaatttacctgtacaaattgatttcagsgggaaaatggggcaattttcttcgtaaactgaaaaatgtgaaaacttgatgggactacaagtttttccatctcattataagtatttttaagattatcttcagacatccacttcttgcagcatagtagactacatatcttaacaaatgtcataataaaaataactgaaatataagcaatgattaaaaaattagagcccctaaattacttacaaatggatctttaatgtcaatgcaattgcaacaagaaactcagagtttgattgtacaacttaacgaacttattctgtaaattatttagaagagaaggaggcaagtatagttaaagtggtggaaatttctgtatcaaaattatagcaatttgctataatttttatacaaattgctttagcaatttatttatgaaataattaaaattgtgtaataagggcatagaaatagatacctagatctgtgaaacaaaattcagacatatatccacatgtatgtagaaataaacatatggcagaactgacattgtagataagcaaatgaatttctttttttataagtttggcttgtacaaagtgttaggaagaaaatatagaaatttatatccctaccccatttcacaaccaatattctgtttcaatggattaaaacttaaatgtgaaaccaatttattaaggaaagattgaatgtgaatttcttcttgaacctaggcagagaatattttagctaaatagaaagtctgaactgaaaaactgaatataaaaatattgaattgattaaagttaagagctgttcagcaaaaggcatgataaatcaaaagccatatttgaaatatgcatatttgatgaataaatgtccaaaatataatttctacaaatttgaaaagattacttttaataacttcat

SEQ ID NO: 709700 - DNA, 653 bp, Homo sapiens
gaaattatattttacaacatatataacgtagattattatctaaattaaatttgagcaattccattcatacagtttacaaatttaagtatatacttctgtaattgctatgaaaatcaaaatatagaatatgtctattactcaagaatattccctcatgctcctttgcagtacatctcttctcccaatatatgccacaactggcaaccaatgatctgcttgaaggtactccttactttactaggatttcatgtaattgtaatyatacagaatattgacttttgttcctcatgtctttcacatagcataattctttcaagattaattcatgttgttgtatataacattcccttttattgctgagtggtattctagtgtatagatgaaggaaaatgtgtttattaactagttgataggtaattttaggcaattgggaataaaacttatgtgaacatgctaacgtttaatttcagctgttacactttagtctgaaccattatgagttagttttatatgatgtgagggtaagcattgaggtatatcttttcacatgtagatatctgattgcatcaactcagtcttctgaaaattgaatccatttcctattgaaattccgtgacacatttgtcattaattgatcatgtatatgggtattt

SEQ ID NO: 709701 - DNA, 653 bp, Homo sapiens
gaaattatattttacaacatatataacgtagattattatctaaattaaatttgagcaattccattcatacagtttacaaatttaagtatatacttctgtaattgctatgaaaatcaaaatatagaatatgtctattactcaagaatattccctcatgctcctttgcagtacatctcttctcccaatatatgccacaactggcaaccaatgatctgcttgaaggtactccttactttactaggatttcatgtaattgtaatcatacagaatattgacttttgttcctsatgtctttcacatagcataattctttcaagattaattcatgttgttgtatataacattcccttttattgctgagtggtattctagtgtatagatgaaggaaaatgtgtttattaactagttgataggtaattttaggcaattgggaataaaacttatgtgaacatgctaacgtttaatttcagctgttacactttagtctgaaccattatgagttagttttatatgatgtgagggtaagcattgaggtatatcttttcacatgtagatatctgattgcatcaactcagtcttctgaaaattgaatccatttcctattgaaattccgtgacacatttgtcattaattgatcatgtatatgggtattt

SEQ ID NO: 709702 - DNA, 653 bp, Homo sapiens
gaaattatattttacaacatatataacgtagattattatctaaattaaatttgagcaattccattcatacagtttacaaatttaagtatatacttctgtaattgctatgaaaatcaaaatatagaatatgtctattactcaagaatattccctcatgctcctttgcagtacatctcttctcccaatatatgccacaactggcaaccaatgatctgcttgaaggtactccttactttactaggatttcatgtaattgtaatcatacagaatattgacttttgttcctcatgtctttcacatagcataattctttcaagattaattcatgttgttgtatataacattcccttttattgctgagtggtattctagtgtatagatgaaggaaaatgtgtttattaactagttgataggtaattttaggcaattgggaataaaacttaygtgaacatgctaacgtttaatttcagctgttacactttagtctgaaccattatgagttagttttatatgatgtgagggtaagcattgaggtatatcttttcacatgtagatatctgattgcatcaactcagtcttctgaaaattgaatccatttcctattgaaattccgtgacacatttgtcattaattgatcatgtatatgggtattt

SEQ ID NO: 709703 - DNA, 1443 bp, Homo sapiens
aaataaaaatgaaaacatgtgaattataggtcccagaggaaaaaagaaacaaaaataaaatgcaagcacaacttgctttagggaataaatgtgcaaaagagaacaatgcttaaaatggaaaggatttaatgtttgcttctggaatgtagtttggtcccttgatgcaacaagtaagttgtgatgaatatatttctatttaaaatctagacacacaaaaaagagattattttctgaaaacttcaaatgaatcaaaatataattgcatagtcatatagggatattaaatgtgtgcattaagaaaggaaaagacatgttcagtagggattaggaaatgaaagataaaaaaactctggcaataacttgaattttagccctggatatatattcaccatgtgaccttggccaaaccatctatacttttggaaacactgagtctttatgtgtaaaacaggagtaataatagttgcttggtgtttcttacgcaatggttatgaggatcaactaccatgatggaaaagacattgattgttaaatatcttgggcagtgcatgatctaagcaagctgccactagattagggtttgcatgggaaaactgtttgggaaggctatgctctctggacctgtctaaaacaattccacacctagttgactccacatactatagttatagttaacctgggaggctacaactatcagaggcagtttatttctttattatttctcatgaatatcttggaaagggagaatgtagaagtagggtttcttggggaattctattaaatttttttttcaaataacagatggaacattgagctccttcccctttgtggaaggaatacctaagtgcacaggctcagcaaagtaaggacacagaccaatgtagaaatctgcctcaacagagaaaataatgtatagtggattactggttaaattcacatagaaacaagctatttctaaggtgacacacaaagcaagccggaagtttcagggcatttggtgatcttgttggggtaaccatcataaaaggctggtagtcagtttcagtagtttatccagagaacaygccctgaagatttgattatcaccatccaaactcataaggaaccccacaaaataaaatataaatatatattaattacacatgcagtatatattttaaatcactatatttattcattcatttaactaatatatattaaagatctattatgtacgtgtagggatacaatagcaaaatattaaaacttgttacctttgtgagcagaaacagatagcagataatacctttgtgtgtgtgtgtgtgtgtgtgtatacatatatatatctaacatacatacatattgtaatgggttgaatggtggctcccaaaaatatattttcacactttcaacctggaacttgtgattgggaacttatttgaaaaaaaaagagtctttgaaata

SEQ ID NO: 709704 - DNA, 1443 bp, Homo sapiens
aaataaaaatgaaaacatgtgaattataggtcccagaggaaaaaagaaacaaaaataaaatgcaagcacaacttgctttagggaataaatgtgcaaaagagaacaatgcttaaaatggaaaggatttaatgtttgcttctggaatgtagtttggtcccttgatgcaacaagtaagttgtgatgaatatatttctatttaaaatctagacacacaaaaaagagattattttctgaaaacttcaaatgaatcaaaatataattgcatagtcatatagggatattaaatgtgtgcattaagaaaggaaaagacatgttcagtagggattaggaaatgaaagataaaaaaactctggcaataacttgaattttagccctggatatatattcaccatgtgaccttggccaaaccatctatacttttggaaacactgagtctttatgtgtaaaacaggagtaataatagttgcttggtgtttcttacgcaatggttatgaggatcaactaccatgatggaaaagacattgattgttaaatatcttgggcagtgcatgatctaagcaagctgccactagattagggtttgcatgggaaaactgtttgggaaggctatgctctctggacctgtctaaaacaattccacacctagttgactccacatactatagttatagttaacctgggaggctacaactatcagaggcagtttatttctttattatttctcatgaatatcttggaaagggagaatgtagaagtagggtttcttggggaattctattaaatttttttttcaaataacagatggaacattgagctccttcccctttgtggaaggaatacctaagtgcacaggctcagcaaagtaaggacacagaccaatgtagaaatctgcctcaacagagaaaataatgtatagtggattactggttaaattcacatagaaacaagctatttctaaggtgacacacaaagcaagccggaagtttcagggcatttggtgatcttgttggggtaaccatcataaaaggctggtagtcagtttcagtagtttatccagagaacatgccctgaagatttgattatcaccakccaaactcataaggaaccccacaaaataaaatataaatatatattaattacacatgcagtatatattttaaatcactatatttattcattcatttaactaatatatattaaagatctattatgtacgtgtagggatacaatagcaaaatattaaaacttgttacctttgtgagcagaaacagatagcagataatacctttgtgtgtgtgtgtgtgtgtgtgtatacatatatatatctaacatacatacatattgtaatgggttgaatggtggctcccaaaaatatattttcacactttcaacctggaacttgtgattgggaacttatttgaaaaaaaaagagtctttgaaata

SEQ ID NO: 709705 - DNA, 1443 bp, Homo sapiens
aaataaaaatgaaaacatgtgaattataggtcccagaggaaaaaagaaacaaaaataaaatgcaagcacaacttgctttagggaataaatgtgcaaaagagaacaatgcttaaaatggaaaggatttaatgtttgcttctggaatgtagtttggtcccttgatgcaacaagtaagttgtgatgaatatatttctatttaaaatctagacacacaaaaaagagattattttctgaaaacttcaaatgaatcaaaatataattgcatagtcatatagggatattaaatgtgtgcattaagaaaggaaaagacatgttcagtagggattaggaaatgaaagataaaaaaactctggcaataacttgaattttagccctggatatatattcaccatgtgaccttggccaaaccatctatacttttggaaacactgagtctttatgtgtaaaacaggagtaataatagttgcttggtgtttcttacgcaatggttatgaggatcaactaccatgatggaaaagacattgattgttaaatatcttgggcagtgcatgatctaagcaagctgccactagattagggtttgcatgggaaaactgtttgggaaggctatgctctctggacctgtctaaaacaattccacacctagttgactccacatactatagttatagttaacctgggaggctacaactatcagaggcagtttatttctttattatttctcatgaatatcttggaaagggagaatgtagaagtagggtttcttggggaattctattaaatttttttttcaaataacagatggaacattgagctccttcccctttgtggaaggaatacctaagtgcacaggctcagcaaagtaaggacacagaccaatgtagaaatctgcctcaacagagaaaataatgtatagtggattactggttaaattcacatagaaacaagctatttctaaggtgacacacaaagcaagccggaagtttcagggcatttggtgatcttgttggggtaaccatcataaaaggctggtagtcagtttcagtagtttatccagagaacatgccctgaagatttgattatcaccatccaaactcataaggaaccccacaaaataaaatataaatatatattaattacacatgcagtatatattttaaatcactatatttattcattcatttaactaatatatattaargatctattatgtacgtgtagggatacaatagcaaaatattaaaacttgttacctttgtgagcagaaacagatagcagataatacctttgtgtgtgtgtgtgtgtgtgtgtatacatatatatatctaacatacatacatattgtaatgggttgaatggtggctcccaaaaatatattttcacactttcaacctggaacttgtgattgggaacttatttgaaaaaaaaagagtctttgaaata

SEQ ID NO: 709706 - DNA, 659 bp, Homo sapiens
atgataggacccagtctcttggggaaagaaaaagtcagagagcagatttggggtagtggggcagggcaggtcagggtaagcatagactgctttaggaacaatgatcaagggaaggacaggaggaggtagcattgtacacaaagcccaaatgatgagcwggagccagctgtgggaagtatagggcagtggctgcaaaaacctgtctctgggctagacttctgatttgaagctagttcctggtgtgtaaacttggatgactttaccctctctgtgcctcagtttcctcataattgaaacaaagctaataatcacaccgattccattgcattgttttgaaaactccattaaatacagataaagtacttagacccatgcttggtatatagtcagcgctcaatgaaatattattttatttgtatttgggcaaatgtttatgagcagagcaagtactgagtgtaaaagtttgtagtgagaactagagtagcatgtcccatgaataaggctgataatgatgtggttaaagtaaaacttgcagtataggaattccaattagaaacttatactaagaaaatgaagttatgtaaaagtaaaaatgggatgctcattgcaatgttgtttataacagaaaaatcagggaatgggacagcatttcaaaaaat

SEQ ID NO: 709707 - DNA, 1317 bp, Homo sapiens
tctatctatctatccatctatcatctatctttccttctctctaaatctttatcctatcctattttacacacacacatagatcctcaacatacaaatttagggcctcaaaaccaatttctgaaaacagattgctttttcactttctagaaccgtagtgtttttgtatcattttctttctcatcaatattcatattggtcgactccattggctgagataaatttttatctagagggaatgtatggatatctccgcggaaagagaacagcattatcggatgttgtcttcttaaaaatcatccgtctcagtactgagcatattaccacagggaaaggtgattggagacagcacatgaggtgtggttttatccttgcgatttcagtttgtgttgtctagatggtcatcatcttttactctactgctaaaatccccatacttcatgtcattattatttagtaattaatatttagtgaggtacttaggtataagacactttacagactataaagacaagcaaaattttcttgcttttattattattattttttttaatttcccacagaacttgctagttatttgctacttagggaaaattgctggcacatttactctttaaacattaagtaaaggaaggatttcttaagagaaactctgtgtacttttcggacagtcagaagtgcaacgtctcattataccctcatctcctaaataaagggttcagattagatgctaagatttcacctacagttggaggtctctgtggcatcttaaatgagggtttcatgcctctgagtgccagatgaaagtgtgcagaggaccaagatgaggacctgattgaaaagttggttgagacacaagagaggtgaatgcactcctagacagctcttacataccaagtcagcactgggggatgtgggaggggaagcatgaaatttaaggttgagaaattttggcaattcaacccccaagtgccactgagccctcctggctggcagaaacagcccttcccactgcacaaagaagaaaggctcccatggtttggagaccatgtgcatgcgagaatctcacctcaagcaggtgcatcataattgctttcttgctcacctcaaacctcatccccaacaaagctttttagccccaggacaaaaacctgagtcaggggagtacagccttatttcaggaagaaactgctttcatggcaacaggataaatatacgtggttaatatggatttggatataaactgggggragatacacagaagtgagcaaaatggaagactaagcagaagaggatgttcaacgagggcagactcaccca

SEQ ID NO: 709708 - DNA, 843 bp, Homo sapiens
ttctgctgattagtgttcccaggagaggggaagacacatgccacagaatacagtgtgagtcccactaaagtggaagctacatctacctcctggccacctttagatcctcacggcaaaggatccgtgagtgaaaaggcagttgctccactggctggaatgttgaccctaatgaccgtgaagaggccgggtggccagcatcgaggaggctggcaggggaaaggatggcatggaagcctcttcgcacctccatggcytggcagtaactgtttcgggaaaaatatagcaattaaaagacagcaaaaggagataacccaagtgtttagaccttcatcaatcctggtctgggtcttctcaccaggcaatgaaccagacaggccaaagtgagggtaagggaagcctgacatgggtaataaaggggagagaagatgaatgtcccttacgtcttcaagccaaccacattagtggggcctgaggcttggtcactaatttgtgagctgaagccttacaggagataacaactagacatgaggttcagggagagaagagcccattacttgactgtgactttctcccccactcaggaaagaagtgcaggggggccagcgtccatagtggggaagctcaaccagtgccaggcagactcataaaccccctctggagatggctccaaggcatagtttctccttacacatcttccttaacatgttccatatgttgtgcaaccaagactactcagccccctgctgtctctatttacagcagagcatgcattcctggctggtgcagcaaagtgttctctctggacggctttccatccccattgccccctctccctcacctcca

SEQ ID NO: 709709 - DNA, 843 bp, Homo sapiens
ttctgctgattagtgttcccaggagaggggaagacacatgccacagaatacagtgtgagtcccactaaagtggaagctacatctacctcctggccacctttagatcctcacggcaaaggatccgtgagtgaaaaggcagttgctccactggctggaatgttgaccctaatgaccgtgaagaggccgggtggccagcatcgaggaggctggcaggggaaaggatggcatggaagcctcttcgcacctccatggccyggcagtaactgtttcgggaaaaatatagcaattaaaagacagcaaaaggagataacccaagtgtttagaccttcatcaatcctggtctgggtcttctcaccaggcaatgaaccagacaggccaaagtgagggtaagggaagcctgacatgggtaataaaggggagagaagatgaatgtcccttacgtcttcaagccaaccacattagtggggcctgaggcttggtcactaatttgtgagctgaagccttacaggagataacaactagacatgaggttcagggagagaagagcccattacttgactgtgactttctcccccactcaggaaagaagtgcaggggggccagcgtccatagtggggaagctcaaccagtgccaggcagactcataaaccccctctggagatggctccaaggcatagtttctccttacacatcttccttaacatgttccatatgttgtgcaaccaagactactcagccccctgctgtctctatttacagcagagcatgcattcctggctggtgcagcaaagtgttctctctggacggctttccatccccattgccccctctccctcacctcca

SEQ ID NO: 709710 - DNA, 625 bp, Homo sapiens
tgaagggaagttgtgcaggaagataattcagcagtggcaattcttagaaagcctcagaagctcacctggctcacactggagttgcaacgtttgttgcaacrattaacatggggtcagggtaaggagagggagccacggaaattctgttggattcattttggcgcagaggaggagaaaaagagtctatcaaagagctcatgaaagagatcgtgtttgaagggattcgtccttttctttcttcagtcgaaaaggggagggcatttgggctgtgaaggccagaagctaccccggtccgggaaaatactaaaaaagagaaaaatgcacacatacatgctcacatgcatacatatacccataatcattaaataaacaattttaaagttcaagagaaaagaaaactgtcaacagataaaaaatattgtttagcaaaatgctgttataaagcaattaaaaattaggagcatgttattctcctaatatgctctgcatatttcattctatgctattcgttgtttaacttttatcctcatttcaagaagccattctaccttcgacctcctaacaggttgaaataacctatttatcctatcaagaacatttcctctttttcttttacactctccta

SEQ ID NO: 709711 - DNA, 1498 bp, Homo sapiens
ttttattacttctatagtcactttgacttcggaagtcttcacagtctttttactgaaacactgggatggttttcatggaagggaagaagcaggcaggaggttaagaagaaaacaagaacatggagtcctcacttctcaggataaacactcattatactgtatattgccaacgggccggttggcaatgttctgataacttcacagattcatagattattcctgcattttatctttttgttgtgtctaataaccctgaaggctcaagttccctgaaataatcacacagcagcctcttacttattacaacatttagaaaattatattttatcctcccagatacttcttttgcccagctttcaccttcccttctaccctgtcaaaaattccttgagatttttttctctctcctgttcacacagtgaaataatccctgctatgaaatcttgcaggttccccaacccaattctgaatcgccacccccagcatcagtgctgtgcccttgactttgagtgagccgtgtggttccgggagccagggttgccttcctcagcattgtctcctcatctttcctctctcttctattattcagtgaaccaagaaccggtgtgtcttcagccggagaatatatttgatgatcaataccctgcatcctcatttcagactttctaagcatgtattttcaatgatctctgagaaaatttgaactgaaataatctctgtgaaagggtggtaggacttcttccaagttcttatcccaataactatcttggcacttgtcatcaccatctagtccaagaatatatatagccaatttttctttcctgccccatgatgtgattctaagcctctagaaacaggaatcccttctttggtagtgaaacctcataggaattgtgtggcccttgaatgacacagttatctaaaacacttagtagaatattttacacatatacatatatacagagagaatttatataataaatattggttattatcattattttttcacctgaacactgatattatgtctcttctaattttcctagtagttttgatgaaagatgtcagtttccagcatctaatgaaatatagttttactctttccaccaaaagaaagcacccatactatattcaaatatcagatcattttttctatgtcactagcagttacctcatttggcaaaamactggaggtttcctttattcatttttatatctaccataaatctacaccgtgacttgtgtacaacagatgtcttataagagtggaaaaagtgaacgatgaatgtgtatgaattaaatcacccgcctgtcatttttttttcacttagatgactaaccgcttttatcatcaaaatttgagattttttttcagatatcaaattacacttttagacactggcactttacctattctctcatgttgctttttcatttttatgagatatttcctccctagaaatttgaaattcagacacacgttaaagagaatctctca

SEQ ID NO: 709712 - DNA, 1942 bp, Homo sapiens
atcaggatgtttgctttctgaagagggagatatataacttcaaaatttttatctaagaatgcactgttgcgtgacagatatttatctgggtttactttgtggatgtgggccacaatgaaactctactcattatacttctacaactagttcattccattctcaatggtacatgacattcattgtagaaatctctcccttgagtttttctaaacagttttaccagccacctatactttcactaatagtatttttacacactttaattggtaatttaaattttacacgtgattttctggcatttatagagttcaaaatggggttttactataattttagtactaagatataagattttgttactctgccaaaatataaatggtattcattgcttctacctgaaagactcagaattcactaatttcctataatgcatgttgttattaaatccatcttcctctatgatctttgaaaggctactttaaaagtagcccaagatagaaacaccaaaataaacaaaattcaacaagcraaaattcatgtgcatcatgatacacgttttattttacctaaaagcaaaacacgaggacaagccacttacaattttaaatccatgttctgttgtctactttcacacctcacattccaaatcatggtcaaatgtgttactctgcccttgttccattgtttcataactagttacatacactttggtgcaaatattggcagaaattacctctatcgatgcattcctgtgtgctgtgtttggtaatcatataaacaccgttaaaagattgagctgtatagttttaaatccattcacagatttatagttagaggaaaagacatatattagaagatttagccaactgactttgttctaactatccacggtaaaatgtttctgatattacagcaaagtagagtacaatatctgcaagtaaatcctgtcaacaatattgacctgattttcaattttactgcatgtcaacataaattgacagtttctcttcctttccttttcaacagcctactgtcagcttagaattctgtctggagccaatacagtccttcaaaaaaacaatttcgtattatatcacaaaagctccattagctcatttaattaatgacaagtaaaatattgtttcagctcactaagcaaagcctacattgtaaggcaattactttcttcttctctatgagaagcagagatatcatggtcaactggaaaaaaatcacagaagtctctagaatatcttagaatttccaatgttttatctcttgacatctcttataatagtgatcttaagaagaactgaaaagggaaaaacaaaggaatgtaccttaaaaatattaaagattttgtttttcattcttagtcaatttttgggataattcaaagttgaaataataataactgctaggggcaggaggaagattactttatagaatattgtaaaacataaaaaagaagaagatatatatcctgagatacaaaggaataaatattcagctttagactctcacattaattaattttcaaatgttttgccaaatatctagttttcagctacttttacatccgctatcaccaaacacaaacacaatgtgtgtgtatatttttcttcttttattctgtgatttcaagttgaattctcttatactattaaatgattcccagatggaagttacttgtgtcctaaaattacaaacattaatatgagtttgtaatactgagaagatgcttaaatatatatataaataaatgtgtacatttatatatatttaaatatatgaataaatgtatatatagtaaatacatataatgaatatgtatacacacatatatatttaaaaatatatatatacatatttaagccaactcatcacaatagacaattaatatattaagaaaactaaaatataaaggtcacaccaaagtgtc

SEQ ID NO: 709713 - DNA, 1204 bp, Homo sapiens
tttaatatactttcaccaaaatttctaaaacaaagcaggctatagaataaataatcaatataaatgcttccagaatgtagcatatgagatattctataaagataaatctagaacttggctagagcattaaaaataaagtyagacaaatgtcagacaaatggccaagtaagaatgatctttccttggagttttcctaaaatggttacataggtgagtttagacagttgaaggggatttaaacccagttcagaaatttaaagcctattcacattttatcttgaaaaatgtcttctttgaaaatgctgaccgttagataaaagctatgcttgcaacaatctgcatctgttttactatatctcattttaagatattttgtccatgaatataaaatcttttgctttgctttttggttttgaatttgtgttgtgtaatcaaagataatatcccatgtcctgctatcttatttttcatcaatactcaaccaatgatcaggaaactatggcctgggattcttttctgtaccttaggatgtgtacactccctggaagtctccaagataatactggctttggaaagttcaaagcttggggttaagtttctatgttgcttgcaggtgactgattgaaaatgctttttttatttgtaagtttttccctaatggttaagttgttatgatagttcagttcttagatttgagcgactattctagttgtgctagtgtaaaagacagtgtaaaaaattacccaagataataaaattatggaaaggtagtttcatctaaaataatttattttcttctatttctggaaaagtatataaggcaatttttaagagtgttaaatttttatctgtgattttgagaccatttcttttccatgcaattgatataacaatcttgtttttaactgaatgctcatgttgaaattcttatttttaattcataaatttgaagtttacataaaaagtagatttaagtatctttaagatacagaaaaaagaaatattaaaatgtagaaaaaggatgtcaattttcttagagtcccatattatacaaagaaaggggtgaatgttatttttttaaaaaagtaccattatagtgatttttttgggaaattctacaatctctgaaatttaaattcttggactattttagactttcacatgaatttatctagactttgaaaatgacttctatagtgaccca

SEQ ID NO: 709714 - DNA, 1204 bp, Homo sapiens
tttaatatactttcaccaaaatttctaaaacaaagcaggctatagaataaataatcaatataaatgcttccagaatgtagcatatgagatattctataaagataaatctagaacttggctagagcattaaaaataaagtcagacaaatgtcagacaaatggccaagtaagaatgatctttccttggagttttcctaaaatggttacataggtgagtttagacagttgaaggggatttaaacccagttcagaaatttaaagcctattcacattttatcttgaaaaatgtcttctttgaaaatgctgaccgttagataaaagctatgcttgcaacaatctgcatctgttttactatatctcattttaagatattttgtccatgaatataaaatcttttgctttgctttttggttttgaatttgtgttgtgtaatcaaagataatatcccatgtcctgctatcttatttttcatcaatactcaaccaatgatcaggaaactatggcctgggattcttttctgtaccttaggatgtgtacactccctggaagtctccaagataatactggctttggaaagttcaaagcttggggttaagtttctatgttgcttgcaggtgactgattgaaaatgctttttttatttgtaagtttttccctaatggttaagttgttatgatagttcagttcttagatttgagcgactattctagttgtgctagtgtaaaagacagtgtaaaaaattacccaagataataaaattatggaaaggtagtttcatctaaaataatttattttcttctatttctggaaaagtatataaggcaatttttaagastgttaaatttttatctgtgattttgagaccatttcttttccatgcaattgatataacaatcttgtttttaactgaatgctcatgttgaaattcttatttttaattcataaatttgaagtttacataaaaagtagatttaagtatctttaagatacagaaaaaagaaatattaaaatgtagaaaaaggatgtcaattttcttagagtcccatattatacaaagaaaggggtgaatgttatttttttaaaaaagtaccattatagtgatttttttgggaaattctacaatctctgaaatttaaattcttggactattttagactttcacatgaatttatctagactttgaaaatgacttctatagtgaccca

SEQ ID NO: 709715 - DNA, 3228 bp, Homo sapiens
tgggaagagggtgttgagaacttgttttcctgcagtgtattattctctttgccttttcacctctacattcctagattccttctttagagacccctaaacttcagttgtttaactcttgtgtaaagagatcaagggtgtgaagcctgattcccaatctggcctgtccctcagaggctctatttgaaccctgctgcttggtgtccccagagagaatctcagggactttgtttcctttgaggtttacctttaataggaacctttctgttctataactaaaccataaggttgaactatgtagctctggcctaaaatcaatggataatttgggaaaatttggtattaggtatgtgagggaaaattaggacttgatttacagttgaataataactaaacccatggaatgaagatttctaaataaaaaacaacaatagccatgctgaaaacccaactagagcagaaaagtgatcctctgtgaattgcataaagtggatgtcttcatatgactttcttctctgctaactgcaacaagggaatcgggactgattgctggggaaagtttagtgttcaaaggttttcttctttggtgggaagctcttttttttcccctttcaggatattaatgctagtgttttctaatttttaaaatccttttacctcttcacctcttctattcttgtcttttgctcctgttaaaataagaaggatataatatcacatatataattattgattaggaacactaagccatttgattgaagtaaaatttagtcatattaaaaatgttatcttgaactggcatttgaattctgtaatctttatctctgttttaattccagataatacccatgtctgccacccctgcacaacctctccaacttccactcaccttgccagcaaggaatatttttgtttatttttaaggcaatgggagtggaggtagggtgaatctgaaatgatgctaatattgctcttacatgatgcaagtaatgttctgaaagtaatttgataagttcttctacagtaggtttcttaacattttggggaccataggcccttttctaaatctgaaaatatttatggatcttccattttaaagacttaattacctttccctattctgtgtgtatttaaaagatgcccatgaatctctggcctgttcttggcaacactctgagcggtgcaagtgagtgtggatattcacagtagaatgccctgttctttctctgtcagctgacaagtttcttccctcaaacacttaacctactttttctaatctttttctgttctttcaggcctgggtttgtatcttcatgtccccagcacacacatgccttttgagtctctcctatagaatcctcttaccctatctgagtttagacgcaattcatttttttttttcctttctaacattactcaaaccttagcttgtttttcttttccctcatattcatatgagggattcatatagattcatatttggtgttctttgatatataggtgttatgttgttttttaatgatgyttttacactaaccttcctgatctgacatccttaaatgcaatgctatacattatttattttttctaccttagctatgaagtatatgattaaaaggcttcatgttaataaagataaaaaaaataaaaactgtaatgtgttatacaaaataagctaaaactgtaagaaaatggctcaatacatggattaattaaataaaaatacccagcaatgagagggtgtaactcaggaaagaaccagaaattttaaccaggcacaaccaggtattgttgtacttaaaaatctaacaaccatatagaactattcccagagctgactataggagatcacaatgtacctatttccttatacttgccttcaaatttattttaaattgaagactagctgggaatcttatgccagaagaagacacctaagtacaaatatgttcacgtttttgtgagacttggggtttgtctgtatgttaagcagtacccaaaaatacaccatgtctgtgtagttgggagagtaagcaaatgaagaattccttttctccttcttggttctaaaatggagacaaccatatggggcatgactctataaaaagtacttccctggcggatgacctgggacagcaaatgtccacagtttctataagcaattaaaggaaggtctacccaaagactgatatgcttgtatacattgtgttttacttactcttacttgttcccctccctaccaatcccctgctgttccggagctgtatttttttttaaataattgtgttgctagagtgcaggtgattgatggctatagatcatcactccagtggtcaagctgagttgttaatccagctaataaacatacattttgtggacatgaggatgactgggaaaatggcaataaattttctttctttcctagacttttgcctagcaatacatacaaatgtacaataggatagagagagctatgtaattaaaaaagaaatatgcaaatgtgcctaattttctcacaagtcttaatgcgcctcttaacgtaattctagatttaatggcactttggtgcttgggtcagaccagtgattcttaataggaatcacctcctgctgcagggatggtgctgggggaggatggctgcatcaggatcacatagatgagtgtttaatgtgctgccttaaggaaacatgctttctgagctgaaaaatcatcactgtctagttagccattattgctattctatttcttatgtgtcttattgtagagaaagattgagaaccacgtaagctgattgtccagggactttattacaattacgtgtttgaatttctgactcccttatcagcttttaaatctgggatttaaaaggcctgaatcatgtctgcctcattaatcattcttgctaatcattaataatcttgttaataatttgattcccattgctacacttatagtaggtgctctttggatatttgctgaatgaataaaaagatgaatgcatgatgacaaggagacattgcagttggagatttctctgagattggattgtctagttggaaattaccttgcatgagaacttgcaaaaatgtgtaactgtctcctttcctccaaaagccaccagaaaaacatggtgtaggtttcttaacatttgataagttcttctacagtaggtttcttaacattttggggaccaaaaactgtaatgtgatatataaaaataagctaaaactt

SEQ ID NO: 709716 - DNA, 2526 bp, Homo sapiens
tgcagctagatcattcctcagagtgcctctagggagtgttacattagaaagataacagcaggcttgtaaattagtacagtttaccaacccacaaacatttgtcaccctctcccctcctcacaggagaaaataagcagtctttcctcagcacctcctgcctcatgatttgtttggcataaattgctacctgccttgtggctgggcagtaagctaatttaaaggctgaatgagaaagctcagaaaacagccagagtgttctattgaagtagacggtcagtcaatagggaaaaaagggaataagctgattaatgataaaatcaggaacaccctttgaaaagaatctttatgctttgtcaagctaatttcagtggatctcatatcactggtcacctggtacccatccaatattcctgatttcaagtttagacagttctcagtatatcactgtcaaatcatgactgatattcctttcagtggaacaatactcagataattgcaatttagcttttctctctattataaatttagttgtctctttacctgtgcaacaaaatcataattagatgaatacctgcatatttataggtatatttcaacccaacagacggtctagacattttctgctaacaaactttgattgattgttaagggcatgtggaatcagtagttggctatgttgagtacatctctgagctttgctttttccatctgcaaaatagaaataatattatctccctcatagggtaattgctggaactaaatgaagcaaatatctgtcgcatatatctgtaaaattctttgaacagtgcctcttacataaaaagcattcattcagtgaaagctatattatcgttaaagagttccttctagctcagcctggggagatagtgtgtaaccatttctccatccttggataaacactgtgggtggagtttgagtcagaccaaaataaattgcccttcatttgtgagatctcatatttgctaagcatctttttttttatgtcttgaatgtaaatcctggagttcagaggctacagctatttcttctataaccccagtgtctggcctcatgtgctgcaaagggtctaagttcaatcactgtttgttgcatcaatgaatacatagcacagtgatctgaagtcttttcattggccctcaagtctctgtggaaggaagttagggtcttgtaaaaggaaagatatcagtctgagactattaattttatgcctatggtcatttggggaggcgggcacattagaggaaataggactagatccatggccaaagataaagctcaaacacaatttcttgtggcataatccaaacaagcgatattcgtaaaaacaactccatatctgtggatattttcttgtttttagatgaccaaatttgtctgaaggaggcatgaagcaccatgaagtaaaaattctaacacttggtgtaattttgatatctttattaaatgacattatccattagtgcatgactgctgagcctactgtttaccagcttgaggtgaactgcaaaacttatatatcttatttaaaaattaaaatgttgattctacagggttatcaaagaatctaagacatgatgatttcatattgcaagttatgtaaatggaattaattttggaagacattttgtacaatttaagtagcttatttccacattaataaatatgatgtggtggctaggataaacaccttgctttggaagagcacgtttattttccaaagacagtgttaacttgtgccctgtcatagagagtaacgacatatgtggaacatctattctctttatttctttcttcttttttctctctctggagactaacgtcttcatttacctaaggtctccagcaattggaggcaatcgtaaggaaattggtagtcctctgattcttstgctccattgtattcccccttctttttctgagtgtgtgcttgttagggagcttgcaaggatctacagtgggcagaagcttgtgtttcatctgagagaggagagtgacaaaaggggactaggaaagtcaggcgtgacatgtctatttggtgtgatctgagtttcttcctgtgtttttcactatgggcttcactcacacccatgaaacagttaacacatgttccaacaaaagcaaaaccaatgtgaaaaatgtctcatcaatgcctttgtgtggtgagcaatgggaagctgggcaacaacattttttcatgtagctgagaattagcaatgattatttcttcttaaagcaacatctgcttaatgacagctcttttaaacttcatcaggaaaaagtgagtgaaaaatcctgttataaatactacagtgaaagattctatttagatgttcactgtttcaaagtcactagctctgagctaatcctaagcttcagaagcttactgtgcaccctgacatgctgactattcaaatgggtctctctcaagatggctgggaaaattgttcatatacaaaggagctcagctttagcacctagtggggctgaaagccaggtgtgacaaag

SEQ ID NO: 709717 - DNA, 2526 bp, Homo sapiens
tgcagctagatcattcctcagagtgcctctagggagtgttacattagaaagataacagcaggcttgtaaattagtacagtttaccaacccacaaacatttgtcaccctctcccctcctcacaggagaaaataagcagtctttcctcagcacctcctgcctcatgatttgtttggcataaattgctacctgccttgtggctgggcagtaagctaatttaaaggctgaatgagaaagctcagaaaacagccagagtgttctattgaagtagacggtcagtcaatagggaaaaaagggaataagctgattaatgataaaatcaggaacaccctttgaaaagaatctttatgctttgtcaagctaatttcagtggatctcatatcactggtcacctggtacccatccaatattcctgatttcaagtttagacagttctcagtatatcactgtcaaatcatgactgatattcctttcagtggaacaatactcagataattgcaatttagcttttctctctattataaatttagttgtctctttacctgtgcaacaaaatcataattagatgaatacctgcatatttataggtatatttcaacccaacagacggtctagacattttctgctaacaaactttgattgattgttaagggcatgtggaatcagtagttggctatgttgagtacatctctgagctttgctttttccatctgcaaaatagaaataatattatctccctcatagggtaattgctggaactaaatgaagcaaatatctgtcgcatatatctgtaaaattctttgaacagtgcctcttacataaaaagcattcattcagtgaaagctatattatcgttaaagagttccttctagctcagcctggggagatagtgtgtaaccatttctccatccttggataaacactgtgggtggagtttgagtcagaccaaaataaattgcccttcatttgtgagatctcatatttgctaagcatctttttttttatgtcttgaatgtaaatcctggagttcagaggctacagctatttcttctataaccccagtgtctggcctcatgtgctgcaaagggtctaagttcaatcactgtttgttgcatcaatgaatacatagcacagtgatctgaagtcttttcattggccctcaagtctctgtggaaggaagttagggtcttgtaaaaggaaagatatcagtctgagactattaattttatgcctatggtcatttggggaggcgggcacattagaggaaataggactagatccatggccaaagataaagctcaaacacaatttcttgtggcataatccaaacaagcgatattcgtaaaaacaactccatatctgtggatattttcttgtttttagatgaccaaatttgtctgaaggaggcatgaagcaccatgaagtaaaaattctaacacttggtgtaattttgatatctttattaaatgacattatccattagtgcatgactgctgagcctactgtttaccagcttgaggtgaactgcaaaacttatatatcttatttaaaaattaaaatgttgattctacagggttatcaaagaatctaagacatgatgatttcatattgcaagttatgtaaatggaattaattttggaagacattttgtacaatttaagtagcttatttccacattaataaatatgatgtggtggctaggataaacaccttgctttggaagagcacgtttattttccaaagacagtgttaacttgtgccctgtcatagagagtaacgacatatgtggaacatctattctctttatttctttcttcttttttctctctctggagactaacgtcttcatttacctaaggtctccagcaattggaggcaatcgtaaggaaattggtagtcctctgattcttctgctccattgtattcccccttctttttctgagtgtgtgcttgttagggagcttgcaaggatctacagtgggcagaagcttgtgtttcatctgagagaggagagtgacaaaaggggactaggaaagtcaggcgtgacatgtctatttggtgtgatctgagtttcttcctgtgtttttcactatgggcttcactcacacccatgaaacagttaacacatgttccaacaaaagcaaaaccaatgtgaaaaatgtctcatcaatgcctttgtgtggtgagcaatgggaagytgggcaacaacattttttcatgtagctgagaattagcaatgattatttcttcttaaagcaacatctgcttaatgacagctcttttaaacttcatcaggaaaaagtgagtgaaaaatcctgttataaatactacagtgaaagattctatttagatgttcactgtttcaaagtcactagctctgagctaatcctaagcttcagaagcttactgtgcaccctgacatgctgactattcaaatgggtctctctcaagatggctgggaaaattgttcatatacaaaggagctcagctttagcacctagtggggctgaaagccaggtgtgacaaag

SEQ ID NO: 709718 - DNA, 1493 bp, Homo sapiens
gccattaacattctggtttctagatatgcactggaccatttcataatgccaaatgagaatgttaaacatattactgtagtgacattaattaaagtgtatttcttgcaatgcagttaagtttgcttcacaatgcagtaagtttgcttcacaagttgaagcaaccccaaggttgaccttaaaatgataagcaatgctatttgctattttacttaaacgtattccatatccatgagcatcaaagtaaatctgtaatctgggawaaaatatttgttcaaataataatttcctctctaaaataattccctttatttatatgaatgctttacaaaaaaatcagaatctttagggtcaatctgatacgcatctaaattctctagtagaaatagatgaggaaacagaattaaactgcaatcaatataacttgatttagatattcctatttcctatatgtttcaagataccctgatccggttgttcatattgagaattatatacatcgacatatatgttcacaggggaaggtacacagcagattcaggaaagaagctagaatcatcttatttctactccatgcatctggattttcgtatgccattttctgttttgaaacggcacgttaaccatggagtgctaagtacaaatgggaaagcagagggtcatggacacaacagaaacatcttctacttccagctactaacagaagagatggatagaaagtgaatactataggattccatcttcttctttaacttacatggaactttctgagatacctaggctcatcacctaacacaaagcaaaaaattacatgcatctcttttcttcattacctatttaatcaccactaaaaatatatcgatctgacatatgtagacctgtaatgaccagtaacatcattacagtttttcagtcatgacttaaactataagccaaacttttatttttgtttgtttgtttttgagacagggtctcactctgttgcccaggctggagtgcagtggtgcgagaacggctaaactgcagcctcgacctccaagtctcaagctatcctctccccttggcctcccaagtaactgagactaaaggcatgcacgactacaccctgctaatttttgcttgtttgtttttatagacgaggtctcactatgttgctcaggatggtctcaaacttctgggctcaagcaatcctctgcctcagcctcccaaagtgctgaagttattggcattagcccctgtgcccagccccaaaacatttcttaaaaatatagacagtattatcattgtggacaatcataattatagatatagggactaccacatgtaatatttctggctaaggaatatacagaatgaggacaaattttataatctactaagtaatttcaggatgttctattatatgtgaatttttcttacaaaagtcctcaatacatagtttctccatctgtaatttctgcattctcacaatgcggtaattcaaaataaaatactcc

SEQ ID NO: 709719 - DNA, 1493 bp, Homo sapiens
gccattaacattctggtttctagatatgcactggaccatttcataatgccaaatgagaatgttaaacatattactgtagtgacattaattaaagtgtatttcttgcaatgcagttaagtttgcttcacaatgcagtaagtttgcttcacaagttgaagcaaccccaaggttgaccttaaaatgataagcaatgctatttgctattttacttaaacgtattccatatccatgagcatcaaagtaaatctgtaatctgggataaaatatttgttcaaataataatttcctctctaaaataattccctttatttatatgaatgctttacaaaaaaatcagaatctttagggtcaatctgatacgcatctaaattctctagtagaaatagatgaggaaacagaattaaactgcaatcaatataacttgatttagatattcctatttcctatatgtttcaagataccctgatccggttgttcatattgagaattatatacatcgacatatatgttcacaggggaaggtacacagcagattcaggaaagaagctagaatcatcttatttctactccatgcatctggattttcgtatgccattttctgttttgaaacggcacgttaaccatggagtgctaagtacaaatgggaaagcagagggtcatggacacaacagaaacatcttctacttccagctactaacagaagagatggatagaaagtgaatactataggattccatcttcttctttaacttacatggaactttctgagatacctaggctcatcacctaacacaaagcaaaaaattacatgcatctcttttcttcattacctatttaatcaccactaaaaatatatcgatctgacatatgtagacctgtaatgaccagtaacatcattacagtttttcagtcatgacttaaactataagccaaacttttatttttgtttgtttgtttttgagacagggtctcactctgttgcccaggctggagtgcagtggtgcgagaacggctaaactgcagcctcracctccaagtctcaagctatcctctccccttggcctcccaagtaactgagactaaaggcatgcacgactacaccctgctaatttttgcttgtttgtttttatagacgaggtctcactatgttgctcaggatggtctcaaacttctgggctcaagcaatcctctgcctcagcctcccaaagtgctgaagttattggcattagcccctgtgcccagccccaaaacatttcttaaaaatatagacagtattatcattgtggacaatcataattatagatatagggactaccacatgtaatatttctggctaaggaatatacagaatgaggacaaattttataatctactaagtaatttcaggatgttctattatatgtgaatttttcttacaaaagtcctcaatacatagtttctccatctgtaatttctgcattctcacaatgcggtaattcaaaataaaatactcc

SEQ ID NO: 709720 - DNA, 645 bp, Homo sapiens
ggaaaacttgttaatttgaaattaaatgtgtccagaaaataggtgagtggcaaaggctgctgtgcttctccagaagtgaaaccttgcaattaagatgagaagacagcccaagtgtgacgctggcgctggagcggccgggggatctcaacacggctaatgaatcatcatcaaagtgatttattgactgcggccagagcttcaactctgtctcagtgtaaatgaggaataataataatttcccagtactcgcttggctgtgaacttctaaagagtgagaaccttcagcaggagatgataaactgtagtgatgccataggacgtcttcttccacaatgttcaaagccactgtcatacagtgaactacatctcataaaaccgacaagagacgggtatgcacaacgcgatgtcatcccaacacagcttccaagcaaaagtcccctgagtctcatcctattacagcttctcatggggaccgttcattgctgccacacaggaatgtaaggaggagagggatgcctccttagaatatcaagctcctgacatttaggatctggactcacgcgcttctctgtgrcttcagcgaccatggttttcaaaccaaaagaaaccttggataccatctatcatcatatatacaatcagtcc

SEQ ID NO: 709721 - DNA, 1470 bp, Homo sapiens
cttctgaatgagttacagaagcttatattccatcttaaggttacagaaagaacagtggctcagagcatggccaaaaccaagttcagtggtaaatcaggtttagtggcaagacaggttatgagagggagtaaggaagaggcctggccagcaaaggtggatttaytgtgcagatgaagcttcctgagagaggatagatggtaaatgtttctttttagacttttaaagatgtcagatgtctcagtctctctagatctgggtagtgcctagaaaggggaggcctggctgcattaacagagattctctacggatgaaattttcccccacctcagtctgctggccctgtagcagccatttcaaaatatatcaaaaagggatatttggggtaaaatatttttatttccttcactggcaatttgagagggaagagttctagttttataaaaaagggcagaagggcagggtgagataagctctttcttatagcttagttgttattgtctattttcccccaagcttataaactccccaaggatgaagacaatatctgttttactcatggatgcattaacttaattctgaataagcatttcaataattctttgttaaatgaacatgtgaataggagccaatggtcagaagtgcccaaacatgccctccagaaagagagtgtggagggacaggttcagagagatgaggaagaacatagcaagaatcagtggcatttaccatcccagtggcatttactcatgagacagtaagtgagtcaggatatcttggagctgacaagggttgtgcctgattctagagcctgtggaagtgagacaagaataatacaggatagttgcaggagaatagaaaattccaggccacagtttcccaggactagcaaaaggaaactgttaaaatagcttcagaagctcggggctcatcagaccttgaaaaaccagggtgtggaccaagccggctaaaactggacccaacagggcattggatttgatctaggtttctcctaggacctcatgatatgttcagtaacataattacacaccaaccatgccattatagttctgggaacacacatatttggtataagaatggatgggacaacagttctgagaaatttccacttttttccaggaatcttcatgaatatttgaccccttggttacagaaacccacaaagacagcagccccaaagtcccttgtgagcaactttcttgagtacatctgccctctcctttcttgagtgtgtacttttcactttgtgaaacatttccatacttctactaatttctgatccattattgaattccttatgatggtggtgttaaaagactggacaccagccagggttgaggtccatcagcatttggggactcccctagctcaccagtatcacaagggctaagctgagtgaaagagaaaggtcttgggatgtacatatctccaatgtacctaactcagttacat

SEQ ID NO: 709722 - DNA, 1470 bp, Homo sapiens
cttctgaatgagttacagaagcttatattccatcttaaggttacagaaagaacagtggctcagagcatggccaaaaccaagttcagtggtaaatcaggtttagtggcaagacaggttatgagagggagtaaggaagaggcctggccagcaaaggtggatttactgtgcagatgaagcttcctgagagaggatagatggtaaatgtttctttttagacttttaaagatgtcagatgtctcagtctctctagatctgggtagtgcctagaaaggggaggcctggctgcattaacagagattctctacggatgaaattttcccccacctcagtctgctggccctgtagcagccatttcaaaatatatcaaaaagggatatttggggtaaaatatttttatttccttcactggcaatttgagagggaagagttctagttttataaaaaagggcagaagggcagggtgagataagctctttcttatagcttagttgttattgtctattttcccccaagcttataaactccccaaggatgaagacaatatctgttttactcatggatgcattaacttaattctgaataagcatttcaataattctttgttaaatgaacatgtgaataggagccaatggtcagaagtgcccaaacatgccctccagaaagagagtgtggagggacaggttcagagagatgaggaagaacatagcaagaatcagtggcatttaccatcccagtggcatttactcatgagacagtaagtgagtcaggatatcttggagctgacaagggttgtgcctgattctagagcctgtggaagtgagacaagaataatacaggatagttgcaggagaatagaaaattccaggccacagtttcccaggactagcaaaaggaaactgttaaaatagcttcagaagctcggggctcatcagaccttgaaaaaccagggtgtggaccaagccggctaaaactggacccaacagggcattggatttgmtctaggtttctcctaggacctcatgatatgttcagtaacataattacacaccaaccatgccattatagttctgggaacacacatatttggtataagaatggatgggacaacagttctgagaaatttccacttttttccaggaatcttcatgaatatttgaccccttggttacagaaacccacaaagacagcagccccaaagtcccttgtgagcaactttcttgagtacatctgccctctcctttcttgagtgtgtacttttcactttgtgaaacatttccatacttctactaatttctgatccattattgaattccttatgatggtggtgttaaaagactggacaccagccagggttgaggtccatcagcatttggggactcccctagctcaccagtatcacaagggctaagctgagtgaaagagaaaggtcttgggatgtacatatctccaatgtacctaactcagttacat

SEQ ID NO: 709723 - DNA, 1470 bp, Homo sapiens
cttctgaatgagttacagaagcttatattccatcttaaggttacagaaagaacagtggctcagagcatggccaaaaccaagttcagtggtaaatcaggtttagtggcaagacaggttatgagagggagtaaggaagaggcctggccagcaaaggtggatttactgtgcagatgaagcttcctgagagaggatagatggtaaatgtttctttttagacttttaaagatgtcagatgtctcagtctctctagatctgggtagtgcctagaaaggggaggcctggctgcattaacagagattctctacggatgaaattttcccccacctcagtctgctggccctgtagcagccatttcaaaatatatcaaaaagggatatttggggtaaaatatttttatttccttcactggcaatttgagagggaagagttctagttttataaaaaagggcagaagggcagggtgagataagctctttcttatagcttagttgttattgtctattttcccccaagcttataaactccccaaggatgaagacaatatctgttttactcatggatgcattaacttaattctgaataagcatttcaataattctttgttaaatgaacatgtgaataggagccaatggtcagaagtgcccaaacatgccctccagaaagagagtgtggagggacaggttcagagagatgaggaagaacatagcaagaatcagtggcatttaccatcccagtggcatttactcatgagacagtaagtgagtcaggatatcttggagctgacaagggttgtgcctgattctagagcctgtggaagtgagacaagaataatacaggatagttgcaggagaatagaaaattccaggccacagtttcccaggactagcaaaaggaaactgttaaaatagcttcagaagctcggggctcatcagaccttgaaaaaccagggtgtggaccaagccggctaaaactggacccaacagggcattggatttgawctaggtttctcctaggacctcatgatatgttcagtaacataattacacaccaaccatgccattatagttctgggaacacacatatttggtataagaatggatgggacaacagttctgagaaatttccacttttttccaggaatcttcatgaatatttgaccccttggttacagaaacccacaaagacagcagccccaaagtcccttgtgagcaactttcttgagtacatctgccctctcctttcttgagtgtgtacttttcactttgtgaaacatttccatacttctactaatttctgatccattattgaattccttatgatggtggtgttaaaagactggacaccagccagggttgaggtccatcagcatttggggactcccctagctcaccagtatcacaagggctaagctgagtgaaagagaaaggtcttgggatgtacatatctccaatgtacctaactcagttacat

SEQ ID NO: 709724 - DNA, 1470 bp, Homo sapiens
cttctgaatgagttacagaagcttatattccatcttaaggttacagaaagaacagtggctcagagcatggccaaaaccaagttcagtggtaaatcaggtttagtggcaagacaggttatgagagggagtaaggaagaggcctggccagcaaaggtggatttactgtgcagatgaagcttcctgagagaggatagatggtaaatgtttctttttagacttttaaagatgtcagatgtctcagtctctctagatctgggtagtgcctagaaaggggaggcctggctgcattaacagagattctctacggatgaaattttcccccacctcagtctgctggccctgtagcagccatttcaaaatatatcaaaaagggatatttggggtaaaatatttttatttccttcactggcaatttgagagggaagagttctagttttataaaaaagggcagaagggcagggtgagataagctctttcttatagcttagttgttattgtctattttcccccaagcttataaactccccaaggatgaagacaatatctgttttactcatggatgcattaacttaattctgaataagcatttcaataattctttgttaaatgaacatgtgaataggagccaatggtcagaagtgcccaaacatgccctccagaaagagagtgtggagggacaggttcagagagatgaggaagaacatagcaagaatcagtggcatttaccatcccagtggcatttactcatgagacagtaagtgagtcaggatatcttggagctgacaagggttgtgcctgattctagagcctgtggaagtgagacaagaataatacaggatagttgcaggagaatagaaaattccaggccacagtttcccaggactagcaaaaggaaactgttaaaatagcttcagaagctcggggctcatcagaccttgaaaaaccagggtgtggaccaagccggctaaaactggacccaacagggcattggatttgatytaggtttctcctaggacctcatgatatgttcagtaacataattacacaccaaccatgccattatagttctgggaacacacatatttggtataagaatggatgggacaacagttctgagaaatttccacttttttccaggaatcttcatgaatatttgaccccttggttacagaaacccacaaagacagcagccccaaagtcccttgtgagcaactttcttgagtacatctgccctctcctttcttgagtgtgtacttttcactttgtgaaacatttccatacttctactaatttctgatccattattgaattccttatgatggtggtgttaaaagactggacaccagccagggttgaggtccatcagcatttggggactcccctagctcaccagtatcacaagggctaagctgagtgaaagagaaaggtcttgggatgtacatatctccaatgtacctaactcagttacat

SEQ ID NO: 709725 - DNA, 1470 bp, Homo sapiens
cttctgaatgagttacagaagcttatattccatcttaaggttacagaaagaacagtggctcagagcatggccaaaaccaagttcagtggtaaatcaggtttagtggcaagacaggttatgagagggagtaaggaagaggcctggccagcaaaggtggatttactgtgcagatgaagcttcctgagagaggatagatggtaaatgtttctttttagacttttaaagatgtcagatgtctcagtctctctagatctgggtagtgcctagaaaggggaggcctggctgcattaacagagattctctacggatgaaattttcccccacctcagtctgctggccctgtagcagccatttcaaaatatatcaaaaagggatatttggggtaaaatatttttatttccttcactggcaatttgagagggaagagttctagttttataaaaaagggcagaagggcagggtgagataagctctttcttatagcttagttgttattgtctattttcccccaagcttataaactccccaaggatgaagacaatatctgttttactcatggatgcattaacttaattctgaataagcatttcaataattctttgttaaatgaacatgtgaataggagccaatggtcagaagtgcccaaacatgccctccagaaagagagtgtggagggacaggttcagagagatgaggaagaacatagcaagaatcagtggcatttaccatcccagtggcatttactcatgagacagtaagtgagtcaggatatcttggagctgacaagggttgtgcctgattctagagcctgtggaagtgagacaagaataatacaggatagttgcaggagaatagaaaattccaggccacagtttcccaggactagcaaaaggaaactgttaaaatagcttcagaagctcggggctcatcagaccttgaaaaaccagggtgtggaccaagccggctaaaactggacccaacagggcattggatttgatctrggtttctcctaggacctcatgatatgttcagtaacataattacacaccaaccatgccattatagttctgggaacacacatatttggtataagaatggatgggacaacagttctgagaaatttccacttttttccaggaatcttcatgaatatttgaccccttggttacagaaacccacaaagacagcagccccaaagtcccttgtgagcaactttcttgagtacatctgccctctcctttcttgagtgtgtacttttcactttgtgaaacatttccatacttctactaatttctgatccattattgaattccttatgatggtggtgttaaaagactggacaccagccagggttgaggtccatcagcatttggggactcccctagctcaccagtatcacaagggctaagctgagtgaaagagaaaggtcttgggatgtacatatctccaatgtacctaactcagttacat

SEQ ID NO: 709726 - DNA, 1470 bp, Homo sapiens
cttctgaatgagttacagaagcttatattccatcttaaggttacagaaagaacagtggctcagagcatggccaaaaccaagttcagtggtaaatcaggtttagtggcaagacaggttatgagagggagtaaggaagaggcctggccagcaaaggtggatttactgtgcagatgaagcttcctgagagaggatagatggtaaatgtttctttttagacttttaaagatgtcagatgtctcagtctctctagatctgggtagtgcctagaaaggggaggcctggctgcattaacagagattctctacggatgaaattttcccccacctcagtctgctggccctgtagcagccatttcaaaatatatcaaaaagggatatttggggtaaaatatttttatttccttcactggcaatttgagagggaagagttctagttttataaaaaagggcagaagggcagggtgagataagctctttcttatagcttagttgttattgtctattttcccccaagcttataaactccccaaggatgaagacaatatctgttttactcatggatgcattaacttaattctgaataagcatttcaataattctttgttaaatgaacatgtgaataggagccaatggtcagaagtgcccaaacatgccctccagaaagagagtgtggagggacaggttcagagagatgaggaagaacatagcaagaatcagtggcatttaccatcccagtggcatttactcatgagacagtaagtgagtcaggatatcttggagctgacaagggttgtgcctgattctagagcctgtggaagtgagacaagaataatacaggatagttgcaggagaatagaaaattccaggccacagtttcccaggactagcaaaaggaaactgttaaaatagcttcagaagctcggggctcatcagaccttgaaaaaccagggtgtggaccaagccggctaaaactggacccaacagggcattggatttgatctagrtttctcctaggacctcatgatatgttcagtaacataattacacaccaaccatgccattatagttctgggaacacacatatttggtataagaatggatgggacaacagttctgagaaatttccacttttttccaggaatcttcatgaatatttgaccccttggttacagaaacccacaaagacagcagccccaaagtcccttgtgagcaactttcttgagtacatctgccctctcctttcttgagtgtgtacttttcactttgtgaaacatttccatacttctactaatttctgatccattattgaattccttatgatggtggtgttaaaagactggacaccagccagggttgaggtccatcagcatttggggactcccctagctcaccagtatcacaagggctaagctgagtgaaagagaaaggtcttgggatgtacatatctccaatgtacctaactcagttacat

SEQ ID NO: 709727 - DNA, 677 bp, Homo sapiens
attgttgctaccctgagttcctgcctcatgtatccactaccatttctatagcttcctcaatagcccaaagtgtgaggagtaaagttaatatggcagtctccaagttcgtaggagatcttccctgtggggttttggaaaggaaggcactgctagttggaggaaggttgaaaagaatgaaaactatgtgccaggcgtggtggctcacgcctgtaatcccagcactttgggaggcagaggtaggcggatcacttgagttctagagttcgagaccagcctggccaayatggagaaaccccgtctctactaaaaatacaacagttagcccggtgtcatggcacgcgcctgtaatcccagctactcgggaggctgcgacacaagaatcacttgaacccagaggcggaggttgcagtgagctgagatcgcaccattgcgctccagcctgggtgacatagtgaggctttttgtcaaaaaaaaaaaaaaaaaaaaaaaaaagaacaaaaactatgtattattgacctgtgtcagagggatggtccagatggcagggagaattctacaggacgttcaaaagccagtggaaatgggatttaaagaggattgaaaacgttcttttgatgccattctgtcctagggtggaagtgaggtctagaggaagcaattggccatgtaagttatta

SEQ ID NO: 709728 - DNA, 635 bp, Homo sapiens
gaattattgagaagtacatagaaagtacatagtacaccaaataattggcagcagcaacgaggccaacaacaaaacaataartaccaagaaataaaagctgtgtgtaggaaaaaaattagcaggggtaatacatccatatatcataaattgtatttgcacagttatataaacacaaaatatttatacaaaattaatatgaaatgtatataaataaaataaaattatgttggaggatgaaagtaaaaaagttaccattcagaggtaacagtaaagaaaatagagttaaaatttttcttttccaaagagaaaattttattctggtcagtaagcacagcctaagacaggaacatcatgaaaggacgtatcaagcatatgattcagggacataggggttaatttcaaaataaatatgaaaattgatgaaaggattgcttctgaaaagaagaaatacgtgtgtttgggtgggggtggttctgggatttttttcttataaaactaccagattatttgacctttaaactaagtgtatgacaaaaataattaaagaaccaaaaagaacttttgcaatacccatgctgttcatttgtcatttgcttccttcttgacacagcctattctttctaataagagaaaaa

SEQ ID NO: 709729 - DNA, 599 bp, Homo sapiens
gctgaagagcagtgagaktgagggcgaaattcacacctgtcttaaaaatgcataccctctgcaaaaagttgggttttcctttaatgtaatcggcactagcgactcagtttcactgtgaggcccccgggcgattgtgaaggtaccaggcgatggtgttgctggcccagggcagcttctgcagcagtgcagggagggctggccaggattgtttagcctgtgcctgtttcctcacgttttgtgtgttgacagagcatgatctaaacattttatcagtttctttttcatttacgtaaattaggcagtagggaaatctcagctaactaaggtctttaaattttatttggatgaacaaaaaatgtaatcagagggaagggaactcattttcctcgagggtcagaggcaggaatcagaaaggctttctagggggtgggcctggcctctccggttgtctgtgaaattgagacaggtatgggagtctagaaacggagttgcatgtgtgtgattcctttcagttactttaattggatctctggttatccttgaactatccccgaatttaaacagttcttcatgtttgagatatagaagcatcttaagga

SEQ ID NO: 709730 - DNA, 1035 bp, Homo sapiens
ttagcctggaaggatgaggagtcctttgtaggccaaaccattgttatggactgttatggaatgtgggtgtttgtgggtgtgtgcacgcactcgccacagttatgtgccctccttctttttccattactaagtcatagaaaacgctgaaaattcccctccatttcatttgtttggaagggaacaaaaagaagaggttttgataagatgtaggctgcagcttcagagaggtaccatcagggtacggtattcctggggccagggtagtggcgccagcggcagtcaaaggtggacagtacccaaaaggaatataaatggaggcaaacagatttgggaacatttggtccctgtttgttttcaattattctttaaaaatatttctgccgggtgcggtggctcacgcctgtaatcccagcactttgggagactgaggcaggtggatcacctgaggtcgggagttcgagaccagcctggccaacatggcgagaccccatctctactaaaaatacaaaaattagccgagcgtagtggcacacacccttagttccagctactcgggaggctgaggcaggagaatcgcttgaacctgggaggtggaggttgcagtgagccaagatcgtgccactgtactccagcctgggcgacagagccagactccatctcaaaaaaaaaaaaaaaagaaaaatgacagtcccctgtcccacctttctcttttacaaagtcctgttccccagaatcttgtagctgtttcttccagtaatttgccgcattatttctaaataacgtatgtggacattatcttaggagggacggactccagcaggacgcgcttataaaacarttgcatcctcccgttcaccgctgagcgtgtcagctctgggggccttttctttctcaccctctgggttaaatctaggcagggcctggaactttttcttatcacactcaaataacatgaaatcttcctgttctaatttcagtgagtgcaatgcctggtacaaaactcttcaaaagtgtcccgatcaaaaaaaagacaga

SEQ ID NO: 709731 - DNA, 638 bp, Homo sapiens
tgaaccacccgcctcagcctcctaaagtgctgggattacaggtgtgagccaccacacctggactgttcttttctcttacgtttggtcacctggtgcctctgaactccctcttccactctctctacatcctgatgcacaatttatttgaaaaggaggaaacattttccgtcccaagtccctttttactcctttctttcccaacaaaacctgtacagaatcctcacactactgtgttctrtagaggagcggagagggagaccagttctccactcccctggccctgctgacacctggagggtgccaggcatgttcatggaaacagcagcattgcagccttccttccttccccacagctgtatccgtgtgagtctggacaacaaggacttgtcaacacgaatctctctcttctcctggtgtaagacagaacaaaaacaaaagacgttggagtagagatcagaaaagggtgggtttgcgatgtttgggagggttgagtgggcattttgacaacttagcttctccttgggtggtatttagcagatgcccttgtggtttaaactgtagctttagatataaaatccactcctggtcaggtgcggtggctgacgcctgtaatcccagcactctgggaggctgaggta

SEQ ID NO: 709732 - DNA, 592 bp, Homo sapiens
tgggtctagccagaaattacactgtaaccaattaatgtacttaaatgataatcagcaaatgtgaattctagaggtgagcaaacctgactgcttgattggagtataatgcagtgcagcatggttcaaagccaatctttctcaaggctacacctcccatagtcctgccatttttgtctttaataatttaatgaaaattatttttcagtgatactttggaattttttaaaaaagtaagtggaatgtacttacctgaagaagcattttgtttccagccttgaaggagaatatgtttgcaatgtcaactttcatagaaatttgttttcaaatgagtatcttgatttgtataatgtttataatttaatacattyttgtatgatcttcattgaacaatttaaaatcatcttttcaaaaaataaacattaaaataatgacttcttttgtcccttaaaagaaatattctaaaagactctcatatacattaaagttaatttagtctttaatgttttaggattttttctttaatatttataaaccacactgttggaatgatatttatgttattacacataatttattccaacttttacataag

SEQ ID NO: 709733 - DNA, 592 bp, Homo sapiens
tgggtctagccagaaattacactgtaaccaattaatgtacttaaatgataatcagcaaatgtgaattctagaggtgagcaaacctgactgcttgattggagtataatgcagtgcagcatggttcaaagccaatctttctcaaggctacacctcccatagtcctgccatttttgtctttaataatttaatgaaaattatttttcagtgatactttggaattttttaaaaaagtaagtggaatgtacttacctgaagaagcattttgtttccagccttgaaggagaatatgtttgcaatgtcaactttcatagaaatttgttttcaaatgagtatcttgatttgtataatgtttataatttaatacatttttgtatgatcttcattgaacaatttaaaatcatcttttcaaaaaataaacattaaaataatgacttcttttgtcccttaaaagaaatattctaaaagactctcatatacattaaagttaatttagtctttaatgttttaggattttttctttaatatttataaaccacaytgttggaatgatatttatgttattacacataatttattccaacttttacataag

SEQ ID NO: 709734 - DNA, 460 bp, Homo sapiens
gatcttactcagtttcagaagtatttcagagaagcacgcacagtgcttattcacattgacatctggattttaatattgtcagtttttggggggttaaattccttattacaaatttatgtcaaggatcttctcacgcatcatcacaaaaaataattttaactgttgttactatattaattttttgacgtttggagataatattagccctggaatagtatttttgaactcatmaatttgcattatttgacttgatccttcgttccttgactatgcagcgtgagtctgagacacgtgtatgtttactgaacacaagaggtgggccccagacacatgaaagatgtgtctcactcacctcttcctcctacctgagatttcattcaactttcccactgaacaatgattttgcacccccagaggggttttctatgatacagtttataagaatttaatgattgtttca

SEQ ID NO: 709735 - DNA, 1109 bp, Homo sapiens
gctcctttggataaaagcctccaggggctccccactgcctacagcataaaggccctgccagcayatcccaggctccccacgatctgacttctactgacttacccaaagtgggctcttgttactggcttgttttcctgctgttctgtgtgtccccaccctctgcctcatgtcacacttcactccccagctctctctctgggcctctgcatgcttcacttcacctgcctaggatgcccttcctgctatgggaacttttctttgtctggaagatacctgttccttcaagacatccttcaagggtgatctcacagctccatgttggagcactcctgttgtttcctagtgtgtgttccccccaggctactctattgaactgaaactattcttggttgtgcgttttttttttttttagatggagtcttgctctgtcacccagggtggagtgcagtggcgcgatctcagctcactgcaacctccgccacctgggttcaagtgattctcctgtttcagcctcctcagtagctgggaatacaggtgcatgctgccatgcccagtaatttttgtatttttagtagagatggggtgtcaccatattggtcaggctggtcttgaactcctgacctcaggtgatccacccgcctcggcctcccaaagtgctaggatgacaggcatgagccaacgcgcccagcccattgtatgtgtgtgtgtattttttttccctgccctatcctggtcttggccaaaaacaggagtgcttctaaaatgcaggcgccacacaagcaggaggcttatctgtcgttttcactgctgcatccccaggctggaagagggactggtacattctaagcacccagtaaatatttgttaaatgagtaaatatttgttaaattagtacataagccagtatctctatttcaacagccagaactaccgccttacctgtaacaaaagtcgtgcttctggaaggtctggcaagccaaagggaagatatccagaaaggcccaaagtgtggtgcaggtatcacaaaggtagagaacaatgtcctttaattcctgttgccaaaagaatacactgcattattctcctctgtccacacatacagatctgca

SEQ ID NO: 709736 - DNA, 868 bp, Homo sapiens
cagtgcttctgtttctctttttttcttatttttttgtgtgtgtgtgcgtataaagaggaacctctaaaaaaaactgcttgtttttgatcaaaccttctcccctctgcctgctaatgggatccaacggctaatgtccgttccttttgcaacccagaagagccctctctgaactctgtccctacctgctctcagcaacaatgcaaatcatgacatttttgacacagtgccatcatccctgaagcagggagttgcagagcaagagcttgagagtcaggtctacgtttacacacgtcccagctgggccacttattagtcatatcctctcaggcaagtcccctacattttaacctcagtttccttatctgtaagtggggatgatgacagcacttatctcacagggctgctgtgaggatccaattgacataacatatgtggagtgcttggcagaatgccaggtccccggaacactctccaataaaggttagcttagttatcactgctgttcttacattcgtcgccaaaggaaacttccccattcctatgtctgatgcatggccaattgcataatactaatacactcccaaggcagaatggtggcttacactgtaatctcagctgttcaggaagctaaagcaggaggatgacttgaggccaggagttcaagaccagctggaacaacatagtgagaccccatctactaaaaaaawtttttttttaattcgccaggcatggtggtgtgcacctgtagtcccaggtacctgggaggctgagttggggggatagctttactccaggaatgtgaagctgcagtgaaatatgattgcgccactgcactcttgcctgagtgacagagcaaggctttgtcttt

SEQ ID NO: 709737 - DNA, 1159 bp, Homo sapiens
tggtgaaacactgtctctactaaaaatacaaaaattgaccaggtgtggtggtgggcgcctggaatcccagctacttgggaggctgaggcaggaggattgcttgaacccgggaggtggaggttgcagtgagtcgagactgcgccattgcactccagcctgggaacaagagcaaaactccgtctcaggaaaaaaaaaaaaaaagatttagttgtgctcaagcatccagattatcttttcttttcaaaaccagccttactgactaaatgttaaatatgtactagtcgttattagtttgctgaatattacctagtgattattgagtatttattctcacctttcagacatgagcttctgaattcaacacgtgaagatttacagcttgataagccagcttcaggaggtaggtcttcaatctcgaggcagatcagaagattatgtgcaataattatttcacgcttaacattgatttcttctttatgttaccttccacatgaaataatatgtctctaactattaattatgtgccattacaggagaattcatgttgtcaaaattctaataatttctagaagaataaacgcatcttctttttattaacccattgtaaatacttataaatattgcatttatgggtagacagaagtaaaagaacaatatttgttctacttttgatgcaagatttatctggcataatgcattgaacagtttattattgaagtctacacgagtcaatggaacaagcattcattgaatgtccatgatatgcaggacataagaaggtttccttttagagcatggagccatttatatcatctcttaattgttagatgtattttgttttgttttgttttgttttttgagagggartcttgctctgttgcccaggctggagtgcagtggtgcgatctccgctcactgcaacctcccgcctcctgggttcaagcagttctcctgcctcagcctccctgtagctgggattacaggtgcctgccaccatgcccagctaatttttgtatttttcgtagagacagggtttcactatgttggccaggctgatctcaaactgctgacctcaggtgatctgcccacctcggcctcccagagtgctaggattacaggcatgagccaccgcgcccagcctgttagatgtgttttaaaa

SEQ ID NO: 709738 - DNA, 1159 bp, Homo sapiens
tggtgaaacactgtctctactaaaaatacaaaaattgaccaggtgtggtggtgggcgcctggaatcccagctacttgggaggctgaggcaggaggattgcttgaacccgggaggtggaggttgcagtgagtcgagactgcgccattgcactccagcctgggaacaagagcaaaactccgtctcaggaaaaaaaaaaaaaaagatttagttgtgctcaagcatccagattatcttttcttttcaaaaccagccttactgactaaatgttaaatatgtactagtcgttattagtttgctgaatattacctagtgattattgagtatttattctcacctttcagacatgagcttctgaattcaacacgtgaagatttacagcttgataagccagcttcaggaggtaggtcttcaatctcgaggcagatcagaagattatgtgcaataattatttcacgcttaacattgatttcttctttatgttaccttccacatgaaataatatgtctctaactattaattatgtgccattacaggagaattcatgttgtcaaaattctaataatttctagaagaataaacgcatcttctttttattaacccattgtaaatacttataaatattgcatttatgggtagacagaagtaaaagaacaatatttgttctacttttgatgcaagatttatctggcataatgcattgaacagtttattattgaagtctacacgagtcaatggaacaagcattcattgaatgtccatgatatgcaggacataagaaggtttccttttagagcatggagccatttatatcatctcttaattgttagatgtattttgttttgttttgttttgttttttgagagggaatcttgctctgttgcccaggctggagtgcagtggtgcgatctccgctcactgcaacctcccgcctcctgggttcaagcarttctcctgcctcagcctccctgtagctgggattacaggtgcctgccaccatgcccagctaatttttgtatttttcgtagagacagggtttcactatgttggccaggctgatctcaaactgctgacctcaggtgatctgcccacctcggcctcccagagtgctaggattacaggcatgagccaccgcgcccagcctgttagatgtgttttaaaa

SEQ ID NO: 709739 - DNA, 615 bp, Homo sapiens
taacttccttccagtcacatcattatgtaataacaaaatcactctcagtgtatacttaaaaataaagacatacctccaggatatcasaggttcaattccagaccacctcaataaagaaagtcacacaaattttttggtttcccagtgcatatacaagttctgtttatatgataccatagactattaagtgtgcggcagcactctgggaagctgcggcaggaggatctcttgagcccaggaattcaaagccagtctgagcaacatagcaagacctatcattaaagtgatcataaaaatataaattattcacactaattattcactggttgatattctatccatacccaacattcagactttctccatatcagcaataagggtgttttgctttcttatcatttgtgttcactgaagtaacactttaaatttccgtcaaaaatttttcctttgcattcatacttgtctaattgtttgtcataagaggtctagctttcctccttctcagcctctgacatgccttcctcactaagcttaatcatttcttacttttgatttaaagtgtgagatgtgtaactcttcctttcacttaaatactcacagaacattgtaggatta

SEQ ID NO: 709740 - DNA, 615 bp, Homo sapiens
taacttccttccagtcacatcattatgtaataacaaaatcactctcagtgtatacttaaaaataaagacatacctccaggatatcacaggttcaattccagaccacctcaataaagaaagtcacacaaattttttggtttcccagtgcatatacaagttctgtttatatgataccatagactattaagtgtgcggcagcactctgggaagctgcggcaggaggatctcttgagcccaggaattcaaagccagtctgagcaacatagcaagacctatcattaaagtgatcataaaaatataaattattcacactaattattcactggttgatattctatccatacccaacattcagactttctccatatcagcaataagggtgttttgctttcttatcatttgtgttcactgaagtaacactttaaatttccgtcaaaaatttttcctttgcattcatacttgtctaattgtttgtcataagaggtctagctttcctcctyctcagcctctgacatgccttcctcactaagcttaatcatttcttacttttgatttaaagtgtgagatgtgtaactcttcctttcacttaaatactcacagaacattgtaggatta

SEQ ID NO: 709741 - DNA, 291 bp, Homo sapiens
ttttcatcactgcaaacgtccttttcaatatggcctgagttataatcaaaatggaataatctactaccataggttcgtttctaagaatagaagagtttaagtatacagccctccatttatggttttgtgaattttttttaacattatcaaggctaaaaattaccttcctctttgttycttctacattcttgaaagcttacttaagaaacatactggtgattaacaatttttagtttttattttcaacatccactcttaaatttaatgcacttgcggcgggggggggggggg

SEQ ID NO: 709742 - DNA, 1053 bp, Homo sapiens
atctctacattttcccccttaggttaaattgtaaatttttttttttttttttgagacagtgtctccccccattacccaggctgaagtgcagtggtgccatcgtagctcactgcagcctcaaactcctgggctcaaaccatcctcccgctttagcctccccgtgtagctggggatacaggtgtacactaccaaacctggccaaaacttttaaatgtatcaccaaattgccctccaagtgaagttacacatatgtacactctcatgagtgacatttgagtggctatttccccatgatctctccaacatcggttattgtgattttttaaaagaccttgccaatgtcataggtaaaaaaaatagcatatcattgtttgaatctattgttattttcattatactgttttatttctggtagaatgtaaaattgcatacatactatttttacaactttataaaaatacatggaacacgcatgtttcaagtgtggaaagaacaacagaaaaatgtcagtagttgtatgatgggattgtaatataattcttttatgttgtaaattttttaaattaaaaagaatctctgtaaaaaaaaaaaaaaaaaaaaaaaagttcatatggaaccaaaaaagagcctgcattgccaagtcaatcctaagccaaaacaacaaagctggaggcatcatgcttcctgacttcaaactatactacaaggctacagtaaccaaaacagcatggtactggtaccaaaacagagatgtagaccaamggaacagaacagagccctcagaaataataccacacatctacaaccatctgatctttgacaaacctgacaaatacaagaaatggggaaaggattccctatttaataaatggtgctgggaaaactggctagccatatgtagaaagctgaaattggatcccttccttataccttatacaaaaattaattcaagatggattaaagacttaaatgttagacctaaaaccataaaaaccctagaaagaaacctaggcaatagcattcaggccataggcatggacaaggacttcatga

SEQ ID NO: 709743 - DNA, 1436 bp, Homo sapiens
catgtcttagaagcaagacactgtatttctaagtttttccatgtttgttagaaaggcacattgctatacatgtattttttaactggtttgttgcttcattcaacattatattttcttggttatttttctagtagaaaagaaaatgcttaaaggtacagatggcctcctttttctcttccttttagtctctcaatgtcaagttattactaaaatttaaaaccaccctttttgtagtccctatttcaaaaacttattggggcagcttttgcctatatgctcttagctaggttgaaaaaaggcctgatgaccagtgagcataaggagaaacaatgaagaaattcaaaaacatttacttaaagactattactaaaacatgataacttaaggatgaaaataacaggtcagatcactggaaaatgaatatcaatagctcttattttctcattttataccaattaacttttatatggtgctgttggactcagatactaaacgttatgtatggctacctaatgttgtttcctttttcaaagggcaaaatcatttacagttctaatatgctacaatgagatagcgatatattcctttatcagaaaatgtgttaaatagctgaagtgggcagtctgaagtagaataacaggttaacaataatttccaagaattaacatgaaaacttgtcttaaaacgtaaatgtaaattaaaaatagtaaaatgtatattcccctttttcttttcagcagtcattcctttgtactctggatgccgaatgttgcaatactgtctgcccgcgaacctttccattcttacagcaaatcactcgtccataaagacagactgtagtgattctaatgcttctgtaaaatatctacttattggcactgtcatcagaataaatttaactttattttaaatgctgcaaaatgtaaatctctaattattttacatttctggacatggggtattagaattatgattgctatataatgtattttctaaagcatcagatcattagcaatttgaagaatgattaaataattacctatcaaaagccatggtaaatgacaattttaatagtgacacaaagccttcactaaattatgttgaggtaaatatattttatgtttacagtcttgaaatccctaagctcaaaattacagtaatctctattgtgttttgtttcttgttcattgattatcccttagcctagaacacaaccttggaatatgacattaaaatagttcagggatatgtgtgtgtagaaatatatgtatttttttcccattggaaatatacatatatattttttccgctgaaaaaaaaatatatttctttttcccactggaaatataaatatagattttccactggaaatatatatatatatakagagagagagaaatagatatagatatattttccactggaaatatatatta

SEQ ID NO: 709744 - DNA, 1540 bp, Homo sapiens
cccagctactcgggaggctgaggcaggagaatcacttgaacccaggagttgcaggtgaagtgagatcgtgtcattacactccagcctgggcaacggaacaagaatccataaaaaaaaaaaaaaaaaaaaaaaaaaagtaacattgaattacacaaaatgaatagtgggaggatgaatacggttttgttagcttttgctttgtttttattttttgtttcatgtgggagtgagggatttatgaatcctgcaaaattgaaaattatttgatggataaagaggtcctttggctcattaattaatcaagttaaattattattatagagcacctattatgagtcaggtatctttctggacactgggtatacagcagtaaagatattaaacaaaaacccataaattttggtgagggaggaaagacaataaataaaataacaacaacaaaaacagatatagtatcttagatgatgataggcaaaatggaggaaaataaagaaggccatagagatagagtactaatttaagacaggtcagtcaagaagacctcatgactcaaaaaaataaattcaaaaatggctaccaggtataggagtcggcaatttccagagaagcaacattacatactccaaagaatatgaaagatacagttaccggaacttttgagaattatttctaccaacccataaagtaaagctctttaatgatagttggtgactttttactgaagaaacacagatatttgccaaatgtccatctgagaaaaagagaatccacattrctggatatccacaattgtcagacttggtgatgggaaggtaataaaccttattcacttaatctttacaaataaacctttgatcattctgattctacccatttttaactctctcttacataaaatattccaaatgaagaagagttctactgataaattaataaaaatcactgtccacatgccacctttcattaaaatgtacacttcttcctgtgcttttgctaaatcatgatgaaaatacagtattactaagtcatacctagggagcaagcttaaacccagaagaaataaattctgactgtgtttgtgtctcttgggattttttttttctgtggagtaaagtgaaagatttaaggaaacaggcggtaatgtttttccatttttactcagagctaaacaattaaatttgtaagagtaagtaggctgcaagataaaactgtccggttacgtaaatgtcaacaaataaaatttgatatcagactgacagggtcttgaaaaatacccaaaacaaataaaatatcattccatatttggctgtgagcaaacaaaaagtacaatatagtgcttggatatattttatgggtcgaattttgtctcctccaaaaaaatgatatattggagtcttaacccttgatatctcaaaatgtgaacctatttgaacatagggtctttacagaggtaatcaagttaaaatgaggtcattagagtaggcctaaatcaatatggtagtatccttataaaagggaaatttgggaacagaggtagaca

SEQ ID NO: 709745 - DNA, 1540 bp, Homo sapiens
cccagctactcgggaggctgaggcaggagaatcacttgaacccaggagttgcaggtgaagtgagatcgtgtcattacactccagcctgggcaacggaacaagaatccataaaaaaaaaaaaaaaaaaaaaaaaaaagtaacattgaattacacaaaatgaatagtgggaggatgaatacggttttgttagcttttgctttgtttttattttttgtttcatgtgggagtgagggatttatgaatcctgcaaaattgaaaattatttgatggataaagaggtcctttggctcattaattaatcaagttaaattattattatagagcacctattatgagtcaggtatctttctggacactgggtatacagcagtaaagatattaaacaaaaacccataaattttggtgagggaggaaagacaataaataaaataacaacaacaaaaacagatatagtatcttagatgatgataggcaaaatggaggaaaataaagaaggccatagagatagagtactaatttaagacaggtcagtcaagaagacctcatgactcaaaaaaataaattcaaaaatggctaccaggtataggagtcggcaatttccagagaagcaacattacatactccaaagaatatgaaagatacagttaccggaacttttgagaattatttctaccaacccataaagtaaagctctttaatgatagttggtgactttttactgaagaaacacagatatttgccaaatgtccatctgagaaaaagagaatccacattgctggatatccacaattgtcagacttggtgatgggaaggtaataaaccttattcacttaatctttacaaataaacctttgatcattctgattctacccatttttaactctctcttacataaaatattccaaatgaagaagagttctactgataaattaataaaaatcactgtccacatgccacctttcattaaaatgtacacttcttcctgtgcttttgctaaatyatgatgaaaatacagtattactaagtcatacctagggagcaagcttaaacccagaagaaataaattctgactgtgtttgtgtctcttgggattttttttttctgtggagtaaagtgaaagatttaaggaaacaggcggtaatgtttttccatttttactcagagctaaacaattaaatttgtaagagtaagtaggctgcaagataaaactgtccggttacgtaaatgtcaacaaataaaatttgatatcagactgacagggtcttgaaaaatacccaaaacaaataaaatatcattccatatttggctgtgagcaaacaaaaagtacaatatagtgcttggatatattttatgggtcgaattttgtctcctccaaaaaaatgatatattggagtcttaacccttgatatctcaaaatgtgaacctatttgaacatagggtctttacagaggtaatcaagttaaaatgaggtcattagagtaggcctaaatcaatatggtagtatccttataaaagggaaatttgggaacagaggtagaca

SEQ ID NO: 709746 - DNA, 1082 bp, Homo sapiens
aaaataaacaaagtgaaagtgatactttaaataagggacatattaacttagattatcaacaagacttgctaagatttcattgtccaagtacagcaatgaaaagataagcagccagagtcttttcaatataaatcttwtcccattccttctatgattataatcttccctttaataaatttattcaatcaatgttgagcacctacttcatgccaggcactagtcaggcatttaggactatagtggcaagagaagcaaaattcctgctcttgtagagcttatattctactggagaagaaagataatattcaattaaatacacaatataatgtatttaataagtaatatatacaaatttagaggcagaaatagagatttatagtaataagcagacttctttagagaacaaattaagaaaagtctctctgtggaggtaaaatttgagcagaaatctgtatgtaggagtcagcatacgtatatctggggagatagaggcacagactcgtgccctgggtgggggcaaggttggcccatccaaagaacagcatggcctgtggtcggagcagagtgaggaggggagaaagtctggagagtgatcaatgaggtcatgaaacaagcagagatcacatcacatatagccttgttaagaaatttctaatatattttgaatttgatgagatcctaatagagtttaaactgtgctgcaagtaacataatctgatgtacattttagaaaatcacttaggagctgtttagagaactgatggcagtaagggcaagtgtagaaggagcctaagggctgtgcacattgtaaataaaagatgatggtggctctggtctatgatcctcatagccacaggaagtaaatccaaactttgtaaggcagcagattagatctccagtgatctggccctcacttgcctttctgattgtatttacagtaaacccttttctccccctctttgctttatgtctgttcatcaatctgaaactttgtccatttattccctctagttacaatgacctccatttttctctccatggtccagcagaggtctcaatcttcatgactcagacctcttctt

SEQ ID NO: 709747 - DNA, 1082 bp, Homo sapiens
aaaataaacaaagtgaaagtgatactttaaataagggacatattaacttagattatcaacaagacttgctaagatttcattgtccaagtacagcaatgaaaagataagcagccagagtcttttcaatataaatcttttcccattccttctatgattataatcttccctttaataaatttattcaatcaatgttgagcacctacttcatgccaggcactagtcaggcatttaggactatagtggcaagagaagcaaaattcctgctcttgtagagcttatattctactggagaagaaagataatattcaattaaatacacaatataatgtatttaataagtaatatatacaaatttagaggcagaaatagagatttatagtaataagcagacttctttagagaacaaattaagaaaagtctctctgtggaggtaaaatttgagcagaaatctgtatgtaggagtcagcatacgtatatctggggagatagaggcacagactcgtgccctgggtgggggcaaggttggcccatccaaagaacagcatggcctgtggtcggagcagagtgaggaggggagaaagtctggagagtgatcaatgaggtcatgaaacaagcagagatcacatcacatatagccttgttaagaaatttctaatatattttgaatttgatgagatcctaatagagtttaaactgtgctgcaagtaacataatctgatgtacmttttagaaaatcacttaggagctgtttagagaactgatggcagtaagggcaagtgtagaaggagcctaagggctgtgcacattgtaaataaaagatgatggtggctctggtctatgatcctcatagccacaggaagtaaatccaaactttgtaaggcagcagattagatctccagtgatctggccctcacttgcctttctgattgtatttacagtaaacccttttctccccctctttgctttatgtctgttcatcaatctgaaactttgtccatttattccctctagttacaatgacctccatttttctctccatggtccagcagaggtctcaatcttcatgactcagacctcttctt

SEQ ID NO: 709748 - DNA, 1546 bp, Homo sapiens
tgctctgcagggactaaggttccccaggatggctgaggcagggagagacctttcagcttactgatgcccaggcagtcatggcagagatgtcaagaggatggaggtggggatttgaagcccagctctcccattagtgtattgtgtcgccatcattacactcttatagtttaatgtctacgggatgcctcaggctaataacrtgagaagagtagcaaatgacctgagaatctcactcagctctgaaggcacaataatatgcataattaaaaggtattgtccaatattatttgatgtctccacttggatgaatgaaccaggttgagtgaggatgacattttccctctgctgcagcccctatatggatggagattgggaaccactgggagaagccatattcaaccaagagttcccgtgatgaatgaaacatagtaccgcatgttctccctcataggtgggaattgaacaatgagaacacttggacacaggaaagggaacatcacacaccagggcctgtcatggggtggagggagggggaagggatagcattaggagatatacctaatgtaaatgacgagttaatgggtgcagcacaccaacatggcacatgtatacatatgtaacaaacctacacgttgtgcacatgtaccctagaacttaaagtataataataaaaaaaaagacatgaagggaaaaaaaaaaaaggaatactgagaattaagagagtctgtggaactagaaaaaaaaaaaaaaagaaacctaggctctcgattgctggctttctcttttgcttctctaccacgcctcccctccaagaccttgacccagggaagggaggtcaggagattcatcttgcccctgtgaagctgtctcaatctctgtgcactcagcttaaagattaggactaagaccagagggtttctgctcaggcacacaggctataatgcagtgaagagcttcactgcttcattcacgaacttcttcaagttcaacttagctgaacgctacactgctgggacagacacctttcaggacgtgagattgctcaacagggcaaagcatttgcttattaagcaactatgtatgtatcaaaactcacttttagttcctcacctcactatgccccccaaacctaaactattatatcaagaacttcgcccagccccagtgagaccacctgttaacctcacaatgggtaggctccgtctcttggtgggtaccaactcaatgaccacaaacagggaggatttaacaagggggattttattacttgcaacaagttcaggagagcacagaggagagttccccagagcatccccagctgagtcgggttttataagcatagcgtaatgaggtgtgatctgattggatcctgcaataaggtgatgtcaggaggcatgatctgactggacactgtcatggggtgaccccagagcttgatctgattggatcctggattctgccatgaggtgtcggcttcttaattcagtccccacccctcagtcgagcacttaggtttcccctatgcttgcacacttggttcatctgg

SEQ ID NO: 709749 - DNA, 1546 bp, Homo sapiens
tgctctgcagggactaaggttccccaggatggctgaggcagggagagacctttcagcttactgatgcccaggcagtcatggcagagatgtcaagaggatggaggtggggatttgaagcccagctctcccattagtgtattgtgtcgccatcattacactcttatagtttaatgtctacgggatgcctcaggctaataacatgagaagagtagcaaatgacctgagaatctcactcagctctgaaggcacartaatatgcataattaaaaggtattgtccaatattatttgatgtctccacttggatgaatgaaccaggttgagtgaggatgacattttccctctgctgcagcccctatatggatggagattgggaaccactgggagaagccatattcaaccaagagttcccgtgatgaatgaaacatagtaccgcatgttctccctcataggtgggaattgaacaatgagaacacttggacacaggaaagggaacatcacacaccagggcctgtcatggggtggagggagggggaagggatagcattaggagatatacctaatgtaaatgacgagttaatgggtgcagcacaccaacatggcacatgtatacatatgtaacaaacctacacgttgtgcacatgtaccctagaacttaaagtataataataaaaaaaaagacatgaagggaaaaaaaaaaaaggaatactgagaattaagagagtctgtggaactagaaaaaaaaaaaaaaagaaacctaggctctcgattgctggctttctcttttgcttctctaccacgcctcccctccaagaccttgacccagggaagggaggtcaggagattcatcttgcccctgtgaagctgtctcaatctctgtgcactcagcttaaagattaggactaagaccagagggtttctgctcaggcacacaggctataatgcagtgaagagcttcactgcttcattcacgaacttcttcaagttcaacttagctgaacgctacactgctgggacagacacctttcaggacgtgagattgctcaacagggcaaagcatttgcttattaagcaactatgtatgtatcaaaactcacttttagttcctcacctcactatgccccccaaacctaaactattatatcaagaacttcgcccagccccagtgagaccacctgttaacctcacaatgggtaggctccgtctcttggtgggtaccaactcaatgaccacaaacagggaggatttaacaagggggattttattacttgcaacaagttcaggagagcacagaggagagttccccagagcatccccagctgagtcgggttttataagcatagcgtaatgaggtgtgatctgattggatcctgcaataaggtgatgtcaggaggcatgatctgactggacactgtcatggggtgaccccagagcttgatctgattggatcctggattctgccatgaggtgtcggcttcttaattcagtccccacccctcagtcgagcacttaggtttcccctatgcttgcacacttggttcatctgg

SEQ ID NO: 709750 - DNA, 1485 bp, Homo sapiens
cctgaagggtgcccctcatgcactactcgaaatattcctttcatttaaacaaagtttttgaggccctttgtactctgcatgtgaacaccaagggcagcctgatttaggaatgagtttcattctcattattcattaaagaacatttgtttcctctccaccggggagctctgccgactgtgcaggcatctttttgacgattttctttcaattctgcttattgatccaatgaagaatcccagtacttctctgggagttggtttacattctacattttaagacgaggagccaggaatgtaagtacaactgtaaaaaggaaaagaaggcacgatggaaacagaggctgtgcaggagcgtccgtctgcctcgccgttatctctggggcaaggtgcattggctccctggggttctatgaccacaataactgactttcataaaacccgtggcaaagtgaatgatagaatctcaaagctgtaaatggcctaataaatcatcacattcaaacgtccacgcgctgcagatatctctaccgtaatgttcctgataaacacgcatccggtttctgttgggccaggtccaacgttgctaagactccactatggcggctccacttgcccggagcttttcctcttaagcgtcacccgcggatcctgatattgcttctggactgtctgccagcgcccctcctgccagatccttcaagctgactctaatcaggcctttatagccaccgttccaactcaatcaccctttgtcaatttcaccaggccttccatgctgtcaaacccaatgctcagtcttcagctctcatctgatttgttctagtggcagcgttccacacagccgatcgcttccgtctcattgagtcattttcttcatttggcttccaggacaccaaagcctctctgttttcctgccgcctccccagctgtgccttctccatcccctttgcttcttcctcctccccttctcctcactttctaactccggaggccataatctcctctctacctacgccccgtcccttggcgacctcatccagacttgtagcttcaagtcccatctacgtgctgatggtgctacaagtatgtctccagcccagtcctctcccagcaatctcagacacagaatccagcttcctccacttcactgatgtcctaactgtccttccagctggcacctgccctttagggtcggttccaacagagtcctccatgaagatggagtcaacattttacaagaygctcgttgacctcagtcatctcttaccacttgtgctctggttggtcttggaacactctgggccatctcaaggcctttgctcaagcttctctgtgattgactacttgtctgaatatatccacagggcccctcactcacctttctgagctcagagtctttacgtttcaataactagacacgcaatttttttcttttgtaatctcccggactatcttgagattcagttttgttctgagttttcttttc

SEQ ID NO: 709751 - DNA, 1378 bp, Homo sapiens
tgcaaaacatataaataaaacttgctgaaataaagccagtcatttatttttcgatctgtggccaagtgaaaaataaaactttcgcctcatagcttctggagtgtgtcctatagatttcaacctgatctgccatattcatgaaatacttcaaaattaaccacaaagcttcaaatctaatcttcagagatgtaattatttccaaataaattggaagacccttgaaatacagaaggcagggtaagggagatatcatctggtgagaacaaaactccttttagcagtatgaaaataaataatacacaacaattatcataccttcttttgggtctacagcgcaaaataaaaggttgtccaaatgaatataatttgcagctctacgttttgccacctgcaatgaattacgtgttgaacttgttgaacacacctggaccycatgaaaacccctccaatcccaccatcatccaaagattctgattctatagctggtgtcattcctgaaaatctacgtttaatatattacaccttttccatagataaaccttgaaaacactcttctagagggtaatattttggagctattagacatatggattgagttactttttaagaagcactgttctaaatagcaatataattatcctgagacaacaaaacagtccatgcccttcactagttctataacctcatgctatcatggcccatcatgctatactcaattcgccctccctctaaatcactaaatgtgcgttcatccagtgcaggaagcagttctttcacatctgcgcacctccagtatcttatacaacgtgcagaacagtgtaggcattcagtaagtgtgtatggaaatgtggaaacaatcatttccaagcattttcaaggttgtatcaacatctataactaggttcaccaagtcatcgtcattcagtattataatactttgacattctgtgactttctggccacaaaagctgtcctcctacacgacaagcatacatcaccacctaattcttaaaaattgctagattaactcaacactacctgtcacttaaaaagtagtagaatatggctagggaagtggcaaggatacaccctaatccatgtaattccactctggggtcttagaattttagattctaaaattctaagaccttattcagttaccttattctctacatgttgactgctgcagattcaaaaacccaggaaggaatcactgtggagaagggagagaaaatggactgtggagaggaaaaaaacaaacagaaaagaggaccattcctaatactatagtcctgctgataatctagtctaaaatcccacaaaattaagtcacaacatcaaactatttacattaggagatcatccactcagagaatgc

SEQ ID NO: 709752 - DNA, 1378 bp, Homo sapiens
tgcaaaacatataaataaaacttgctgaaataaagccagtcatttatttttcgatctgtggccaagtgaaaaataaaactttcgcctcatagcttctggagtgtgtcctatagatttcaacctgatctgccatattcatgaaatacttcaaaattaaccacaaagcttcaaatctaatcttcagagatgtaattatttccaaataaattggaagacccttgaaatacagaaggcagggtaagggagatatcatctggtgagaacaaaactccttttagcagtatgaaaataaataatacacaacaattatcataccttcttttgggtctacagcgcaaaataaaaggttgtccaaatgaatataatttgcagctctacgttttgccacctgcaatgaattacgtgttgaacttgttgaacacacctggaccccatgaaaacccctccaatcccaccatcatccaaagattctgattctatagctggtgtcattcctgaaaatctacgtttaatatattacaccttttccatagataaaccttgaaaacactcttctagagggtaatattttggagctattagacatatggattgagttactttttaagaagcactgttctaaatagcaatataattatcctgagacaacaaaacagtccatgcccttcactagttctataacctcatgctatcatggcccatcatgctatactcaattcgccctccctctaaatcactaaatgtgcgttcatccagtgcaggaagcagttctttcacatctgcgcacctccagtatcttatacaacgtgcagaacagtgtaggcattcagtaagtgtgtatggaaatgtggaaacaatcatttccaagcattttcaaggttgtatcaacatctataactaggttcaccaagtcatcgtcattcagtattataatactttgacattctgtgactttctggccacaaaagctgtcctcctacacgacaagcatacatcaccacctaattcttaaaaattgctagattaactcaacactacctgtcacttaaaaagtagtagaatatggctagggaagtggcaaggatacaccctaatccatgtaattccactctggggtcttagaattttagattctaaaattctaagaccttattcagttaccttattctctacatgttgactgctgcagattcaaaaacccaggaaggaatcastgtggagaagggagagaaaatggactgtggagaggaaaaaaacaaacagaaaagaggaccattcctaatactatagtcctgctgataatctagtctaaaatcccacaaaattaagtcacaacatcaaactatttacattaggagatcatccactcagagaatgc

SEQ ID NO: 709753 - DNA, 959 bp, Homo sapiens
gcagttagatgtgtcttgaattagaaatataaatttctgagttatgtgcatacagaagaaaatgaatcttcatgtgttaaatgagattgattaggggaaaaaaatatacaatgaggaggaggcccaggagctacccttgattaactccaatattaaatggacaaatttcagcataaatccgtgttttatttggcccataaaagaaatgttcttggaggaattggctggtagcatttatataatgggagattacacataaaattccacattcctagcttctcttgaaaaccagaagctatgaccatattgatctggtattctaactgaaacacaggtggccaaagtggagaagcagctaacctcccttagatgcagcatgcattttgcagttattcacaatatccaccactccctaytctccatcacctctctgggtgggctgccatttgttgtcacaatttgtggttttccaaaagcccaattccattacctgtctgccctgttgcgtgtattcaaatttgtggggtctgcatagactttaaattcttctaaagtctaggtggcaataaatacctgtaaacatacacttattgtatgctgtgataagaactcaagtagacacatactgaaagtcctcgagtaacagaggagggagtcaattgctctgcctggaaaaatagaggaaacctaaggaggagcggtgtatttttctccagccctgaatgacatctaagattactttttgttggttttattttgctttatcttaagagagaaatgggaataaaattcggagaaaataaaattttataaagtcatagatgtttcctgggagtcaattaaaaatttgctgtatgggagaagagagaccaaatttgggaagaaggtcaagatggattctgagagataatttatgacaggatgaaatagaaatcccatcctttaagcactagagagcc

SEQ ID NO: 709754 - DNA, 959 bp, Homo sapiens
gcagttagatgtgtcttgaattagaaatataaatttctgagttatgtgcatacagaagaaaatgaatcttcatgtgttaaatgagattgattaggggaaaaaaatatacaatgaggaggaggcccaggagctacccttgattaactccaatattaaatggacaaatttcagcataaatccgtgttttatttggcccataaaagaaatgttcttggaggaattggctggtagcatttatataatgggagattacacataaaattccacattcctagcttctcttgaaaaccagaagctatgaccatattgatctggtattctaactgaaacacaggtggccaaagtggagaagcagctaacctcccttagatgcagcatgcattttgcagttattcacaatatccaccactccctattctccatcacctctctgggtgggctgccatttgttgtcacaatttgtggttttccaaaagcccaattccattacctgtctgccctgttgcgtgtattcaaatttgtggggtctgcatagactttaaattcttctaaagtctaggyggcaataaatacctgtaaacatacacttattgtatgctgtgataagaactcaagtagacacatactgaaagtcctcgagtaacagaggagggagtcaattgctctgcctggaaaaatagaggaaacctaaggaggagcggtgtatttttctccagccctgaatgacatctaagattactttttgttggttttattttgctttatcttaagagagaaatgggaataaaattcggagaaaataaaattttataaagtcatagatgtttcctgggagtcaattaaaaatttgctgtatgggagaagagagaccaaatttgggaagaaggtcaagatggattctgagagataatttatgacaggatgaaatagaaatcccatcctttaagcactagagagcc

SEQ ID NO: 709755 - DNA, 959 bp, Homo sapiens
gcagttagatgtgtcttgaattagaaatataaatttctgagttatgtgcatacagaagaaaatgaatcttcatgtgttaaatgagattgattaggggaaaaaaatatacaatgaggaggaggcccaggagctacccttgattaactccaatattaaatggacaaatttcagcataaatccgtgttttatttggcccataaaagaaatgttcttggaggaattggctggtagcatttatataatgggagattacacataaaattccacattcctagcttctcttgaaaaccagaagctatgaccatattgatctggtattctaactgaaacacaggtggccaaagtggagaagcagctaacctcccttagatgcagcatgcattttgcagttattcacaatatccaccactccctattctccatcacctctctgggtgggctgccatttgttgtcacaatttgtggttttccaaaagcccaattccattacctgtctgccctgttgcgtgtattcaaatttgtggggtctgcatagactttaaattcttctaaagtctaggtggcaataaatacctgtaaacatacacttattgtatgctgtgataagaactcaagtagacacatactgaaagtcctcgagtaacagaggagggagtcaattgctctgcctggaaaaatagaggaaacctaaggaggagcggtgtatttttctccagccctgaatgacatctaagattactttttgttggttttattttgctttatcttaagagagaaatgggaataaaattcggagaaaataaaattttataaagtcatagatgtwtcctgggagtcaattaaaaatttgctgtatgggagaagagagaccaaatttgggaagaaggtcaagatggattctgagagataatttatgacaggatgaaatagaaatcccatcctttaagcactagagagcc

SEQ ID NO: 709756 - DNA, 959 bp, Homo sapiens
gcagttagatgtgtcttgaattagaaatataaatttctgagttatgtgcatacagaagaaaatgaatcttcatgtgttaaatgagattgattaggggaaaaaaatatacaatgaggaggaggcccaggagctacccttgattaactccaatattaaatggacaaatttcagcataaatccgtgttttatttggcccataaaagaaatgttcttggaggaattggctggtagcatttatataatgggagattacacataaaattccacattcctagcttctcttgaaaaccagaagctatgaccatattgatctggtattctaactgaaacacaggtggccaaagtggagaagcagctaacctcccttagatgcagcatgcattttgcagttattcacaatatccaccactccctattctccatcacctctctgggtgggctgccatttgttgtcacaatttgtggttttccaaaagcccaattccattacctgtctgccctgttgcgtgtattcaaatttgtggggtctgcatagactttaaattcttctaaagtctaggtggcaataaatacctgtaaacatacacttattgtatgctgtgataagaactcaagtagacacatactgaaagtcctcgagtaacagaggagggagtcaattgctctgcctggaaaaatagaggaaacctaaggaggagcggtgtatttttctccagccctgaatgacatctaagattactttttgttggttttattttgctttatcttaagagagaaatgggaataaaattcggagaaaataaaattttataaagtcatagatgttycctgggagtcaattaaaaatttgctgtatgggagaagagagaccaaatttgggaagaaggtcaagatggattctgagagataatttatgacaggatgaaatagaaatcccatcctttaagcactagagagcc

SEQ ID NO: 709757 - DNA, 945 bp, Homo sapiens
acacaaagcataatatactccaaatcaggagtcctaaataatctgactccttaattgtgacacttaaactctgtgagtctcagcttcctcattattaaattaatttgcctttcatttaggtccttttccagatctaaaatcttatgattcaaaacacacaaatctgtgatgggtacaaagggaaaagaggtttgcagaggaaccaagagaacctacaaattaactattattcccatttttaagactaaaatattctaaatatatatttttaaattacatttttttgataaaacttggaactaaaacagtatattttcagtaaaattccattttacaattaaatataattgttttaatcctgtgctaaatgcaaaatattgtaccctcctatcattgcctccctttcctattaggagtacttccttttgattagtaaygaagccacaaaagtctttagtatctgaggaataaatttatatacagtgtactttttggtaccaattagaaacacagtttgtatataatgtaagtcccttgcctaaatgatgttttaatgagcattgaagtatgctgatccaaaccacctattttagtttcctagaaattaatcagcttttttaaaaacatagagccttctcccacttccactcactgaaaaagaattcaagaatatgtgtgcatacatgtagtccttaccattaagtaaggatttgtagaatgaaggaattcaaaaaaaagaataaaatgtttatctctttaatgctaatccatgtatgaaagctagaaaataacttgccaactgaatgatagaatggtaaacaacactcatttcgaagtatatcaaaggactgatgacacaaaaacagctatggaaaatagaatcatattctctccaggcaattgaagaaaatgtcagtactttgacacttctgtaagggcttagga

SEQ ID NO: 709758 - DNA, 3132 bp, Homo sapiens
gcctggagtgcagggcatgatcccggcttactgcagccgcgacttctaggctgaagcaactctcccgcctctgcctcccgagtagctgggactacagttactcaccaccatgcccagctaatgattttctaatttttttagagatagggtcttgttatattgcccaggctggtctcgaactcctagcgtcaagcaatcctcccacckcccaaagtgctgggattgctggcatgagccaccatgccaacatttggtggaatttttttttaagtgatgccttcagcaaagcagaaattgccctttctcaaaatgatgagctcatggttgagaaccttgcagatactcctgggacctgccagcctcgccgcctcacccttcatgtgttccctaccctcttacttgaaggctggctagggtagcaggtgttttggggtgtgtgtgtgtgtgcgtgtgtgtgtatgtgtgtgtgtgtgtgtttgagacagtgtctcactctgtcacccaggctggaatgcagtggcaccatctcggctcaccgcaacctccacctcccgggttcaagtgattctcctgcctcagcctcccgagtagctgggattacaggcgtgggccaccgcacccagctaatttttatacttttagtagagacagggttttgccgtgttggccaggctggtctcgaactcctgaccccaagtgatcggcccgcctgggcctcccaaagtgctgggattacaggcgtgagccaccacgcccggctggtagcaggtgtttcattcaaactcattcacgccacctggttcaccccgtccggggcctcatctctgcccatgaacatcactgtggtcagcagagtcctggagtgtccagactcatgtgggggtctcatctcctggatcagcggcaggtggctttcagggctcccgccccgctatagaccccaaccctgcatccaggccccgctgcaggcaccttcacaggagcgggaggtgggtgggctgctgctgaccaaagccgctgtgcccgcagaacaagcactgcctgctggaggctgggatcggctgcacaagagacttgatcaagtccaacatctaccccatcgtgctcttcatccgggtgtgtgagaagaacatcaagaggttcaggtagggctcccagacccctaagggctgtcccctcctgtccctagcaccccaccaagcctccatggatcgcaggaggcctgtgtgcccccacctcatgcaccccttttgtaaaccctcaccaagtacgggactgaccttgcagagctgatgccaaggacagcggccgagatggtgactcacatatggggcgcatcccaggggacaagagctgggagggacggggcggagtgcccatcacccagggtggtccgggaaggcctggggtatccatcagcgagacccatggcagtgaggggggcctaggagatgagaaagaagacgcaatctgggcagcaggggaacagctggtgctcagaccctgagacagatgtttgggcggaatggtgagggacggaggggtgaggggcggagtggtgagggacagaggggtgagaggctgaggagtgaggggcggagggtgagggacggagagtgagaggctgaggggtgaggggcgcaggggtgagaggcagagggtgaggggtggaggggtgaggggcgcaggggtgaggggcggaggggtgagaggctggggagtgaggggcagagggtgagggacagaggggtgagaggctgaggagtgaggggcggagggtgagggacggagagtgagaggctgaggggtgaggggcagcgggtccaggccatgcagggccacgggaggctgcgacatcttgttctgggtgcatctggaggccactgaaggtggcatggtccactttagggtataaacgcacctctcacctctggacacgggcagggtggcggtgtgggccgggcttctgtctgagaggcgatgagaggcagtctgactccgaatccgtgttcagggtcgagcctgcaggattcgggaaagggttcactctggggttccagagaaccagaggctgggcgcggtggctcacgcctataatccccacactttgggaggccaaggtgggcacatcagctgaagttggtagtttgagaccagcttggccaacatggtgaaaccccatctctactaaaaatacaaaaaaaattagctgggcgtggtggcgggcacctgtagtcccagctactcaggaggcagaagcaggagaatcgcttgaacgtgggaggggcaggttgcagtgagctgagatcgagccactgcactccagcctgggcgacagagtgagactccatctcagaaaaaaaaaaacaaaaaaaaaaaaacgaaaggacggcgctgaggtttggggcctgggtgatgaggacagactggcccttaagtggcttcatctcggatccccgcccctcctcgcacgcacctgcaaaataaatgtcctgccaccattttgcagagggaatcacagactgagagtttaggcccattcattccttttcaccagatactcactgagccattgtgaagggttaggctctggggaacgcagcagtgagcaaaagagacgggcatccccctcgatacctcacacccgttaggctggccaggaccaaaaggacagaaactgacaagtgttgacgaggagggtagacgtcggaacccggtgcacagctgctggaaatgcaaaagagagcggccactgtggaggacagcatggcgatgcccccaaaaattaaaaatagaatactatataatccagcaaccccacctgcgggcatatccccaagagaattgagagcagggtctgtaagagacatatacacgcccgtgttcacagcagcgttactcccaatagccaaaacgtagacgtcacctaagggtcggtctgtggggagtgaatacacacaatagggcccatccatacaggctaggaaggtggcaagagctgaaaaccttgcaaactgttaacaaaaaaagagttgaaacaaagaaacaataatacatttaatgcatgagaaatactagcatggtacatacccccttccctgatctgtcctgcctgggaatgtgtttatggtg

SEQ ID NO: 709759 - DNA, 3132 bp, Homo sapiens
gcctggagtgcagggcatgatcccggcttactgcagccgcgacttctaggctgaagcaactctcccgcctctgcctcccgagtagctgggactacagttactcaccaccatgcccagctaatgattttctaatttttttagagatagggtcttgttatattgcccaggctggtctcgaactcctagcgtcaagcaatcctcccacctcccaaagtgctgggattgctggcatgagccaccatgccaacatttggtggaatttttttttaagtgatgccttcagcaaagcagaaattgccctttctcaaaatgatgagctcatggttgagaaccttgcagatactcctgggacctgccagcctcgccgcctcacccttcatgtgttccctaccctcttacttgaaggctggctagggtagcaggtgttttggggtgtgtgtgtgtgtgcgtgtgtgtgtrtgtgtgtgtgtgtgtgtttgagacagtgtctcactctgtcacccaggctggaatgcagtggcaccatctcggctcaccgcaacctccacctcccgggttcaagtgattctcctgcctcagcctcccgagtagctgggattacaggcgtgggccaccgcacccagctaatttttatacttttagtagagacagggttttgccgtgttggccaggctggtctcgaactcctgaccccaagtgatcggcccgcctgggcctcccaaagtgctgggattacaggcgtgagccaccacgcccggctggtagcaggtgtttcattcaaactcattcacgccacctggttcaccccgtccggggcctcatctctgcccatgaacatcactgtggtcagcagagtcctggagtgtccagactcatgtgggggtctcatctcctggatcagcggcaggtggctttcagggctcccgccccgctatagaccccaaccctgcatccaggccccgctgcaggcaccttcacaggagcgggaggtgggtgggctgctgctgaccaaagccgctgtgcccgcagaacaagcactgcctgctggaggctgggatcggctgcacaagagacttgatcaagtccaacatctaccccatcgtgctcttcatccgggtgtgtgagaagaacatcaagaggttcaggtagggctcccagacccctaagggctgtcccctcctgtccctagcaccccaccaagcctccatggatcgcaggaggcctgtgtgcccccacctcatgcaccccttttgtaaaccctcaccaagtacgggactgaccttgcagagctgatgccaaggacagcggccgagatggtgactcacatatggggcgcatcccaggggacaagagctgggagggacggggcggagtgcccatcacccagggtggtccgggaaggcctggggtatccatcagcgagacccatggcagtgaggggggcctaggagatgagaaagaagacgcaatctgggcagcaggggaacagctggtgctcagaccctgagacagatgtttgggcggaatggtgagggacggaggggtgaggggcggagtggtgagggacagaggggtgagaggctgaggagtgaggggcggagggtgagggacggagagtgagaggctgaggggtgaggggcgcaggggtgagaggcagagggtgaggggtggaggggtgaggggcgcaggggtgaggggcggaggggtgagaggctggggagtgaggggcagagggtgagggacagaggggtgagaggctgaggagtgaggggcggagggtgagggacggagagtgagaggctgaggggtgaggggcagcgggtccaggccatgcagggccacgggaggctgcgacatcttgttctgggtgcatctggaggccactgaaggtggcatggtccactttagggtataaacgcacctctcacctctggacacgggcagggtggcggtgtgggccgggcttctgtctgagaggcgatgagaggcagtctgactccgaatccgtgttcagggtcgagcctgcaggattcgggaaagggttcactctggggttccagagaaccagaggctgggcgcggtggctcacgcctataatccccacactttgggaggccaaggtgggcacatcagctgaagttggtagtttgagaccagcttggccaacatggtgaaaccccatctctactaaaaatacaaaaaaaattagctgggcgtggtggcgggcacctgtagtcccagctactcaggaggcagaagcaggagaatcgcttgaacgtgggaggggcaggttgcagtgagctgagatcgagccactgcactccagcctgggcgacagagtgagactccatctcagaaaaaaaaaaacaaaaaaaaaaaaacgaaaggacggcgctgaggtttggggcctgggtgatgaggacagactggcccttaagtggcttcatctcggatccccgcccctcctcgcacgcacctgcaaaataaatgtcctgccaccattttgcagagggaatcacagactgagagtttaggcccattcattccttttcaccagatactcactgagccattgtgaagggttaggctctggggaacgcagcagtgagcaaaagagacgggcatccccctcgatacctcacacccgttaggctggccaggaccaaaaggacagaaactgacaagtgttgacgaggagggtagacgtcggaacccggtgcacagctgctggaaatgcaaaagagagcggccactgtggaggacagcatggcgatgcccccaaaaattaaaaatagaatactatataatccagcaaccccacctgcgggcatatccccaagagaattgagagcagggtctgtaagagacatatacacgcccgtgttcacagcagcgttactcccaatagccaaaacgtagacgtcacctaagggtcggtctgtggggagtgaatacacacaatagggcccatccatacaggctaggaaggtggcaagagctgaaaaccttgcaaactgttaacaaaaaaagagttgaaacaaagaaacaataatacatttaatgcatgagaaatactagcatggtacatacccccttccctgatctgtcctgcctgggaatgtgtttatggtg

SEQ ID NO: 709760 - DNA, 1366 bp, Homo sapiens
tgagaaagcacagcactgctgcaggacaccacctgagtcgttactccagacaacagtgaggcagatgcagtcatgtttgcccacaccctcctgaccggctgcctttctggatggcttggtctgttcatgatatacttcaggggtgaatgtgtgcgtgggttgttgcaaagcaaatttctttttcgctggtttccctcccctccctgcctgatttcctttaaagggcagctattttgagcacagcccagggatcagtctgtttccttctattttttctccttcctctgtcacagtcttccccgaccaaagatggggaacatcaggggtcaggcagcaagcaaaaacacatttccactccctacaggatcaagaagagggagtgaagagcaggaccagcccggcctgaccttttccatattcagagtggctgagcttgcacacatctccccacagacaggtgcccaccacaagggaatgaatgtggagttgtcaggcaaggttctcctttagctcagaagggagctaggttttgcctgacgggtggctccaaggatcctaagatgggggcagtgaggcactaggtatttgtggcaggtatttcacacgatgtttcgttctacactttttcatgtcatattttccatggaagtccacactcgaagcaagggcagaaggggagacctctgagatacaactggtagtttagcataatgatgagttgtgtatgtttttaatctgtagggaagaaataccaaaatctcataaagctggctactgggatgggactgggaacttggagggaacaggatgaaagtgacagagacttgggcacgagggacactgtaaacagtaggagcactggctacttggaggattattcagttacaaaaggggccctgtggttggcatcggagggccaagcccactcttgcctttactttgtgatgtattacattaggcagcaaaaaaaaaaaaaaaaaaaaaaaaaaaaattccctgtactgcaaaatggaagcgagacatggcacctcgttccctggaggctgcgcggcactgtctgggtgtgggggacacrctacttcctctgagctgcatcattgataaggcattatttggtttgattttgcagttagtgtgatgagaatatgaaattatgccaataagaagccgttgtggatatttataactttggggctacctgcaaactaaggactctctacaaacggttcagaatctaggaagggccagcctgcaagcagattcacagtcatggagtgggcactaggtggagggacagggctctatctgtgctgacaaatgccaagatgcaatgcaaaaaatggaaaaatgaggggtgttttaaaaa

SEQ ID NO: 709761 - DNA, 637 bp, Homo sapiens
tatactagattccaaaacatgacaatctcctcttttgataggaaaaatacatacattcttttgtcttttataaaacagaacaaaaggatgtgcaggtaaagaaaaaagattaaagaattctcaaggtgacactttgggtgagagagacagataagaatcttagcttggtccatttgcaggatacagaagcaatgacccctagtagcaakgaatatacctagtgcctagattgtgatttcttaacatcattcttcagcaaaagaaagtaggatagtttggttaataatagggataaagcagaaaaatatgattcacttacaaaaaacttatgatgccagaaattaagaaaatgctcagaaaagaatgaggtcttgtagaaagaacaacaaagacaatttgaaaaaaaggagatcttgtagaaagaatgaggtcttgtagaaagaacaaggaagacaatttgaaaaagttcctgacaactaaagctcagaagtttgagaaacaaaataaattcttgtgttattagattataagccatagagatttattttgagcagcaaaataaatacttgtgttgttaggttataagatatagagatacataacccacaaattaaaacagatgaataaaataaagaaa

SEQ ID NO: 709762 - DNA, 1015 bp, Homo sapiens
tcacttatataatcgatgcttttaattctggctgttcatcataatatcatatttttcctatcagcctgctcaaatacaatatttgtgagacattgaggatattaggacattgttttcagcttttatagattataaataatttattcatataaatatggattataataatgtgccttttgaacttttatttttcttcttttcactatgtctctaagatagattccctgggttgagaagtaagaagaaatttgaaacttctcaatacatattgccatgttgatttttaagcagattacactgagttacaatacttccagcaatatatgtctcaccccaacctttccagctctaggtgttttatatattttaagcattttttcctgtcgttattaattattagtttagttgcatttattctattattagtgagagtaagcatttgattttatatatcttgacctacacttatttgcattaccttttcatgatctcttacccctcctatggtttctactattttttgacattttaatcagtaatttggatgacagttgacaggcttattggtttatttatttagagacatggtctctctctgttacccaggctggagtgcagcagcatgatcatggctcactgcagccttgacctcccaggctcaagcaatcctcccatttcagccwccccagtagctggtgtgtgccatcacacccacctaatttttatatgttttgtaaagacagggtttcatcatattgcccaagctgcttttgaactcctgggcacaagcgatacacctgctttgacctcccaacacgttgggattacaggcatgagccaccatgcccgttaggtttatcagatttagagttcccatggagcgataagggagagctaatatctccttctaaactacctgaaataatgaaccaattctacaaaatgtaatttcacagaaacaagtataaaatctataagtagggtccagaaacaactgtggaagtgtaccataaaa

SEQ ID NO: 709763 - DNA, 2117 bp, Homo sapiens
gtttatcatatgacctcactccagggtatttactctagagaggtgaaaacatattcacacaaaaacccatacagagatgcttatagcagttctattcataattgaccaaaactggaaataacacaaatgtcattcaacaagtgaatggttaaacaaactctggaatatccatacaatgaaagttcgctcaggaaaaaaaaggaactattgatatatgaataatatgaatgtatctcaaaggcattacgcggaatgaaagaaaacagtctaaaaaattaaataaaataaagttctatttatatgatattgtggaagtgcaaagctatggagatggagatcaggggttgtcagggttagggtggaggaggagttgactacaatgggacagcatgagggaatttggggggtccattgaactgctctatattttgatggggtggtggttatatggctctgcgcatgtattaaagctcagccagacatggtggctcatgcctgtcacctcaatactgagactgagatgtaattattatatactaatgacagaatcttttggggttttctgcttatggttgcacaagttgtgcactgcacatctcaacactgagactgagatgaggtggaaggattgcttgagcccaggaggttgagaccagcctgagcaacatagttaagaacctctctttacaaaaaataaagctgggcgtggtggtgcacacctgtagtcccagctactcgggaggctgaggtgggaggatcacttaagctcaggacttcaaggctgcagtgaactgaagtcatgctactgcactcaagcctgggtggcagagctagaccctgtcccccctcaccctcctcaaaattaaaactcacagcactgcccaccaaaaaaagttaattttacggtatgttaattaaactataaaaaagcgttttaaaaccctcaaatctctcttctataccactcctgcccccactctcattcctgtcattttcacctctcctggacgactgcaattgactcccagctagacttctcttcagttgcaatattcaactctgttttcttgatgaattattatgaaatatttctattgcacaaaatgttataaagagaaacaaaatcagtcatatctaaatagctctaccctctcgagattgggcaggtataccactccttatggtttccccaaaactgagaccaaacgcgaaaattaaaataagtatccaaaagaatatatgtttgtattatgttacacacttataccatagcttaacaaaaatacagctttatcatggtgctggaaatagagtttatttttattttttattttattttttttgagacagagtctcgctgtgtcgccaggctagagtgcagtgtcatgatcttggctcactgcaacctccgcctcctggattcaagcaattctcctgcctcagcctcttgagtagctgggactacaggtacatgccaccatgcccagctaatttgttttgtatttttagtagagatggggtttcactctgttggccaggatgatctcaatctcttgacctcgtgatccgcccgcctcggcctcctcccaaagtgctgggattacatgtgtgagccactgcacccgaccagaaatagagtttattcctatacccaccctattttattcatttgtggtccatttctgtgtttcctgacctagcccctaagcctactgcttctggcaggtgctaaactagtcctagttgaattgaattttttagctgtttcaactcagtagctcttttgacctgttgcctttgtcatgtgaacatggagaaaaagtggatgaaagagttcacgtgctagacttggcacaacaatactaatgcctggaaaagarcaacaacatcccagagatagcatctattaaacaattaattggccatttaagaaacatgagtcagaaaatagaagaaagagaatttcccaatgggctactaaaaaaaatgcactggagttaaaaattgaaagaaaaataaaacaaaagtattttatcccaatgttattgcaggtgctcctggattaactagacaatcgtgaggcaagtgattttaaaacaaacaaaaaaattgtaaaa

SEQ ID NO: 709764 - DNA, 975 bp, Homo sapiens
gctcactggaaccaccatcttccgggttcaagcaattctcacatatcagcctcccaagtagctgggattacaggcacccgccatcatgcctggctaatttttgtattttagtagagatgaggtttcaccatgttgaccaggctggtcttgaactcctgacctcaggtgatccrcccgcctccgcctcccaaagtgctgggagtacaggcgcaagccaccgcacccggcctctttctttctttgtttttattgcgacacagtctcgctctgccatccaggctggagtgcagtggtgcaatctcagctcacttcaacctccgcctcctgggttcaagcgattcttctgcctcagcctccagagtatctgggactacaggtgcgtgccaccacacccggctaatttctgtatttttcaacatttagtcatgttggccaggatggtctcgaactcctgacctcaagcgatccactcgccttggcctcctgaagtgctgggattacaggcatgagccactgcacccggcccagcaagcactttttactgagatccagtgcttatttagagtgacaccagggggcactcctagagcttatgagggagtgtcagagccctccatgctatcagcaaacatgctggagggcaaagccaagaggcagaaaagatgggttcttggtcatgtggagctgctggatcaagcctctcctgaagccctcaaccctgtgagtttttggtaacatgagccaacacagtccccttaaaattgaagccagtttgaatccgggtttcacggtgagtgggcagatgctccacaatgagtggccatgccctgccttgcaccacccccccaacccaccacctcctttcaggacggtggtcccagccaccctgacatacctgtcacctgcccgttgtgctccttgagctcgtgcaccttggtccatttggcaccgctcttttcatagatatgcacctca

SEQ ID NO: 709765 - DNA, 975 bp, Homo sapiens
gctcactggaaccaccatcttccgggttcaagcaattctcacatatcagcctcccaagtagctgggattacaggcacccgccatcatgcctggctaatttttgtattttagtagagatgaggtttcaccatgttgaccaggctggtcttgaactcctgacctcaggtgatccgcccgcctccgcctcccaaagtgctgggagtacaggcgcaagccaccgcacccggcctctttctttctttgtttttattgcgacacagtctcgctctgccatccaggctggagtgcagtggtgcaatctcagctcacttcaacctccgcctcctgggttcaagcgattcttctgcctcagcctccagagtatctgggactacaggtgcgtgccaccacacccggctaatttctgtatttttcaacatttagtcatgwtggccaggatggtctcgaactcctgacctcaagcgatccactcgccttggcctcctgaagtgctgggattacaggcatgagccactgcacccggcccagcaagcactttttactgagatccagtgcttatttagagtgacaccagggggcactcctagagcttatgagggagtgtcagagccctccatgctatcagcaaacatgctggagggcaaagccaagaggcagaaaagatgggttcttggtcatgtggagctgctggatcaagcctctcctgaagccctcaaccctgtgagtttttggtaacatgagccaacacagtccccttaaaattgaagccagtttgaatccgggtttcacggtgagtgggcagatgctccacaatgagtggccatgccctgccttgcaccacccccccaacccaccacctcctttcaggacggtggtcccagccaccctgacatacctgtcacctgcccgttgtgctccttgagctcgtgcaccttggtccatttggcaccgctcttttcatagatatgcacctca

SEQ ID NO: 709766 - DNA, 1805 bp, Homo sapiens
aaaaaaaaaaaaaaaatcatctcccttgtcttctgattccctgagctgtcatagaaaggaagtgaagcagtgaaagcatccccccaaaagggacttttcaaaaccagcctaagcaacatagcaagaccttgcctttagaaagtatttaaatttgaaggaaaaaaaaaaaaaagcagtattatggcacagagttgacagctacaggtgtggctacatccaggtcctaaaactatatcatcagaatgacccctgaccctccccccgctttccattttactttcttaagcatgaacatgaaatttccaagactgtttctcctttggctaatctgcttctcagacccaatcactgtggccagggtggtggaaggatactgacatccaggctgggaccacatgccccagctccagatcaaggtggggaatggccagtcgcacacatgtcgtggggaactagtgactcctcggtggaaaatcggggactgtcattggagaggagcgatagaagaaaggctgaagcagtgcaatgtatctcctgcaccagcctgggcctcgatgtcttgagtactgatgacccagtactcagtctagggcaatcccaactccatctgcggggctgcccacagtacatggaccccctcactggatttgctgaccacacgtgcaaatagccacttcccagccccactccccgcagtccccctgaaccctgtcaaaattcccctcagttctcgccaagattaaaagcaactctgagggtgagcggctcattctgctagtttaaatctctcggttccttccctctccagaactctgtacttactgctccrtcactggtaatgacaatgaacatcttcacaatctcaggttttattgcaaagtgattgaggaccagttagaataagttatgctacagaaactaaagaaattccgtcaaacaaatggtatgtaatagaaagtcttagggcagccgtgtatattttctccccccagtgaatcaattgaaaatgagaagttgttaccgccatgttccaggcagaagctatcaaaagtataagccatgatattataatttgatgatttttcatccgtcaaatggatatggcccaggggtgaaaagtggatgctccgtaactagatgatggtcaagagttataaaaatgaggtcctctctgttcaacatttctcctttcttgaaagggtactcaatgtcatgctcagggcctctaatggccagaaataaagttcctcccagttccagagcacctcagggcaaccccaaaaccagagcaactgcttattgccatgtagactatgtactgtgcaatttctggggtggcattttcataaatatgtgggtggcgccccctggaggtatgcaatgcacaacttgcacaaatggtaagtcatcgtatcccaaggtccacaaagaagaggtaaacaaaattcccatcgatgttgccatcagtcatgagtctgccttttcttcatgggacagtagcaaaaacaatttggccaagtgtgcttggatgatctctaagatggaatcagggtctctcactttcagcactattgacctttggggctggatcattattttgtcttagtgggagttgtccgcggaattgtaggatgtttagcagcatcactggcctctacccattagctgccagtagcaccacctcctccagctgcaacaaccaaaattgtctccagacatggccacatgttctctggggggcaaaatcaccccctggttgagaaaccctgaagtaaagacataatacgcagatcacatgtaagtaa

SEQ ID NO: 709767 - DNA, 1210 bp, Homo sapiens
attatttatttcacccacttttaggacatttctattattaaaaatggggcttaacctcatccattctttcctttctgtcatttgtcatttctactttggttaggggcttcattttgtctattttattgtgcaaaataattttataattataaagttaaacttatcatttatgttatattttctgatgattatattctacttacatcattcttagacttctaagaaaaatatttctcccataattgtatttgaatgcttttacagtttatttatttatttatttatttatttatttagggacagagtcttgttctgttgctccagctggagtgcaaagtatgaccatagcttactgcagccctctacctcttgggcaatcctcctgcgtgagcctcctgagtaacaaggattataggtggatacagatggctaatttttaaaatttttcataagatggggttttcctctgttgtgcaggctggtcttgaatacctggcctctagtgaygcttctacctccacctctcaaagcactaggattacaggtgtgagccaccgcacctggcctaattctccctttaataatacttgatctgtatagaatctatttttgtgtgagacgtgaggtaagactataactttcccagctcattagagcgcccccactctcacgtgcaagaacaaacaaaaaaaaccctgcacagtctgtccataactaaactttctgttcctttctattgatctcttgtgataaagaatatctctctcataaccaaagtcagcaccataattaatagagaattgcagaaagcatttctgtgatatttaagaaaaatattacaatgcataattcttctttagctacttaaaattctggaggatatagtcaatgctttagttatgtagcagatctattagtatacatatagggaaagaaaacacaaaattaaaacatttgcaatttctatgatgttagaaaacccaagtgttaactgagaagctatgggaattaatcaaaacaactcagtaaattggcagaatgaaatttaattaatccaaaatcatgagctttcttaaatatcagtgagcctagataatgttttgagattataatttatgtttgttctatgtttttgttcctttatctttcttctacccctactcacaatttaggtaggtctcagttctgcatttcatttccgcaggaaagg

SEQ ID NO: 709768 - DNA, 2262 bp, Homo sapiens
tgtattccagtttttcacctttactgctccatggaagatgttgctttagtcataagtcaaattagcttcacacctgtgcccaactgggaatttgctgggagagtattttacctacatcaaatttactaagctctaatacccaaacattacatctagtcatccatgattcctctttcttttgcgctccacatccaatccattataaaaattatcatagctaactctttaaaataaatccagaatttgactatttattaccacttctaccatcatgttggtcatgctaccatctttttatgcctggactagagccagtgccctgcaactggtcttcctgcctccacaatttccccacatattgcattctcagccccaggttgatctgttaacacataaggcacatactattttccatgtgattaccatggccttcaccacccaatgtgatagattcagttcctcactaccactctgataacttctattctcatttttctcctttcactgctttccaaacactggtcttatttttccaacctacaggtcctttgtacatgatgttgttactttagtctggatactgttgagtagttgtaggtttcatggttcattgcctgacatcctctgttccaacatgatcttaccagaaaggccacccctgactatataaaggataaccctacccatcccactccatgcccccacccctgccttatttttctccactgcttttatccatctgacatagatttatttctgcatctcacatacatttatttgttcagtagaacatgagctccttagagaggcacagagtttcatttgttcactgccattcaccaagtatctagaaattcatggcacataataaatgctcagtaaaaattcctagaatgaataaaatgatcatctcatatttgagaactctctcccaaaaatatcaggttagtgcaaaagtaattgcagtttttgccatttaaagtaatggcaaaaatactagaatttatcagcacctaaagtgattttagagcagtggtaacctgggatgcagaaatttacattgaaaagtaaaacckcttgaacccaggaggcagaggttgcagtgagccgagatcacgccactgcactccagcctggtgacagagtgagactccatctcaaaaaaaaaaaaaaaaaaaaaaaaagtaaaacctaggtaattgtgatatagattgaataaggattcgatgagctgaggctcagtcatttgtgttaacaatgtccccagatgatttctcctttagtaaaaatatgtggacacacttttcaaaattcttttagagtatggggtctgtatctgattgcttttaaaaatttatttaaaatgcctggccctgaaaacagttgagttgaagcgccttgatctagaatctgtaccaatcagtggttcttaaccctggcttcaagttattaatctgtaccagtcagtggttcttaaccctggcttcaggttattatcacctggggagggaattttaaaagtatcggattccaaggtgtcactctggaatctagctcaagactgcatggattcaactgcctgatgcacagctcactagctatttgacctgaagccagtggttagcttttcttgaaaactgggaattataatagtgcccactttagaaggccgtgatggggcaggaaaaaatgaaatattaaaatgcttagaatccggcacagaagaaagtctcataaaggattagatgtcagtaagttttggcgacaaaaaccaatcatctttattgttaccctcttaaaaagagccttaaaatttattcctttcctctattttgctgattccttaacatcccagccacccttgctttaatgttgacaaggggaagcaactacacccttcaggttatttcaggcccaactagtgaagctattacaaaatgagtatgaaatggaaggaacatgggaatgaaatggagtgaatgtcattggatcagttgaccaaagaatcctctcctaagatggttatctggatagtttttcgattgcaaatgctatttttttcattatcttgttcctgttgtgcaaaaatatggagaaaaaagaaactcagtaatcattatacaccagtagggctgatttttaaaatagagaatagcttgactaagtgacttaatgaagaggaatctgaaaataatagtgtacaagcactgaggaagaaggaaaacactcttctactctgaaacaatggcagaaaggaagtca

SEQ ID NO: 709769 - DNA, 652 bp, Homo sapiens
atttaaccaaagagcttctgcacacaaaatgggaggaaaatattgcwtcctatcaatctgacaaaagtctaatagccagagtctataagaaacataaatttataagaaaaaataaacaaccctattaaaaagtaggcaaaggacatgaaaggcaaaggacatgaaccgacacttcttaatagaagacatattgggcttaagacttaggtcatcagctgatcggtgcagcatactgccatggcacatgtttacttaggtaacaaagctacccatcctgcacatgtaccccagaaccaaaaatgaaataagaaactatcaaagcatgtgctttctaagccacttttacatttttgtgatttttttgtttacttccttcttgtttgtattctcaggacagaagctcccatttatacctgagtgtcattttagaattataggttacatgccatttgtgctatttatacttttgctgtatttctaagaaaagacatggaagacttattttttgttctgcaaataagttacagatatcattaataggcaagggatacattttgagctatgagtcccattttggtgtttcgaatgtaatacccagaacactgtcatttatgtgaatgctggcattgcttttccctgtagtagaatgctc

SEQ ID NO: 709770 - DNA, 607 bp, Homo sapiens
tgtttattcatcttacttttttattttttttgagacagggtctcactctgccaggccagagtgcaggggcaygatcttggctcattgccacctccacctcctgcggtccagtaatccttccacctcaaacacccaagtagctgagaccacagacatgctccatggggtttcgtgatgttgcccaggctggtctcaaacttctaatctaaaggtctcaaacttctaatctaaaggtctcaaacttctgagctaaagcaatccacctgcctcagcctccaaagtgctgggattacaggcatgagccaccatatccagcctattcttcttattttgacatgtcagcttctttccgtaagctgaggttgacatatataatcagagacttaggtcaataggaaaaggcattccctaatttcaaaacagatctaaactctctaatttcctcaaaagagatctcctaatctttcatctactgggattattttaataaactcattttagcaccctgttactatgaactcttaacaaaggttccttccagggctgggcgcggtggctcatatctgtaatctcagcattttaggaggccaaggcaggcagatcattt

SEQ ID NO: 709771 - DNA, 1150 bp, Homo sapiens
tgtcaggagttcgagaccagcctgaccaatatggtgaaaccccatctctactaaaaatacaaaaattagctgggtgtggtagtgtgtgcctatagtcccagctactcaggaggctgagacaagagaatcgcttgaacctgggaggtgaaggttgcagtgagctgagattgcatcactgcactccagcctaggtgacagagcaagattccatctcaaaaataaataaataaaacaagactaaatattaaaaaataaaaaaaggtcttcagatgattcgaragctgaaaaatgatgatttagccaattttatattagtttaaaaccaccaattaaaacacttttgctcacaattggatatggttacagttactcacctatctatagccacgaatgtacgtggtctatcacatatcatgtcatttactcctgatgaaccagagtctactgttacatgtttgtatagaggggcatgacggcctggcactttctcacctcctcataggtgcaatcaacaatgcttggcaggtgtttggtacaagcggttaccagaaatacgaagaagtaagacttagcctttatcctcaaggagcttatcacattttaggtgaaatcacaacaaaagttgacagtaaaagaatattcacatgcctgtagctatcaagtgccatctgactactggtgaggagtgctttgtgtaatgatgtcccccatggcagagctgtgactgtcaagtattgtgtgaatcccaaaggttgaacacgtggaggaaacagcaacttcaacggctgtaagtcgggaaataactctaaagtcaaattggatacacactcattcattcattcctgctatttactgctaagaatatgcatcaagcacttggctacataccacacataatggggggttctagagatatgggggtgcagagaacagagatgaccccctagttggataaaatgtactacaagagaatctctaattcattatgcatcaatgttcttaattgctactgtggtgagtgctgtaaagggaaagtccagagtcctagaacgtgaaagatgattataagccaaggaccacagagatctcccaagaacataggaggcaatggactcaacctcagtgatgagccaggctgctggctgtggag

SEQ ID NO: 709772 - DNA, 1150 bp, Homo sapiens
tgtcaggagttcgagaccagcctgaccaatatggtgaaaccccatctctactaaaaatacaaaaattagctgggtgtggtagtgtgtgcctatagtcccagctactcaggaggctgagacaagagaatcgcttgaacctgggaggtgaaggttgcagtgagctgagattgcatcactgcactccagcctaggtgacagagcaagattccatctcaaaaataaataaataaaacaagactaaatattaaaaaataaaaaaaggtcttcagatgattcgaaagctgaaaaatgatgatttagccaattttatattagtttaaaaccaccaattaaaacacttttgctcacaattggatatggttacagttactcacctatctatagccacgaatgtaygtggtctatcacatatcatgtcatttactcctgatgaaccagagtctactgttacatgtttgtatagaggggcatgacggcctggcactttctcacctcctcataggtgcaatcaacaatgcttggcaggtgtttggtacaagcggttaccagaaatacgaagaagtaagacttagcctttatcctcaaggagcttatcacattttaggtgaaatcacaacaaaagttgacagtaaaagaatattcacatgcctgtagctatcaagtgccatctgactactggtgaggagtgctttgtgtaatgatgtcccccatggcagagctgtgactgtcaagtattgtgtgaatcccaaaggttgaacacgtggaggaaacagcaacttcaacggctgtaagtcgggaaataactctaaagtcaaattggatacacactcattcattcattcctgctatttactgctaagaatatgcatcaagcacttggctacataccacacataatggggggttctagagatatgggggtgcagagaacagagatgaccccctagttggataaaatgtactacaagagaatctctaattcattatgcatcaatgttcttaattgctactgtggtgagtgctgtaaagggaaagtccagagtcctagaacgtgaaagatgattataagccaaggaccacagagatctcccaagaacataggaggcaatggactcaacctcagtgatgagccaggctgctggctgtggag

SEQ ID NO: 709773 - DNA, 1150 bp, Homo sapiens
tgtcaggagttcgagaccagcctgaccaatatggtgaaaccccatctctactaaaaatacaaaaattagctgggtgtggtagtgtgtgcctatagtcccagctactcaggaggctgagacaagagaatcgcttgaacctgggaggtgaaggttgcagtgagctgagattgcatcactgcactccagcctaggtgacagagcaagattccatctcaaaaataaataaataaaacaagactaaatattaaaaaataaaaaaaggtcttcagatgattcgaaagctgaaaaatgatgatttagccaattttatattagtttaaaaccaccaattaaaacacttttgctcacaattggatatggttacagttactcacctatctatagccacgaatgtacgtggtctatcacatatcatgtcatttactcctgatgaaccagagtctactgttacatgtttgtatagaggggcatgacggcctggcactttctcacctcctcataggtgcaatcaacaatgcttggcaggtgtttggtacaagcggttaccagaaatacgaagaagtaagacttagcctttatcctcaaggagcttatcayattttaggtgaaatcacaacaaaagttgacagtaaaagaatattcacatgcctgtagctatcaagtgccatctgactactggtgaggagtgctttgtgtaatgatgtcccccatggcagagctgtgactgtcaagtattgtgtgaatcccaaaggttgaacacgtggaggaaacagcaacttcaacggctgtaagtcgggaaataactctaaagtcaaattggatacacactcattcattcattcctgctatttactgctaagaatatgcatcaagcacttggctacataccacacataatggggggttctagagatatgggggtgcagagaacagagatgaccccctagttggataaaatgtactacaagagaatctctaattcattatgcatcaatgttcttaattgctactgtggtgagtgctgtaaagggaaagtccagagtcctagaacgtgaaagatgattataagccaaggaccacagagatctcccaagaacataggaggcaatggactcaacctcagtgatgagccaggctgctggctgtggag

SEQ ID NO: 709774 - DNA, 1150 bp, Homo sapiens
tgtcaggagttcgagaccagcctgaccaatatggtgaaaccccatctctactaaaaatacaaaaattagctgggtgtggtagtgtgtgcctatagtcccagctactcaggaggctgagacaagagaatcgcttgaacctgggaggtgaaggttgcagtgagctgagattgcatcactgcactccagcctaggtgacagagcaagattccatctcaaaaataaataaataaaacaagactaaatattaaaaaataaaaaaaggtcttcagatgattcgaaagctgaaaaatgatgatttagccaattttatattagtttaaaaccaccaattaaaacacttttgctcacaattggatatggttacagttactcacctatctatagccacgaatgtacgtggtctatcacatatcatgtcatttactcctgatgaaccagagtctactgttacatgtttgtatagaggggcatgacggcctggcactttctcacctcctcataggtgcaatcaacaatgcttggcaggtgtttggtacaagcggttaccagaaatacgaagaagtaagacttagcctttatcctcaaggagcttatcacattttaggtgaaatcacaacaaaagttgacagtaaaagaatattcacatgcctgtagctatcaagtgccatctgactactggtgaggagtgctttgtgtaatgatgtcccccatggcagagctgtgaytgtcaagtattgtgtgaatcccaaaggttgaacacgtggaggaaacagcaacttcaacggctgtaagtcgggaaataactctaaagtcaaattggatacacactcattcattcattcctgctatttactgctaagaatatgcatcaagcacttggctacataccacacataatggggggttctagagatatgggggtgcagagaacagagatgaccccctagttggataaaatgtactacaagagaatctctaattcattatgcatcaatgttcttaattgctactgtggtgagtgctgtaaagggaaagtccagagtcctagaacgtgaaagatgattataagccaaggaccacagagatctcccaagaacataggaggcaatggactcaacctcagtgatgagccaggctgctggctgtggag

SEQ ID NO: 709775 - DNA, 1711 bp, Homo sapiens
agatgccaagtgcgagtaagaggcaaaatcctctttcacctgctcatcagtattcagtaattgtctgtgctctttaaaagaagcacatgggaggggccatcatggagggatgccctttgctgaaggggaaggagaggagggatgcgtttttgtggctgtgttaataatgcacatgggatctgaaggtacaggttcatgccatgagtcacaggaaggaaattctgtatctagaaaaggtgtccgctttctgagtatggctttcttgtgttatgcctaattagctttgaaaaatcaagcattattagtataagtcattcttgtaggtttattaatatgagcagcttcaagtaggaagaggttagaggcaaaaatacatggagtttccatggttctgagagtctgttttttttttttttctggtctctctggtctccttaattaaggctgttccagtccaccttgccttcttctaaaagcctcgtctttgctgtattctgttctctttgtgccatccctctgtttaaaaaaccacagtgactcccagtcctgatcttcccaaagtaaaccacactcatacctacgtcacactgcttggccttcaagccataaataaactcccatctcttctaggaagccttccttgacttcttcattccatacaaatgccacttccactttcccaaacttctgcagactatgtggtctgtcccacacaatttagtacttaattatatcaccatatataatgggactgtcttcattttttattgggtattggctttgtctcccaaatggattggggttttcttgaggacagagatcttattctattttgtttttctgactcagcagcccttcacaccatgttgagcatatataatgtacatatttttcctttcagatattgattgattggctaaatcatagaaattggggatgttggtaccatttttatatcacttttttctgaactataatgcttggactgtarccaagtttagcctgactattgaaatcagacttttttccatttaaagggggcaatatttttgttttaaaaatggaaaatggattaatttagcaaggattaactatcacttttgtaatagataatttccatacgggtatattttagcaatctgtgaagggtgctagtccacctctgtggccaggtaccctaggggatggcaccggcaggggatcctggcagcggctgccactcacttgctgggtcccctacatgctttcctcctcagtagggctcctttctgggagcccccacccttaggccaacaggaggctcccatcagactctgccggagcacatatataccagaatccggcatttcagaggcactgaggggtcacgggacctctgaactaatgggtgtgattgaggggcactccccgttctccctgactctccccataaggacagagattagccttcctaaaaatgggataaataggaagtaagaaaacacttgctttcaatctttcaatcttttctttattttctaggaaaccaacccatgttcagtacatgttgatggtaggggaagctaacttcctatattccaggcactgggctaagggctttgtctacatgactcacttaatcgacatgttgaatgtaagcctagcagggtctttaagtttggtcacattgttagaaatatggaaccaacatttagtggatgattagtgattg

SEQ ID NO: 709776 - DNA, 1008 bp, Homo sapiens
aaaaaaaaaaaaaaaaaaagaaagaaagaaagaaagaaaggtaggaaggacaaaggaactcctgcctcctgtgtcctcccacagcatatcactggggggccctgtcaaatgaggggcactaggttgagaactataaaacaatctgttgatttatgcatttaaaacctcaagacttttttttttttttttttctggagatggagtttcgctcttgttgcccaggctggagtgcaatggtgtgatctcggctcactgtaacctccaccttccgggttcaagccattcttttgcctcagcctccccagtagctggaattataagtaagcaccaccatgcccggctaattttttatatttttagtagagacgaggtttttccatgttagtcaggctggtctcgaactcccgacctcaggtggtcctcccacctcagcctcccaaagtgctggaattacaggcatgagccaccacgcctggttggacttttgtctcaaatgaaattgttaaaggaacccacattttacaaaatatgtggtatgtggtggaaaaaacttccttccatgartctcttttccagggtatatgggagataaggaggggaagaccagggcttttaggcccggctcttcctggtgctgagatactggaagactgccttgtaaagcatctagggatgtaaattcaggaaaagttctttaagcattagaccaaagctgagtgagctgggagattatggatctcgcatgtagacctgataacgggcatcggtaggatcttaatccttggagagccaggtgcctccctctgcccacatgatgtgcatgcaagtaaaaaagaaacatggaactaaattatctcccagtttttcctcctccgcagtcccctccagctctatccttcctttctaccaagagcagagccacttagaggacaaggtactcatcacgtctggctcaggtccaatgctgtgaagaggtaccagatacaagagacaggtgggactggctca

SEQ ID NO: 709777 - DNA, 1008 bp, Homo sapiens
aaaaaaaaaaaaaaaaaaagaaagaaagaaagaaagaaaggtaggaaggacaaaggaactcctgcctcctgtgtcctcccacagcatatcactggggggccctgtcaaatgaggggcactaggttgagaactataaaacaatctgttgatttatgcatttaaaacctcaagacttttttttttttttttttctggagatggagtttcgctcttgttgcccaggctggagtgcaatggtgtgatctcggctcactgtaacctccaccttccgggttcaagccattcttttgcctcagcctccccagtagctggaattataagtaagcaccaccatgcccggctaattttttatatttttagtagagacgaggtttttccatgttagtcaggctggtctcgaactcccgacctcaggtggtcctcccacctcagcctcccaaagtgctggaattacaggcatgagccaccacgcctggttggacttttgtctcaaatgaaattgttaaaggaacccacattttacaaaatatgtggtatgtggtggaaaaaacttccttccatgagtctcttttccagggtatatgggagataaggaggggaagaccagggcttttaggcccggctcttcctggtgctgagatactggaagactgccttgtaaagcatctagggatgtaaattcaggaaaagttctttaagcattagaccaaagctgagtgagctgggagattatggatctcgcatgtagacctgataacgggcatcggtaggatcttaatccttggagagccaggtgcctccctctgcccacatgatgtgcatgcaagtaaaaaagaaacatggaactaaattatctcccagtttttcctcctccgcagtcccctccagctctatccttcctttctaccaagagcagagccacttagaggacaaggtactcaycacgtctggctcaggtccaatgctgtgaagaggtaccagatacaagagacaggtgggactggctca

SEQ ID NO: 709778 - DNA, 1777 bp, Homo sapiens
cagtggctcatgcctatgatcccagcactttgaaaggccaaggcgggtggatcacttgaggtcaggagtttgagaccagcctggccaacatagtaaaaccccgtctctattaaaaatacaagaagtagctgggcatgatggcatgcacctgtaatctcagctactcaggaagctgagacaggagaatcgcttgaactggggaggcagaggttgcagtgagctgagatcttgcctctgcactccagcctgggcaatggagaaagactccattaaaaacaaaaacaaaaacagaaaacagacaaaaaaaactataaagccaaagggatagaaagaactcaagaaactttcagtgtctgaaaggcctgcctttaaaccctggcccgaccatttgtctgctcatttgagttacctcagatgagttacctcttttccaygacttccttttctgtaaaacaggatcattgtgaagatcaaatgagaaaatgcatgtaaagcacctggcacactgtagacacacaatagatttcaatcagtagggggccctctggacatacctatgtgcttgccaaagtttgtgctttagcaatacttttaatgtcccatgattacttctcattaattaagtgaatttagaagtattgtaaaccaaggataatctggctaggggctaaaggacaatatatatggggtacagactatgtcacctgcccagtgatctctgtgctaactggcagctttgttcttttctggtgattcagttaaacagcagagagtgcccaccatcactgcagatgttgttcagtgacctagacttcctcctggaaggacctcagtaactggaaccagagaatactgtttttgagccaaagaccacattcgttctcagattgaatctcatctctttacagacaaggacactgaaccagagaggagcaattcggcacagctaaatgtgacagaacacaaacacgattcttaatcttacctctttaccagtggttctcaactagaggtgattttgacatacacgggacatttttggttgccacagctaggggaagatgagatgttactggcatctagtgggcagaggccagggatactgccaaacatcctacaatgcacaggacagcccctacagcaaaagcatcaatagtgccatggttaagaaatgctcacctactccattggaccagtgtctccagggagtctgaaatctgcctttaaagctgctgctgctggaagttgaacttggccccagcatggcggccctcactaatgactgattcaaccctgtcaattgtgcctcttagcattgaaagccaccaggtttgggaaggatttagagatttgcctcctcaggtaacttaaagtctggacataacttttgaagcaccctgatatgcctgggcataagtgctattgacagtcctgaaaatgcacttcggtcttattaggcaatctaagaaacttactctcaaaaccattttggcaaaacaccgccaaacagccaaatgatgcacaaccacacagatacctgaatatcaaatattcagaatgatccaccctgagcaaatacatctgatactgtactaagcacctccaggattaatggcttgagtagaggaaacacagagattgaagcactgattaaagctaaaatactctcagtgtttccacccaaagcttgagttccatgttgcagggactaaaaaaagaaaagaaaggcagagtcaatgatttaagcaattatgtacttactgattcttgccatgca

SEQ ID NO: 709779 - DNA, 648 bp, Homo sapiens
taaagcctgtaacaataatgtatttaccgtacttttgcagaactgatagttacacttttaccattgttatatagaattgctaaagtcttaaaagtaaaatactagtataggaggcatattataataaacctcttactcctgtccttttccaatgaaagaccaattttctaaaacacaaaagccaagaaaatcctaaaactcacatacacttaaaataaataagaacgacaactcattcaagtctctttaatagctaagagaaaaatccttttttcagtaatggtattactgaagtattaattgtttgaataaccatacattttatttggttacccaaatataaacggttaaagtctcaagcagtttgatgacttcatctcaatacaatgtcacacttcaaactgttcagacagcatatttttaagacaacttataaatccagcaacttaaacttctagtcaaagtatagattccctctctgctggggatgtagatttttttkgggggggtggggggtggggttcaattttgctggatgaagaccaaaaactgcaaatcctgttatctcatttcaaaatagattatgttagtttagcccctaatcaaaccaaatcttttaagattagtcattccttagtaaaatcttcc

SEQ ID NO: 709780 - DNA, 593 bp, Homo sapiens
cggctaacacaggatacaagtcatgttttccattctgcaaaacctggacacacctgagcatttatcctcacagagagaaagactaacccatcacacggtcagcaacaaatattcacattcggcttttaggattaaaaggcaatccggtggtcctgagcagctgctctgtccagcccacttgaagcctccatttcttttaagtacaaacaaaccataatagttacggcatgaaatgagccggcctgtcatcatgggatggcactgcccttcaggtgatgcaagttaagccctaggtccattacacaacatcagcttctttggtttgaacatcaccctataattacatctctagataaggccgaagtttaaatcttcagttccatttaaaaccggtacgatccatgaacccactctcaactgagtaagaacagaaaataattacgagctgtcaacggaacactatctcacatcaagcacagctggcttccaaatctcacatgacagatgactgaaggtcaaaccctgctccccctaattatttygttaagataatcaacatgtaaactcgaaagccaggggacaagaccaatcac

SEQ ID NO: 709781 - DNA, 638 bp, Homo sapiens
tagtgtttctatgcatcaggaggttgagttttctttttttctttttcttttttttgagacggagtctcgctgagttgcccaggctaaagtgcagtggtgcgatctcggctcactgcaagctccgcctcccgggttcaccccattctcctgccaggaggttgagttttctaacacgcacttcatacasggatttagatttcagattctatgtttccaaatactttctccatctactgagttggaagaaactagagacagtcaaactgctatacttttatgcctgcctggttctgaggtctgggcaagcagcaacaataaaatcaggatctttaacagagaagttacagggcaggccctgagacagccaaatgcacttgaacacagacgctcccagtgagctaagctgggcacctagtcttcaaagttcacgaagtatctgaccagagctctgacgcaccgagaggcttggaaagaggtaaaatgaaaaagggtgttttatcaaattattttcttcccttcacaatcctaaaggagctctattaaaatgaaacatttccatgagaagtatgtcaagtgcgaatactggcctggaagtctggaggccaggattccagcacagagaccccaggaaggagtca

SEQ ID NO: 709782 - DNA, 1191 bp, Homo sapiens
tttttttcttttttacaaaaaggtaaatggtacctgctagagacttccctcaaaaggtcagggaaggactagcataacgagagcatcttgaaggagcagtgggagacaggaataaaaactatttactttaaaattatgacacccgctaagtccttcttgttcagtataacacctacatccttattgagcactccttttactcctgatggccatcatcttcccctggaaattgacacataaggtcagttccctcagcttaaaaggggccaagtcgctgtaaaaataacgaaaagtagcaatcactttatatattagaataaatttatagaatgaraaaattaagttgaatatatcaaaaatccatggaaactatggcccctagtttataacatctttatggagtcttaaaagcaaaatattatatagctttacataaacttccctgaatgctgaccaaggctttgtattaaagaatgatgcatttttaaatgccttttattattttgatcatttttacttttaatgatgcaatgacagaactccatttatgcagaaccttttgcactgcacttagatggatgatcctaaataaatccatgagatttttaacttgcaatactgaggaaacaataaatacaacatggcatttctttcaaataaaataatttcaacagcattttcttttcctaccctgtgggaaccaaaggaaccaatgtattatttgttaaagttcgcaagcaacgtgttaggttggtttttaatttaagtgtacactgtagccccctcctcctttttgctgagtagtaagacatctccatgtgcagtggactgcctgagagagccagtgtctctcaatgtcaggtgagatctcaaaatctaaaatttcaaaagttaaaaacactgtacccacattttctgatttgcaagaaaaatagatgtggcctgtggaagccgagtgctgagcaagcagggaggggaggagctgctgggaagaggacgcagcgggctgggggcacagggtggccgctgcaggaagcctggagctgaccccgaagcccagctatcctgcttccctctgggcttgcacacctgactgaaatcttagaggaatgaaaaatacaggccaggcgtggtggctcacacctgtaatcccagcactttgggaggccgaggcaggcagatcacctgagg

SEQ ID NO: 709783 - DNA, 1191 bp, Homo sapiens
tttttttcttttttacaaaaaggtaaatggtacctgctagagacttccctcaaaaggtcagggaaggactagcataacgagagcatcttgaaggagcagtgggagacaggaataaaaactatttactttaaaattatgacacccgctaagtccttcttgttcagtataacacctacatccttattgagcactccttttactcctgatggccatcatcttcccctggaaattgacacataaggtcagttccctcagcttaaaaggggccaagtcgctgtaaaaataacgaaaagtagcaatcactttatatattagaataaatttatagaatgaaaaaattaagttgaatatatcaaaaatccatggaaactatggcccctagtttataayatctttatggagtcttaaaagcaaaatattatatagctttacataaacttccctgaatgctgaccaaggctttgtattaaagaatgatgcatttttaaatgccttttattattttgatcatttttacttttaatgatgcaatgacagaactccatttatgcagaaccttttgcactgcacttagatggatgatcctaaataaatccatgagatttttaacttgcaatactgaggaaacaataaatacaacatggcatttctttcaaataaaataatttcaacagcattttcttttcctaccctgtgggaaccaaaggaaccaatgtattatttgttaaagttcgcaagcaacgtgttaggttggtttttaatttaagtgtacactgtagccccctcctcctttttgctgagtagtaagacatctccatgtgcagtggactgcctgagagagccagtgtctctcaatgtcaggtgagatctcaaaatctaaaatttcaaaagttaaaaacactgtacccacattttctgatttgcaagaaaaatagatgtggcctgtggaagccgagtgctgagcaagcagggaggggaggagctgctgggaagaggacgcagcgggctgggggcacagggtggccgctgcaggaagcctggagctgaccccgaagcccagctatcctgcttccctctgggcttgcacacctgactgaaatcttagaggaatgaaaaatacaggccaggcgtggtggctcacacctgtaatcccagcactttgggaggccgaggcaggcagatcacctgagg

SEQ ID NO: 709784 - DNA, 2046 bp, Homo sapiens
gcacatttttcagaatcaatgattggtgacaggtttattttttaccaataaacaataaataataacacttctagtgggtgatgacaggttacctgattatatttcttcccaatttrtaaggctgacctatgactcattcctttgggtcatttcttttgaactttccacgccacacagctgcagtccttcatgatggcagccaaatatgccaggattaacattccgtgaaacattcaaacaaaaatgactctcgagttatgaaatagggtttttccgagaagttttacacaatctgtggagtctgatcatctcgagaaagatagaaaggataagtcatggtctgccagaaatgatatttatttcttccatgaaaaaaaaagaacatgttcatgcagcagagatccatgcatagtcaaggaatgatagcgaagaaataaaacatagttatttctaaagaaaattctgatttaagaaacaagcacactaccccaaagccagaaaataagccagatatcaaaaaccatattttaagtgatgtgctttggctttgtccccacccaaatctcatcttgaattcccatgtattgtgggagggacctggtgggaggtaaccgaatcatggaagcaggtctttctcatgctgctgttgtgatagtgagtaagtctcacgagatctgatggttttataaagagaagctcccctgcacaagctctctctctttgcctgcagccacccatgtaagaagtgactggcccctccttgccttccaccatgattgtgaggccgccccagccatatgacactgtgagtccattaaacctctttttcttcccagtctcgggtatgtctttatcagcagcgtgaaaatggactaatacattaggtttttaaaaatggcttaatcaaaagggctgcatttttatataccttcacaccaaaataatcaaattctagtttcttcacatgcttgagaaaaacatgctttcaatgaagagtccactctttctctctcctgtgttaggggcctatttttttctttggccagtttgaactcatctcttcagaacaaaactggccaaggtcaattttaatttcacttcaatctaacttaaaatcaagctttttctgtgtttgattgaagcttaatttttcttagcttttacagcaccacttggaaaaatacggcttttccattagcacggggaatgaaggcctgcgcccactcataccagccacgtttatttccacatgtgagccactttgttgttaacctgccagaaggacagaggatggcagagctggtgcatttcaccagcctaaggcctaccaaggagactgagctgagggctgtggatggaggccacgtgttctctcggcagtccagctcccatggctaatgggttcaaggtcaaactcttcagcctggacatcaaagtccttcacagtctgtccttacgcctcctctcaagtggttcctccacagccagtatccctaaacacagcatgccattcctgtgccctgggaacagtacacttccccactctaaccagcctggtgtctgtatgcctcacaatcaatgctcagtctctcttttcaattaatctgtggtccatggattatgggcaggggcaggggagtccacgacctccgtggaattgcatgaaaactagtgcgtgcatgcactgttctggagagcctctcctcaaaattcatcatctcatcctgccctccccttgggagctgtaacccagctattctggccttctttccctacacacaaaaaagtcccgccttcctaaggcctgtgtacttgttctctctgctgagagaatcacttggccccctttcatcgttcaaagcacagatcactctctggaatgatcacagttatgtgcttgttgacttgcttgttgcctttccccactggaatcagagctcagaagagcagggtcatctttgttctccttgtcctagaattccctgagcctggaatggggcctctccagtgagagatgcacaatcagtatttattgaagtaatgaat

SEQ ID NO: 709785 - DNA, 680 bp, Homo sapiens
ttgttttatgaaagtttgcatcacttcgttctaaaagcagagacaccctagaggcaaaatagctcttactgctccctgaaaagtctcaattttggaccttatccatttgatgtaatcgtttggggttttgagatttagagtgaactgtggaactcttgtttttctttgcctggaaaattgactaaatagacatcttgttcaggtgccagtaatgaasagagattggatttttgtatgaggtagactggtttctgaagaaaagtaatggtgttattccccaagatggagatggttgatattgttcttgtcagtgaaagaataacagtaaattccaaggactagttctttttgatgatccgtcattatcaacttagaagttgggtccctgattgatagtgtatatcctattgtgcctgtaagagagagatttttgcttttaaatcagaaagttgttagagatactttttctttccttatataattgtaatattttaaaaaatattctttacctaaaagctgaggatgtatagatatagatatatgcatacagtgaaaagcacccataattgcatattttagaaataaaatgttgcactttggagtatttccttaactttttttctatgcatatgtactcaattttagaaaaatgggatcattctccactgtcacctgtttaa

SEQ ID NO: 709786 - DNA, 557 bp, Homo sapiens
tgacatttgaaggggagggcccaggtgtggttggcctgggggagtccatggggtgggcgaggtgaagatagagccaagatcaggtgcagctgggatgcggggccccctgtatcggtagtaatgggccacaggtgaagaaactacctgttgacttttatttcagctgcattttctttctttaaggatgtctgtctttttctttcttgttacatgtttrttgtaacaaatctaaacaatataggagagtgatttaaatagtggaagtctaaggtgctcacattctcctggccctgtgcagatgtggtagtgaatagatgtatgtcataggctgccagttgggtcagaattggagaatttgctgcagaatcagcgggagggcagggatgggagcagtagcggtgagcccactgctcaggcaagcatctcttccagttcctcctgctctccgtggcctggtgcgccctcacaagaagcggaagaagctgtcttcctcttgtaggaaggccaaggtacggctcctggggactgcggacagccccaggactcctcccaacctg

SEQ ID NO: 709787 - DNA, 1961 bp, Homo sapiens
catacacacacacgtgtggcactgtttctacaatttttaaaaagtggataaaatacagcaaatattcagggtcgctgtgttgcatcattccagggtgctgtgtaattggtaaagttataaaatgtgcaacctgtgtgtctgcacatggttgccctggcaaccaccatcatctctccagtgtttcatgtattaagacctatcatattaatgtctgctgctctttgagctaataacatatttttaacgattggtgaattggtctgttttccctccgcatgattactaggagctatgagatgttttgaattccacagtaagagcttctcctaacctaggatctttggaataattatttgctacctctcctagacatttggctctggcattttaatactcgttttaccagttagagttttattgtgtcttttattgtaagttgccttggattctttttttaaagcaagcttggtgtaaacaaataaaatcttggtggtaataattaggtacaagggaaacagaaaaaatctagggcagctttcctctacccctccaggaaatgattatggctgaggaggtaaaaatgaaatatgtgaaaaatgtcacaagagaaacacttcagtctttgccattggttggaaaatttggttccttgaggctggcctaccagataacaaggagctatactataattgcccagtgtaaaatggtagtgacaaagggggcacctggatttgaaccagggacctcttgatctgcagtcaaatgctctacccctgaactataccccccaaggtactcatcttctttcaataaagatatattaataatcacagtcattcacaagctacgctctggccactctgtctccagagtgtggagttatgtaatgcacaacagagcagctcttctgtacaaccccctccacacctgccggcacctggccaattaagctgcagccttagctttttgggaaaaggagagtggtggggttaaatccagatatagacatagcttgagggcctgggttcgggccctgggcctgattgttctggagtgcaaggagcccctacttgatagtaattgatgttccaatattgagccatcagtgcatttctgttttaagtctttcttggttatgtgggattgtactattggataaggttttctactattttgtctagattactctgaaatgagattggcctatagctttctttgtggtatatgctcttgtaatttattttttatatcaggattatgtgaattttctagaatgatttggagagatttaaagcgttctacgctggaacattatatataacataaaattacatattcttaactaaagattagcagaaacttgcttgtaagcctctgggtggggtgccttttgtgaggaagagctccttaatgatcttttaatgaattctgtcattattggtctatttaagtgctctgcttcatcttaggtcacttttagtaattcattttcacttagaaaatataataaagttgtacatagtatttgcttttctttccttcctttcttcctcccttcccttcccttccttcttttcttttcttagatggagtttcgytcttgttgcctaggctggagtgcaatcttggctcactgcaacctccactttctgggttcaagcaattttccttcctcagccccctgagtagctgggattacaggcacccactaccatgcccagctaatttttgtatttttggtagagatagtgttttgccatgttggtcaggctggtctcgaactcctgacctcaggtgatccacctgccttggtctcccaaactgcagagattacaggtgtgagccactgtgctcggcccatagtattctcttataatctgaaattttatttagctatgttctatttttttttcattatgttgttcatttgtcttttttggcttagacaacatgaagattcg

SEQ ID NO: 709788 - DNA, 724 bp, Homo sapiens
tttttattttcttgagatggagtctaactctgttgcccaggctggagtgcaatggtgtgatctcagctcactgcaacctctgcctcctgggttcaagggattctcctgcctcagcctcctgagtagctgggattacaggtgtgtgccaccacacttggctgatttttgtattttttgtagagacagggtttcactgtgttggmcaggctggtctcgaactcctgacctcaggtgattcacccacctcagtctcccaaagtgctgggattacaggtgtgagccaccacacccagccacatttctgatatgttattgacctaaatgttccaaaattgtattaaactcttaaaaatataatgtcattagacataatttgggttatgttgtatgccacaaaaataaccaaatttctgtgtcaattgctgatgataatgaacttacatcagatttttaaacatgattattttaagtttttgtcatccacagttattgttttgatttttctctaaaagcatttggaatcagattcatggaggagactctaacaagtacacttaaatatgggcttctaataattttaagatcaattaactaaataaaaatctttaggccaggcacagtggctcacgccactgtggccaatcttttccctccaaaatgggaccagagcagcagtttgggacaggttcatctcagcaccaaggaacataatcctaactacaga

SEQ ID NO: 709789 - DNA, 724 bp, Homo sapiens
tttttattttcttgagatggagtctaactctgttgcccaggctggagtgcaatggtgtgatctcagctcactgcaacctctgcctcctgggttcaagggattctcctgcctcagcctcctgagtagctgggattacaggtgtgtgccaccacacttggctgatttttgtattttttgtagagacagggtttcactgtgttggacaggctggtctcgaactcctgacctcaggtgattcacccacctcagtctcccaaagtgctgggattacrggtgtgagccaccacacccagccacatttctgatatgttattgacctaaatgttccaaaattgtattaaactcttaaaaatataatgtcattagacataatttgggttatgttgtatgccacaaaaataaccaaatttctgtgtcaattgctgatgataatgaacttacatcagatttttaaacatgattattttaagtttttgtcatccacagttattgttttgatttttctctaaaagcatttggaatcagattcatggaggagactctaacaagtacacttaaatatgggcttctaataattttaagatcaattaactaaataaaaatctttaggccaggcacagtggctcacgccactgtggccaatcttttccctccaaaatgggaccagagcagcagtttgggacaggttcatctcagcaccaaggaacataatcctaactacaga

SEQ ID NO: 709790 - DNA, 724 bp, Homo sapiens
tttttattttcttgagatggagtctaactctgttgcccaggctggagtgcaatggtgtgatctcagctcactgcaacctctgcctcctgggttcaagggattctcctgcctcagcctcctgagtagctgggattacaggtgtgtgccaccacacttggctgatttttgtattttttgtagagacagggtttcactgtgttggacaggctggtctcgaactcctgacctcaggtgattcacccacctcagtctcccaaagtgctgggattacaggtgtgagccaccacacccagccacatttctgatatgttattgacctaaatgttccaaaattgtattaaactcttaaaaatataatgtcattagacataatttgggttatgttgtatgccacaaaaataaccaaatttctgtgtcaattgctgatgataatgaacttacatcagatttttaaacatgattattttaagtttttgtcatccacagttattgttttgatttttctctaaaagcatttggaatcagattcatggaggagactctaacaagtacacttaaatatgggcttctaataattttaagatcaattaactaaataaaaatctttaggccaggcacagyggctcacgccactgtggccaatcttttccctccaaaatgggaccagagcagcagtttgggacaggttcatctcagcaccaaggaacataatcctaactacaga

SEQ ID NO: 709791 - DNA, 1172 bp, Homo sapiens
tcatttggcacctaagatgtcttaggaattattcttggcactttgaataagcagtctcatgtaaccctcaacatagccttatgaattttatatttatatattgctattttcacttgagacaggaggaaattaactctgaggaaaaaaaacattgctcacagtgcaaagctaataaatggtgcagtaaggattaaaattcaggtttacatgaaaacaatgtgtgctgaaattaatattggaaaaaagtcttaaaattcagattcagatatgttctcactacccagcttttgaacttgggacatctaacagtcttattttatttatatctgtaatttagaggttgaattggatgcttcctaaaaatagtctgtgattctattttccaactgtacatattttacctgcctttcttttataacacattcttgccttttagacattccatgggaatttgggttgggccattctcttgagccatgtaatgaacattttgtgttggttgattattcaattacaataaagaagtgacaatccattataaagagttatgaatctacacattggaggggaatcctgtgattttrttttgcctatcagcctttccaactgcacttttattataatgaaacaaaatacaacttaatggttaggggaccacataaactgaagcaaacggtaaggatggctgatgccagagggtgaattttgccaagattcactcaacactcttttctctccctgggtgtcttggcctaatatctacttacctcagtaatagaaagcaagtttttaacaccattacctcctgctgaaccaatgcagttatgaaaaagcaagctggattctttttgtctcatacatcaactacaacactgtcagctgagttccatttgcagaatccttattactgctgatgatgtcagagaaaaggaacatagcttgattaatagattgcaggtggaatttacaatactggcaactaaaaatgatcttttgatttataaactgagaacattcaatgtaaaagtcactgagagtgaataaagatgtttaaaacccaccagatcactttaggaaatcgattttctatttataattacaatttaaatatcattaaaaagcttctttcctttccgttttgcatgcggtttttggtattctacaaccatttg

SEQ ID NO: 709792 - DNA, 727 bp, Homo sapiens
gtcccttcctgttgtatgtgagctggcttgtgacttggtttcaccaacagaatgcagtggatgtgatgctctgacttccaagaccaggccattgggattctgtcagattataattctgccttggaagccagtttttatgtaaaaagtcaaaatactcagagccatcatatttgcaggtagcccaaactacacagagacggagaaaaaagcttcagagaggaacgctgagaactaaacaatattatggaatcccttttatgcctttttgtagagttacatacatttgtttataactgtttaaggacaatttagaccgtttcaaagtaagtgaattcatctgttaattaagcaacgtagtaattgggcctagggttgcactgttgttatgtaactcataattttccttatatttacctactttgcatctatgataataattattataagttcagttagcatagtcattaaataaatatgtaatttattatagtgacatttgtttatggtacagtatctctccacatagttcaagttttcttagaatctttaaactatccataatatgatttcaccatgaaaaaggcagtggtgctgctagataatttgctataaattagatgtgagccagaaggtgcaatgacttttcttcccgtgttaggattataaagcarcccctggggttgttttgtgctatgattttcatgttgcagaagtcaagaaattcaca

SEQ ID NO: 709793 - DNA, 619 bp, Homo sapiens
aatcaatcacatttctacatacgaacaataaacactgaaactaaaatttaaaacagtacaattttcaatcacttcgaataaaatgaaattcttaggtatacagtttaaaaatgtatgctgaaagcttcgtaatgctgatcaaataaatacatgctgattaaaatgctgatcttccaatacacgaacagagtatgtctctgtacttaaatcattctttgatttaaagagagagacatactctgttcgtgtattggaagactcaacatagtaagaatatayattctcccaaaattactatcaaaattccaccaaggcttttatagatataaaaaaaaatctattctaaagtttatatggaaaggcatagccccaaaatagctaaagtgattttcaaaattaataaagtgggacacctggttaaaaatcaactcaaaatgcattaaagacttaaatttaagacctgaaactataaaattgctagaaggaaacaggggaagttttccttgacataggactagtaatgatattctgaacatgactccaaaagtactggcacaaaactgaaaattaaaaaaaaaaaaaacagaattgcatcaaactaaaaagcttctgcatagct

SEQ ID NO: 709794 - DNA, 608 bp, Homo sapiens
gactagaaaagacatataattactatttgcatataaaacatttactttgtttccatcaattaaagtcatcataatagttttttaatgattacatttgctcttattagaagtgtttgcacattgttatataagtcaaaaactcaggccagttttactgatatcccatcagaaaatgatttgaggactaaagcacagtgcatccaggtttttaccccataaaaatgaaaacagtatgttgtgaggtgctgattacttccactgttcaatgcattatctagattatctgtggctcccagttgaataatacacatattaaaaagattttgttggactgggtggtttacaatctgctgtattttttatacatctcattcaaaaacctttggtaagttgaggattagtcatagtagtttttattaaagattttttaaatgtacattartgactgcttatattatccacttgttcaatttttcaagctccaacattacagttttatgtgttgtatgctttctgcagatttttctattttgctcaaatgagtgtaaaattgtatatagctgaatatatccctattgacatacatttgaatgggctcaatagcttaa

SEQ ID NO: 709795 - DNA, 600 bp, Homo sapiens
tggaaacttcccacacagagattcatatatgtcctaaaaattaataaaactattaattagtaacatttataatcactgggctcaataaattcagataaaataatgyggattgcatttaaaaaaattattaagacatgtaaaacatcatcccatttaggaaaatgagatcttggacaaaaagaaatatttatgaaatgatattcttttaagttaatattttttattttattttattcaaatcattagctataagtgccttaaaatttgtcacgtgataacatttatggtttaaacattagaagcactctatggttgatgttaaatcgtggttattaatataccactttgaaattatctcctacgggaaattcctgacataaaaaaattaacccaccacctatgaatttacctcttctcatattatcaaaatttataaataggataaaaatgtgtcatagtctattgcaactgttaagttggaaagcactttgatatgattcagcatctaaaaatgtagaataccagatagctccatggtaaatgcatttccagtgtattacttacaataatagcaccaataagtttgttcaaatgtatgac

SEQ ID NO: 709796 - DNA, 1471 bp, Homo sapiens
ctgcacttcagtttccccatgaagctggttgatctctgctcccataaacctttcagaatatctctataagacttgggtatcttagaagaagactccataagaatagccctatataagccagtggttaagaaatcagactaagtttaagtccrgctctgccatatattcaccacaagatgctatgactttctaaatcctggtttctgggtttccgtctctacacagcagggatagtagtaataattcttatctggcttggtgttgtggggatgcaacggaaagctctcagcacagtgccaggcataggatgggggggggcacaaagtgtgcatttatcaaacagaggccccaaagtccctcaaagcagagcctcaggggccctgcccaccatgatcctgtcaccaagagcctcagccttcacctgcagacaccagacctgcattcaccatgagtgtggggctgagtggcatgatctggggagtgcagaccacattacagtgtagggcttttctaccctagtctgttgtccgttagcaatccgcccaaatgatgggtggctcctctggtcaagatggggctccattcaggctcacattgtgagagacaagagcctcaatgccagccaacaccctatttatttgtggatttggcttattggagacaaatgatgctgaggcagttctatggtcatcaaatgaattatttatacatctgattaaattgttttactggaggactcaaccctggttaactcttgcatttccagcttggtgtgtagaaattccactgagcactttctacattttactttggggtctcaccttgaaaattaatggccattaggactacatgtcaagatgtccatactcaaggcttcgtacaggaaaaaaaccaaaaccaaacttagttttgagaaaaaaaccatcagtttctacaaaatgcttattgaagaacctgtgtttttggaccagttagacctttcaaagtctagagggagagatatttaaaatcaaatgtgatgatacaaaatgtttatccattttccctaagtttaaggggagcttgctcttcctttaggcacacaaaataattgctaagcctgccttatcctattatttgtaaattcaatataattagagacttactcagttcattactagcttgagtttttgcccagctttttctcaccctcttgccttttcaaaacactttattaagaacttgttttagtgtcacattctttaagggaaaataactcccaagtacatttgacaggaagtgctcaaaattcaagacagtgccagaaactaataatctcaaatcacagaacttacatgggaaggtcccatatactgttgcaaacagcgtgggtgggttccacctgcaaattgaaattcacatgttctaatagagagttttactggagaaattgtcaccaggtcctgcagttgaaaaaacggcgttcttattc

SEQ ID NO: 709797 - DNA, 580 bp, Homo sapiens
tgttggctaggccaggtctctaactcctaacctcaggtgatccacccgccttggccccgcaaagtgctgggattacaggcgtcagccactgcgcccggctgacaggtgaattctttatcccccacctgtatagaggtagctccaggatccctgagtattaagatgcattataggttgggttctagctcagataggtaagttgccactagctaataatgggtttttgagaataaaatttggtatgtttcctgtttataaatgtaaaatttgctcattgtagacaattgaaaaaaatactgaaaactacagagaaggaaatgagactggagtattcttgggaactccaggcggaagtccagctgtcaaggccatgcatatcagaagcaagagtgcttagagcttaccgcatactaggcttggggcagcaggattatacaggtcccttccacttaaattactcttaattctgctaaggattgcctcagaaatatsatgggcagaggttgcagttttttttccctaaatgtaagttcactgctacacctacagttttggatcattgtctggcctatccacttaa

SEQ ID NO: 709798 - DNA, 612 bp, Homo sapiens
ttggtggagtgatagacacgagggtgactgatgcctttgtaataatttcggaactgtctgaaattatccaaagcaaatctttgttgccattctcagttcttttctatagtctctgcctcctttgccttattcctgacctgtttttttccatgcctacacgtttcttgacttttggagcctaaattatccctccttctataatatatttgggataytataatgttctgatgtttggaagtgacagattataatgttatgctttgccagtaagtcatgctatgtaacagactgctgcagccagtgtgtttaaatttgatgttttaggtcattaaaaattttaacgtttcacttaattacttgttataaattccatacacaatacttgggttaaaaacaggttgtttgttttcttatactacacttgagtttagtctggcttttataacaacttaaacttttggggttggagaatgacttattaaaactacttttgtgatatccgtgtttgttccatttctgacttgtggccagacatcaaaaggcattggaaatttgagtccttctgttaaaagactgttattcatatgttagaagaggagccacttcgtaaag

SEQ ID NO: 709799 - DNA, 612 bp, Homo sapiens
ttggtggagtgatagacacgagggtgactgatgcctttgtaataatttcggaactgtctgaaattatccaaagcaaatctttgttgccattctcagttcttttctatagtctctgcctcctttgccttattcctgacctgtttttttccatgcctacacgtttcttgacttttggagcctaaattatccctccttctataatatatttgggatattataatgttctgatgtttggaagtgacagattataatgttatgctttgccagtaagtcatgctatgtaacagactgctgcagccagtgtgtttaaatttgatgttttaggtcattaaaaattttaacgtttcacttaattacttgttataaattccatacayaatacttgggttaaaaacaggttgtttgttttcttatactacacttgagtttagtctggcttttataacaacttaaacttttggggttggagaatgacttattaaaactacttttgtgatatccgtgtttgttccatttctgacttgtggccagacatcaaaaggcattggaaatttgagtccttctgttaaaagactgttattcatatgttagaagaggagccacttcgtaaag

SEQ ID NO: 709800 - DNA, 1872 bp, Homo sapiens
tgatgaattcatgtcctttgtagggtcatggatgaagctggaaaccatcattctcagcaaactatcgcaaggacaaaaaaccaaacaccgcatgttctcactcataggtgggaattgaacaatgagcacacatggacacaggaaggggaacatcacacactggggcctgttgtggggtggggggaggkgggagggatagcattaggagatatacctaatgttaaatgacaagttaatgggtgcagcacaccaacatggcacatgtatatatatgtaacaaacctgcacgttgtgcacatgtaccctaaaacttaacgtataataaaaaaaagagaaaggattatacactatgaacaatgggcatttattgcaggaatgcaaggttggtttaacatccaaacattagttaatgtaatgtaccatataaatagaacaaaggacaaaaaacatccagacagacacagagaaaccatctgacaaaactccaaacctttcgataataaaaacactcaccaaactcaaccagataaagggaatattgttcacagtaaccaaaaagtagaaacaatctggtgtggaagaaagttaacagagcaggtctgagaccactagccttaaaaagacctgctttcaaagattacccttggttggcatctgggaacttgactggtaaaaagttcctttcattgataaaatgttttccctaaattataagactgcagtgtctaaactgtacaaataatatggtttatgccaaacacctgctttctttctggagtctggagttttggtacatgcttggcagaggatgcctatgtgaccagcttccgataaaaaccctgggcagtgagtttctaatcagcagtacctacaatgcagttgcagtttgctataagtgcaaggctatggtaaagccgtggtagacaacaattcctatgtgtcctcacagctctctggtggaggactaagtgtgttctgtgtgcctctataggagaagactcttagaagcgtgaatctggtctcctctggactttgctctgtgcacattttccctttgtgattttgctctgtattcttttgctgtaataaatcttagtcatgaggatgttgtgtgctgaattctgtgagtccttctagtgaatcactgaacttgggagtgctcttggggatcccagacacaacaaactcaaatgttcatcaactgatgaatgcatttttaaatgtggtatatccatacaatggaatttccccccatataatatagaaatgaagtactgatatgtgctacaacatatatcagtgaccctgatgaactctgaaaacattatgctgaatgaaataagccaatcacaaaaccacatattgcatgagtctgttatatgaaatgctcaggataggcaaatctatagagacagaaagtggctgccagggtttggagggagaagggaatgggaggtgactggtagagttatggggtttctttttagagcgatgaaaaagttccaaaattgtggggatgattgcaaaaactgaaaatactaaaaaccattgaatcgtatattctaaatgggcaaattatatgatatatgaattataactcaataaagcattttttaaaaagaagattctgactagagtggggttggggactaggagggacataattgtcaagatggcagcctttccaaatccccttgtgacatttggcctgtgttccgttagaccctacacagaaaaatacacttcctggccgggcacagtggctcatgcctgtaatcccagcattttgggaggccgaggtgggcggatcacttgaggtcaggagttcgagaccagcctggccaatatggcaaaaccctgtctctaataaaa

SEQ ID NO: 709801 - DNA, 2297 bp, Homo sapiens
cctgaaacagggatgccacttcgtatttacatttagaaagaatctgagtttgacagatttttatctaggctaaattcactattacctctaccttctggttgggacaaataatttagaggtggcatgttaaaacagagcagaaaagccaggcgcactggctcacgcctgtaatcccagcactttgggaggccaaggcgggcagatcacaaggtcaaaagatcaagaccatcctggccaacatggtgaaaccccatctctactaaaaatacaagaattagctgggtatggtggtgggcgcctgtagtcccagctactcaggaggctgaggcaggagaatcgcttgaaccccagaggcggaggttgcaatgagctgagatcacaccactgcaccccagcctggcaaaagagtgagactccatctcaaaaaaaaaaaaaacaaaaacaaaaacaaacagcagaagcctgccacttcctaaagttagggagaccctataatcctgattctgtcaggacaggcccagtttatatacctattgtcctggggtctcaaggaattagtgccccctcacaattagaagtgtcttgaattgagaaagcatattatcaccctcccaaggtactaatcaattccaatgaagcagaggtgacagtacttataaaaattccaaagaggttgaagtgtcttataaccctgaagcacgatgattgttcttaccctatgcaaccctcacttttagctttaagagaaacctcaagtgattttttctccgttttaaaaaaatcaaacaaaaaagtgatttctggctactgatacagaaggtctagttctcccttgtaatgacagataacataagtttcacaatacaacagattaatacagcttaactcattaggcatttgaaactagagagctaggctaaataaataaaaactaatcaactgcaaagttttcatcttataattgacaataattagkattttcagtatgtaaaaataggattgagaacagttagtactgggaacggaatgttccaggcttgatcagatacctctaactcaattgagagatgcatactttggtttatgggatctatcgttaaataaattcaaagtagaagaaagcttacatctctctaagaaaccagccaagaggattttggagtacagggaaaaggaaaagaagggatggcaccacagcaaacaatcagctaggccaggagtcagcaaaatttctctgtaaagggcttctcagtaaatatttaggcttttaggtgatgtggtttcttttgcaactactgaactcagtccttatggcagagaaagcagccacagaccatggctatatcccaataaaaccttatttatggacatgaaatttaaatttcaaatgattttcacatcacaaaatatttttacttttgtttcaaccatttaatggcataaaaaccattcttgcctcacacacaatagaaaaactggtggtaggttagatatggcctacaggaggtaatttgctgacccctgtgctaggcaataaaagcataatggaattctgtatgagacgttaagaggaaaggtagaacaggtctcttgctcccccaaacagttctacgaggaaggaagagagagattaagtaagaattgtatgtaaactgcaacacaataaccgacctgtttacacaagcgtcaatgaattttaacagcatctgaaggattcccagaaagtagaactgccgcactaaataaacacttgaagcagcacaataaattatcatggatatgtgcaatacacacatcagtgtgttacattaaaacattacgtaatgaaagacattaaagatagaaatcatgcttacaggtagaaaaatcaaaacaaatggactaatatgtaaacaattagtattgtacaaaaataccttcctaggttttagttataggattcttcctttgtattacagagatatttaccaatgacgttttttaagattaaacacacaatgcctcatgaaagaaacttaaacatcagaggttcttaccaaagccgattttttctaggttagcatggatgtaactcactctggtttgggcaaaagatttgtcatcaacaatctgagtaaaagcaacctgtgcacaaaataactttttataagacttgaaactatgacaaggggccgagtgcagtggctcacgcctgtggtcccagctacatggaaggctgaggtgggaggatcgcttgaacccaggaattcaagattacagtaagctatgatcatgccactgcactccagcatgggtga

SEQ ID NO: 709802 - DNA, 2297 bp, Homo sapiens
cctgaaacagggatgccacttcgtatttacatttagaaagaatctgagtttgacagatttttatctaggctaaattcactattacctctaccttctggttgggacaaataatttagaggtggcatgttaaaacagagcagaaaagccaggcgcactggctcacgcctgtaatcccagcactttgggaggccaaggcgggcagatcacaaggtcaaaagatcaagaccatcctggccaacatggtgaaaccccatctctactaaaaatacaagaattagctgggtatggtggtgggcgcctgtagtcccagctactcaggaggctgaggcaggagaatcgcttgaaccccagaggcggaggttgcaatgagctgagatcacaccactgcaccccagcctggcaaaagagtgagactccatctcaaaaaaaaaaaaaacaaaaacaaaaacaaacagcagaagcctgccacttcctaaagttagggagaccctataatcctgattctgtcaggacaggcccagtttatatacctattgtcctggggtctcaaggaattagtgccccctcacaattagaagtgtcttgaattgagaaagcatattatcaccctcccaaggtactaatcaattccaatgaagcagaggtgacagtacttataaaaattccaaagaggttgaagtgtcttataaccctgaagcacgatgattgttcttaccctatgcaaccctcacttttagctttaagagaaacctcaagtgattttttctccgttttaaaaaaatcaaacaaaaaagtgatttctggctactgatacagaaggtctagttctcccttgtaatgacagataacataagtttcacaatacaacagattaatacagcttaactcattaggcatttgaaactagagagctaggctaaataaataaaaactaatcaactgcaaagttttcatcttataattgacaataattaggattttcagtatgtaaaaataggattgagaacagttagtactgggaacggaatgttccaggcttgatcagatacctctaactcaattgagagatgcatactttggtttatgggatctatcgttaaataaattcaaagtagaagaaagcttacatctctctaagaaaccagccaagaggattttggagtacagggaaaaggaaaagaagggatggcaccacagcaaacaatcagctaggccaggagtcagcaaaatttctctgtaaagggcttctcagtaaatatttaggcttttaggtgatgtggtttcttttgcaactactgaactcagtccttatggcagagaaagcagccacagaccatggctatatcccaataaaaccttatttatggacatgaaatttaaatttcaaatgattttcacatcacaaaatatttttacttttgtttcaaccatttaatggcataaaaaccattcttgcctcacacacaatagaaaaactggtggtaggttagatatggcctacaggaggtaatttgctgacccctgtgctaggcaataaaagcataatggaattctgtatgagacgttaagaggaaaggtagaacaggtctcttgctcccccaaacagttctacgaggaaggaagagagagattaagtaagaattgtatgtaaactgcaacacaataaccgacctgtttacacaagcgtcaatgaattttaacagcatctgaaggattcccagaaagtagaactgccgcactaaataaacacttgaagcagcacaataaattatcatggatatgtgcaatacacacatcagtgtgttacattaaaacattacgtaatgaaagacattaaagatagaaatcatgcttacaggtagaaaaatcaaaacaaatggactaatatgtaaacaattagtattgtacaaaaataccttcctaggttttagttataggattcttcctttgtattacagagatatttaccaatgacgttttttaagattaaacacacaatgcctcatgaaagaaacttaaacatcagaggttcttaccaaagccgattttttctaggttagcatggatgtaactcactctggtttgggcaaaagatttgtcatcaacaatctgagtaaaagcaacctgtgcacaaaataactttttataagacttgaaactatgacaaggggccgagtgcagyggctcacgcctgtggtcccagctacatggaaggctgaggtgggaggatcgcttgaacccaggaattcaagattacagtaagctatgatcatgccactgcactccagcatgggtga

SEQ ID NO: 709803 - DNA, 625 bp, Homo sapiens
tacttaatatcaaacaagcaagtgtagagtcctcatgtatcaaaactcttgttctagacttccttaaagaaagggaaataacaaagctctttttatgttagacaaagaagggtgtttaaatattccactggaaattattatatgtaaaattataaattcatttaggttagttattttcacaatataaatgctcaaacataaaggtgtagcattatggatttcaagtaatctttacaattacatgcaaaaagaaagaagaaagagaaagaaagaaacgaaaagagaaaaggaaagaaagaaagagagagagaaaggaaggaaggaaggagagaaagagaaagagagagaragagagagggagagagggagggagggaaagaaggaaggaaggagggaaggaaggaaggaaggagggaaggaaggaaggaaggaaagaaggaaggaaggaagagaaggagggagggagggaaggaagggaaggaaggagaaagagagaaagaaagccaacaaataaatgcttgaataatatagacacaaaagcagtactcagcttggtaagccatacgtcattctctttgtgaccctttgcttgcatcctggtttagagacttgttccatccctgca

SEQ ID NO: 709804 - DNA, 604 bp, Homo sapiens
taccttctctatgagtatatctatggtaaaaatctgtaattctctaaaatttgtagattttttcaactacatatacattcctgtaattactggaaaattttatgtatcaaagctacataaggaaacctgtcattacacatttttaatagttaaggtttagtattttagaaatttaaattatatgagtgattattcattgatttttcataaactatcaattattaaatatgaaaacaataatcccataamatgcaatatttcaaacaccagatttgccacttacttatacactgtcttattaagttatgtaactattgtgtcaatgtgaccgtatcctccttggaggttggaaccaaaacattatccactttttgttgatgttccccatggtaccaattacagtacagaacacatagtaaatgctcaataaatatccactaacttgaattgcatatttaaaagtttgctacataaagaaacaatgttatgatgagttgtaaagaaaaaccaatctaatgcttttattagcttaccatgatatataaaagaatagaaagaaatagcaatgtacatatctaaatacacagtctgttggtatcactac

SEQ ID NO: 709805 - DNA, 604 bp, Homo sapiens
taccttctctatgagtatatctatggtaaaaatctgtaattctctaaaatttgtagattttttcaactacatatacattcctgtaattactggaaaattttatgtatcaaagctacataaggaaacctgtcattacacatttttaatagttaaggtttagtattttagaaatttaaattatatgagtgattattcattgatttttcataaactatcaattattaaatatgaaaacaataatcccataacatgcaatatttcaaacaccagatttgccacttacttatacactgtcttattaagttatgtaactattgtgtcaatgtgaccgtatcctccttggaggttggaaccaaaacattatccactttttgttgatgttccccatggtaccaattacagtacagaacacatagtaaatgctcaatraatatccactaacttgaattgcatatttaaaagtttgctacataaagaaacaatgttatgatgagttgtaaagaaaaaccaatctaatgcttttattagcttaccatgatatataaaagaatagaaagaaatagcaatgtacatatctaaatacacagtctgttggtatcactac

SEQ ID NO: 709806 - DNA, 1613 bp, Homo sapiens
tcactacattgagcagtattataaaaatttttccttgacttacacattttaatggttttaagaaaaaatagctacatgaatgaaacagatggttccataagatgaccactttccattatgagtgtggcagatcaatgcttgttcaaatatgaatgtgtgcaaaaacctccttgagatcctgttaagaggcaagttctgagtcagtgggtctgggctggggcactaataacaagctcccaggcattgctgctgttgctggtacttggacctcactttgctctgcaactttctagataacaggatctrttataaaagttctggccaggcacggtggctcacgcctgtaatcccagcactttgggaggccaagatgggcggatcacgaggtcaggagatcgagaccatcctggctaacacggtgaaaccccgtctctactaaaaatataaaaaaattaatcaggtgtggtggtgggcacctgtagtcccagctactcgggaggctgatgcaggagaatggcgtgaacccgggagatggagcttgcagtgagccgagatggcaccactgcactccagcctgggcgacagagcgagactccgtctcaaaaaataaaaaaaagaagttctaagtatttggccgtaatagttttataagagagactagattttactaggatcttgaatagatgagagttggataaattataaagggacaaaataacataaaatcagaagcataagtatactatgttgatagtaaagggaagagagagttatgattgcagttgtgggcctaaaaataaataaataaaagttagcaagaataatgttacattttagaaagcaatgaaagttattgttggggtgggaattaaacatgccatgattgaattgagatacttaaatatattacagttacatattatttgattgtttataccatacttttaacataaaaggtataggccaggtgcagtggctcaagcctgcaatcctagcactttgggaggccaaggcaggcagattgcctgaggtcaggagtttgagaccaccttgggtctggtggtgcgtgcctgtagtcccagctacttggaaggctgaggcaggagaattgcttgaacccaggaggtggaggctgcactgagccgagatggtgccactgcaccactccagcctgggcgacagagcaagactctgtctaaaaaacaaaaaacaaaaaacaaaaacaaacaaataaatatgaaaacatgaaaagtatcatctgattcttacagtgaggaaaacaagtctcacaaaagttttaagagacttacctaaaacacaaaatgttaaacctgagccaggaacacaaatcttctgacccatagtcttagtattttttttgcattatcccaaactgcctttttgttttatatattttaacttatttcctacatattctaactggttatactttatgatatactgatagcaataactttagaaagttggtatccctacccttttcaacattgtcctcattgccctctgcttttttgtttacaacagttaacttgctctcctgttgaagtctcatctattggaggaattgcagggaaagtgcatgggaatgtaac

SEQ ID NO: 709807 - DNA, 1613 bp, Homo sapiens
tcactacattgagcagtattataaaaatttttccttgacttacacattttaatggttttaagaaaaaatagctacatgaatgaaacagatggttccataagatgaccactttccattatgagtgtggcagatcaatgcttgttcaaatatgaatgtgtgcaaaaacctccttgagatcctgttaagaggcaagttctgagtcagtgggtctgggctggggcactaataacaagctcccaggcattgctgctgttgctggtacttggacctcactttgctctgcaactttctagataacaggatctattataaaagttctggccaggcacggtggctcacgcctgtaatcccagcactttgggaggccaagatgggcggatcacgaggtcaggagatcgagaccatcctggctaacacggtgaaaccccgtctctactaaaaatataaaaaaattaatcaggtgtggtggtgggcacctgtagtcccagctactcgggaggctgatgcaggagaatggcgtgaacccgggagatggagcttgcagtgagccgagatggcaccactgcactccagcctgggcgacagagcgagactccgtctcaaaaaataaaaaaaagaagttctaagtatttggccgtaatagttttataagagagactagattttactaggatcttgaatagatgagagttggataaattataaagggacaaaataacataaaatcagaagcataagtatactatgttgatagtaaagggaagagagagttatgattgcagttgtgggcctaaaaataaataaataaaagttagcaagaataatgttacattttagaaagcaatgaaagttattgttggggtgggaattaaacatgccatgattgaattgagatacttaaatatattacagttacatattatttgattgtttataccatacttttaacataaaaggtataggccaggtgcagtggctcaagcctgyaatcctagcactttgggaggccaaggcaggcagattgcctgaggtcaggagtttgagaccaccttgggtctggtggtgcgtgcctgtagtcccagctacttggaaggctgaggcaggagaattgcttgaacccaggaggtggaggctgcactgagccgagatggtgccactgcaccactccagcctgggcgacagagcaagactctgtctaaaaaacaaaaaacaaaaaacaaaaacaaacaaataaatatgaaaacatgaaaagtatcatctgattcttacagtgaggaaaacaagtctcacaaaagttttaagagacttacctaaaacacaaaatgttaaacctgagccaggaacacaaatcttctgacccatagtcttagtattttttttgcattatcccaaactgcctttttgttttatatattttaacttatttcctacatattctaactggttatactttatgatatactgatagcaataactttagaaagttggtatccctacccttttcaacattgtcctcattgccctctgcttttttgtttacaacagttaacttgctctcctgttgaagtctcatctattggaggaattgcagggaaagtgcatgggaatgtaac

SEQ ID NO: 709808 - DNA, 657 bp, Homo sapiens
tgtactaaaaatacgaaaaatagttgggcatggtggcacatgcctgtaattccagctactcaggaggctgaggcaagagaatctcttgaggctgggggtacggaggttgcagtgatctgacattgcaccactgcactccagcctgggtgatagagtgaactctgtctctaaaaaaaaaaaaaaaaaaacaagccctccagcgattctgatgctcaattagatttcagaaccactgggtaactgtaatgtagcaagtggtattgaggggctaacctaatgttgaggcagtaagggccagaaaggagggggtggacttaagggaaaccttgagacagactcatttgctttaggaggaatcaaggatgagtttctggctggagccactgccctaagtaaggttggatcacaaggaagttawagagccaggggtgaatccacatgtgccttgcctccatggcccgtacgttcctacaacaccacactagggctctgtggcagtgcctgaccacctttaaacatttgtacagtgcacaggggaaatgaatgaggctgcttgaggttggaggggacaagctggaggacctgaggctgctagaggtaaccagctgggagatcccagctccctagagctgaggggaatcagtaacccatacccag

SEQ ID NO: 709809 - DNA, 649 bp, Homo sapiens
tttttctcatctgtagaatggacataatgatagtgcctgcttcatagggttgtcatgaacatgaaattaattagtacgtggtaagtgctatgctacatgtccactattattactttagattggacggtaatgacatttttaaatgctccaggtatcccctctccctaaggtacagttacagcttctgcacctgaaggtgcatctgctcatccccagaccctgtcaggagtaatttccagccctcacagaagcattcccagtggtgaggtgtaggagaaagaccctggctctggggttggacattcccatgtctgcatcccagcttkcccacttagcagctgtgcactctggggcaacttgcttatctgctctgagcctccagggcctcatctggagtggttgcaaagaattagaatgttttggagcacctgatacttaggatgcatgcacttattcagtccacaaatacttattgcgtgcctatgtgtgccaggcactgcaagaacctcagagtgctgcagtgaaggaaccaggcagacgtggtccgccctcaggggctgctgtccagtggggggagggatgctaaacacacaaccacagtggagactcctgggaagggagacgccacctagcggggctgaggaaggct

SEQ ID NO: 709810 - DNA, 1114 bp, Homo sapiens
cagcctgggcgacagagtgagactctgactcaaataaataaataaacttataaaattaaatgcaatgtccttacagatagctcagaaactgatcatgcaaactacctaaaagtgacaggatagctctccgattgtagcctggttggttgtgctaaaccacccaaagcaagaagtgtgttgatatggtttgggtttggatgtgtgtcccacccaaatctcacgtcaagttgtaatctccagtattgaaagagggacctggtgggaggtgactggatcacgggggcagatttcccccttgctgttctcatgatagtgagttctcatgagatctgattgtttaaaagtgtgtggcacctccctctttgaccactttctccttctctggccatgtgagacgtgcctgcttcccctttgccttccaccatgattttcctgaggcctcccaagtcatgcttcctgtacaacctgtggaactgtgagtcaatgaaacctgttttctttatgaattacccagtcccaggtagttctttacagcaatgtgagaatggactaatacatgtgtgctcccaagggctgtgggtcagcacagaaccagagaatgagagccccaaaggcaaggccacccctaccatcaggcagtagagatgcacccaccatcccagactcttgccatcacaggctggattcatccggctccccttgtcctgaatataggctcccagagcaaccttctgatcatcctggcttcccatatggccaacagggaactcttgcacagatcatgccaatgagaatatgctaggctctggagcagttctatctctctttgcaatttaattcattggccttctaaggtctacttctgttgaaggtaactttcagctgatatgagtccctcacagaggtactgtcttgggagccttcagaacagaagacacgatgctgatggaggatgcgctcatccagggactgcccagctccctcgccatcctctctccctccaacacctcaccctagtcctgtgaacatgggacaaaagccacaaggtagggattggctcttacccctgacactgccccaggcttgtsagctcaataactcatagactccacac

SEQ ID NO: 709811 - DNA, 844 bp, Homo sapiens
tgaagcctactagccaagttgcatagcagccctggggttgtattttcattaagatacatcctttctactgttggattccctttaaccagaccctcttaaggcccagtttaaaatcccactcctctgcagagccctatcaaagagctcctaacacgtgcaactgtttgtctagaaatcatctacaatgtatctaaaatctactaagtgacyattcatccactgaactcttaatgagggcttacaatgtgctgttctgtgcagggcagggtgggtacatgtttcctgcccccatggggcttattgtctaccaggaaagacaaatggtaaataaatcataatgttaacgttattaaattgtagctagggctaggtgcggtggctcatgcctgtaatcccagcactttgggaggccgaggcaggcggatcacgaggtgaggagatcgagaccatcctggctaacatggtgaaaccccgcctctactaaaaatacaaaaaattagctgggcgtggtggcgggtgcctgtagtcccagcaactcgggaggctgaggcaggagaatggcgtgaacccgggaggcagagcttgcagtgagccgagccaagattgtgccactgcactccagcctgggtgacagagcaagactccgtctcaaaataaataataaataaataaataaatgataaataaattgtagctaggagaaacaatgaggcctacccctgaaggatgggctcttctgtgcctgtcctgttgtcctgtcatcgaacttcaggggatctaatccaaccagctgccttggggaacaccctttccctcctttctgttcccagtccccatctctgtc

SEQ ID NO: 709812 - DNA, 844 bp, Homo sapiens
tgaagcctactagccaagttgcatagcagccctggggttgtattttcattaagatacatcctttctactgttggattccctttaaccagaccctcttaaggcccagtttaaaatcccactcctctgcagagccctatcaaagagctcctaacacgtgcaactgtttgtctagaaatcatctacaatgtatctaaaatctactaagtgactattcatccactgaactcttaatgagggcttacaatgtgctgttctgtgcagggcagggtgggtacatgtttcctgcccccatggggcttattgtctaccaggaaagacaaatggtaaataaatcataatgttaacgttattaaattgtagctagggctaggtgcggtggctcatgcctgtaatcccagcactttgggaggccgaggcaggcggatcacgaggtgaggagatcgagaccatcctggctaacatggtgaaaccccgcctctactaaaaatacaaaaaattagctgggcgtggtggcgggtgcctgtagtcccagcaactcgggaggctgaggcaggagaatggcgtgaacccgggaggcagagcttgcagtgagccgagccaagattgtgccactgcactccagcctgggtgacagagcaagactccrtctcaaaataaataataaataaataaataaatgataaataaattgtagctaggagaaacaatgaggcctacccctgaaggatgggctcttctgtgcctgtcctgttgtcctgtcatcgaacttcaggggatctaatccaaccagctgccttggggaacaccctttccctcctttctgttcccagtccccatctctgtc

SEQ ID NO: 709813 - DNA, 844 bp, Homo sapiens
tgaagcctactagccaagttgcatagcagccctggggttgtattttcattaagatacatcctttctactgttggattccctttaaccagaccctcttaaggcccagtttaaaatcccactcctctgcagagccctatcaaagagctcctaacacgtgcaactgtttgtctagaaatcatctacaatgtatctaaaatctactaagtgactattcatccactgaactcttaatgagggcttacaatgtgctgttctgtgcagggcagggtgggtacatgtttcctgcccccatggggcttattgtctaccaggaaagacaaatggtaaataaatcataatgttaacgttattaaattgtagctagggctaggtgcggtggctcatgcctgtaatcccagcactttgggaggccgaggcaggcggatcacgaggtgaggagatcgagaccatcctggctaacatggtgaaaccccgcctctactaaaaatacaaaaaattagctgggcgtggtggcgggtgcctgtagtcccagcaactcgggaggctgaggcaggagaatggcgtgaacccgggaggcagagcttgcagtgagccgagccaagattgtgccactgcactccagcctgggtgacagagcaagactccgtctcaaaataaataataaataaataaataaatgataaataaattgtagctaggagaaacaatgagrcctacccctgaaggatgggctcttctgtgcctgtcctgttgtcctgtcatcgaacttcaggggatctaatccaaccagctgccttggggaacaccctttccctcctttctgttcccagtccccatctctgtc

SEQ ID NO: 709814 - DNA, 844 bp, Homo sapiens
tgaagcctactagccaagttgcatagcagccctggggttgtattttcattaagatacatcctttctactgttggattccctttaaccagaccctcttaaggcccagtttaaaatcccactcctctgcagagccctatcaaagagctcctaacacgtgcaactgtttgtctagaaatcatctacaatgtatctaaaatctactaagtgactattcatccactgaactcttaatgagggcttacaatgtgctgttctgtgcagggcagggtgggtacatgtttcctgcccccatggggcttattgtctaccaggaaagacaaatggtaaataaatcataatgttaacgttattaaattgtagctagggctaggtgcggtggctcatgcctgtaatcccagcactttgggaggccgaggcaggcggatcacgaggtgaggagatcgagaccatcctggctaacatggtgaaaccccgcctctactaaaaatacaaaaaattagctgggcgtggtggcgggtgcctgtagtcccagcaactcgggaggctgaggcaggagaatggcgtgaacccgggaggcagagcttgcagtgagccgagccaagattgtgccactgcactccagcctgggtgacagagcaagactccgtctcaaaataaataataaataaataaataaatgataaataaattgtagctaggagaaacaatgaggcctacccctgaaggatgggctcttctgtgcctgtcctgttgtcctgtcatcgaacttcaggggatctaatccaaccagctgccttggggaacaccctttccctcctttctgytcccagtccccatctctgtc

SEQ ID NO: 709815 - DNA, 520 bp, Homo sapiens
acaaaatgggtcataggcttccattgtgggggcggggcgggggggcagattatttgtgactttggttttaaagaaaatttatgctggtggtttgcagaaagttgacatatatcctagggttyccttgtcagagggcagcagggtccccatgggttcacatcgttgcctggacaaggagtctttgtaccctagtggtgcctgggttgtcgcagggatggggtaactcatttattcacactctttctcctttcctgtttccttcaaagataccctggtcctagttgactctactttactgttcaaaattcagctcaacatatgtcaagctgtacgttcttaaactcaaggaaacagaaaggttataaccccgtggtttccaagcctggcttttcatcagagtctcttggtgaacttttagaaaatccatattcttgcccccacagccattctgattcattaggactgcttggggccatggaacttatatttgaaaaagctctccttgtgtttctgatgatca

SEQ ID NO: 709816 - DNA, 1122 bp, Homo sapiens
gaaatagattctcccacggagactctggaggaaactcacctgctgtcaccttggacgtctcatttctagaatgataagattataaacgtgtgctgttttaagtcactcagttggtggtaatttgttatagcacaaggggttttgtttgttttttagagacagggtcttgctgtgttgcccaggctaaagtgcaatggtacaataatagctcactgcagcctcgaattcttggccttaagcaatcctcctgcctcagcctcctgagtagctgggaccacaggtgtgtaccaccacgcctagctatttttttcttttctttyttttttttttttttgtagagatggggtctcgctatgttgctcaggctggtcttgaactcctgggctgaagcgatcctcctgcttccacctcccaaagtgctgggattacaggaatgagctgctgcgcccggccaaccacactcttttctctcatctgtagaatggtctcagtatccttgtcctgactctgtgtctctgaggatgagaaagcaggagacctccagttctccttggctgttgctgtagatttgtttccataaagcggtttctttttcttttcttttttttttttttttttttttgagacagagtctcgtgctgtcacctaggctaaggtgcagtggtgtgatctcggctcactgaaacctctgcctcccaggttaagtgattctcgtgccccagccccttgaatagctgtgattacaggtgcctgccaccatgcctggctaatttttgtatttttagtagagacggggtttctccatgttggccaggctggtcttgaactactgacctcagacgatccgtctgccctggcctcccaaagtgctgggattgcgggcatgagccaccgcgcccagccccataaagcagtttctagatctcactgtcatatggctccgaatgtcctgttgtgagatctcttctgaaagggagaaaaccttatcctgaggaattctaaccgaaagcctggagaacccaccacagactgattaaaagaaatctttctcgtaggaaaactgcaagtcctgagtctccagctttttcatgtgtgacccttgggtggcccacttcagagcat

SEQ ID NO: 709817 - DNA, 1541 bp, Homo sapiens
gaccagcattcctgatattttcctggcatctacaaaatgcaaaactaaattacatgtaatgttaattgaggattccaaagatcttttaatttccagttttcatgcattaccaactcatgattttttttccacccttaaatatgaaacttgcactgcttttaacctaccacattaccaaggtcagaaacagaaccactctcattgtcagataaaagcatgagaaaagtattcacaaatgtacttaactagacataaggtggaaatccagttctgtctcttataaaatgctaaaaatcttctctatgatacactttaaaaggaataattgctttaaatgttttgaagtccttgccgcattatttataaacaacaactttgcagagtacttgcctgtgataaatttgtattatgttttacgtggatcaaatttttgaccttcaattcagaatgacaaaaaatagaaaaatcatagcgagcaggaaaaaaaaaaaaataaggccacacctttctctaacattggttgttattatttagtcctttatggataacacataaccatcttttacacttcttcaagtccatatccttcaaaacatctttattcttcttatcctaatgttccatccctcaatctaacacacgggtattcaggtatctacaattttattaaaaagcccttgtgctttattattacaaaatacaacatacagggcagttttttcctgaccatgctcagcttatcagaactactttattatgcaccactgatctctatttaaaatgatgactttgttttataacagaatctaatgttctaaggagacagtttctgatgttagaaaggggaaaacctcaggaagcattctttcaaaacctgctccatgactttatgccaagacattggtaagcaaactttcagaagcagatatcccagaagctcctcttctgaaacagtgtttgacagtagcaatcacaagtcagaacagaactacgaaataattaccttttaaaaaatacagtctgcatttaaatggtctacacagcagagatttatctgtgctaataaactctctttaaaatgacatcactaggaagattctgcttatccaatggtttgagacagaagggttcctttgaattytagaggggagagggctcaaatcatgggtgatacataaaaacaagaatttgaatttgatcaatcaaggaagagcgtttgggcactgatactccaaaaaagaataaacatcatgggagaagggcagggaaagagaggcagatgaatacaaagccacatttcatcacagttgatgattgcctcctgcactatgaagaatgcttatatccctttcaaggtgcttacctccatacagggcttgctcagaactcatcagaccacagatgcgccttaattcaccatctcattgcaaatgaggatggtcagggaagataaagagaaacacacagaatcttatttcaggactatctgaagtctacagaatgatcttacagataatttggaatcaacaattctggtctcc

SEQ ID NO: 709818 - DNA, 583 bp, Homo sapiens
gagctatcttggcgacgagacctaagtctaaacataaaatttatttatgtttcatgtatgtcttatgtacatcacctgaaggtaattttatacaatattttaaataaatttgttcatgaaacaaagttttgatggcattttattatgacctgtcaccgaagatcaagtaagaaattttccgatggcatgtaggtgctcaattttagattttagagtattctggattgggggcattcctaatccaaaaatctgaaatccaaagtgctacaaaatttgaaactatacacaccaatacacaatacacacayatatatatatttagtttcctgacatgtgtgcctgtatatgtgtgtgttgcttttacagaccatgtctttgtgttggacatgtcagtttaatatgcctgccatatcccaattccatttaacataatttgtcttcttcgaactcttaaaagagatatgcaacataccagctgacctcacatgaatggttatagatacaggcatgcctcattttattattattttatttattgcactttgcagatatcacttttttttttttaacaaattgaaggtct

SEQ ID NO: 709819 - DNA, 1215 bp, Homo sapiens
tgaaagacagaagcacctatttcacagtttgtaaccaattcacttttcttacaacattaatttcaaatgttatttatggaacccagtagtgctacttagatagtgattgttgaagtttgtcgaggacgcttctggatcctaaattcctgacccatgtaataattaatgtgctgcaattggtaactgccctagagtggagaccaagatttcttaaccttctgaactacataattctttgttaagtgtgtgtgttagtgggaagttgtcctgtgccctgtaggatgtttagaaatgtctctggcttctattcattagataccagtagcaccaccccaaccccccttccattatgacaacaaacartatctccagacattgccaaatgtcccatggcagcaaaactccctgttgagaacaactggtatagacaaaacaaacacgcccacacatatagcacactgttgttgcagtaatagtatgttatagcatttacagacactaaaacaagacaacaaaatatccataagcagttatataatgaggtgtctgcttgcttgctttttcctgtcaacctcaactccactgagggatcagcttaaggaaggtgttgtaagcctgagagaaagtggcttttgatgactgaggcttatggtatcctcttagattttgcactgaatgtctcacatggtcttaccttagtcccaggtcctgcgtttacacctgagtttcagttggtttttactcattctcagcttgtcattctgtagcacatcaatggctctcagcaatagccatctaatactacttcctccatgggtttcaaatgctcaacacatcacacctcctaaggggttcacttccattcgttcactgtcccaattcaccaccagtgagagagtgttaggagttggacttctgccttgtactgggggctctctggctccttttaccttgttgtcaggttggcagcacagattcctctcccaaactccgtgacgctttctcaggttatttttggcacgaactgtcacaggttgggttttctggaagcaaatgctgagattgaatttatggtaaaaaatgtttgttaggaattcacagtgaaggacaaaaaaggaaggagcagagtcgagtagtttgcaagctgaactgtgatggaagctccacaaagcctccggaagcccgttgtggtgtgggggatggtgaggagggggg

SEQ ID NO: 709820 - DNA, 2424 bp, Homo sapiens
gatccacagctgccacttaaagcctagaatttaaacacagagcaactcagcagccaagtgttaggatgaaacagaagctgagcttctgagcagaatacgtctttgaagccagacatatttagccggaattctaaacttacccacccattcaccactgattaaccaagatccaaagaggcagcttgatccagccatccacgcaatggagatgctgagcacacatatgactgccactacaaccaacaagccaccggccctttcactccagagacgatggtcttattagcaaaaggccactgctcctcagttgcattttcttgcctggtgtgcctgcacttggcactccagaagcaaatcatcctttggcaggttccacatcaatgcaggggttggggactgctttctccttgtccaaaccctgaaggggccattcccaactgcactgtgttggagtgggcctacatagcttgatgtgagtccaggggaacagcaggttccctgcatccatccacttgtgtgcttacctctgactggggagaaggcttcctctacctttcaagcaatgatgtttgcattcaaatgtctctgtcaaaggcggattcctgataatctgttcctcttcaccataccagcacataggcatatatacaaagatcctgctacagaaactttaaaggaagaaaatcatggtgatcagccagggccttctcccttttccactgttcaactcaactgatttcctcaactcaaaaatgtgggaacaagcttttctagccataatactccctccactgcaaatgatcttcctgtacaaatagtatcatacacatcctgatatgtctgtatgacaaagccagagtcatctgtctcttcaacttgcatctgactcacgtgtgaggctgcaggagtcaggctgcctttcctctttgccattcttcacagccaggagtcatttttgtggcaaaaattgaaaaagacagatctataggtagatacttaagtcaactatttaagaattgttgggattgaaggatctgagggcacctggaagttcacctgattcaatcttaactgttctgacattcagcctttgtttgaacacatgcagagataagaacattcgtttattcgtgcaacccctcctgtaggtacaggcttggtggcagcagggcaaaggaggacacagagctctctgcattttgattccaatgtctcaatgtttttggtgctcagaaagaactttatcctcttcctttttttttttttttttttttgkctcttcctatttctgcccaaggaatgagtccaggagtagaatcctgctccttctcttctgataaaaactgcaattgttttctcttctttctgagtacccagcatgggttggaccagcaccttctttagtcttcttgcaggaaagggacttcccgctctggctctggaacccagagatgtttggcctgtgatccagacccagtcttggcttttctgagaaaaagtagactctggtttactcttctggattctccattccggtcatgtagcttatggctgttgcccaagttctctttactagcccttggaaaataaatcctgatgtacaatagttgttggctttgccacatcagctgcttccttactgggccaactttcccactgtccctgctgctctcagtttttctctcctcctgagctgggcttcaagggctgtagccctgggtctcctgtccagtttctgccctactccaccatctggtctgggctttctgagttttatcatgagcacccttctccactcagcagttttcaacctctggtctctgaccccagttctcagactgggaacttccatattgaaaacttgacaaaatgcctgctaacagcttgttacagcaggttttgagttatccgggggagctgtcaggaagccaggttaggatgaagcaagacaagaaacgacattatttctagggctggggaagccccagtcaagacagtcagccacagcctgataactctccctgcatgcgcaagcccaccgcttgcaacctggaggaagctcctgtcagcaatgggctctaatgacatgtcagaaaacagaacagacagcttaagagaccttcactactacttccctgctttcacagcaggtgtcctggtggtacaaaccccaggtatgaagctgcaaggagggacccagttccaggacaccaagaacacccagctactcagcaatctccttccaccgtggacctcggcacatgaacacagcacaggcacccaacgattccgccaaggcctgcaggagtgttgtgcctggtccaacccagagtgtcaacaagcatgtctttcccaacattgttacaaagtgcaaggatagagtctcccaagtgtgcggctcctttcacctaccttgtctcctgg

SEQ ID NO: 709821 - DNA, 2424 bp, Homo sapiens
gatccacagctgccacttaaagcctagaatttaaacacagagcaactcagcagccaagtgttaggatgaaacagaagctgagcttctgagcagaatacgtctttgaagccagacatatttagccggaattctaaacttacccacccattcaccactgattaaccaagatccaaagaggcagcttgatccagccatccacgcaatggagatgctgagcacacatatgactgccactacaaccaacaagccaccggccctttcactccagagacgatggtcttattagcaaaaggccactgctcctcagttgcattttcttgcctggtgtgcctgcacttggcactccagaagcaaatcatcctttggcaggttccacatcaatgcaggggttggggactgctttctccttgtccaaaccctgaaggggccattcccaactgcactgtgttggagtgggcctacatagcttgatgtgagtccaggggaacagcaggttccctgcatccatccacttgtgtgcttacctctgactggggagaaggcttcctctacctttcaagcaatgatgtttgcattcaaatgtctctgtcaaaggcggattcctgataatctgttcctcttcaccataccagcacataggcatatatacaaagatcctgctacagaaactttaaaggaagaaaatcatggtgatcagccagggccttctcccttttccactgttcaactcaactgatttcctcaactcaaaaatgtgggaacaagcttttctagccataatactccctccactgcaaatgatcttcctgtacaaatagtatcatacacatcctgatatgtctgtatgacaaagccagagtcatctgtctcttcaacttgcatctgactcacgtgtgaggctgcaggagtcaggctgcctttcctctttgccattcttcacagccaggagtcatttttgtggcaaaaattgaaaaagacagatctataggtagatacttaagtcaactatttaagaattgttgggattgaaggatctgagggcacctggaagttcacctgattcaatcttaactgttctgacattcagcctttgtttgaacacatgcagagataagaacattcgtttattcgtgcaacccctcctgtaggtacaggcttggtggcagcagggcaaaggaggacacagagctctctgcattttgattccaatgtctcaatgtttttggtgctcagaaagaactttatcctcttcctttttttttttttttttttttgtctcttcctatttctgcccaaggaatgagtccaggagtagaatcctgctccttctcttctgataaaaactgcaattgttttctcttctttctgagtacccagcatgggttggaccagcaccttctttagtcttcttgcaggaaagggacttcccgctctggctctggaacccagagatgtttggcctgtgatccagacccagtcttggcttttctgagaaaaagtagactctggtttactcttctggattctccattccggtcatgtagcttatggctgttgcccaagttctctttactagcccttggaaaataaatcctgatgtacaatagttgttggctttgccacatcagctgcttccttactgggccaactttcccactgtccctgctgctctcagtttttctctcctcctgagctgggcttcaagggctgtagccctgggtctcctgtccagtttctgccctactccaccatctggtctgggctttctgagttttatcatgagcacccttctccactcagcagttttcaacctctggtctctgaccccagttctyagactgggaacttccatattgaaaacttgacaaaatgcctgctaacagcttgttacagcaggttttgagttatccgggggagctgtcaggaagccaggttaggatgaagcaagacaagaaacgacattatttctagggctggggaagccccagtcaagacagtcagccacagcctgataactctccctgcatgcgcaagcccaccgcttgcaacctggaggaagctcctgtcagcaatgggctctaatgacatgtcagaaaacagaacagacagcttaagagaccttcactactacttccctgctttcacagcaggtgtcctggtggtacaaaccccaggtatgaagctgcaaggagggacccagttccaggacaccaagaacacccagctactcagcaatctccttccaccgtggacctcggcacatgaacacagcacaggcacccaacgattccgccaaggcctgcaggagtgttgtgcctggtccaacccagagtgtcaacaagcatgtctttcccaacattgttacaaagtgcaaggatagagtctcccaagtgtgcggctcctttcacctaccttgtctcctgg

SEQ ID NO: 709822 - DNA, 2424 bp, Homo sapiens
gatccacagctgccacttaaagcctagaatttaaacacagagcaactcagcagccaagtgttaggatgaaacagaagctgagcttctgagcagaatacgtctttgaagccagacatatttagccggaattctaaacttacccacccattcaccactgattaaccaagatccaaagaggcagcttgatccagccatccacgcaatggagatgctgagcacacatatgactgccactacaaccaacaagccaccggccctttcactccagagacgatggtcttattagcaaaaggccactgctcctcagttgcattttcttgcctggtgtgcctgcacttggcactccagaagcaaatcatcctttggcaggttccacatcaatgcaggggttggggactgctttctccttgtccaaaccctgaaggggccattcccaactgcactgtgttggagtgggcctacatagcttgatgtgagtccaggggaacagcaggttccctgcatccatccacttgtgtgcttacctctgactggggagaaggcttcctctacctttcaagcaatgatgtttgcattcaaatgtctctgtcaaaggcggattcctgataatctgttcctcttcaccataccagcacataggcatatatacaaagatcctgctacagaaactttaaaggaagaaaatcatggtgatcagccagggccttctcccttttccactgttcaactcaactgatttcctcaactcaaaaatgtgggaacaagcttttctagccataatactccctccactgcaaatgatcttcctgtacaaatagtatcatacacatcctgatatgtctgtatgacaaagccagagtcatctgtctcttcaacttgcatctgactcacgtgtgaggctgcaggagtcaggctgcctttcctctttgccattcttcacagccaggagtcatttttgtggcaaaaattgaaaaagacagatctataggtagatacttaagtcaactatttaagaattgttgggattgaaggatctgagggcacctggaagttcacctgattcaatcttaactgttctgacattcagcctttgtttgaacacatgcagagataagaacattcgtttattcgtgcaacccctcctgtaggtacaggcttggtggcagcagggcaaaggaggacacagagctctctgcattttgattccaatgtctcaatgtttttggtgctcagaaagaactttatcctcttcctttttttttttttttttttttgtctcttcctatttctgcccaaggaatgagtccaggagtagaatcctgctccttctcttctgataaaaactgcaattgttttctcttctttctgagtacccagcatgggttggaccagcaccttctttagtcttcttgcaggaaagggacttcccgctctggctctggaacccagagatgtttggcctgtgatccagacccagtcttggcttttctgagaaaaagtagactctggtttactcttctggattctccattccggtcatgtagcttatggctgttgcccaagttctctttactagcccttggaaaataaatcctgatgtacaatagttgttggctttgccacatcagctgcttccttactgggccaactttcccactgtccctgctgctctcagtttttctctcctcctgagctgggcttcaagggctgtagccctgggtctcctgtccagtttctgccctactccaccatctggtctgggctttctgagttttatcatgagcacccttctccactcagcagttttcaacctctggtctctgaccccagttctcrgactgggaacttccatattgaaaacttgacaaaatgcctgctaacagcttgttacagcaggttttgagttatccgggggagctgtcaggaagccaggttaggatgaagcaagacaagaaacgacattatttctagggctggggaagccccagtcaagacagtcagccacagcctgataactctccctgcatgcgcaagcccaccgcttgcaacctggaggaagctcctgtcagcaatgggctctaatgacatgtcagaaaacagaacagacagcttaagagaccttcactactacttccctgctttcacagcaggtgtcctggtggtacaaaccccaggtatgaagctgcaaggagggacccagttccaggacaccaagaacacccagctactcagcaatctccttccaccgtggacctcggcacatgaacacagcacaggcacccaacgattccgccaaggcctgcaggagtgttgtgcctggtccaacccagagtgtcaacaagcatgtctttcccaacattgttacaaagtgcaaggatagagtctcccaagtgtgcggctcctttcacctaccttgtctcctgg

SEQ ID NO: 709823 - DNA, 635 bp, Homo sapiens
taagctgtaacactcactgkgaaggtctatggcttcactgctgcaaccagcgagaccacgaacccaccaaaaggaaaaaaactccgaaaacatccgagcatcagaaggaacaaactccggacatgccgtctttaagaactgtaacactcaccttgaaggttggcagcttcattcttgaagtcagtgagaccaagaacccaccaattccggacacagtactatgccaggattagagctctaaggtaaaacccgtaaaaaaaaaaattattttttcactctgtttagtaggttggagtgcagtggtaacaatctccggtcgctgcaacctctgcttcccgggtttaggtgattctcgtgcctcaggttcctgagtagctgggattaaaggtgtttgctaccacgcctggctcatttttgtatttttagtagaagttgggttttgccatgctggccaggctggtattgaactccttaccttaagtgacccccgcacctcggcctcccaaagtgttagggttacaggcatgaaccaccacaaccggcctaaagctgtaagatttttatttgtgtatatatgtggttagatgtgtttacatatgttgtatattgtgtctacatggtaccaagttgactta

SEQ ID NO: 709824 - DNA, 1317 bp, Homo sapiens
tgtgttacagttttctacagtcttcagtgcagtcacacgctgtgcaggtgcagcctgggagcaggaggcctatgccgttcggcccaggcgtgtaggggcgacgccatccgggtctgcgttcagcccaggcgcgtaagggtgacgccatccgggtctgcgttcagcccaggcgcgtaggggtgacgccatccgggtctccgttcagcccaggcgcgtaagggtgacgccatccgggtctgcgttcagcgcaggcgcgtaagggtgacgccatccgggtctgcgttcagcccaggcgcgtaagggtgacgccatccgggtctgcgttcagcccaggcgcgtaagggtgacgccatccgggtctccgttcagcccaggcatgcaggcgcgaagccatgcgggtttgtatcagtgcgctccacaatgctcacacaaccacgaggccaccttacgtttctctgaatgtgccccctcattaagtggcacatgactgtacttattacttgtaatgatggaacgtagaaccccactggtttgtagcgtaagacgatgttttcggtgaagcgctattttaccaaatttctgagcaggttctgacatcgacctaacctcctggaacaccttagttcacgtggatggatggatcagagyacacagaacgctatctgagtggtgaattaattccttttgtgattcctaattgtgtgaggaaaagttatttcccctccatcagctttttttctgtaaatatgcatcagtttatacattaaaaataaatatcaccggccggtggctcatgcctgtaatcccagcactttgggaggcgaaggcaggtggatcatttgaggtcaggagttcgagactagcctgaccaacattgtgaaaccccgtctctactaaaaatacaaaaaaaaaaaaaaaaaaaaaaattagccgggcgtgatgtcatgtgcctgtaatcccagctactcgggaggctgagacaggagaattgcttgaaccctggagatggaggttgcagtgaaccgagattgcaccactgcactccagcctgggcgacaagagcaaaactccatctcaaaaaaataaaatgaataaaataaaaaccaaagtaggaaaagaggcctaagttaaaatttggtatagaggatttctcgagttgtgggctgttttcacttcagaaacacctgctggtccccagaagtcagtactcctgtctcaggaagtgccggaggaagtgctcccatcgtgtgggtgtggttacgaggggcaaccagcgctagccacctggttcttttaaaatgcattttaaatagagtg

SEQ ID NO: 709825 - DNA, 909 bp, Homo sapiens
gtaatttcatgctctttccttgttatgtagagtaattagatatgccatgcagtccccatctctctgctttgcccatactcccttctgtgatttttctcccccacgcctcacttccagagctggccaacaataagatatctttgtgtcatgttttcatgcatccatttaacaaacatttattggacactcactgtgtgctaggcatgatgttaggtgctggggatttaacggcaaagcaagaaaataaaatcaatctctgccaccaggaaagttactgcctagtgaaggggccaggaactaaattttaatgctcacaaacagatgtaaaattgccatgtaatggggctgccaggaaaggtgcatgtgctctgagtacctttcactgggggatgagctgctcaaagagatcagggaagacttccacgaggacgtgatttgccctttccatggggttggggagttgatgggggtcaggatggctgcaaaaggaggtaagggagatcacacagggcctcaacagctgtgctgatgactttagccattatcccgagagccgaagagcaaggggaatccactggagggtcgcaatgggtgtgcggagcaggaagagacagcgtgagagaaaagcacgaacacacaggtggaaattcaggcagttaccatgcatacactgggataggtttttgtaaaagatacgaagataaatggtctgtgtcctcaaagatcttaatccaaaacaccaatttgctagataaaggacaacttacatggtatgaatataaatgatttctggtcaaagtctccaaaagaataaagcttattcacrtaatagctctgttgagttctttctgaccaagatcaggagaccaaactgaatgatccggaaccaaactgttgaaccctgctaca

SEQ ID NO: 709826 - DNA, 909 bp, Homo sapiens
gtaatttcatgctctttccttgttatgtagagtaattagatatgccatgcagtccccatctctctgctttgcccatactcccttctgtgatttttctcccccacgcctcacttccagagctggccaacaataagatatctttgtgtcatgttttcatgcatccatttaacaaacatttattggacactcactgtgtgctaggcatgatgttaggtgctggggatttaacggcaaagcaagaaaataaaatcaatctctgccaccaggaaagttactgcctagtgaaggggccaggaactaaattttaatgctcacaaacagatgtaaaattgccatgtaatggggctgccaggaaaggtgcatgtgctctgagtacctttcactgggggatgagctgctcaaagagatcagggaagacttccacgaggacgtgatttgccctttccatggggttggggagttgatgggggtcaggatggctgcaaaaggaggtaagggagatcacacagggcctcaacagctgtgctgatgactttagccattatcccgagagccgaagagcaaggggaatccactggagggtcgcaatgggtgtgcggagcaggaagagacagcgtgagagaaaagcacgaacacacaggtggaaattcaggcagttaccatgcatacactgggataggtttttgtaaaagatacgaagataaatggtctgtgtcctcaaagatcttaatccaaaacaccaatttgctagataaaggacaacttacatggtatgaatataaatgatttctggtcaaagtctccaaaagaataaagcttattcacgwaatagctctgttgagttctttctgaccaagatcaggagaccaaactgaatgatccggaaccaaactgttgaaccctgctaca

SEQ ID NO: 709827 - DNA, 2749 bp, Homo sapiens
aacctttgctgtgttaagcctttgcaatatcagcgtttatttgttactgcaacaaagcctagactatcccgactaatacatattttaaaacttttaagattataaatgagtgaatttaaagaaaatattaactacacaatggtccaggacataacaaaaatgtttgaaagtgatgctcaaatgccacctagtgcttatagtcttagagttaattttacaaaagagtggaaagtcactcccctcctcctctcaccaggtttcccaagagacctggaccaggctagggtaaagtgcagcccagggctataacagaacaaagtgaaattgtagtttcaaggatcaaatttgctgcctttttggcaaccagctgaattaactgactctaaaaagcagaagcagtataattagaatcattaggagtccagagaaaaagacttaaaattacccacttttccctgggtggtatgacaaactctcactgtctttgattttatgaagctcagctttcctacagccctgtcactctacaggttggaagcgtgatttcataccacgtacttcaaggccaacttttccttgtccggtcctcatagtctcacgtgaagtttatgttatttgttcattcccattatgctagacagacaatggatgcacacatagttttcatcttggggatgatttagtaatgatcaaaagttatactgtttcaaagtgggaagcaaggtgcacagactcgcttgcctccagttaatttctcttcctcaaagaaaagtccggatggaaggaaccttgagacttagatacatctggggtgctgtgacaaagaaggaaaaacacaaaacaagttattagggaacctgactccaacactagttcagctgtttggctttgagcaagcccccttgcctctctctgcctgtgttttccatctttaaaatagaaatatcaacagttaccttagccaggtgacttgcagtgatgtggaggcagatgatagacacggcactgctgtgaaaatcgcatgaccagcagctaacacaccgtgagttctgggttctcaccacgtaatgtactctgtgctgggcacttttcatacttctcatttaatcctcagaacaacatatgcagaaattgcactattatcccctttcttttttgtttttgtttttatttttgtttttttgagacagagtttcattcttgttaaccaggctggagtgtaatggcaccacctcagctcactacaacctctgcctcccgggttcaagcaattctcctgcctcagcctcccaaggagctgggattacaggcatgcaccaccacacccaactaattttttgtatttagtagagacgggtttcaccatgttggtcaggctggtctcgaactcctgacctcaggtgatccacctgcttctgcctcccaaagtgctgggattacaggcatgagccaccacacgtggcctaacccctttcacagatgagaaaaccaagacttagttggatagggtcagtcgcttcctagaagtcactcagttaccaaggggtagggccagaactcaaagtcaagtgccagtggccttggagatggggcccattcgaatccctgcccctcaaagcaaggtgtggcttgttatcaagtctgggtctggcttctctggactgtgacacagccccctgttttgaaactccatttttccacacggggttaatccaaagagcctgctgggagaagagaggcggccgcaagccctgccagcatgttacacgctgcttagcaaccggtgaaaacaagcaggaagggaaaatgagcctcaggctgccggggaggagtgaagaagggggagactttggtccctgcctaatctggttgggtttgtgccgcgatgggcatgcgctaatctgaatgctttccccttagtgttacctggtccctgtgctgaggagatgccaggaccaacaaggaagatagaaaatgaaaagacctcatgacctaagttcaacctccaccttagcatttaggctgcctgtagaaggtgtgtgcaggcaccagccctcgaagggcctggagataagccagaaaaagagctcagttctccaaarccactgttgactgagcccctgagagaagacaatttcaaatgaataagaaagccttgataaagctccgcccatccaggaaagaaagtaggggagaatttcagacttccagctaaaaggttggaggttacagtaacctccagcttgcccaggatatctttcttttgcttgagtaatttcaaaacatctcaaaatctcacagaaatcttcatgcctaaaatctatctatgcagtaggggccacttcatgaaaagtaattaatcacatgacattttgattaatgtaaggaatttgaggaatgtgagtttcaggaaggtgagaatgtcttctcaaaggagttctctaacggaaataacaagtaatgtaccattaatggaagaccagcatatctggaaaccagtgtgttccttgccactaactgcctgtatgtctttagggatgccatttatgtattctctcatcacacatctaaagaaccaggctgggggaaaagatacaatggccctgtctggccctggggttgcttaatgtctctggggaaggctgaggcctgaacaagccagtagcatttagcatggtccatgcactgtgtgtcaccatgggaaggcattatggagttgctgaagctccagtggaatccagaggatgaa

SEQ ID NO: 709828 - DNA, 613 bp, Homo sapiens
agagaagacaggtgaagcacagcatatattatatgacaaggactaaggcaaaatacacccatgagaaggggcacaaggaggttgcattttagtttaaacatttgaaacatgttctataggaggcaagagaacaagccttgttggtggctaaggggagaacattccagaaagagcatataggacctgagtactatcttagctcakttgtactactataaccaaataactgagactgggtaatttataaataatagaaacttgtttctcacacttctgggggctgggaagtccaaagtcaaagcaccagcaggttggtgtctgatgaaggctgctctctgaatccaagttggtgcctcaaatgctgtgtcctcacatgacagaagggcaaaaatgtcctgggagctcccttcaacctcttttataaggttgctaatcccattcatgagggctctgcacctcctaaagaccccacctcttaaaactatcatattggcagttaagtttcaacatatgaatttgggagacacatccagaccatagctagtacaagggggcaagctttgtcttcacagttatggagataatggagtttaatcccagaatccaaacaagc

SEQ ID NO: 709829 - DNA, 613 bp, Homo sapiens
agagaagacaggtgaagcacagcatatattatatgacaaggactaaggcaaaatacacccatgagaaggggcacaaggaggttgcattttagtttaaacatttgaaacatgttctataggaggcaagagaacaagccttgttggtggctaaggggagaacattccagaaagagcatataggacctgagtactatcttagctcagttgtactactataaccaaataactgagactgggtaatttataaataatagaaacttgtttctcacacttctgggggctgggaagtccaaagtcaaagcaccagcaggttggtgtctgatgaaggctgctctctgaatccaagttggtgcctcaaatgctgtgtcctcacatgacagaagggcaaaaatgtcctgggagctcccttcaacctcttttataaggttgctaatcccattcatgagggctctgcacctcctaaagaccccacctcttaaaactatcatattggcagttaagtttcaacatatgaatttgggagacacatccagaccatagctagtacaagggggcaagctttgtcttcacagttatggagataatggagtttaatcccagaakccaaacaagc

SEQ ID NO: 709830 - DNA, 1097 bp, Homo sapiens
gtttttatatggatatctgtagtagatttggggagtttgtgattattaattctcaagtacttctggtcatcaatataaatattgtgataatattcaagagttacattcattttttggcagtattttgcatttcgtctaccacagatttcaagtacctttagaccctgtgaggttctgcataaaataatcaatcattccctcttggctgtttggcagaggcagccaatgacttgttctgtcatgaactgaattaatatatattcatgaagcgtagagaaacacttcattgtttcagactgttttgttattttagaataaatcacaaaggcagcatcccactcatagctggtagagaaatatttgtcctgtgatcctcacctttatggttgtaatgttttaacttgcacacagtttagccyacataactttttttttaaaaaaatagtaaattgcatgcttttaaaaaagtaccgtgtctctgttaccttttatcagcaaaatttgaaaacattaaaaactaaaatgacatgcgtccctaagtcagaatgatttaattttcacagactgagggactcatggcaaaatgatgtacaggtaagtattgttcaagctcccacattccatcaatctcaacctttatggtccctcatttatttgggaagaactctcaagaatcagttgtaattgcaaaatttttatcctgccaggatatctatgtgaacttccatagggcaaccatagcataagcagcatgaaaaagacttgttgggaaagctattttagcacctctgataaacagaaaaaaaaaaggtgattattcctgtttcaagctatctaactttctcactttgtctgccttttctaatcaatgttatcatgtgctggcaaaatcttgtaaaattcagaaaggtaaaatccagggaaatgaaacccagggacagcaactccccgaaatgtaaaagccattgaacattctctatcaccaccaaagtggttctcagaaaaggcagtttattggatcttccctaagaattatgttttcagcaacaatacttaaacatttactgtctcggattgtaacaatggctatttgttta

SEQ ID NO: 709831 - DNA, 2056 bp, Homo sapiens
aaatgcctatcggcaaaattcacaaaagcttaagccgtctacgttatcccataaagtgaatttggtagagagctatactttgtcactcagttcctgagaaccttttcttgtgacctatcatcaatattcaccttcaacgcacactgatggatccaacaatatcaagaaaggcctttcctcaaataactgggggcgaatgtataaattccctatgatagacagtgtgttatgaatttctgaagttcatttcaaactctttttttattctattttaactttgtattattcttattgttctctatctttaaagacaggtttattctcacgaaaaacatgtttcactttatcagacgttatccaaatgacttacgtgaaaaatttcctggctataagattgttcgtatattcatctatcttttttgttttatttttgtttgtaaaagtaaaggccttacattctgaatcttataagaaaatttaaattacacaagtcagaaatacataattattttcatgatagaaataacattggtaaattggcttctatttcttccttaatatttattgattcagatgatttggatgaaattatatgtatagataaatgaatattgagagtcttgttacttttttyggatatgtttttcagaattcatgtaagcaacttattgctcaataaatatttatttgaatgatgacttttggaccattctaatgaatatgttggaccaagtcatgatagctaatagattcaagtaaagaaacttcacaaaacttgatttcccattttgagttacttgcgttttcaattcaattttgagaagcattataaaaggattagatcaactattttaaggaaaaaagcaagaagcttccactagagaagtggttgttaggattcttttctggactgaatcatgaggttattgagcacagcctggggcagagttcactcattcttccctttgtccttagcagtaaaatattcagctgggttcatggtggcccagaacaaagactacattttccagacattcttacagctagctgtggctgtggggctagattatttttttttaatgtgactaaattttaagtccaacgatatgttagcacaagtgatgtctgcaattcagattgtgttactcaagtcaagagaataaaaattaaccttaaacaagtcactgtgattctggttttgcgttgcatacagctaaaccttcattctaaaccattaaattcccacgatagaatgtctttagggacaaaaatatggtaaagattagttaattttgtagtgaaataaattagtgtaagatgagaatattttgtttacatatatacatacatgcatgtatatatatgtgtgtgggtgtctgtatgtgtatttgtatgagttataatagttaaagacctttcttacaaagtaatttgcttcaactctccttggttttggcaccccaattgcctgaggtatcaagaccttgcctagttcagttctggccttcaggaccacctggctggcactcaagccccctgaaggggaatattacatgtttagtattgcggttgctgcagtcccatatgtggtggagactgcaaacaactgcaacaaaatgaggcagagcataatcaaaataaaagagtgtgatacatagcaaatatacttctttctcagacttgtgatcataaagccaaactgtcctttcccggatagtatgagatctgctcactacaactgatctcttcaatctgttaccatgcagattagaaaaatgtgccccttatcatcggtttgaaaattgtcataggaacctgcttttattacaatgaggcatttctttgctatctactggaaagatgtatgtatgtatgcatgtatatgtaggtatgtatctatctatctctgcagtataaacggtaacccctagacttgttcagtgtactgcatgcacaactgtacaaggcaagctgtgtgtaaccacaggtggaaattgtgagttaagaaaagtgatttatgcgtctctttaatttgcactaaaattagacaattata

SEQ ID NO: 709832 - DNA, 906 bp, Homo sapiens
ggttttctgttcctgtgttagtttgctgagaattatggtttccagcttcatccatgtccctgcaaaggacatgaactcattgttttttatggctgcatagtattccatggtgtatatgtgccacattttctttatccagtctatcattaatgggcatttgggttggttccaagtctctgctattgtaaatagtgcagcaataaacatacatctgcatatgtctttattgtagaatgatttataatcctttgggtatatacccaataatgggattgctggctcaaaaggtatttctggttccagatccttgaggaaccactacactgtcttccaaatgatttaactaatttacagtcccaccaacagtataaaagcattcctatttctccacatccgttgtttcctgacttttcaatgattgccattctaactggtgtgaggtggtatctcattgtggttttgattcgcatttctctaatgtgttctgttcagtgttaaaacatgttttaaaagcctcagtaaatctctggtagtaccatcacaggagtggattgaaagttcagtgacacagatgtgaaggccagaaacagctttctgtacacgtaaacatttagtgcaggattgtggggcaacaggtttatttatttatttaatgagatattgggaagattaaggcagtgacaccaatcatgaacactagtgtactgtctgtttcctataccccatcctcatgtggctgtcaccttgctgataagtaggtttgcttaattttttytaaataaaaaaactagataattttgtgtcccctaaaaatacccataatttgaagcaattacattgctgatgctacttctcctggaattaggatataaccccaattatttaagatttatgggaaggcaagtc

SEQ ID NO: 709833 - DNA, 1050 bp, Homo sapiens
ctcctgtcttggcctcttagagtgcacgattacaggcagaagccactgcacccagcctcaaaatagttctctaggggtctgtcgggtaaattgggcctaagaactctgagtttgtcctgtccacatgcacaacgacattgccttctcttctaattttgcttctgcctgaggtgatatcctaaggctragccttcagaatactaggtgcagcagatttaataactgtgcgtgaatttggtcaacctcattagcccaacccgataattaaattccaattaaaatatctcctgcttctgacacagaaaaagaaaaagtagtgaggaacagattagattattttgaccttttaatttcctttaggcattgggtctgtaggtcaatgattaatattaacatgctttgtgtaattaacatcaagtcccctgataagtagggcaggaaattcttcatagttagtattttagaaggatgcctgtaatctccatttgcacaaaataaactgacatatgattttccaggaaggatgttagaataaatgactatccaatcgtaggatagagatatattgttagtaggaagtatacgtccattaaactgattgtctgactctggtttttaaactttttattatgtagaatttggaacatacacaagaataaacagaatataatactttaccatcctactgtaacaaccatcaacttataattaatcttttgccactcacacctctaacctcctcatattatttttgaagcttattctagcttattccatataatgtaaaagatgatataaaatcatttcatctaaggatattccagtatatacttctaatagagaagcagtcattgttttaaaacaaaactacggtaccatttctgtcctaaaaaagaacaataatttcttggtattataatatttttcctttatacttatttttactttcttttatagtgagatagatgaatagataattagtggttaaattgggggtgattttaccctgtaggggtcatttggcaatgtttggagttatttttgttacca

SEQ ID NO: 709834 - DNA, 863 bp, Homo sapiens
ttttcaggaagggaaaaatttatagctacagagggtagttagaaaaatcataacttatatgtgaataaaatacatataagcagcatttacggtagtggcattctacttattaagatgcaatgaaatgaagaaaggctttatgttcaaggacctttgccatagttcagctaattgtagttttatatagaaatgatcctgaacactctgaacttgacgtagtcctgcggtgatattctatctgcagtatttgtacctccagaatggcagatccctcagcaggaacaaaggcatattgacggttctctcagcgtatgcattaaaaaaggtacttcctgaaacttttgattcaataatgactaaacatactatgtacacaattactgtaaggctaattcacgtgccatactccacctgaaagcctgagttatcttgctataagcttttcatggagcacttcctttccagaaactgatttgtaactcatttagagaatgtcctggcgtcggtttttagcatatgtggtatttaaacagagctagaatgtgatgtctgaagataatgctgcatttctgggtttcttgtgtggattttaaartaaattgtgcctacaaatataaacaactcatcttgttttataatttgctggggagtggcaaatattagagaagtattagagaacttaaaaaataatagggaacttgacaaatattggagaacagcaaagtaataattattttaatatgtacaattgcagaacaaaatgactagaattctcacctcactttgctgatcaaattctatcttgtggattttgtttgtttgttggtttgtttttgttttgaaatggagtttggctcttgtcg

SEQ ID NO: 709835 - DNA, 638 bp, Homo sapiens
ttccctgattccaattcttccaagtgagggttttgttgtctaattactgcccaggaatttcatatttttccctttgcaaaagcaataatttccccgccaccttttctaggtcagttctttagtagatgtaccccccaagataaacattcctgggatctttgtttgcacaggtaaaacatcaaccctgaaatgtaraaaacaggaaagtttgtttttcagtttcagtgaaaacgctgagcaagtgttgtaatttgctgtgtccaatgtgtagaggggacattttctcagaacttccatgttaagctggaaaactggaaagtgagtccactttgtcattctgtcactcactccttttctcactcaacaacatgcctcagacttatctaaatctgctagactaaaagaggtccctgatgtctgtaacttcctaattctgctagaattctagagcgagctgatgaaataaatgaaaaggatgatgaacagagataaaagactgtgcattcccttctgacactcactctctttccctcagcctcagtttccccatgtgcccctggaggtgatcattcaaggatttatgagattttagagacaatacatgaaaaagcaaaaaggcatcagaaagacaaggagtt

SEQ ID NO: 709836 - DNA, 662 bp, Homo sapiens
ataactgggtggtgagaactgacaaaaactggaagaatgagagtgaaggatgatgaagagggtatgcagtcagggaatatctgactaggagtcaggaaataaggcaaaatgagccracaagaagcattgtcagagggtgggtgatacagcaatccctgcccccttcacccttagccaacattctagcctcagttttcctcccccggcatgtcatccttctcctttgggaatgctcatcacctttactatctgctacccccaccagaccatcggctgcatgagagcatggactgtatctctgttctggtcactgcagatcctgtgcaactagcaacacagactctcaataatatggctggatgtgcaaaacatgtattccccctttgatccagaaaaatgagggaggaccgggcatggtggctcacacctgtaactcctagcacttgtggaggccaaggctggaggatcgcttaagcctagaagttcaagaccagcctgggcaacagagccagaccccttctctacaaaaaatacataaattagctgggtgtggtggtgaacacttgtagtcccagctatgcaggaagctgaggtgggaggattagttcagcccaggaagtggaggctgcagtgagctgagatcccgctactttaccctagcc

SEQ ID NO: 709837 - DNA, 1405 bp, Homo sapiens
agaaaacaaattggaagaaagtctcatatgctagtcagagaggatgacaacctaaattaggcaggtctcactcaaagggaaaggagtttgggggtagaggaaggaggcacaggtagaaccaacaggacctgcctacaggctggataggaatggtgaaagaggagtaaaagctgattctcccttttcattattgttatttttttgttagcttgggtgattggaaagtttgactctcataatggaaatataagagtgaaaaacagatttggctgcagaggttggatcaggtcagttagagacaatttaaattaaatgattctacattctttttctatagtcaacaagaaaggaggagaaattggattacaaaaataagggcatttagttgtcaaggagtgccaaatttattttatgttgtatttgtagtagtttaaatttttcagtgtgctgaggcagtagataagaaagctatcaagaatttaatatcttctcttataggttgtggttgtgcatataaaaataatgagataattctggaggacaatttggcaatatctattaaagttaacatttaaaagaatcacactgtytgagcaaatagttctatttctaggggtctgttctacagaaaagtagctcatagaaccatttagccagtgccctgggtgggatttgaacccaggcctgtatgagtccaaaatctgcaagtttaaccattatgttataatactctcttagagccaggtgtggtggcatatgcctgtaatcccagcacttcgggaggctgaggtgggcggatcacctgaggttggaggttcaagactagcctgaccaacatggagaaacctcatctctactaaaaatacaaaattagccaagcatggtggcgcatgcctataatcccagctacttgggaggctgaggcaggagaatcacttgaacccaggaggcggaggttgaggtgagctgagatcatgccattgcactccagcctgggcgacggagtgagactccatctccaaaaaacaaaacaaaaaaaaaacactctcctagggactttttctttaaaaaaaatacttgtttaaaattccatggtaaataagaagtataaaatattttttatgtagaactccccacccctatacacatatccatcaatagagaattggttaaattagtttaagatcatccttataatggaataatgtatagccaataaaaataatacatttatttaaaaggaaatacctgatacttcaatatgtatgcatcagtatgatcacactttaaaatttatatttataaaattaaatttgacaatgatgtattccaaactttatatattatatataaatacatatatattactgtattatatagtttacttaaatatggtattgtattt

SEQ ID NO: 709838 - DNA, 1405 bp, Homo sapiens
agaaaacaaattggaagaaagtctcatatgctagtcagagaggatgacaacctaaattaggcaggtctcactcaaagggaaaggagtttgggggtagaggaaggaggcacaggtagaaccaacaggacctgcctacaggctggataggaatggtgaaagaggagtaaaagctgattctcccttttcattattgttatttttttgttagcttgggtgattggaaagtttgactctcataatggaaatataagagtgaaaaacagatttggctgcagaggttggatcaggtcagttagagacaatttaaattaaatgattctacattctttttctatagtcaacaagaaaggaggagaaattggattacaaaaataagggcatttagttgtcaaggagtgccaaatttattttatgttgtatttgtagtagtttaaatttttcagtgtgctgaggcagtagataagaaagctatcaagaatttaatatcttctcttataggttgtggttgtgcatataaaaataatgagataattctggaggacaatttggcaatatctattaaagttaacatttaaaagaatcacactgtttgagcaaatagttctatttctaggggtctgttctacagaaaagtagctcatagaaccatttagccagtgccctgggtgggatttgaacccaggcctgtatgagtccaaaatctgcaagtttaaccattatgttataatactctcttagagccaggtgtggtggcatatgcctgtaatcccagcacttcgggaggctgaggtgggcggatcacctgaggttggaggttcaagactagcctgaccaacatggagaaacctcatctctactaaaaatacaaaattagccaagcatggtggcgcatgcctataatcccagctacttgggaggctgaggcaggagaatcacttgaacccaggaggcggaggttgaggtgagctgagatcatgccattgcactccagcctgggcgacggagtgagactccatctccaaaaaacaaaacaaaaaaaaaacactctcctagggactttttctttaaaaaaaatacttgtttaaaattccatggtaaataagaagtataaaatattttttatgtagaactccccacccctatacacatatccatcaatagagaattggttaaattagtttaagatcatccttataatggaataatrtatagccaataaaaataatacatttatttaaaaggaaatacctgatacttcaatatgtatgcatcagtatgatcacactttaaaatttatatttataaaattaaatttgacaatgatgtattccaaactttatatattatatataaatacatatatattactgtattatatagtttacttaaatatggtattgtattt

SEQ ID NO: 709839 - DNA, 584 bp, Homo sapiens
tcagttcactgcaacctctgcttcccagggtcaagcaatcctctgagctcagcctcctgaatagctgggactacaggcatgtgccaccatgcctggctaatttttgtattgtttgtagggatggggtttcaccaggtggtccaggctggtctttaactcctggactcagaaaatccacccaccttggcctcccaaagggttggaattaccagcgtgagccgccrtacccggcctatgtattgttttcaatctataaggtttatctgtgctgttatgtatagtagcatgttcatttccattgtggtatactattccattgcatgaatatataataatttatccattttagcttttcagtttcaaataatgtgtatcttttggagtagactaaggtgacttaagtaggaaaagaatgcatagccagtaactctcccaacagaattggattcatgcctggggtgattcaggatgtccggttaagttgagaaatactgtacatcttggagtacagttactgtctcctggcatatgcatatcttcacctttagtagatagcatcgcatggttttataaagtggttttac

SEQ ID NO: 709840 - DNA, 584 bp, Homo sapiens
tcagttcactgcaacctctgcttcccagggtcaagcaatcctctgagctcagcctcctgaatagctgggactacaggcatgtgccaccatgcctggctaatttttgtattgtttgtagggatggggtttcaccaggtggtccaggctggtctttaactcctggactcagaaaatccacccaccttggcctcccaaagggttggaattaccagcgtgagccgccgyacccggcctatgtattgttttcaatctataaggtttatctgtgctgttatgtatagtagcatgttcatttccattgtggtatactattccattgcatgaatatataataatttatccattttagcttttcagtttcaaataatgtgtatcttttggagtagactaaggtgacttaagtaggaaaagaatgcatagccagtaactctcccaacagaattggattcatgcctggggtgattcaggatgtccggttaagttgagaaatactgtacatcttggagtacagttactgtctcctggcatatgcatatcttcacctttagtagatagcatcgcatggttttataaagtggttttac

SEQ ID NO: 709841 - DNA, 584 bp, Homo sapiens
tcagttcactgcaacctctgcttcccagggtcaagcaatcctctgagctcagcctcctgaatagctgggactacaggcatgtgccaccatgcctggctaatttttgtattgtttgtagggatggggtttcaccaggtggtccaggctggtctttaactcctggactcagaaaatccacccaccttggcctcccaaagggttggaattaccagcgtgagccgccgtacccggcctatgtattgttttcaatctataaggtttatctgtgctgttatgtatagtagcatgttcatttccattgtggtatactattccattgcatgaatatataataatttatccattttagcttttcagtttcaaataatgtgtatcttttggagtagactaaggtgacttaagtaggaaaagaatgcatagccagtaactctcccaacagaattggattcatgcctggggtgattcaggatgtccrgttaagttgagaaatactgtacatcttggagtacagttactgtctcctggcatatgcatatcttcacctttagtagatagcatcgcatggttttataaagtggttttac

SEQ ID NO: 709842 - DNA, 551 bp, Homo sapiens
agaatcctattttgttcaaggtccatattaaccaagctccttcagactgacatctttttccctattttctgtaaattatgaaacatttttttcctcatgtgtatggtgagaacaaacaacaatttatttgctcattctccctttgatgggcacctgaattacctctactttttgtctacaacaaaacatgctgatattaacatttttgtttatgtgatctggttctgtaaatctgtacacaaatttctaaaagtcatgaacctaggagyagagttgctaggttgtagggtattacattttcaactttagcatgcactgccaaacctttccccaaagtggttgcaccaattctgtattccatcagcaatgtatgagaatcttattatgacacaaacttcatgtgccttctcagattcctctaattgccttcttttctctttctaagcacccaaactgcacctggtcacctgtctacattcagatttagatgaaagccacaccatggaggcagccagaggcccatgggagatgtctggattcgcagaggaata

SEQ ID NO: 709843 - DNA, 2384 bp, Homo sapiens
gaagggggaaactgccaagcactattaaaccgtcagatcttatgaaaactcactatcatgagaaagcatgggggaaatcctccccgtgatccaatcaccttccaccaggtccctccctcaatacatgggaattacaattcaacatgaaatttgggtggggacacagagccaaaccatatcaaacagttttcattaattcttatttctgataaaagggttatgagtttcagagaaattttcctttcaccaacccgagagatatttgtcatatgggtgtatatataggaaacaccaatctaatagacatattcaaaatgtgttaatacaaaaataatattgtgaagttttagtgacatatgtagtaatataaatggcctttaataattatcacctctactagggacaagattattgattactttttgtgtttacattaatattgaatgaatgaatgattaacattccttaaacactgcaaagattatcaagaaaaataaaaaacaaacgtcttgttttttatgttatcttaaacaggcaaattaaaaaagatgatctatttttcggtgccaagataacaatgcattttagcatcttgttgcatatcttaggtaatcatattattgattctactacataaactattttgttgctctcaggcctgtttctgattcatattcaaaataaaagcatgaattatatatgaatgaaaattcaaatggcatttttaaaattaccttgagtaactgtaaaatattataataaaatatatattatctatacttactcaagactgtgctctcacattaatgcctatttggtggcctaggcaaggacgttagtggattgaacacactacattaaagaataaattcctcatatattagcgctttcacagcctgtctcttgaaggaataaaggacaatacacaaaccagaaggaagtcaaaagtaatagaaggaaggaaagagggagaaagggaggaatggaggaagggaagaatgaaacatgaatacattgagcataccatttatagcccatgttgcttgtttcagtggagtcaatttcaccttcacatttatacataaataatatatatgcatataaatacttacatttgtgggtgtatatattttaaacaaagtagtagcatatcacaaatgattcatgtagaaatgtgctaggcaagtgtaacgctggactatggaactttacctgtggtttataaaatgaacctcatttacaggaagagcacaaatttaagcaataacagaaagaagtttatccacattccaaaatgattgctagggttaatatgccagattgatttattgatccactaccacattgccaagaaattaagtggaggataaacatcacattacaacttaggaaagggaaaaagaaaagtcaccacgagaaaaaaaaaagtgcttaatgttaaattctgaaaatgtttaggggtctacacgactgttttcaccacatatttttctatttattttcaattcttgtgagatgtgtgctggtgtgagaattaaaatggctttcatgtgttaagttgttggtttataagctttttcactatcacaggaaagagaaagttggaattgaattacttgtttctaatatataattcatagggggaaaaaatttcacgactttgatttttagaaaattttatgaacttttctttgtttccttcagctgagatttcccagcagttctaaaattatttcacgaaaattacagaactatattacatcgatcagctgtaaaaaatttgattctcgttgaacagaaaaattgttcttttmtcaatgtatatgttgtttcaagttttttttcttctttagtgttattataataactttatgttctagaagacaatattgaaagggtctctggttcatcctacctttgctattaattttccttttttttggcagaaataatagctttttttttattaattggaatgaatactctccatttttctatgaaaattgttctgccttccatgcttatttcaaaagtgataagctgtctttcatgttgggagtttacctcttctgaagcttggttaatttgtaataattataattttttaaaataatgattttgaggtattattggttctttcaaatactatctgtaatttgaaaagcctgtaactgcaagacaggtacatcactctcaatttttttcttaatttgcaataaaatacatattttacagtaatttttgacagaaaggaaaataagtgaaccagcttatttcttatttatttcaaaactctgaattattagtagcataaattgtttttgtgtatctgcgtgtatgtcttgtgcatccatgtgtgtgttttttgcagtgtgtgcgtccat

SEQ ID NO: 709844 - DNA, 2384 bp, Homo sapiens
gaagggggaaactgccaagcactattaaaccgtcagatcttatgaaaactcactatcatgagaaagcatgggggaaatcctccccgtgatccaatcaccttccaccaggtccctccctcaatacatgggaattacaattcaacatgaaatttgggtggggacacagagccaaaccatatcaaacagttttcattaattcttatttctgataaaagggttatgagtttcagagaaattttcctttcaccaacccgagagatatttgtcatatgggtgtatatataggaaacaccaatctaatagacatattcaaaatgtgttaatacaaaaataatattgtgaagttttagtgacatatgtagtaatataaatggcctttaataattatcacctctactagggacaagattattgattactttttgtgtttacattaatattgaatgaatgaatgattaacattccttaaacactgcaaagattatcaagaaaaataaaaaacaaacgtcttgttttttatgttatcttaaacaggcaaattaaaaaagatgatctatttttcggtgccaagataacaatgcattttagcatcttgttgcatatcttaggtaatcatattattgattctactacataaactattttgttgctctcaggcctgtttctgattcatattcaaaataaaagcatgaattatatatgaatgaaaattcaaatggcatttttaaaattaccttgagtaactgtaaaatattataataaaatatatattatctatacttactcaagactgtgctctcacattaatgcctatttggtggcctaggcaaggacgttagtggattgaacacactacattaaagaataaattcctcatatattagcgctttcacagcctgtctcttgaaggaataaaggacaatacacaaaccagaaggaagtcaaaagtaatagaaggaaggaaagagggagaaagggaggaatggaggaagggaagaatgaaacatgaatacattgagcataccatttatagcccatgttgcttgtttcagtggagtcaatttcaccttcacatttatacataaataatatatatgcatataaatacttacatttgtgggtgtatatattttaaacaaagtagtagcatatcacaaatgattcatgtagaaatgtgctaggcaagtgtaacgctggactatggaactttacctgtggtttataaaatgaacctcatttacaggaagagcacaaatttaagcaataacagaaagaagtttatccacattccaaaatgattgctagggttaatatgccagattgatttattgatccactaccacattgccaagaaattaagtggaggataaacatcacattacaacttaggaaagggaaaaagaaaagtcaccacgagaaaaaaaaaagtgcttaatgttaaattctgaaaatgtttaggggtctacacgactgttttcaccacatatttttctatttattttcaattcttgtgagatgtgtgctggtgtgagaattaaaatggctttcatgtgttaagttgttggtttataagctttttcactatcacaggaaagagaaagttggaattgaattacttgtttctaatatataattcatagggggaaaaaatttcacgactttgatttttagaaaattttatgaacttttctttgtttccttcagctgagatttcccagcagttctaaaattatttcacgaaaattacagaactatattacatcgatcagctgtaaaaaatttgattctcgttgaacagaaaaattgttcttttctcaatgtatatgttgtttcaagttttttttcttctttagtgttattataataactttatgttctagaagacaatattgaaagggtctctggttcatcctacctttgctattaattktccttttttttggcagaaataatagctttttttttattaattggaatgaatactctccatttttctatgaaaattgttctgccttccatgcttatttcaaaagtgataagctgtctttcatgttgggagtttacctcttctgaagcttggttaatttgtaataattataattttttaaaataatgattttgaggtattattggttctttcaaatactatctgtaatttgaaaagcctgtaactgcaagacaggtacatcactctcaatttttttcttaatttgcaataaaatacatattttacagtaatttttgacagaaaggaaaataagtgaaccagcttatttcttatttatttcaaaactctgaattattagtagcataaattgtttttgtgtatctgcgtgtatgtcttgtgcatccatgtgtgtgttttttgcagtgtgtgcgtccat

SEQ ID NO: 709845 - DNA, 2384 bp, Homo sapiens
gaagggggaaactgccaagcactattaaaccgtcagatcttatgaaaactcactatcatgagaaagcatgggggaaatcctccccgtgatccaatcaccttccaccaggtccctccctcaatacatgggaattacaattcaacatgaaatttgggtggggacacagagccaaaccatatcaaacagttttcattaattcttatttctgataaaagggttatgagtttcagagaaattttcctttcaccaacccgagagatatttgtcatatgggtgtatatataggaaacaccaatctaatagacatattcaaaatgtgttaatacaaaaataatattgtgaagttttagtgacatatgtagtaatataaatggcctttaataattatcacctctactagggacaagattattgattactttttgtgtttacattaatattgaatgaatgaatgattaacattccttaaacactgcaaagattatcaagaaaaataaaaaacaaacgtcttgttttttatgttatcttaaacaggcaaattaaaaaagatgatctatttttcggtgccaagataacaatgcattttagcatcttgttgcatatcttaggtaatcatattattgattctactacataaactattttgttgctctcaggcctgtttctgattcatattcaaaataaaagcatgaattatatatgaatgaaaattcaaatggcatttttaaaattaccttgagtaactgtaaaatattataataaaatatatattatctatacttactcaagactgtgctctcacattaatgcctatttggtggcctaggcaaggacgttagtggattgaacacactacattaaagaataaattcctcatatattagcgctttcacagcctgtctcttgaaggaataaaggacaatacacaaaccagaaggaagtcaaaagtaatagaaggaaggaaagagggagaaagggaggaatggaggaagggaagaatgaaacatgaatacattgagcataccatttatagcccatgttgcttgtttcagtggagtcaatttcaccttcacatttatacataaataatatatatgcatataaatacttacatttgtgggtgtatatattttaaacaaagtagtagcatatcacaaatgattcatgtagaaatgtgctaggcaagtgtaacgctggactatggaactttacctgtggtttataaaatgaacctcatttacaggaagagcacaaatttaagcaataacagaaagaagtttatccacattccaaaatgattgctagggttaatatgccagattgatttattgatccactaccacattgccaagaaattaagtggaggataaacatcacattacaacttaggaaagggaaaaagaaaagtcaccacgagaaaaaaaaaagtgcttaatgttaaattctgaaaatgtttaggggtctacacgactgttttcaccacatatttttctatttattttcaattcttgtgagatgtgtgctggtgtgagaattaaaatggctttcatgtgttaagttgttggtttataagctttttcactatcacaggaaagagaaagttggaattgaattacttgtttctaatatataattcatagggggaaaaaatttcacgactttgatttttagaaaattttatgaacttttctttgtttccttcagctgagatttcccagcagttctaaaattatttcacgaaaattacagaactatattacatcgatcagctgtaaaaaatttgattctcgttgaacagaaaaattgttcttttctcaatgtatatgttgtttcaagttttttttcttctttagtgttattataataactttatgttctagaagacaatattgaaagggtctctggttcatcctacctttgctattaattttccttttttttggcagaaataatagctttttttttattaattggaatgaatactctccatttttctatgaaaattgttctgccttccatgcttatttcaaaagtgataagctgtctttcatgttgggagtttacctcttctgaagcttggttaatttgtaataattataattttttaaaataatgattttgaggtattattggttctttcaaatactatctgtaatttgaaaagcctgtaactgcaagacaggtacatcactctcaatttttttcttaatttgcaataaaatacatattttacagtaatttttgacagaaaggaaaataagtgaaccagcttatttcttatttatttcaaaactctgaattattagtagcataaawtgtttttgtgtatctgcgtgtatgtcttgtgcatccatgtgtgtgttttttgcagtgtgtgcgtccat

SEQ ID NO: 709846 - DNA, 2384 bp, Homo sapiens
gaagggggaaactgccaagcactattaaaccgtcagatcttatgaaaactcactatcatgagaaagcatgggggaaatcctccccgtgatccaatcaccttccaccaggtccctccctcaatacatgggaattacaattcaacatgaaatttgggtggggacacagagccaaaccatatcaaacagttttcattaattcttatttctgataaaagggttatgagtttcagagaaattttcctttcaccaacccgagagatatttgtcatatgggtgtatatataggaaacaccaatctaatagacatattcaaaatgtgttaatacaaaaataatattgtgaagttttagtgacatatgtagtaatataaatggcctttaataattatcacctctactagggacaagattattgattactttttgtgtttacattaatattgaatgaatgaatgattaacattccttaaacactgcaaagattatcaagaaaaataaaaaacaaacgtcttgttttttatgttatcttaaacaggcaaattaaaaaagatgatctatttttcggtgccaagataacaatgcattttagcatcttgttgcatatcttaggtaatcatattattgattctactacataaactattttgttgctctcaggcctgtttctgattcatattcaaaataaaagcatgaattatatatgaatgaaaattcaaatggcatttttaaaattaccttgagtaactgtaaaatattataataaaatatatattatctatacttactcaagactgtgctctcacattaatgcctatttggtggcctaggcaaggacgttagtggattgaacacactacattaaagaataaattcctcatatattagcgctttcacagcctgtctcttgaaggaataaaggacaatacacaaaccagaaggaagtcaaaagtaatagaaggaaggaaagagggagaaagggaggaatggaggaagggaagaatgaaacatgaatacattgagcataccatttatagcccatgttgcttgtttcagtggagtcaatttcaccttcacatttatacataaataatatatatgcatataaatacttacatttgtgggtgtatatattttaaacaaagtagtagcatatcacaaatgattcatgtagaaatgtgctaggcaagtgtaacgctggactatggaactttacctgtggtttataaaatgaacctcatttacaggaagagcacaaatttaagcaataacagaaagaagtttatccacattccaaaatgattgctagggttaatatgccagattgatttattgatccactaccacattgccaagaaattaagtggaggataaacatcacattacaacttaggaaagggaaaaagaaaagtcaccacgagaaaaaaaaaagtgcttaatgttaaattctgaaaatgtttaggggtctacacgactgttttcaccacatatttttctatttattttcaattcttgtgagatgtgtgctggtgtgagaattaaaatggctttcatgtgttaagttgttggtttataagctttttcactatcacaggaaagagaaagttggaattgaattacttgtttctaatatataattcatagggggaaaaaatttcacgactttgatttttagaaaattttatgaacttttctttgtttccttcagctgagatttcccagcagttctaaaattatttcacgaaaattacagaactatattacatcgatcagctgtaaaaaatttgattctcgttgaacagaaaaattgttcttttctcaatgtatatgttgtttcaagttttttttcttctttagtgttattataataactttatgttctagaagacaatattgaaagggtctctggttcatcctacctttgctattaattttccttttttttggcagaaataatagctttttttttattaattggaatgaatactctccatttttctatgaaaattgttctgccttccatgcttatttcaaaagtgataagctgtctttcatgttgggagtttacctcttctgaagcttggttaatttgtaataattataattttttaaaataatgattttgaggtattattggttctttcaaatactatctgtaatttgaaaagcctgtaactgcaagacaggtacatcactctcaatttttttcttaatttgcaataaaatacatattttacagtaatttttgacagaaaggaaaataagtgaaccagcttatttcttatttatttcaaaactctgaattattagtagcataaattgtttktgtgtatctgcgtgtatgtcttgtgcatccatgtgtgtgttttttgcagtgtgtgcgtccat

SEQ ID NO: 709847 - DNA, 997 bp, Homo sapiens
cattccttggtcaattagcacggacaagggttcatgcaactgtgtttgtgagacggaggagaggattcttttatctttactacttaggtattatgttgaatttcaaagtccatcacaaggttccttactttttctccatagctgacagtttcatcccaaggaggcaaagaagaaagaactcatagccagaggtttgtagctcagaagggcctgtacttgccaggcaagggggaccacaragataccatgccttccaggcatttgggactattttgttgaatctaaaacaggtgcacttctcactctgagctttagggttaaaactgcctttgccaggcctttgtttagttaagtggaattgtgatgtgaggagtgacaaacagaagctttatttccggctttctctcactctctggggagtaggtgtggagtgggaggggggttgagaagtgtgtggctcttctcttcttcgacctgtggttgcaccccccacacactccctggactctggtttctctgctttgacagttggttctcaatgatgcagataatttccctcttggactacctgtccgccctttctcccctcctccacgcagctatacttcatattctcagatgataatgatcatctttaggcaatttatagaagtgtgtagaaaaatcatttgaaaacattcctgctttatcaaccttccttcaatgattcacttcacagcacgtctgactaagggaagagtcattagtgtggagcgtggactgccagtgggggacattatccccaatcacacccactttacgcttgcaagatagcaaaaaggaaattctgggactcaatttataggcaagaacaaaggacactggcatgaaatattgctttacaaagtagcaaatacgaacatcctcccctggcaaagaaaaagagagacagagagactttgacattgctcttcagtcagagttgcttcagacagtcccatttgtcattggatcacca

SEQ ID NO: 709848 - DNA, 764 bp, Homo sapiens
ttagctattcaatactttattataaaataggctttgtgttgatcttgcccagctgtatatgggcaaacatacagatgagtttgttctatggatgggctttttctggactgttcaactatttgtctctctttgcctataccaatattgtactgttttgtttaatatggttttacagtaagtttttgtatccagtactacaagttacccctttctatttcttcattaatcatgtcaggcatatatttttcttgcaattgcctattttgaaaactaaatgcaaaactttatcttcttccctttcaaaattccttttgttcatttagactattactatagcacactgaaaacattttaaataatatttttgctatctgatacattatctagccctyataattttaatatattcacctcattgatgaaaatttgcaacaggacaaagtgcacttttctgagtctccggtaaggacatatcattaagaaatgtaatggaaaacaaaaccatcactagtgagaaacagtaataaaataagaagactcctgggtagtgtccaacccttccaggaacctgtggatgaccatcaccagtttaacctccctggatttcagtccccggtatctaatatgagcactagtggtaataggaattcaaacaaacgaaaaggacagaggcaaatctcttggagaatataatgggtgatgaatttcaggatcaaaccagaatgatttatacagtttctcatgtttaagattgataataaaaa

SEQ ID NO: 709849 - DNA, 1165 bp, Homo sapiens
cctctggaaggtaattaggtcatgagggtggagctttcactacgggattagtgcccttatgagaagagacaccagagagatgacctttctttctctcagccatatgaggatacagaaagaaggaggctgtctgctaaccagaaaaagagccctcactatatactgaatatgctggcaccttgatcttggacttcccagccacagaactacgaaaaacagatgtttgttgtttaagccagtcggtacataatatttttgttagaacagcccaaattgaccaagacaaaggtcttattattatttcacattgtgatgaaaaaactggggcacagagaggtttagtaatttcacaaggtcacaaaacaaataagcagtaaagccaggatttatcccaactaaactagctctagatctgcatccttaactattattgttattacaatccatccagtagttattacataaattgcttaagtgctgaatattgtgtcaagtaattgaaatacaaatatgaataaaaatggtgcattacctttaagaagctcccagtctagcaggggagacagaacaataattagaatgcagtgagataaatgtaatactagaaatatgaagaaattatattagaagcactgaggatacaacactaccatgcatagtgtttactgttttcttattaaaaaaaaaaactaatggagatagtcatccatgaggcagtttaaaaagtgctgctaaatttgctactaaggcaaatgggaaatcaaagtcctgttaatgactctttccaaagtttgtttgtagatatttattagcccttataggccaaattcattaaccctcaatgatgctggctttttcttctattcctgctacacaggaatagaatttggaaataagagggaaagaattgtgttcaagtggtcaattaaatactaacttatactttatcttatgttattaactattgcttggtgaagtttatttttcttttccctgcagtttctttattccttacttcattcctcaattctaaatccataatcccaattcttgcctaacatcctcatatgaatatttcctaaatgtctcacagwcaacatgttctactcatggtattaatattgtaggagcagaaaagtgtgataccttccctcacccattgtaa

SEQ ID NO: 709850 - DNA, 1396 bp, Homo sapiens
aaaaggaacatatgcattttagctttgtatcttgcaagttttgcagtcagaaattttttgaactagcttttgcttttgataacacttcgtgtttgtaaccacattcatatatatatacatatatatgtgaagctccatatttctgttgctttaaagaagtaaaaccttccatttaaataagatgacatgcataagataacaaagcttccttgatttccttttcctgtgtaatttaatagatttgttgactagtgcttgggcacattataaatcagtgttatttgctcttggagccattttttaaaaaaaattttggcagtgagcagttgaatttatcttgaatttatcatgtgtgtgtatttctgaagcagctacatagcagaacattttaagagattctgttagcccacatgttcatgttggttgctgctgaatggtaaatattaaataaaattaccagattaatcttaatatttctgtctttactcctatcatcagcatgtctttacttgtaatagaagcggctcttgatcttattatagtgagatttccagacttctttttagatagatcctgtttgtgttgtcctgccacgtagatgcatttcacactcactacggctcacttatgccatagggaacaatcaccagaaaggtaacaaacagtatgggttaatatcccatagaaagggtaacatttacstggttggctgaccattcattggcctaaccagagccaacttaacaagtcaaaccatcaaaatgtgtttgcatcagaaaacttgacataaaacagataacttccaagcatataagggcatggttaaatgctggttttgacagctgtggtaaaaatctatctgcatgccaactcttctccctggttttcataaaatgatagaaaatatacatgtgacatacactgaaaaacccactgactacaagatttcgattaataaagcctggcttttaacttggtgaaatgtgtcaatattgtataaggttgaagacatttatgtaactcagtgccaagaaaaccactgtctacagcttcagcctcgtagaatacaaaaatccatttaaaggccattgtcagctgggcgcagtggctcatgcctgtaatcccagcactttgggaggctgaggctgttggatcaccttaagtcaggagttcaagaccagcctgaccaacatggtgaaaccccatctctactaaaaatacaaagattagctgggtgtggtggcgggtgcctgtaatcccagctactcgggaggctgaggcaggagaatcgcttgaacccaggaggcggaggttgcagtgaactgagatcatgccactgcactccagcctgggtaacagagcaagactcttgtctcaaaaaaattttaaaaaaaag

SEQ ID NO: 709851 - DNA, 1396 bp, Homo sapiens
aaaaggaacatatgcattttagctttgtatcttgcaagttttgcagtcagaaattttttgaactagcttttgcttttgataacacttcgtgtttgtaaccacattcatatatatatacatatatatgtgaagctccatatttctgttgctttaaagaagtaaaaccttccatttaaataagatgacatgcataagataacaaagcttccttgatttccttttcctgtgtaatttaatagatttgttgactagtgcttgggcacattataaatcagtgttatttgctcttggagccattttttaaaaaaaattttggcagtgagcagttgaatttatcttgaatttatcatgtgtgtgtatttctgaagcagctacatagcagaacattttaagagattctgttagcccacatgttcatgttggttgctgctgaatggtaaatattaaataaaattaccagattaatcttaatatttctgtctttactcctatcatcagcatgtctttacttgtaatagaagcggctcttgatcttattatagtgagatttccagacttctttttagatagatcctgtttgtgttgtcctgccacgtagatgcatttcacactcactacggctcacttatgccatagggaacaatcaccagaaaggtaacaaacagtatgggttaatatcccatagaaagggtaacatttacgtggttggctgaccattcattggcctaaccagagccaacttaacaagtcaaaccatcaaaatgtgtttgcatcagaaaacttgacataaaacagataacttccaagcatataagggcatggttaaatgctggttttgacagctgtggtaaaaatctatctgcatgccaactcttctccctggttttcataaaatgatagaaaatatacatgtgacatacactgaaaaacccactgactacaagatttckattaataaagcctggcttttaacttggtgaaatgtgtcaatattgtataaggttgaagacatttatgtaactcagtgccaagaaaaccactgtctacagcttcagcctcgtagaatacaaaaatccatttaaaggccattgtcagctgggcgcagtggctcatgcctgtaatcccagcactttgggaggctgaggctgttggatcaccttaagtcaggagttcaagaccagcctgaccaacatggtgaaaccccatctctactaaaaatacaaagattagctgggtgtggtggcgggtgcctgtaatcccagctactcgggaggctgaggcaggagaatcgcttgaacccaggaggcggaggttgcagtgaactgagatcatgccactgcactccagcctgggtaacagagcaagactcttgtctcaaaaaaattttaaaaaaaag

SEQ ID NO: 709852 - DNA, 1396 bp, Homo sapiens
aaaaggaacatatgcattttagctttgtatcttgcaagttttgcagtcagaaattttttgaactagcttttgcttttgataacacttcgtgtttgtaaccacattcatatatatatacatatatatgtgaagctccatatttctgttgctttaaagaagtaaaaccttccatttaaataagatgacatgcataagataacaaagcttccttgatttccttttcctgtgtaatttaatagatttgttgactagtgcttgggcacattataaatcagtgttatttgctcttggagccattttttaaaaaaaattttggcagtgagcagttgaatttatcttgaatttatcatgtgtgtgtatttctgaagcagctacatagcagaacattttaagagattctgttagcccacatgttcatgttggttgctgctgaatggtaaatattaaataaaattaccagattaatcttaatatttctgtctttactcctatcatcagcatgtctttacttgtaatagaagcggctcttgatcttattatagtgagatttccagacttctttttagatagatcctgtttgtgttgtcctgccacgtagatgcatttcacactcactacggctcacttatgccatagggaacaatcaccagaaaggtaacaaacagtatgggttaatatcccatagaaagggtaacatttacgtggttggctgaccattcattggcctaaccagagccaacttaacaagtcaaaccatcaaaatgtgtttgcatcagaaaacttgacataaaacagataacttccaagcatataagggcatggttaaatgctggttttgacagctgtggtaaaaatctatctgcatgccaactcttctccctggttttcataaaatgatagaaaatatacatgtgacatacactgaaaaacccactgactacaagatttcgattaataaagcctggcttttaacttggtgaaatgtgtcaatattgtataaggttgaagacatttatgtaactcagtgccaagaaaaccactgtctacagcttcagcctcgtagaatacaaaaatccatttaaaggccattgtcagctgggcgcagtggctcatgcctgtaatcccagcactttgggaggctgaggctgktggatcaccttaagtcaggagttcaagaccagcctgaccaacatggtgaaaccccatctctactaaaaatacaaagattagctgggtgtggtggcgggtgcctgtaatcccagctactcgggaggctgaggcaggagaatcgcttgaacccaggaggcggaggttgcagtgaactgagatcatgccactgcactccagcctgggtaacagagcaagactcttgtctcaaaaaaattttaaaaaaaag

SEQ ID NO: 709853 - DNA, 1396 bp, Homo sapiens
aaaaggaacatatgcattttagctttgtatcttgcaagttttgcagtcagaaattttttgaactagcttttgcttttgataacacttcgtgtttgtaaccacattcatatatatatacatatatatgtgaagctccatatttctgttgctttaaagaagtaaaaccttccatttaaataagatgacatgcataagataacaaagcttccttgatttccttttcctgtgtaatttaatagatttgttgactagtgcttgggcacattataaatcagtgttatttgctcttggagccattttttaaaaaaaattttggcagtgagcagttgaatttatcttgaatttatcatgtgtgtgtatttctgaagcagctacatagcagaacattttaagagattctgttagcccacatgttcatgttggttgctgctgaatggtaaatattaaataaaattaccagattaatcttaatatttctgtctttactcctatcatcagcatgtctttacttgtaatagaagcggctcttgatcttattatagtgagatttccagacttctttttagatagatcctgtttgtgttgtcctgccacgtagatgcatttcacactcactacggctcacttatgccatagggaacaatcaccagaaaggtaacaaacagtatgggttaatatcccatagaaagggtaacatttacgtggttggctgaccattcattggcctaaccagagccaacttaacaagtcaaaccatcaaaatgtgtttgcatcagaaaacttgacataaaacagataacttccaagcatataagggcatggttaaatgctggttttgacagctgtggtaaaaatctatctgcatgccaactcttctccctggttttcataaaatgatagaaaatatacatgtgacatacactgaaaaacccactgactacaagatttcgattaataaagcctggcttttaacttggtgaaatgtgtcaatattgtataaggttgaagacatttatgtaactcagtgccaagaaaaccactgtctacagcttcagcctcgtagaatacaaaaatccatttaaaggccattgtcagctgggcgcagtggctcatgcctgtaatcccagcactttgggaggctgaggctgttggatcaccttaagtcaggagttcaagaccagcctgaccaacatggtgaaaccccatctctactaaaaatacaaagattagctgggtgtggtggcgggtgcctgtaatcccagctactcgggaggctgaggcaggagaatcgcttgaacccaggaggcggaggttgcagtgaactgagatcatrccactgcactccagcctgggtaacagagcaagactcttgtctcaaaaaaattttaaaaaaaag

SEQ ID NO: 709854 - DNA, 1396 bp, Homo sapiens
aaaaggaacatatgcattttagctttgtatcttgcaagttttgcagtcagaaattttttgaactagcttttgcttttgataacacttcgtgtttgtaaccacattcatatatatatacatatatatgtgaagctccatatttctgttgctttaaagaagtaaaaccttccatttaaataagatgacatgcataagataacaaagcttccttgatttccttttcctgtgtaatttaatagatttgttgactagtgcttgggcacattataaatcagtgttatttgctcttggagccattttttaaaaaaaattttggcagtgagcagttgaatttatcttgaatttatcatgtgtgtgtatttctgaagcagctacatagcagaacattttaagagattctgttagcccacatgttcatgttggttgctgctgaatggtaaatattaaataaaattaccagattaatcttaatatttctgtctttactcctatcatcagcatgtctttacttgtaatagaagcggctcttgatcttattatagtgagatttccagacttctttttagatagatcctgtttgtgttgtcctgccacgtagatgcatttcacactcactacggctcacttatgccatagggaacaatcaccagaaaggtaacaaacagtatgggttaatatcccatagaaagggtaacatttacgtggttggctgaccattcattggcctaaccagagccaacttaacaagtcaaaccatcaaaatgtgtttgcatcagaaaacttgacataaaacagataacttccaagcatataagggcatggttaaatgctggttttgacagctgtggtaaaaatctatctgcatgccaactcttctccctggttttcataaaatgatagaaaatatacatgtgacatacactgaaaaacccactgactacaagatttcgattaataaagcctggcttttaacttggtgaaatgtgtcaatattgtataaggttgaagacatttatgtaactcagtgccaagaaaaccactgtctacagcttcagcctcgtagaatacaaaaatccatttaaaggccattgtcagctgggcgcagtggctcatgcctgtaatcccagcactttgggaggctgaggctgttggatcaccttaagtcaggagttcaagaccagcctgaccaacatggtgaaaccccatctctactaaaaatacaaagattagctgggtgtggtggcgggtgcctgtaatcccagctactcgggaggctgaggcaggagaatcgcttgaacccaggaggcggaggttgcagtgaactgagatcatgccactgcactccagcctgggtaacagagcaagactcttgtctcaaaaaaattttwaaaaaaag

SEQ ID NO: 709855 - DNA, 1030 bp, Homo sapiens
ttaacctttattacttccttataggcactatctctaaatactgtcacattggggattagagcttaaacatgaattttggagggatataattcagcctgtagcaatcttctaatccaataaccttttcacttctattctccctctttttgaattttttctttattctaggtgagttccacttttactgaatcatttcgacatttcttgccatcatgttttttatttctaagagctcttattcaattttttgattattttcctttatttcactgttttytcattgataaatatatttatctttctgaaaatatgatagattttttaaatcctgctacatgaattacttgtattttttactaaatgactttttttttttctatttactttgcacttggcctctcaaattggaggctttttcaaatatttggtgatctttggctatcctttgtcatataaaagtgaggcacaaaaaaaatcttagagagaacgaggcttgttgaccaagtagcaagaagacttttttattgtgtgatccccagatgtcaaaattgatcttttctctgggtctgcttagtgttacactagttagtttagctaggataggcaaggttagctacaggaaaagaaaaaataaaaagaataaaacaactctgtggcttaacacaataaatatttatcattcccactatatgtccagtgataattggtgatgggctctgctccagtcacagaattactccaaaccatcttatgatgtcactgtttcaccaagatacctcatttgtcatagcaggaaaaaaagcaagcatggaaactcgcatattgtctgttgaatgtgtccacctggaagtagtatacatgacttgtacttttacttaattgactgaagcaaattgtaggtccacacctagcctcaaagagtggggaagtgcagccctcccaagtgtccaaaaggagagggtagccagaaatactggagagcagcaccaatgtttaccacaatgactgattcattctcttaaaaatagta

SEQ ID NO: 709856 - DNA, 635 bp, Homo sapiens
aagccctttttatatycattgttaatccctttcctctatatccccccaagatgtaatcagtatcctgaatttgctgtttatcatttccatgaatattttaaacttcactacatatgtatatattcacaaataatatattgtattactttgcatgtttcaaagctttataaatgatgtcatactgtaaatggtattctgtgccttgctttttccactcaacctatttttgagatttatggatattaatatatgtattctagttctgtgttgttgctatatattgaaagaatatacaggtatttatttttctgctattttttgttcattgacatgtaaattggttccaagtttttctcatttcatgaacatttgcatactgtcaccttggacacactgaggatatatactaggagccaagttactaggtcacatagtatgagcatctttaaatgtactggattccaatgtcagatctagaaacctagcttcactgggtttggtcttctaaatctatctgcttacttgctgtattagccagggtttcccaggggaacagaatagaatatatctatacatgaaagggagtttatcagggagaattggctcacacaacaggctgtctgaaaggtggggaa

SEQ ID NO: 709857 - DNA, 635 bp, Homo sapiens
aagccctttttatattcattgttaatccctttcctctatatccccccaagatgtaatcagtatcctgaatttgctgtttatcatttccatgaatattttaaacttcactacatatgtatatattcacaaataatatattgtattactttgcatgtttcaaagctttataaatgatgtcatactgtaaatggtattctgtgccttgctttttycactcaacctatttttgagatttatggatattaatatatgtattctagttctgtgttgttgctatatattgaaagaatatacaggtatttatttttctgctattttttgttcattgacatgtaaattggttccaagtttttctcatttcatgaacatttgcatactgtcaccttggacacactgaggatatatactaggagccaagttactaggtcacatagtatgagcatctttaaatgtactggattccaatgtcagatctagaaacctagcttcactgggtttggtcttctaaatctatctgcttacttgctgtattagccagggtttcccaggggaacagaatagaatatatctatacatgaaagggagtttatcagggagaattggctcacacaacaggctgtctgaaaggtggggaa

SEQ ID NO: 709858 - DNA, 635 bp, Homo sapiens
aagccctttttatattcattgttaatccctttcctctatatccccccaagatgtaatcagtatcctgaatttgctgtttatcatttccatgaatattttaaacttcactacatatgtatatattcacaaataatatattgtattactttgcatgtttcaaagctttataaatgatgtcatactgtaaatggtattctgtgccttgctttttccactcaacctatttttgagatttatggatattaatataygtattctagttctgtgttgttgctatatattgaaagaatatacaggtatttatttttctgctattttttgttcattgacatgtaaattggttccaagtttttctcatttcatgaacatttgcatactgtcaccttggacacactgaggatatatactaggagccaagttactaggtcacatagtatgagcatctttaaatgtactggattccaatgtcagatctagaaacctagcttcactgggtttggtcttctaaatctatctgcttacttgctgtattagccagggtttcccaggggaacagaatagaatatatctatacatgaaagggagtttatcagggagaattggctcacacaacaggctgtctgaaaggtggggaa

SEQ ID NO: 709859 - DNA, 628 bp, Homo sapiens
tgttaatacctggttaaataccactcacggacagtcactcattgcccagctttccaatactatggcagcccttaagctgcaatgaattaacaatttgtacacaaagtgggcaacaattctcaatatcacaaaccaaactgcaaccttttagccatttagcactgaaagttgctatcactaacactgaaccaatgggatgcaccctgacttcagcagaagaataaaagcatggagctctggaaacccctctgctcttacatcatgcccacagaagcaacacctgtgacacgcagaccaagaaatgacttctaggtgaccaggagccrtgtggtcactcaattccttgagtcatggctaccacaggtctgcatttctgtggtcttccccacagttcaaggccagtgcaaaaggacttgctgacttgtatttctggagattctctccagaaattggtagagattctctcaccaaacaaaagatttctgtgcttctatgaagcacacaatatcaaagcatctattgagaagaaagacaagtccactcacagaataatatgcaggagggcatctccagggacaccaatcacggctaggatcttaggacaaatgttttcctgaagagcataata

SEQ ID NO: 709860 - DNA, 628 bp, Homo sapiens
tgttaatacctggttaaataccactcacggacagtcactcattgcccagctttccaatactatggcagcccttaagctgcaatgaattaacaatttgtacacaaagtgggcaacaattctcaatatcacaaaccaaactgcaaccttttagccatttagcactgaaagttgctatcactaacactgaaccaatgggatgcaccctgacttcagcagaagaataaaagcatggagctctggaaacccctctgctcttacatcatgcccacagaagcaacacctgtgacacgcagaccaagaaatgacttctaggtgaccaggagccgtgtggtcactcaattccttgagtcatggctaccacaggtctgcatttctgtggtcttccccacagttcaaggccagtgcaaaaggacttgctgacttgtatttctggagattctctccagaaattggtagagattctctcaccaaacaaaagatttctgtgcttctatgaagcacacaatatcaaagcatctwttgagaagaaagacaagtccactcacagaataatatgcaggagggcatctccagggacaccaatcacggctaggatcttaggacaaatgttttcctgaagagcataata

SEQ ID NO: 709861 - DNA, 1038 bp, Homo sapiens
ggaacatctcacaagataagcataccaaaaaaaaaaaaggtgcagggaagacagatgagcttcaaaattgacataaatgaggaaatagacttcggaaaagactctgcataaagggtgatgtctcccagctgccagtacccgcacaggtgagggtctaagattgatactttctagactacactgttcttccctaagactaagatccattaagctatcatggcccaaagggcgcacagaatgatggcataatagaaaaaagtatttaaaattcaagttgtataaatccagctaaaagcatcctacctgtgartgaatcttggttggcctccatctggaatactacctactgttctggccactctacctcaaggaagacagaaaaaaaaaaggaaggaaaaataaaatcaacatggagatactgtataaacaaaattaatataatgaaatctctttaatgtgaaagacaagaactaaaactgtcactgaagccctcagtttaaagggcttcatgggatgaacttggactggttgtcttgccttggagttctgcaaacacgaaaaggcatcccttgaggtatgcctctaaagggaggtagattagcatagattaaaaaaataagatgatactggctgggcatggtggctcatgcctgtaatcccagcactttgggaggctgaggtgggtggatcacccgaggtcaggagttcgaaaccaacctggccaacatggtgaaaccctatctctactaaaaatacaaaaattatccaggcatgttggcatgcgcgcctgtaatcccagctactcgggaggctgaggcaggagaattgcttgcacccaggaggcggaggttgcagtgagccgagattgtaccactgtactccagcgtgggcaacagagtgagatctctgtctcaaaaaaaaaaaaaaaagatactttgtgaggaggatggtaaatctaaggacattatcttccccaacagattttatgagttatgaatataaattcaagaggttgatatgttcctgggttttcatgta

SEQ ID NO: 709862 - DNA, 584 bp, Homo sapiens
aaaagtggtaaaagggactactgaacactaaaatagagaattttctcactgcgatyataataattatttttttctttacaactttcagaacccagatcaaggggttatttttgtgaaaactatgaaacagttacataaataatgcatttcattagagatcttgatggggtctttcttgttttgtttgtcctagacatatatacttacacattacatctttttttaaaaaaaagataaaattatatgtggctttatgatcaatttcagtaactaataaacttttaatctattataaaaaatttacttttatttcctttcaagtaatgtctggaataaatcataataaccagtgaattgaagaacatctgaaaatgatatcaactttgggtatgcaaacatcatttaattttaaatactataatattttacactgtccttctcacagaaactattaagtagcaatttcccatctgcatatggtggcaggtcatccagatggtactgatgcttactccaaagctgtctttgaacatctgttgtgttgagcattaaaatgtttttcttttgatcaaaaattgtttttc

SEQ ID NO: 709863 - DNA, 665 bp, Homo sapiens
ctcagccttccaggttcaagcgatcctccttcctcagccccacaggtagctgggactacagctgcataccaccacacctggctaatttttgtactttttatagagatgggggtttccctatgttgcccaggttggtctcgaactcctgagatcaagcgatcctcctgcctcggccttccaaagtgcttggattataagcatgagccaccgcacccagcctaacctatcattttaaaaatacgtctcttcatacttttctttctattcattttctttttggtcattgtgctcttgctgtttctaaaatcaagaccaattcagtatcccaggctccttttcctttttagtaaaaatactaaaatacttttgccctacaagtttaagcttctgatttagtaaaatattttcttcttaacttaatgaaaatagaggccctatcagttctctctacttattttctttgttgccttttgatcctgtatcgtacatattttattccartgaatgtggccacatcctgtggctatcttatttctcatttatcattgttcccttctggtctttaaaacccatttttatctctttactccatgtgtctttcaaatgacttacctttgttattgctatctaataataatagttcaagatgctaattcaaaagaaaa

SEQ ID NO: 709864 - DNA, 665 bp, Homo sapiens
ctcagccttccaggttcaagcgatcctccttcctcagccccacaggtagctgggactacagctgcataccaccacacctggctaatttttgtactttttatagagatgggggtttccctatgttgcccaggttggtctcgaactcctgagatcaagcgatcctcctgcctcggccttccaaagtgcttggattataagcatgagccaccgcacccagcctaacctatcattttaaaaatacgtctcttcatacttttctttctattcattttctttttggtcattgtgctcttgctgtttctaaaatcaagaccaattcagtatcccaggctccttttcctttttagtaaaaatactaaaatacttttgccctacaagtttaagcttctgatttagtaaaatattttcttcttaacttaatgaaaatagaggccctatcagttctctctacttattttctttgttgccttttgatcctgtatcgtacatattttattccagtgaatgtggccacatcctgtggctatcttatttctcatttatcrttgttcccttctggtctttaaaacccatttttatctctttactccatgtgtctttcaaatgacttacctttgttattgctatctaataataatagttcaagatgctaattcaaaagaaaa

SEQ ID NO: 709865 - DNA, 665 bp, Homo sapiens
ctcagccttccaggttcaagcgatcctccttcctcagccccacaggtagctgggactacagctgcataccaccacacctggctaatttttgtactttttatagagatgggggtttccctatgttgcccaggttggtctcgaactcctgagatcaagcgatcctcctgcctcggccttccaaagtgcttggattataagcatgagccaccgcacccagcctaacctatcattttaaaaatacgtctcttcatacttttctttctattcattttctttttggtcattgtgctcttgctgtttctaaaatcaagaccaattcagtatcccaggctccttttcctttttagtaaaaatactaaaatacttttgccctacaagtttaagcttctgatttagtaaaatattttcttcttaacttaatgaaaatagaggccctatcagttctctctacttattttctttgttgccttttgatcctgtatcgtacatattttattccagtgaatgtggccacatcctgtggctatcttatttctcatttatcattgttcccttctggtctttaaaacccatttttatctctttactccatgtgtctttcaaatgacttacctttgttattgctatctaataataatagttcaagatgctaattcaaargaaaa

SEQ ID NO: 709866 - DNA, 1067 bp, Homo sapiens
taatatatttggattaaactagttcattgtctgttagtcactttaggcttcaagctaggggaacaggaaagctcccaaagtgggatgggctagttcttyttcgggtcatgggagtatatagcaggatcagtgaatgagaacacttggaggtgtctcctggtttaattaattttaactcagataagcaaattactattgttttttcttttgattctgcctctaaaggaacatgaaacaatgtagccaactaatgaatgaacactgaggagccaccaccatctttgtttcttcaccataaaagaaacatttgcagtaaatcaaacatttttacaacaactgcagctttagatttcccaggaggttttggtgttaatacctccattttgggaaacaaacatgtagattaaactaattttgtaataattagaattaaatccagagtgctctatctcttcccttagcagtaactggcatttcccaaagactgttggcccttacgtagtccttgagtgaagatgaattaagtaaattaaaatctttggccacctacgtctttccactaattttttttttttttttttttttttttttaagctatcaagggagtggaatttctctttggggttacaactttgggatttaggagaaaaggagaagactcagattttattgagaattctaacatacttttagggggaggatgaggatataattaagagatacccttttgtatagacccaaggctgaaaatttttgtcctgtgcattgcaacttaaaccctcaagaacactgtttaaattctcaacagtacttacaagtatgcaggcagtaatactactcaaagagatgcagacagcaaagaatatattcaacggttttggaggtagttgagggaaaacaaaagcacttatcagcgttacctgtatgaagagaaattatgtaaggccttaacagtaattccaagacttggtaattaccaactggagtctaggcaacagtactacaaaatgcttcatgttataaaattacatctgccaccaagtttgctttctagaatgttaatacag

SEQ ID NO: 709867 - DNA, 799 bp, Homo sapiens
cctgtttcaaaaaaaaaaaaaaaamaaacaaactcttggcatttgtctataatgcaggctccagcttttcacccaatgcctctgctgtctcccctcttgggagcaaaaccaaattcttccaatttcagtttcttctgtcccttccaccaaagtttagctccaggtcaaactctgcatatccaagtccatttaagaatttggcagaagcaaaaagcctttcattctcccaggatccactctcctagaaggcatttttgattatagatggcaattttttaaatgttacaattactgccacattattagtcatcagtcatggatgattcccttttttaattgaaccctctgctgcttccaacctgctacaagaactatggtgcctacattctggtggttgacaggaacacttagcgagaccaaggcattgctgaatttttactgaatcatctcatgttcttattggcatgggagtgtgtcagcggtgttgaggtaactcttcttagcaaggaagtaacctgatttgttgtatgccctactgaatagctttgacttgccttaaataaataccttatgaggactgtgagattcaattgaattgctttcatggatgaaattcaatttcatgcataccgagtttcctcctaaaaagagctgagtgtatgtgctttgcatggtgatatggtttggctctgtgtccccacccagatcttatccagcactgtaatccccacgtgtcgggggaggggcctggtgggaggtgattgaatcacgggggcagacgtcccccttgctgttctca

SEQ ID NO: 709868 - DNA, 976 bp, Homo sapiens
ccataatccccacatgtcatgggagggacccagtgggaggtaattgaatcatgggggcagtttcccccatgctgttctcatgatcgtgagtgagttttcgcaacatctgatggttttataaggggcttccccactgttgcttggcacttcttcctgctgccatgtaaagaaggacatatttgcttccccttccgccatgattgtaagtttcctgaggcctccccagccatgctgaactgtgagtcaattaaacttttttcctttataaattacccagtctcaggtattttattagcagctgataatagactaatacaaggctgaaaagcaattaaacttagaaatcccccaaatcgaacatctctttggtttctaactatttcagatccaaataaataaaactaattgaaaaacttgtttcactcgggtggtgaaacactgtctcataaatcaccaagtgagaaaactgaatcaaccccagcgccttgggcacaattagctgtattagagaagaaattaagaagcactcctaccctactgcttaagctaagcacagcctttccctgtaaagccagacatcaatctttgttgctgttgtttgttgtcttcttgctagcacgtgtgagagttggtgttctcacctgaaygtagactgcaaagcaatgaaatataatgtatagcagacatagtaaggcttgctgtaagcatatagataagtattctaataaataaacaaactagtcctgcagtattgattcattccaaagcctaatttccttttgttttgtttcattcaccaaagtctatatcctctaaatctaccttcatgatccatcagaaccaattctacatgtcctcaaagcagatttggaaaacaagcaaaagcagatcagaaactcctagatttctttttggcagttatcagtggttattaccacagagccatgcaatgttgtcagagactttaaaaaataat

SEQ ID NO: 709869 - DNA, 1990 bp, Homo sapiens
gtccagtaactgacaagaaagcagaggaacccagcagccaggggacatatacaccaattctcctaggggcctgtgagagtcctcgatcacttctccactatcccccaagcccgaggacctgcaacattaaaaacacaaaattttaaaacacaacacacgcagacacatatatgaaaatatatatttatagtatttattttaataatataattttaaattcattggaccctgaaaattatgtagccagttttgctggcatgaaagcagtcatttttgtaggtcacagttgaaactacttaaaaatttttaacagtgtttctctagctcctgcctggattttgttgatagtcagtataatgggccaaataattaccctaattcctggaacccataaatatgttttgtcacatggcaaaggagattttgcagataaaatttaaggtaatagaacttaggacagggagagcatccaggactatccaggtggatgcaatgcaatcacatgggcccttaaaagtggaagagtgagaagagagttagagatgtggtagggaagggaaatccagaggaaattcaaagtcgaccattgttgctggctttgaagatggaagaagagagccatgagccaaggaatgtgggcagctgagccaaggaatgtggacagcctctagaatgagaacaatctgcagcctctatcagcaagaaagggggaccttatggaacatacaacctcatacagccaaatggaactcagttctgccaacaaactgcatgctcttgcaggtagactctcccccagagcttccagaaaggaatgaaaccctgtttccagcggagttgcagccttgagacactcaggcagagaaatcagctgagcccactaaacatcagacctacacactgtgatataaatctatgttgtttaaaatttctagatttgcagtcatcagttacagtaacaattagaaaactaatacaattggttgatccagtggcaacaagaatctggcaaggtcacagcaagagagaaatgacagagaaagctccagaggcaggcaccagaggttaggctctggttaaatagtttctcctgaggggcatcgttaagaagaccagaaggctctgggtgtatttaagaaaggctacttttccccttcccctctcagaagtgctgggggattttctctaatcttcrttgtgaaaacctggtttggctccacgaggaaacactcatgggaagtacaggaggcaagttgtagctctcaaaattgttcccagtcgtaatttgtcaattacacgttgacatttcctggtctccaggaggtttctgcttctgagcccctcttctggtaagttgagattctctgtatctacctgtttgtctctctaattttggagggcagtagcttgtcctgttgcctaaatcctgcggtggacctatgaagagttttcagtttgttcagctttttttcttactgcagggatgggagagatcaattccaagcttctttatatgccaaatgggaactggaagtccactaacagaatttaaaaattttccctacagtttattatatgggaagtagcacagttctggaaaagagctttggagacctggattgttatgttacctggcccacctctcctgactagatcttgtaaagccttgctggtccatcaactggcagcatcctccatgctcagaagcttgttagaaaaacaacatctcaggcattctaccccagacctcctgaattagaatccacattaaaacaagaccccagatcactcaagggcttattaaagttttaaagctatgatagaaagttgcttccaagctttgagcattagtttactacctcagttcccaaaccatgcactgaggtgcctgggggcaccctgaggaactcaaaggggcatttttgagatattttaaatgtttaaggtaaacacatctgtccaacacaatgtgaactgaactatctcactg

SEQ ID NO: 709870 - DNA, 1990 bp, Homo sapiens
gtccagtaactgacaagaaagcagaggaacccagcagccaggggacatatacaccaattctcctaggggcctgtgagagtcctcgatcacttctccactatcccccaagcccgaggacctgcaacattaaaaacacaaaattttaaaacacaacacacgcagacacatatatgaaaatatatatttatagtatttattttaataatataattttaaattcattggaccctgaaaattatgtagccagttttgctggcatgaaagcagtcatttttgtaggtcacagttgaaactacttaaaaatttttaacagtgtttctctagctcctgcctggattttgttgatagtcagtataatgggccaaataattaccctaattcctggaacccataaatatgttttgtcacatggcaaaggagattttgcagataaaatttaaggtaatagaacttaggacagggagagcatccaggactatccaggtggatgcaatgcaatcacatgggcccttaaaagtggaagagtgagaagagagttagagatgtggtagggaagggaaatccagaggaaattcaaagtcgaccattgttgctggctttgaagatggaagaagagagccatgagccaaggaatgtgggcagctgagccaaggaatgtggacagcctctagaatgagaacaatctgcagcctctatcagcaagaaagggggaccttatggaacatacaacctcatacagccaaatggaactcagttctgccaacaaactgcatgctcttgcaggtagactctcccccagagcttccagaaaggaatgaaaccctgtttccagcggagttgcagccttgagacactcaggcagagaaatcagctgagcccactaaacatcagacctacacactgtgatataaatctatgttgtttaaaatttctagatttgcagtcatcagttacagtaacaattagaaaactaatacaattggttgatccagtggcaacaagaatctggcaaggtcacagcaagagagaaatgacagagaaagctccagaggcaggcaccagaggttaggctctggttaaatagtttctcctgaggggcatcgttaagaagaccagaaggctctgggtgtatttaagaaaggctacttttccccttcccctctcagaagtgctgggggattttctctaatcttcattgtgaaaacctggtttggctccacgaggaaacactcatgggaagtacaggaggcaagttgtarctctcaaaattgttcccagtcgtaatttgtcaattacacgttgacatttcctggtctccaggaggtttctgcttctgagcccctcttctggtaagttgagattctctgtatctacctgtttgtctctctaattttggagggcagtagcttgtcctgttgcctaaatcctgcggtggacctatgaagagttttcagtttgttcagctttttttcttactgcagggatgggagagatcaattccaagcttctttatatgccaaatgggaactggaagtccactaacagaatttaaaaattttccctacagtttattatatgggaagtagcacagttctggaaaagagctttggagacctggattgttatgttacctggcccacctctcctgactagatcttgtaaagccttgctggtccatcaactggcagcatcctccatgctcagaagcttgttagaaaaacaacatctcaggcattctaccccagacctcctgaattagaatccacattaaaacaagaccccagatcactcaagggcttattaaagttttaaagctatgatagaaagttgcttccaagctttgagcattagtttactacctcagttcccaaaccatgcactgaggtgcctgggggcaccctgaggaactcaaaggggcatttttgagatattttaaatgtttaaggtaaacacatctgtccaacacaatgtgaactgaactatctcactg

SEQ ID NO: 709871 - DNA, 2215 bp, Homo sapiens
ttcagatctaagcctaagaacacggggaaccacgaaagaattttaaattgggaagtgcatgatttgatgcatatttttaaaagttcttttttgcttctttgggagaacagacttgagagaaacaagagcggaagcagggagaccagttaggtgactgttgctgtaatgttgcctgcagatgacaatgactcagatcagggaagtggcaatgagcaggagaaacatggaacactggagctatatttttttagacaaaatggacacaacttgccaatgaattgaatatggagagagaaaaaagagatgaaggagaagcaatcaaggatgactcctaaatagttattccttgtatccatcatgccatttatgctttttgccctcttcatcaaaagtaggccaaagcataccaacctagctgacagtgaggtcacccactgtacttattgattcagtttacattattctgtgtrctttttttttttttttttgagatgaagtcttcactctttttgcccaggctggagtgcagtggcacaatcttggctcactgcaacctccacctcccgggttcaagcgattctcctgcctcacttagcctcccgagtggctgggattacaggcgtgcactaccatgcccagataatttttgtatttttaatagagacagggtttcaccatgttggccaggctggtctcaaactcctgacctcaagtgatttgcctgccttggcctcccaaagtgctgggattacaaggtgtgagccaccacgcttggcctgtgtacttttaaatattgtgctctctgctctgtattttttaaaatatcatttcatgtactttttgcttttgtatgccattcatgcctgctgtgtggtgcccaccatggagcctacctataatgctgtgcatacagtagggctctgcaaatgctaactggcatgaacaatgtatccccaagtgatcaaaactgcactgcttgactatgcctacttatataataagctacttcttttgtaactttatgaaagaagaaaagagagaaattcttctgttcacgctttggataactaggataactctgaccagctgagcatctaaaggcaaggtaggaagaggtgaagagggtagaagcttttcttctatttttcagagaaaagttccattcatgcctgttcaaagggggttccctgttgctactgttgcccagctaggaggaaacttaagaacaaagaaaaacatgcgtgttttctctgaaaaactagaggcaagactataaagggaaaaataaaacatagaataacatcctaaattccacttaaaaatgcaatgggctatagaagtaaggaactccacttaaccaactgaaataacagaagaagcctttcctcatcctggaatgcagagtaattttcttggagggcaagctgatcatatactaatgtgaaataacttcacataaaaagcaaccatactttggcacttcatttgtgctttatttgaatttttgctctttaaagtgctaatttcaatgaaaatgaagaaaattaaatttcagaatattttagcctactgaattcatgtttttggttttaaaacaacaatgctgtagggtgtaggcatttctttttcttaccttattatactagaacatagaacatgcaggacactaaataataatttcagattgacagttaacacacttttttagaggcagggtctccctctgtcacccaggctggagtacagttgcacgatcatgcctcactgcatgctggacttcttgggctcaagcaatcctcccgtctcggcctcccaaaatgctgaaattacaggtatgagccacctcacctggcctcacactacattttaagctttaggaataattcttaatacatagaaatagaactaaaggaggaatagatgaacataaaagcaaacctaggataaagtgtcagtcctgtatttatttctagcttatccccaacaacaatgctatgtttattgtcacatctttaaagacctcaaaatcggttgcctagcattacgccaaaactaacagggtgagaattagaaacacaagcaagttaagggacttggcaaagctaactctgtaagctaaatctgcataatggacaaactctcaaagttctgctggactcaacctcaaccccctaatgacaaagagaagacagcgtaaataacattattttcttgg

SEQ ID NO: 709872 - DNA, 638 bp, Homo sapiens
caaactagcttagaaaacttccaacagcttcatttcccctcctgctttaaagattcttttttaaatgagaaaaatcccctttactatttttagaaatgcatttgtatggaacaaaattgtgtttacatagagccattaaatggtttccttgcattattttgaagacacttagaagacagcaaattagaggggcctaatgtagataggctcacacaggtaggtatcagtagcctttaaacgtcaaaaaggttattaaaaggaacacaaaattgggttttcagcaaatgaatggacaatgtaagaatcaagagggcacttgaataaaatggatagaaacaaagcatcatagaactaagaatgacatggaagcatggaatttttttaaatacaaaatgcaagagcagtaagttactgaaagcagtagcaacatggactggagacatcatggaagttttgtggtcaaggcaggactggggcttccccttgagggctgggtagaatttgactggaaaaaggcaagaagagcagagsaaagagcaagagtatcacactggcatgaggaagtaaagaggggtgggccaggggtgaaaagaatgggataggatcatgcatgtgcaaccatagaaagtactgggaca

SEQ ID NO: 709873 - DNA, 879 bp, Homo sapiens
ctaaaaaacaacaacaasaacaacaaagaaaatcagctgggcatggtggtacatctgtaatctcagctactcaggaggctgaggaaggagaattgcttgaacctgggaggcggaagttgcggtaagccaacatcgagcccctgcactccaacctgggtgacagagtgaggctccatcccaaaaaaaaaaaaaaaaaaaaagaaaaaagaaaatataggaaatatatgtcacagagaaataaatggaaaactattaggaattacagagacactaattttgctgccagggaaaactgaggtactaattctgagaaaataaatcaatatagcttacctgcagtcatcctcagtttctagttctccaaaccactaggtcaatagcatgcattgcttcatggagaaagcatgacactcttacacacagggtaccatgggcctgaatttgcaacaggaattttctgcatagtccaaaatcaagcacttttgaacactgaaattgcctggcttagttgagaagaggatgattttctcacaactcccaaaacaaacattcagcttgaggaggatcaggcaatttacatggcagaaccaatgaaaagggagaaaaatatgcaatgcaaggaaatttcttggcccatagaaggaggaaagcccggctggtcagagagagatggagcctggaaaacagataaataaatgtctctagggttttgattcccctcttatggctgaatccgaaataatgaataaagaatattcaggtaggtttggtaattttaagatctttggggctgatgtcttgctttcctgggcataaatgggaatatggaaagtttcatggggaaatcccatgcctctgaaatgccagcagcatttatca

SEQ ID NO: 709874 - DNA, 879 bp, Homo sapiens
ctaaaaaacaacaacaagaacaacaaagaaaatcagctgggcatggtggtacatctgtaatctcagctactcaggaggctgaggaaggagaattgcttgaacctgggaggcggaagttgcggtaagccaacatcgagcccctgcactccaacctgggtgacagagtgaggctccatcccmaaaaaaaaaaaaaaaaaaaagaaaaaagaaaatataggaaatatatgtcacagagaaataaatggaaaactattaggaattacagagacactaattttgctgccagggaaaactgaggtactaattctgagaaaataaatcaatatagcttacctgcagtcatcctcagtttctagttctccaaaccactaggtcaatagcatgcattgcttcatggagaaagcatgacactcttacacacagggtaccatgggcctgaatttgcaacaggaattttctgcatagtccaaaatcaagcacttttgaacactgaaattgcctggcttagttgagaagaggatgattttctcacaactcccaaaacaaacattcagcttgaggaggatcaggcaatttacatggcagaaccaatgaaaagggagaaaaatatgcaatgcaaggaaatttcttggcccatagaaggaggaaagcccggctggtcagagagagatggagcctggaaaacagataaataaatgtctctagggttttgattcccctcttatggctgaatccgaaataatgaataaagaatattcaggtaggtttggtaattttaagatctttggggctgatgtcttgctttcctgggcataaatgggaatatggaaagtttcatggggaaatcccatgcctctgaaatgccagcagcatttatca

SEQ ID NO: 709875 - DNA, 879 bp, Homo sapiens
ctaaaaaacaacaacaagaacaacaaagaaaatcagctgggcatggtggtacatctgtaatctcagctactcaggaggctgaggaaggagaattgcttgaacctgggaggcggaagttgcggtaagccaacatcgagcccctgcactccaacctgggtgacagagtgaggctccatcccaaaaaaaaaaaaaaaaaaaaagaaaaaagaaaatataggaaatatatgtcacaragaaataaatggaaaactattaggaattacagagacactaattttgctgccagggaaaactgaggtactaattctgagaaaataaatcaatatagcttacctgcagtcatcctcagtttctagttctccaaaccactaggtcaatagcatgcattgcttcatggagaaagcatgacactcttacacacagggtaccatgggcctgaatttgcaacaggaattttctgcatagtccaaaatcaagcacttttgaacactgaaattgcctggcttagttgagaagaggatgattttctcacaactcccaaaacaaacattcagcttgaggaggatcaggcaatttacatggcagaaccaatgaaaagggagaaaaatatgcaatgcaaggaaatttcttggcccatagaaggaggaaagcccggctggtcagagagagatggagcctggaaaacagataaataaatgtctctagggttttgattcccctcttatggctgaatccgaaataatgaataaagaatattcaggtaggtttggtaattttaagatctttggggctgatgtcttgctttcctgggcataaatgggaatatggaaagtttcatggggaaatcccatgcctctgaaatgccagcagcatttatca

SEQ ID NO: 709876 - DNA, 879 bp, Homo sapiens
ctaaaaaacaacaacaagaacaacaaagaaaatcagctgggcatggtggtacatctgtaatctcagctactcaggaggctgaggaaggagaattgcttgaacctgggaggcggaagttgcggtaagccaacatcgagcccctgcactccaacctgggtgacagagtgaggctccatcccaaaaaaaaaaaaaaaaaaaaagaaaaaagaaaatataggaaatatatgtcacagagaaataaatggaaaactattaggaattacagagacactaattttgctgccagggaaaactgaggtactaattctgagaaaataaatcaatatagcttacctgcagtcatcctcagtttctagttctccaaaccactaggtcaatagcatgcattgcttcatggagaaagcatgacactcttacacacagggtaccatgggcctgaatttgcaacaggaattttctscatagtccaaaatcaagcacttttgaacactgaaattgcctggcttagttgagaagaggatgattttctcacaactcccaaaacaaacattcagcttgaggaggatcaggcaatttacatggcagaaccaatgaaaagggagaaaaatatgcaatgcaaggaaatttcttggcccatagaaggaggaaagcccggctggtcagagagagatggagcctggaaaacagataaataaatgtctctagggttttgattcccctcttatggctgaatccgaaataatgaataaagaatattcaggtaggtttggtaattttaagatctttggggctgatgtcttgctttcctgggcataaatgggaatatggaaagtttcatggggaaatcccatgcctctgaaatgccagcagcatttatca

SEQ ID NO: 709877 - DNA, 1380 bp, Homo sapiens
ctcactgagaattaaacccaaaatatactggacaaaaccagggaaactctaaaattcaattaaaagagatrgggttaaagttagcctaggatttgactcaaaatagcttaaaggcattaatatacctaaaggaatgccatgttaaaagggggcttggtcagaaatagaagcacagcaatgggaatgaaagcaatgttagcttatctcctgctttcttcaagggagagaacatctaagttcacaagtaaagatccacgtatttcaaaaacaaagacaaatgtttattagtccctacagtcagagacaaatgtgtattagtcattacagtaaatcactaacatcatccaattccttgatctaattccattctcatcaagcatacttctgacatgattatttaactttctatgtaaatatgcaaatagagaaatgaatgcaaagaccataaaatgagtgcttggttcacttaatggttatacttctcatcagtactattttattctatacatcagactctgtaaccttaatgaatgctgcctgcagtaaaagatgaatcactcttatgtgctatcaaaaatcaggtttatgaccttgcatgactgagagctacaagccaggccacgtaagttcacacagctgttgccacactgggtatgtccaagggtcagaagctttccccttttctttacactaaaatggctgaaaaatccaactttttagatagacatcagtacaagaaaatcctaaatgcctatcttgccacgagtcttaaatgtaggcatttaattctaacatttctgaactgaatagtttagagaagcacttgccaccagacagcaagccaacagcactgcagcactatttcaagacagctacagaattactaaatttttcaatgtcttttacttgttcactttcactgccataaagaaaacttatttgggaataacaataactaatgataataatccccctttcctccatatgcccatactctttcctgccaattgcatagcaaggaaaacacagaaaacttacatggcaccgtagttccaaatctagtgggattcaatactatgaacctgtttttcaagcttcttcggcctacaccttgagctcctatcaatactaatgtttttctctggaagggaggcattttggctacctcctcatatatctggatttcatgacgatcaaattctaaatgaaaaaggaaatgggaatacaaagtcaacttttatatacatgaaagaaatctctgcaattctgtctagtaatggcttagctgtcttgatagttaaatatcacttgacttgtacccacttagcatagatttgtttttacaaatttggtaaagtacaataaataataattatttta

SEQ ID NO: 709878 - DNA, 1380 bp, Homo sapiens
ctcactgagaattaaacccaaaatatactggacaaaaccagggaaactctaaaattcaattaaaagagatagggttaaagttagcctaggatttgactcaaaatagcttaaaggcattaatatacctaaaggaatgccatgttaaaagggggcttggtcagaaatagaagcacagcaatgggaatgaaagcaatgttagcttatctcctgctttcttcaagggagagaacatctaagttcacaagtaaagatycacgtatttcaaaaacaaagacaaatgtttattagtccctacagtcagagacaaatgtgtattagtcattacagtaaatcactaacatcatccaattccttgatctaattccattctcatcaagcatacttctgacatgattatttaactttctatgtaaatatgcaaatagagaaatgaatgcaaagaccataaaatgagtgcttggttcacttaatggttatacttctcatcagtactattttattctatacatcagactctgtaaccttaatgaatgctgcctgcagtaaaagatgaatcactcttatgtgctatcaaaaatcaggtttatgaccttgcatgactgagagctacaagccaggccacgtaagttcacacagctgttgccacactgggtatgtccaagggtcagaagctttccccttttctttacactaaaatggctgaaaaatccaactttttagatagacatcagtacaagaaaatcctaaatgcctatcttgccacgagtcttaaatgtaggcatttaattctaacatttctgaactgaatagtttagagaagcacttgccaccagacagcaagccaacagcactgcagcactatttcaagacagctacagaattactaaatttttcaatgtcttttacttgttcactttcactgccataaagaaaacttatttgggaataacaataactaatgataataatccccctttcctccatatgcccatactctttcctgccaattgcatagcaaggaaaacacagaaaacttacatggcaccgtagttccaaatctagtgggattcaatactatgaacctgtttttcaagcttcttcggcctacaccttgagctcctatcaatactaatgtttttctctggaagggaggcattttggctacctcctcatatatctggatttcatgacgatcaaattctaaatgaaaaaggaaatgggaatacaaagtcaacttttatatacatgaaagaaatctctgcaattctgtctagtaatggcttagctgtcttgatagttaaatatcacttgacttgtacccacttagcatagatttgtttttacaaatttggtaaagtacaataaataataattatttta

SEQ ID NO: 709879 - DNA, 1380 bp, Homo sapiens
ctcactgagaattaaacccaaaatatactggacaaaaccagggaaactctaaaattcaattaaaagagatagggttaaagttagcctaggatttgactcaaaatagcttaaaggcattaatatacctaaaggaatgccatgttaaaagggggcttggtcagaaatagaagcacagcaatgggaatgaaagcaatgttagcttatctcctgctttcttcaagggagagaacatctaagttcacaagtaaagatccacgtatttcaaaaacaaagacaaatgtttattagtccctacagtcagagacaaatgtgtattagtcattacagtaaatcactaacatcatccaattccttgatctaattccattctcatcaagcatacttctgacatgattatttaactttctatgtaaatatgcaaatagagaaatgaatgcaaagaccataaaatgagtgcttggttcacttaatggttatacttctcatcagtactattttattctatacatcagactctgtaaccttaatgaatgctgcctgcagtaaaagatgaatcactcttatgtgctatcaaaaatcaggtttatgaccttgcatgactgagagctacaagccaggccacgtaagttcacacagctgttgccacactgggtatgtccaagggtcagaagctttccccttttctttacactaaaatggctgaaaaatccaactttttagatagacatcagtacaagaaaatcctaaatgcctatcttgccacgagtcttaaatgtaggcatttaattctaacatttctgaactgaatagtttagagaagcacttgccaccagacagcaagccaacagcactgcagcactatttcaagacagctayagaattactaaatttttcaatgtcttttacttgttcactttcactgccataaagaaaacttatttgggaataacaataactaatgataataatccccctttcctccatatgcccatactctttcctgccaattgcatagcaaggaaaacacagaaaacttacatggcaccgtagttccaaatctagtgggattcaatactatgaacctgtttttcaagcttcttcggcctacaccttgagctcctatcaatactaatgtttttctctggaagggaggcattttggctacctcctcatatatctggatttcatgacgatcaaattctaaatgaaaaaggaaatgggaatacaaagtcaacttttatatacatgaaagaaatctctgcaattctgtctagtaatggcttagctgtcttgatagttaaatatcacttgacttgtacccacttagcatagatttgtttttacaaatttggtaaagtacaataaataataattatttta

SEQ ID NO: 709880 - DNA, 637 bp, Homo sapiens
agtaaactatctcccaggaagagcatgcagcttccagctgtcttctacattttatttatttatttatttatttagagacagagtctcactctgtccccaaggctggagtgccatggcacgatctcagctcactgcaacctccgcctcccccattcaagccattctcctgcctctgcctccccagtagctgggattacaggcacccgccaccatgcctggctggtttttgtatttttagtagggagggggtttcaccacgttggccaggctggtctcraactcctgtcttccaagtgatctgcccgcctcagcctcccaaaggtcttctgcattttagactcagattgagagtggagagacagatacaagccacctccagcaaccagccgccacatgtcactttcacatgcctggacctctcagggctcggacagggctttgatctcagggggcctgcctttgtctgtagtcacagcctggagcacagagggacacctgtaacagtagtgagcgcccctgtttagttctcctgggggttcatgatggcacaaatccacgccactggcttgcaaggcgcactggaagaaagaactgtacagcctctgagtttcgtggtggctctgcctccgccagcacc

SEQ ID NO: 709881 - DNA, 644 bp, Homo sapiens
cctcatgtgctccttcctgacttctgggcccttccttcctttttttttttttttttttttgagacagcgtctcactctctcacccagaatggaatgcagtggcgctatcttggctcaaagcaacctcttccacctgggttcaagcgattatcctgtctcagcctcctgagtagctgggataacaagcatgcctggctaatttttgtattgttagtataaatgaggtttcgctatattggtctggttggtctcgaacaactgacctcaagtgatccacccatctcagcctcccaaagtaatgggattacaggcatgagctaccacacccggccttcgtttttcttttgacacagggttttgctctgtcacccaggctggagtgcagtggtgcagtcatagctcactgcagcctcaaagtcctgagttcaagcaatcctcttgcctcagcctcccaacgtgctagcatctcaggcgtgagccactgcacctggcccgaaaccaagctttctcatcccaagcgccaacctttatcaagtctagcctagtcytctatcgtctcctaagtgtccctcatgagtgatcacttctgagtcctcctgcgtggagagctcagccactgggggcgtatctttcccattggaaaa

SEQ ID NO: 709882 - DNA, 3202 bp, Homo sapiens
aaaagtactgggtatgacatttctcccttaggcagcagtggagcgtcgaagggtttagaaaggtctctctggcagtggtttgcagttcagtttaaggtacgtgagactggaggcagggcagtgaggtatgtggctgttgcaggaggccaggctggagatgatgaggcttgaactgaagcagtaggagaggaaggaatgagcacaaatgataccagagcaggagggggaaacactttggtgactggctactgtaggtgcagcggaggaatgcattggtgactcttactttttttctttttttttaattttaatttttattttttgagacggagtctcgccatgtcacccaggctacagtgcaatggcacgatctcagctcactgcaacctccacctcccgggttcaagcgattttcctgcctcagcctcccaagtaactgggattacaggcgcgtgctatcatgcccggctaatttttgtattttcagtagagacggggtttcaccatgttggccaggctggtctcaaacttctgacctcaagtgatccgcccaccttggcctcccaaagtgctgggattacaggcgtgagccactgcactcggcctggtaactcttttttttttttttttttttttttttgagacagagtctcgctctgttgctcaggctggagtgcaatggcgcgatctcggctcactgcaagctctgccttctaggttcatgccattcttctgcctcagcctcctgagtagctggaactacaggtgcccaccaccacagccggctaattttttgtaattttagtagagacggggtttcaccgtgttagccaggatggtctcgatgtcctgaccttgtgatctgcccacctcggcctcccaaagtgctgggattacaggcgtgagccaccgtgcctggcctcggcctggtaactcttaagttttgcaccttgatggtgactttaagccttcaggcagaactcccaggtgctaatccgtcagtccggcagccgaagcctgagctcaccaccttcagacaccaccagcctccttcagatgcccaaggatgcctgacaaatgtcattttctacacatcttatgatgtgagaaggattgagaagtactgaccagagacacagctacatccctcccttccacaagctgcaatcagtggataataaagaagagtttaataagcatatcctgaccttcctaaagtgtaatgttgcataaacataaagattctggctgcctctggtgcttagaatctatgtcgtgtaggccgggcacaatgattattatactcagttgtatccttggctgcctaaagtgatgccaggcccttggctctgtccagagttcctcttgaggaaaatgaccacgctcagctgctgcctttgttctgtttggttttcagacgaaaacagcaaccagagttccgtgtctgacgtctatcagcttaaggtggacagcagcaccaactcaagccccagcccccagcagagtgagtccctgagcccagcacacacctccgacttccgcacggatgactcccagcccccaacgctgggccaggagatcctggagggtgagtcgtggttggccgaggatgagtttcctagaagggccttgctttctgctcttgttgtgtctcgtctttagagtaacaggctcgagagagcacctcagagccaggcagcaccaagccctttctcgatagcttaggaatgattatagtttcccctttcacagagggaagggagaaaacaagcattagagttgcgtgccaggctgtgtggaaggaacttgagtatttgacgcctgctataattctctcaaaaatcctgtgaggtggcagctattgtcttcttttacagatgaggaaaatggacattcaaagcttagaaaggttaaattgggctgggcatggtggctcacacctgtaatcccagcactttgggaggtcgaggtgagcgggtcacttgaggccaggagttcaagaccagcctgaccaacatggcaaaaccgtctctactaaaaacataaaaaatttagttgggcgtggtggcatgtgcctgtaatcccagctactccggaggctgaggcagaagaatcacttgaacccaagaagcagaggttacagtgagctgagatcacaccagtgtattcttgcctgggcaacagrgtgagactccatctcaaaaaaaaaagacctggcgcggtggctcacacctgtaatcccagcactttgggaggccgaagtgggtggatcacctgaggtcaagagttagagaccagcctgaccaacatggtgaaaccccatctctactaaaaatacaaaaattagccaggcatggtggcgcaagcctgtaatcccagctactcgggaggctgaggcaggagaatcacttaaacccaggaggcagaggttgcagtgagccaagatcgcaccagggcactccagcctggcgacagagctagacttcatctcaaaaaaaaacagagaaaggttaaatcgcttgtctgagatcacatagccagtctagtaactgttggaatgaatgtcactttaagtccttctattttcagcatttatgctgtctgcattacatgctaaatttttttcttttctttttttttttttttttttttttaaagagatagggtcttgctctgttgcccaggctagaatgcagtggctgaatcctagctcactgcagtcttgaactcctggggtcaagtgatcctcttgcctcagactccgtagtagtaggactgtaagcctttgccaccatgcctggctttcttttaattttctgtagaaatggagtctcactatgttgcccaggctggtcttgaactcctgggcttcaagtgatcctcccacctcagcctccagagtagctgggattataggtgtgagccaccatgcccgacccaggtttcttgttataatatggatatatagatgtgtcttaggcccttgttaccttctcctgtgctgtgacctgttaacagccaactacaaaatggaacttgtttctccatgggaaatgccaattgtagttaatatttattgtgttcttactatttggcatgtgctgttcttagctcctgtgttttattacttcatctcgtcctcatagcaactctcagaaaactgggagattgagttagagttgtgatgtttgggctagaggat

SEQ ID NO: 709883 - DNA, 3202 bp, Homo sapiens
aaaagtactgggtatgacatttctcccttaggcagcagtggagcgtcgaagggtttagaaaggtctctctggcagtggtttgcagttcagtttaaggtacgtgagactggaggcagggcagtgaggtatgtggctgttgcaggaggccaggctggagatgatgaggcttgaactgaagcagtaggagaggaaggaatgagcacaaatgataccagagcaggagggggaaacactttggtgactggctactgtaggtgcagcggaggaatgcattggtgactcttactttttttctttttttttaattttaatttttattttttgagacggagtctcgccatgtcacccaggctacagtgcaatggcacgatctcagctcactgcaacctccacctcccgggttcaagcgattttcctgcctcagcctcccaagtaactgggattacaggcgcgtgctatcatgcccggctaatttttgtattttcagtagagacggggtttcaccatgttggccaggctggtctcaaacttctgacctcaagtgatccgcccaccttggcctcccaaagtgctgggattacaggcgtgagccactgcactcggcctggtaactcttttttttttttttttttttttttttgagacagagtctcgctctgttgctcaggctggagtgcaatggcgcgatctcggctcactgcaagctctgccttctaggttcatgccattcttctgcctcagcctcctgagtagctggaactacaggtgcccaccaccacagccggctaattttttgtaattttagtagagacggggtttcaccgtgttagccaggatggtctcgatgtcctgaccttgtgatctgcccacctcggcctcccaaagtgctgggattacaggcgtgagccaccgtgcctggcctcggcctggtaactcttaagttttgcaccttgatggtgactttaagccttcaggcagaactcccaggtgctaatccgtcagtccggcagccgaagcctgagctcaccaccttcagacaccaccagcctccttcagatgcccaaggatgcctgacaaatgtcattttctacacatcttatgatgtgagaaggattgagaagtactgaccagagacacagctacatccctcccttccacaagctgcaatcagtggataataaagaagagtttaataagcatatcctgaccttcctaaagtgtaatgttgcataaacataaagattctggctgcctctggtgcttagaatctatgtcgtgtaggccgggcacaatgattattatactcagttgtatccttggctgcctaaagtgatgccaggcccttggctctgtccagagttcctcttgaggaaaatgaccacgctcagctgctgcctttgttctgtttggttttcagacgaaaacagcaaccagagttccgtgtctgacgtctatcagcttaaggtggacagcagcaccaactcaagccccagcccccagcagagtgagtccctgagcccagcacacacctccgacttccgcacggatgactcccagcccccaacgctgggccaggagatcctggagggtgagtcgtggttggccgaggatgagtttcctagaagggccttgctttctgctcttgttgtgtctcgtctttagagtaacaggctcgagagagcacctcagagccaggcagcaccaagccctttctcgatagcttaggaatgattatagtttcccctttcacagagggaagggagaaaacaagcattagagttgcgtgccaggctgtgtggaaggaacttgagtatttgacgcctgctataattctctcaaaaatcctgtgaggtggcagctattgtcttcttttacagatgaggaaaatggacattcaaagcttagaaaggttaaattgggctgggcatggtggctcacacctgtaatcccagcactttgggaggtcgaggtgagcgggtcacttgaggccaggagttcaagaccagcctgaccaacatggcaaaaccgtctctactaaaaacataaaaaatttagttgggcgtggtggcatgtgcctgtaatcccagctactccggaggctgaggcagaagaatcacttgaacccaagaagcagaggttacagtgagctgagatcacaccagtgtattcttgcctgggcaacagagtgagactccatctcaaaaaaaaaagacctggcgcggtggctcacacctgtaatcccagcactttgggaggccgaagtgggtggatcacctgaggtcaagagttagagaccagcctgaccaacatggtgaaaccccatctctactaaaaatacaaaaattagccaggcatggtggcgcaagcctgtaatcccagctactcgggaggctgaggcaggagaatcacttaaacccaggaggcagaggttgcagtgagccaagatcgcaccagggcactccagcctggcgacagagctagacttcatctcaaaaaaaaacagagaaaggttaaatygcttgtctgagatcacatagccagtctagtaactgttggaatgaatgtcactttaagtccttctattttcagcatttatgctgtctgcattacatgctaaatttttttcttttctttttttttttttttttttttttaaagagatagggtcttgctctgttgcccaggctagaatgcagtggctgaatcctagctcactgcagtcttgaactcctggggtcaagtgatcctcttgcctcagactccgtagtagtaggactgtaagcctttgccaccatgcctggctttcttttaattttctgtagaaatggagtctcactatgttgcccaggctggtcttgaactcctgggcttcaagtgatcctcccacctcagcctccagagtagctgggattataggtgtgagccaccatgcccgacccaggtttcttgttataatatggatatatagatgtgtcttaggcccttgttaccttctcctgtgctgtgacctgttaacagccaactacaaaatggaacttgtttctccatgggaaatgccaattgtagttaatatttattgtgttcttactatttggcatgtgctgttcttagctcctgtgttttattacttcatctcgtcctcatagcaactctcagaaaactgggagattgagttagagttgtgatgtttgggctagaggat

SEQ ID NO: 709884 - DNA, 3455 bp, Homo sapiens
tacagaagaaggaaaatgaatgcttctacccattgtactcctaccttccccagtgatgtctgttgttgtatgtttctggattagaaaaattcataggctcatttgatacttttttgtgggcgtttttcctcacttaattatatttcttgggaatcctcctatatccatatgtaatcagctcatttattttcagtgcctttcctactccaaggcttgtctccctttattcatctccaaacatcagtcccctcttctctatttctttctttctttccaagtggtgtctcatatgctttcctcaacctaatgtttctgtctttttctcaatgtttctccaggatttattatcttgatgtttttctaggtaactttgatgttattctggtcttctgtatgttctttctcagaatttcctttatgatcaaaacttatccaacatgtttttctgaaatgttaatcctatttaaaaggaacactttgtggctttctcccttctctgtcacccttgtttaatttccattttctcatttattttgctgttgcagtagtaacaagaatgatgcccactgctgttgtaattcttcaaactaaagtatgtgacatattcattgctttagtttctctcttaacatacatacagcctccagtggtatctgtgactacaattaactggttaactagattcaggtatatctcctagaagcaatgtattttggcagttttatataactggtattttgtcccattgtccaaagtgttgccatgttctccctgccatttttcaatgtttgaaaattgctgttattaactttaagtgtaataattttctttacacttggtaatggtggactaaaagacaagatttcttgcatttcagtgtgtcctgtagcattgagcagcaagttctagcccggtgaccaggaaaataaaacagagaatcaacctttggtttggacacattatggtttattgacccttctaattagatttattattattgcagtggactcctgcataatttcctgatgttcatcttttgtgttccttccagtattatccactctagcatactttcatgtgggagcttagatataagacagttacatcccaaaggagcccattctctgtatctttccaggttgagagacttctacatttattttttatgtatgcccaacatgcccctctctaagtaacttaagaactattgtttagttttagttttccttactcaaaagcaatttgaagtgtagttctatatttctgactttttactcaggattgtatcttgcccccaacttcttggtaggctcagttctcaggctgctaacaagcacttatgtgataggcactgtgctaaatacagggatgaactcacttaatacagacacaaccttttgagactgtttttgttatcagaggagaaaatagaaatgaataacttttccaaaaccatacagctagcaaattatcttttctggtattctgacctcacaccctatgctcttagttattacaaaatactacacctataataactaccattcatggagtgtttgccatggattaggcacttcagatgctgcttttaggttcattacctaatttaattcttccaacaactgtgaaaggaaaaaaatgggctcaaacaggtgaggtaaatgacttgttcactgattcctcaggtttcatatccgtaaagagatgaatagtgtcaaatgttttttaccttgacacagaacaaagtaaattgtaagatttgtcccrgcatgcagatacaccagaaactaaatttcatgaaacacttacccttaatatactccagtactttctcttctatataattacaaaataaatgccagtcatgaaccactaaattggttttatcacttcttactgggtttgtaacctgtagtttcaaccattcctttggaggctaaaggtgactaaggttcgtccagcttcagtattctgttgtctacaatcaggccaatcagaatcatagaacatggataatctaaccttgtggctgatgcataaatttttgtaatattcctagcaaatggatatctagtacctgttttaaacatctccaattttcaatatttaacatggtatttagtccatctggaaaatacagattgaggtatgtatatattcatgttgtaagtagaaaatgtgttagcattaggtgagacatgggtggtctgtttgtgcatatataaacatcttggtgctaaaggtctttttacaaaatttgccaattggctgcaggcaagacttgccaaagatgagagattagtgaatttagtggatttagggggaggcagatgtctaagtaaaacaaataaaacacttacattggaggtataaattaagttttttgaattttgatatatgtgaaaattcttcagaggtgaatttgtaatgcatgtctaatattttaaatattaattttctttagtctataactccctcagttgttggatctgctagacattcagtatgtgccacctttgaaaataatactctgtggtcaataaaaaataaataacaagtatttaaaaactcactgtgtttagtgaaattaaattttaatcaaaacacatttttatatttgatcatatggatagttagattatccttgagaaattggatagcaaattgcattttaatatagtagaaactctactattcaatttatgtagatttttatagcattaggctgtagtttaatttagaaataatttgacatgcttgttaaaatactcatgatttgtaaacatattaaatgtatattttaactgtaaaatacaataaataaacagtatgctgtatgagcctaatattaaactatttgcttataaatccgccttttttgttatttccctttaggttggatggagtactgctcgtgattattacacgtttttatggtcccctatgcctgaacattatgtggaaggatcaacagtcaattgtgtactagcattccaaggtaaggactgaaaactgcagaactcaatgaaactagatgtcttattgccattaaagatgttgtactccattgtaatgatttgttcaggtatctccagggtaccaaagttgaattagttagtgtctttacttagcaaaagccctaagaatgtaactgtctggtgtaggccacatgatattttatgtagacatttaaaagttattggttgttgtcttaactttcactgaagagtgggtttctttttaggtactaatttttggagatttttttttttcaagtgagaaaacaatacaatagtaataacagatattagaataatgtaacaaaaaagaggtgaggaaaatagtccagatgcaaaccacaaacatgattaacagaacttatagttatttgaattctgtcatgtgtaagttcctttattataaaatgataaagtaatataaaattcatttttgtg

SEQ ID NO: 709885 - DNA, 1448 bp, Homo sapiens
ccaaagaagatacatagatggcaaataaacacataaaaagatgctaaccatcattagttgtgagggaattacaaattaaaaccacggtgagataactctacacacattagaatggctaaaatatgtttgttttacttcattaatttctgctctttattatcatttctgcatttgggggtttactctgctgttcttttcctgacttttgagatgggtgcttggatcattgaatttcagccttaatgtatacctatgtaagctaatatataacctagaaaagtggaaaactgatgaccttttgcatcctacttttttaatatacttaaagtcctagtgctaattatgggagaacgagtratagaccaaaaaaaataaaagccagtctcttgattcttatttaagtgcttcttctattttataaacttgataacaatggcctcatcttataaacttggcaaggaaagcttctcatgattttgtgatgatgatgatgatgatgatagcttttattgactgccttctatgtgatattgatagcacttgtctatagctattgataacatggttggcattcaaatctaaatcaaccttagtctctacatttttctgcatatagcctgagtatgtggtaaactataccatctaggtttgtataagtacactctgtcatgtttgcataaggacaaaattgcctaatgccacatttcttttttcttttctttttctttttttttttttttttttttttttttgagacagtctccctctgtcactcaggctggagtgcagtggcatgatctcagttcactacaacctctgcctccaggttcaagtgaatctccttccccagcctcctgagtagctgggattacaggcacctgccaccaccctcagctaatttttgtatttttagtagaggtggggtttcatacctattgcttcatatgtgctagcacagaggaatcagagaaaaggtaatcaaattcttagttattgaatggcaaaagccagagttaatgtctgaaataataatttaaaaattggtttgaacatctgcataacaggcagagtgcttacttactggtccttcctacatgaaaacatatacgtttgaagatggtaggaatggagatggccaggctggtctcaaactcctgacctcaagtgatccacctgcctcggcctcctaaagtgctgggattacaagtgtgagctactgtgcccagcctaatgccacatttctaagaaggtatccccactgttaagggatgcatcactgtatttcagagataaagtcacagagctcattgaaaggggttaagcaagtgaaaggggtcaaggaggaggcttcagataaaagggcaagtgaagttagagataacagggaaatggtaaatttagagagaaatctaaggggagaggaaaataattaaggtaattgagagaat

SEQ ID NO: 709886 - DNA, 1448 bp, Homo sapiens
ccaaagaagatacatagatggcaaataaacacataaaaagatgctaaccatcattagttgtgagggaattacaaattaaaaccacggtgagataactctacacacattagaatggctaaaatatgtttgttttacttcattaatttctgctctttattatcatttctgcatttgggggtttactctgctgttcttttcctgacttttgagatgggtgcttggatcattgaatttcagccttaatgtatacctatgtaagctaatatataacctagaaaagtggaaaactgatgaccttttgcatcctacttttttaatatacttaaagtcctagtgctaattatgggagaacgagtaatagaccaaaaaaaataaaagccagtctcttgattcttatttaagtgcttcttctattttataaacttgataacaatggcctcatcttataaacttggcaaggaaagcttctcatgattttgtgatgatgatgatgatgatgatagcttttattgactgccttctatgtgatattgatagcacttgtctatagctattgataacatggttggcattcaaatctaaatcaaccttagtctctacatttttctgcatatagcctgagtatgtggtaaactataccatctaggtttgtataagtacactctgtcatgtttgcataaggacaaaattgcctaatgccacatttcttttttcttttctttttctttttttttttttttttttttttttttgagacagtctccctctgtcactcaggctggagtgcagtggcatgatctcagttcactacaacctctgcctccaggttcaagtgaatctccttccccagcctcctgagtagctgggattacaggcacctgccaccaccctcagctaatttttgtatttttagtagaggtggggtttcatacctattgcttcatatgtgctagcacagaggaatcagagaaaaggtaatcaaattcttagttattgaatggcaaaagccagagttaatgtctgaaataataatttaaaaattggkttgaacatctgcataacaggcagagtgcttacttactggtccttcctacatgaaaacatatacgtttgaagatggtaggaatggagatggccaggctggtctcaaactcctgacctcaagtgatccacctgcctcggcctcctaaagtgctgggattacaagtgtgagctactgtgcccagcctaatgccacatttctaagaaggtatccccactgttaagggatgcatcactgtatttcagagataaagtcacagagctcattgaaaggggttaagcaagtgaaaggggtcaaggaggaggcttcagataaaagggcaagtgaagttagagataacagggaaatggtaaatttagagagaaatctaaggggagaggaaaataattaaggtaattgagagaat

SEQ ID NO: 709887 - DNA, 1448 bp, Homo sapiens
ccaaagaagatacatagatggcaaataaacacataaaaagatgctaaccatcattagttgtgagggaattacaaattaaaaccacggtgagataactctacacacattagaatggctaaaatatgtttgttttacttcattaatttctgctctttattatcatttctgcatttgggggtttactctgctgttcttttcctgacttttgagatgggtgcttggatcattgaatttcagccttaatgtatacctatgtaagctaatatataacctagaaaagtggaaaactgatgaccttttgcatcctacttttttaatatacttaaagtcctagtgctaattatgggagaacgagtaatagaccaaaaaaaataaaagccagtctcttgattcttatttaagtgcttcttctattttataaacttgataacaatggcctcatcttataaacttggcaaggaaagcttctcatgattttgtgatgatgatgatgatgatgatagcttttattgactgccttctatgtgatattgatagcacttgtctatagctattgataacatggttggcattcaaatctaaatcaaccttagtctctacatttttctgcatatagcctgagtatgtggtaaactataccatctaggtttgtataagtacactctgtcatgtttgcataaggacaaaattgcctaatgccacatttcttttttcttttctttttctttttttttttttttttttttttttttgagacagtctccctctgtcactcaggctggagtgcagtggcatgatctcagttcactacaacctctgcctccaggttcaagtgaatctccttccccagcctcctgagtagctgggattacaggcacctgccaccaccctcagctaatttttgtatttttagtagaggtggggtttcatacctattgcttcatatgtgctagcacagaggaatcagagaaaaggtaatcaaattcttagttattgaatggcaaaagccagagttaatgtctgaaataataatttaaaaattggtttgaacatctgcataacaggcagagtgcttacttactggtccttcctacatgaaaacatatacgtttgaagatggtaggaatggagatggccaggctggtctcraactcctgacctcaagtgatccacctgcctcggcctcctaaagtgctgggattacaagtgtgagctactgtgcccagcctaatgccacatttctaagaaggtatccccactgttaagggatgcatcactgtatttcagagataaagtcacagagctcattgaaaggggttaagcaagtgaaaggggtcaaggaggaggcttcagataaaagggcaagtgaagttagagataacagggaaatggtaaatttagagagaaatctaaggggagaggaaaataattaaggtaattgagagaat

SEQ ID NO: 709888 - DNA, 611 bp, Homo sapiens
agcaagcaggcacccaggacacctgtttaaggaggggctcacgtgggcttctgcaagtgcggagtgagtgccccttaagtgttgcacctgggcacctgacttcactcatcctctcaccatccttggccaagagagcttgttctttaagcaaaatggcaaggctgaactacctttcattcccccttgactgtgtaagccagtggcctcctgatagggccctgggtctccccatcagggaaacgctctctcattccaaggccccagctttggggcctctgtggccagagtcctggcctcagggaaatcacaggagctaatgcaaactgtgttcctttttgggagaaggtgttagcaaagatggttgccaagcaactccaggggcgtctatctagagtgatgatttctctctttttcctccttttgaacatcttctaggccgctgttcagtttccctcatggcattgggattrttagtaatttcatgaagggtgtgctctctaggatgatggagcggagatcactcttcaatactgccacattagaggtgtccttttgatggtgatatgcctgctaagtgggtgtgaaagtcctttaccttcttcagccacaga

SEQ ID NO: 709889 - DNA, 2869 bp, Homo sapiens
tacaattggaaatctaagagtcagccaaaatgtctattagtccatttggtccagtgtgtattgagtttcagatcatttcagcccagaggtctgggtgacatgtgtcccttcagaaaatagagattgctgtcgctttaataaggagaaaattgttacttcattttgttaacaagatgcttgtatcatactgaaaaattcattctctgtgttcagcttgaatattatattcattatgtttcctaatctgtgtgattactacctgtgtaatttgatgtctggcatctgctatcggaattctttcaacccattatatttcccatcttttttttttttttttttttgtaatggaggataagattgggacatggaaaattgctgcagaccgcctaaggcaaactgcaaccagccggcagctggagcagcaaaggatgcgatgtcacaggggcagctgagagaggcggcctccaggtctatggtctgctgtgacagcccagggtaggaaatggagttggccagttttctaacctgggggattggccattcccagattatcttcaataactcaggctggcattatccattcaaataaattattaggataaaataagtgggtgctaagtgggcagtgagatgctagcagattgttacttggggtaccaagtgtgagacgtgggtattggaaaaacaacaacaaacttgcagcaaattatttttagataaatattaagtgcccacatacaaataacagaacaaaaaaatgcaaactgtcctttccttttctctccattctaactacacgcagctctttaatttaacaggtagtacgagtcaggtgctacagcatagcggaaagagaatgagtattgaaatcaggcatacctaggtataaatcctaagtccgacccacactcagagcagattagaactcttgtttcactggtttaaaagggagactagaatatctacagtagttcccacttatctgcagttttgcttactgaggtttcagctactcacagtcaattgtggtccaaaaatattaagacgttttgagagagaagcagagagagagacaccatatctacataactttcattttagtatattattataattgttctattttattataagttattgttgctaatttcttactatgcctgatttatagattaatctttatcatagatatgtctgtataggaaaaaacagcagatatagggttcagtactatctacagtttctggcatctactggaagcgttgtggataagcaggaacactgtacctcatagagctgttattaaattaacttatattaaatcttacatgattatgtatgtaacacatctattcagaccatggatcatagttctcagtaagtgattagaattatttatcttagttttgcatcctagaggcaaayggggcatcaattccagagtacctgcttggcatttcattgccttatgtagattagatttaaaaattcccaggctaggcgcggtggctcacgcctgtaatcccagcactttgggaggccaaggcaggtggatcacgagatcaggagtttgagaccagcctggccaatatggtgaaaccccatctctaataaaaatacaaaaaaagtagccgggcatggtggcaggcacctgtagtctcacctactcgggaggctgaggcaggagaattgcttaaacctgggaggaggaggttgcagtgagctgagatcgcaccactgactccagcctgggcgacagagcaagactccgtctcaaaaaaaaaaaaaattcccccaaatcaatcccttctgcctatccctaagatgctgttaatgttgtgtcagaggctactgtggcaatgggactggaatgcaggcacttgaaccatccagaccttgatttcaaccatgctttgccttgtgctatccatgcaaccttgagaaagtttcttaatctctttcagcctgaggtttttttcccctctgtacaatggagagaatgcaggcatctatcttattaggttcttacagggttaagtgaattaatccatgggaattgctcggtgaaatacctggcgtgtatatgttggctgtcatttaatgtatgatgtgactttaatggctgggttttttcttttaaataactggttcatcccctaggggtggacaaataggttctcttctatcctctgtttatttttgttgtcacaatccccatagtccctgaaattcctggtataggtaagaatgcctgcgtttcctcttcctcatgtccaggtgtctactctccctgcatgcccttcgccatcctcctttattgtcctgtgtacctgctttccatgcaaaaccacgatttgcctttcatgagctcccagattcgtaacaaatgctgggataaacagggaacattacttttcctccatatcaaaatcacaatctcctattccccaacccctctgcaaatgtgaacccctgtggagccaaggctggttacaccaccaggaccagatgtagccttgtccctccttgagaccatcaggcacaggtgaagcctgcacagaagagcctctgctggggctgaagatcttgctccagcctgaccctcactgggagacctgccccttcacagggcagccagcccactgcatgggtccatgctctaatctcccacttccttctgtcctcaggaagaggttggaaagggacatgttcatgatctttgctaagagcagacctttcagagagtttgtgaagggtcagtcatatggccctttcattcctctgcagccccttcccccaccatgcacacagcagcctgaggaggaggccaaagtgtaccttcgggagaagacagagaaaatttcaggtg

SEQ ID NO: 709890 - DNA, 1035 bp, Homo sapiens
tgacgacatgggagtggtagtgatgatcgtggctgttgggattgtttggcccctttcaggtatctgtgatggagatgcagccaatgaccttaccctgaaggatggctcagtggtgggtggggctgaggaccctgctccctttctggacagctggcaggtgcccagctccctgacctcagtgggccagacccgcttccgcccagacagctgcgccacaactgactgctcgccctgccttcgcatggtgtccaaccgcaccttcagtgcctgccaccgctttgtatgtgccaactgggtccagcactggggacacctcctgggctggctggggatggcagcacctacctgcagaggctcattgttccttttgggcagggaggggrggagctgggcactgggatatgtgccatccgagtaaccagcactgcctgatgcatatgtccaggtgcctccggagtcattctgtgagctgtggatccgggacaccaagtacgtgcagcagccctgcgtggccctgactgtgtacgtggccatgtgccacaaatttcatgtgtgcatcgagtggcggcgctctgactactgccgtgagtttgcggggcagggggaccctccattgtgactattgttcccatcccctgttaaagtgggaaaaggctcccggccccaagttcatgtatgctttcccagctttaatcattcatggatttatgtacattagtaaatttataaatatttcatatgtttaatttatatttaatttttatattatataaaagtacattttatactaatgaacacatttattatgattcatatgaacatattaacacatagtaattgtattgttattttagtatttgctttctttgcgtctcttctctgtaagtggagactgtaaccatcgcccccgcccagggtggttttgaggatgtgggggaatgtgttccgagtgctcacatagacctgccccacggacaccgtccagcacaccttaattccctctgcttcctttttgctcacgtttctcttcttcca

SEQ ID NO: 709891 - DNA, 2129 bp, Homo sapiens
tgtgttttgtgtgaatttagatcagagactcataagccactgcagctggttggcccttaaagaggcagcccaacccctcattcaacagaggaagaaactgaggcccagagaggtgatattcacgcccaaggtcacccagtcagtgggcaggggagcaagggtttgactccacctctggagcctagactctgcacttccctgcttctctccctgtgagggctgtttgtgccctaaaccgccaggtcctggaaggcctcttgtgtgacgacagtgctttaaggcaggatggtgcagtgtttaagagcacaggctgcagagaccgacctcctggattcaaatccagggattgacattagctgtgccatcgtgggcacattttcaaatctctctgcctcagtttctcatagataaaatgggtatgataatagcacttaccacccagggttgctggaaagattaaattgacaaatccttgggctgggagcagcctcttttgccaacacctatgtctcactgcacagttgatactgcccctctgctccctgcctgyagtcaaatcagcttgtggtctgttggtgggttatcagtgaggaggctggagaagcctgggctggctgcaagatctctctctgtcctggggtttctttcattggtgatgaaacagccaatccaatggttggctccatggaggtaccccaggaggcagggaggtaggtggctgcctgcctgatgccactcagaggaccagcaaggacttccacgtccctgtgcacaggagtgccctaggcacagggaggacctcagccaccacctcctccctgacgctggttcagtgtcaggcagggttggtgaagctgtgatctgcccggagaagaagaggggaaggtacagggagacacctaagcagccccttccctctctcctagggctggagcgagggcccatcttggcctctgtgggcctctgagggttccttctgccctgctcctctctggacaaacagcagcagaagaggtgagttcccagggatactgctgtttctcagctcatgcatggggtctaataagccctgggtccccatctgatatgatatcctcccccacccctgcgcaggcaatggaggacacagctctggcctgaggcttggtggcagatggggccaccatggacctgaccaggtactcccagagagaaagaagtggcacagagtgggagggacgggggtggtggggagacctccagacacacaatgggtatcagtttacttgtctgaatgctgtctgataaaccaccatcctcttcaacatctcctgtggctgccagaggaaaaaaaaaaaagttccacattggatgttaccaataggtcttggctgccccctggtgccaggcttcgggcctgccagtctggggctgccgtgccaatgtccctccccgagcagtctggcttacgttaaaggcctgctcaatgcccaaagatgctacccagttgttgtcaagcagacaccaccccttgatattagccagagaacatgacatggatgcatccgcaggctgtcccaggagcaaaaactttgctctctggggagctgacgggacagttaaggcccaaaataaatatctcagctgtcctgccctgacatttggatagagtttccttgaaagggaagttaaaattctgacatgactgtcttctcactgtgcatgggaggccagccagtggtcggcacctctgggaggtgcacacgaatcccagctcccttagccgtcagtaactgagactggcggacatttctcacttccccaggaccacacctcagacttccagtcacagtgagaggtgagaagtaagttggagaaagggagtgaacctgctctggccagtttcccatctgagggtgtttcatgccaggccacaacaggccttagggcaggggccagggcacctggaatctctgtaggttttggcaagatggcaacgagggtaacagcgtgggctttggagtatgaaaggcatgagggtaagtattaagtccaggctctgcctggggaacctggtgcccctctggtaacctctctaaacctccctttcctcgagtgttaaacaggatgaccacaggaaccatctcaca

SEQ ID NO: 709892 - DNA, 3368 bp, Homo sapiens
ctctaagtgcgacaatatctccacaattagttggtggaggaattagcagatttttttaaaggaggccacttcctaattagtttatatgactcagagcatcgccttctaactcccttctctagatgtctcatagactgaccaatgatttctcaataatgtatttacactactttctctatggacagttaatcacaagctcattgtaaataggtcattgtgactccaaccttcttccaggtatgtttctagttcagagtatgggacagcatacctgggagtacctgacttgtggaaatctttggaattctttcgaggccacaaatgatgtgaagacttttcatgccttgggaaaagccaacgcacttggagagacaggatgctgaaatgggaagtgtgcattcaagatgagactcataatttgtaatggggcgatgtctacacatgaaccaggttctgttgttcatattttttggaatcttcagctcccaatctttgcagggcttatggtgaggaccaccccagtctgaaactagaaattgtgggtagcccagaactacatttacacagtacctttacaactacctctttattgagatttcttggttctgctaggctaagccccagagatctggggcaatgaggtacaattctcttcctgtactagaaataagagatacagacagagctactcagtgggaaaaaaagaaagtttgttaatttaaaaaagaaagcagactcattaattttggctgattattttagtgacattgtttctatgaattcgttttttcagtggtgaaaattgattttctatgaaccatccatacccagatcacaaaagaaattgggcaagttgattttctggagttagaaaaaaaatgaagctttgtaaatgcaaagctgaagatgccatttagaggtcaagccagtaaccttggctgcattagcaccatgctctaaaccaactgagttgacggggatatttcaaagaaataggaaattgaattaatgggtacattccattctttagtaccaataaaagcctgtgtaagttgaaatagaagggattctagcattgtcactaccaatagtgtgatattaggcatacaccccaatatttctggtttttttttttttttttttgagacagagcctcactctgtcgcccaggctggagtgcagtggcacgatctcggctcactgcaagctccgcctcccaggttcacgtcattctcctgcctcagcctcctgagtagctgggactacaggcgtctgccaccatgcccggctaatctttttgtatttttagtagagaaggggtttcaccgtgttagccaggatggtctcaaactcctgaccttgtgatccgcctgcctcagcctcccaaagtgctgggattacaggcgtgagccaccacgcccggcctctggctctatttcaatgtcagtaatatattgatattattaattagcctctgctgagatgtagggaggcagagaagagagaaattgcgggggcgggggggaaaggaaattctaaaatataaatcataaatctttagaagaaaatcattatgcaaattccttcgccatcaccattgttttaactgttatcacctgcgattcacccaactggcagactttctgtaacctttttacaaaactgagcattttcccaaattcctgaaactcacaggaataaaaacaaattggttaacaaatttattacttaaaaatattgaaaggaaaattgcacaaaaagatggtttgagtttgttttcttcttcagttgtgttgcaaatagttcccccaatgaaaccatggaatttcctccagtctgttccccattacctctgtgggaaaattgtgaaaaatcaatctgttttctgcataactgtatacatcccattattygaggaatgtcaaaagcaaaccccaatgactgacaatatcaatcttttccctctattttccaagtttaatttcagcagtagttacaaagcagaaaggaaagtgcaggctgaatatcattataccccaggcaattgcagattttaagaagaatttatataaaacaggagggtgtattctctttatagctgattatatctttgaccttgagagtcacataagcttcctatgactatgagatttttcaaatgtcagcgaagaatggggcatggggcaggcagaacacaatgcctttcctctagttgacagtgaaaatgtagataatgccatgccaaggttaaaatttttgaaagaaaaaaataaaaagattctagagaaatgtaatgattggtaacatttgatgtaatcctataaaagagttagggctcagggatttattatgtcttctgtcttaaacatttattgccgcaaaggagctttggggtgagattttcttttttttttttaagacaagcttgtcatgaaagcctaattttgctaattttatataacttttttcaaaatattttatttataaagattttattagatggttttatatttttgtaagaaaatataaatactgggaacttcatggtgtttgggaagcaagagacgtaaaagaaagaaaaaaattcaatatagtttcactcggaggatatccaccacatgacttttttttttccttgaagttaatgttttcctctaataattttgttttctcactatctctcatctcattcttccagggaaacaagagagaaaacctctggccttagctgcctcttcacaaaatgaaccaaagccttttgaggcgattactatttttcaaaccactctggaatccttacctatgttcttatattctggtcatgaaggaagatggctacaacatttatagtagagtaacaaaattgggcatttcaattttcgagccagagggtctccatttagtcatggtgctgctttctatgatgtatatccaaaccaattactttgagattcttacaggataatgtatattcaattttcctcaaagtgtacatcattccacattattaaactatgagaagcctaaatagctctgaactaggtgtttctatgcctaagtgtgcttccagatcatccataatctccttatgcacttagacaagctattgaacctctctgataccatatttccctatctatataagggagatgatcatcctgctttccaaaacgtatcactgtgagcactaaaagagataatttgttcgtaaaacttagtacttgagcacatggtaagtattcaataaatgctagatgaaaatatacagttagaatataagtttatagttattttcatctgacatttattgaatggtctgggaggatcccttggcttccttctgttgacactctaaattccaatgtctg

SEQ ID NO: 709893 - DNA, 1488 bp, Homo sapiens
tgcactaaggtttaatgtaggcttaaatcactaatttaagtaaaaagaaatgagccattttaatgaaattgctggaayagtatacagtcatttactcctaaaatttagcaaacccagaatgaatgcttatatttcagtaatctgagtgtttgttccaactactaattatttaaatactactgattatttttaatagtcttcattttttagagcagttttaggtccacaacaaaactgaaggtaagtataaagagtctccatttgccccttgcccccatgtaggcatagcctaccctattatcaataacctccatcagagtggaacatttgtaacaactgatgagcagatgtactaatacactgatgcattattaacacccaaattccacagtttacattataattcactttgtgtcatacattctctggatatggaaaaatgtataacaacatgtatccaccattattatactattatattataaaccagcatagtcctcactgccctaaatatcttccacactccacctgtttacctggatatgcctgctcaccccttgcaacgactgacctttttactgtctgtatagttttgccttttccagaatgttatctagttggaatcatatagtatgtagcctttcaccttagattctttcatttaataatatgtgcttaaatgttttccatgtattttcatgacttgatacttcatttattttcagtattgaattatattccatcgtctcgatgtaccacagtttatttatccaccttcctaccgagagacaccttagttgcttttaagttttggcaattatgaataaagctgctatgaacatcagagtataggtttttatatggatataagtttccaacttatttgccttaataccaaggagtgcagttgttggttcataggacaagagtatatttagtcttgcaggaaactgccaaactgtcttccaaagtggtggtaccatttttgccttcccactagaaacaaatgagagcttccattggtccaaatcctcactagcatttggtattgttagtacttcagatttttatcattctaatagatgtacagagctattaattattctttttttaaaagaaacacaaaacaaaagaagtcctgctgtagcaaggacttgaaataattttgccagaattctttcttagcagttggttgttttcatcatgaaggcaaaaagtattgataatataatgaaactttatttcttgccacctaggagggaagataacagaccatacagttctttttcttggtgttctggtttttttttttttttttaacctttcttatttaacattttttatcaggagtatggataaaaataaagaaaataatgataaaacgtgcaattgactcaacacacactgttcggttttctctgtctttaggccacacccatcacatttgctcttacaccgctgtgaaaccgcttttatcaagatcaccaa

SEQ ID NO: 709894 - DNA, 577 bp, Homo sapiens
aagagaaaaagagtttgggtctttgcctcttgtccaatagagtttccagggaaaaaaagaaaccttcagcagaaagaacccagatatggacttccagatgcccaggaacttggcaagaatgtccaaagattactaggaatagaagtgtaaatatctctaccataggaaatataggaaacacaacagtatctcatgagaaaaagtccctgtttaagacccaaagaatttgaagccacccaaccaagtctcatccacctgccatagctaygtgaaggtggcaggtcaggggagataagtcaattttgtctcttttccagttcagcttcccatatggtgtcagcactgggagacagaatagaaatgaacatcagcactgggagacagaatagaaatgaacactcagtcaaaactgggatttggattattacacagggctggacacttcctgaagtgtccagccttcctgaagtttcacttccagagtttcctgaagtgaaactctgtttgcaatttaaggtaattatagaactgtctattactaaacagtgagcaggaaagttttggcctgccagttttc

SEQ ID NO: 709895 - DNA, 577 bp, Homo sapiens
aagagaaaaagagtttgggtctttgcctcttgtccaatagagtttccagggaaaaaaagaaaccttcagcagaaagaacccagatatggacttccagatgcccaggaacttggcaagaatgtccaaagattactaggaatagaagtgtaaatatctctaccataggaaatataggaaacacaacagtatctcatgagaaaaagtccctgtttaagacccaaagaatttgaagccacccaaccaagtctcatccacctgccatagctatgtgaaggtggcaggtyaggggagataagtcaattttgtctcttttccagttcagcttcccatatggtgtcagcactgggagacagaatagaaatgaacatcagcactgggagacagaatagaaatgaacactcagtcaaaactgggatttggattattacacagggctggacacttcctgaagtgtccagccttcctgaagtttcacttccagagtttcctgaagtgaaactctgtttgcaatttaaggtaattatagaactgtctattactaaacagtgagcaggaaagttttggcctgccagttttc

SEQ ID NO: 709896 - DNA, 577 bp, Homo sapiens
aagagaaaaagagtttgggtctttgcctcttgtccaatagagtttccagggaaaaaaagaaaccttcagcagaaagaacccagatatggacttccagatgcccaggaacttggcaagaatgtccaaagattactaggaatagaagtgtaaatatctctaccataggaaatataggaaacacaacagtatctcatgagaaaaagtccctgtttaagacccaaagaatttgaagccacccaaccaagtctcatccacctgccatagctatgtgaaggtggcaggtcaggggagataagtcaattttgtctcttttccagttcagcttcccatatggtgtcagcactgggagacagaatagaaatgaacatcagcactgggagacagaatagaaatgaacactcagtcaaaactgggatttggattattacacagggctggacacttcctgaagtgtccagycttcctgaagtttcacttccagagtttcctgaagtgaaactctgtttgcaatttaaggtaattatagaactgtctattactaaacagtgagcaggaaagttttggcctgccagttttc

SEQ ID NO: 709897 - DNA, 1539 bp, Homo sapiens
gaaacagaataaggtggcacacaatgggggtggcaggaagggaggggcggcgggcaggtctccgcaacaggtgcaggcaacatggccacccctttcccacacgtatcagggagtctcaagtggccatgtgtgctcagaaaatgaaatcgaaatgcagatcaggtgtctgccaattagaagttggaagcgaaagagcaacaaggggttgtgaggaaggcaggggctcagggagaggggttgtttgtgtccctctatctttgttagccccatatccaaagctcgcatgtgaaatcctatctgtgttattttgcctccaataatcgtgctccagtgaggttccgagatggtatctggatgatgaacacagagagagcttccattgttcctcttctcctttgtgcagaggaagccgttggctggtaagtgtcttcaggtgggcctggaaagttcccagggaggcagatactgtagggaaccaggcatggggcttccccacaactggccgtcttctgtgccagcacctctgccctctacctcatatatcattcatatgtaatggactgatagtgcctgtcatatccttaaatctgacctgaaattgtgatatttgaggcaatttgagatcagacaagtagaggacatgtttgtggttaaggaattattttcaggggtctgtcaaagtatttccatatgaggctaatgccatttttctaagaagcacatgcaagagacacaataaatattatttcgtttcctttggtacattaaaagtaaaagattctgattgtggaaagaaagcattggcagggagatttttgcaagagcaagtaaaatgcactgttaactaagaaagtgatttttttggggggtggaagggataattttgggggtcctatttttcagacttgaggtttgtgtggagatcgctaagtaatttatgttttagttaattttcatttcaattttctgcataatggggagaaggaatatattccagtgattccctctccaaacttgctcgtttgatccctgcattatacctcttgcttcagccacttctaacttgatatattcattacatgtaagagctttcacaaagctttggcatctgctactctttatgtggggtyctttttttttttttttttttccttttcctctatttgatgacctctttctcatcctccaagactgggacctaatgtcccttctcggtcaaacgttctccaaccccctcaggcataatataagcccccttcctctttgttgccctgagctttctgtgtgcattaaggcatggcaattatttgttaatatggctgtctcttccctgggtgatgagtctgtctggagctggggactttcctccttctttaattttctcactgtctgatgtggtgctccataaatactgattgatgattctagaaatgaatggggctttcagaggttagagtgagcttgactgaaagatgggattctcaatcctctttaatgatttgccatggatgagcactagagcccagaattaggaaggca

SEQ ID NO: 709898 - DNA, 841 bp, Homo sapiens
tatttttctacatttcaccttcacctctgagaaaccgccagaaaaatctgtagaactgtagtttccttggttgttaatgagcaggaacttggacactctccttatcacactgcattttgatagtgcctttaatggtggtggcaagttaaagaatagatgggtagggaggataagaaggccccaacttgacagtgttattcaaggcagagaaatctaatgagtgacaataggagggcacaggggcaaattcttgccctagtataaaaccacttcacaaacacagttgaagcgtgtccaacttagcactccatttttctcttatttgagtcatttcatttttatagtaaaacagagatgggggactgaagacaaaggaaaatgaacaggaggaaatagcatcaaagttttcagtatgtttgtacattgctctctttgaatcccctcctaacaactggatagtttgttaaaccatgatttccaaaattaattgtgtacacaacacctggggatcttattaaaatgtatattttaattctgtawgtctggattggggcctgagattctgcattccgagtaagctcccaagtgctgctgctgctgctggcctggggacaatcagtcaaatagcaaagctgtaaaagactttaacacatgagagtctgaatcctatctaatgttaaacaatgcaagtaaattcatctcccccaggttgaaaataaaagaacaaaactcataggcagaataaatgtcaaatcaaggcacagttaacaggtatactctcaccttttattcacaattaatttaatcttaataaaaatttcaggagctagagaacattatc

SEQ ID NO: 709899 - DNA, 675 bp, Homo sapiens
gattcctaaagacgtcattggtgttgagaagtggaagtgacaaggatccatccctgtgactggggatgcagggtgagtcttaagtgtcccattagctattttctccttggtttccatgtcragctacagtgtagagctgttgggtggcaaaaggccggtttcatttccaaggaagcacattcgtattagtgccatttttttttggcggggtgggtggcgaggtggtaatttatctcaaaccacttggaagtttactctttaagtttggaagtgggcacttctgacattgttcttgagccattcacttgaccatgtcaaataggcagttgggcacgtgtgtctggggctcagaagggaggcctgagttgtagttacagattcaagtgaggaagagaagcaacaagaataagtcccagtttctggcttgcaaaagtggggctgtggtggccccactggttgaggtgggggccctgccagcagcacaggcttgacactgcccctcagcagtatgaatgcaaaggttgcacaatactttttattttctgtcctctgctcatgaaacgatttgtgatccctctttcttctctctacctagttacataaatacattttcctgattgtccaggagagaaagtcagccacaatttatttgcttatcctgaaaatgtgaagtaa

SEQ ID NO: 709900 - DNA, 675 bp, Homo sapiens
gattcctaaagacgtcattggtgttgagaagtggaagtgacaaggatccatccctgtgactggggatgcagggtgagtcttaagtgtcccattagctattttctccttggtttccatgtcaagctacagtgtagagctgttgggtggcaaaaggcyggtttcatttccaaggaagcacattcgtattagtgccatttttttttggcggggtgggtggcgaggtggtaatttatctcaaaccacttggaagtttactctttaagtttggaagtgggcacttctgacattgttcttgagccattcacttgaccatgtcaaataggcagttgggcacgtgtgtctggggctcagaagggaggcctgagttgtagttacagattcaagtgaggaagagaagcaacaagaataagtcccagtttctggcttgcaaaagtggggctgtggtggccccactggttgaggtgggggccctgccagcagcacaggcttgacactgcccctcagcagtatgaatgcaaaggttgcacaatactttttattttctgtcctctgctcatgaaacgatttgtgatccctctttcttctctctacctagttacataaatacattttcctgattgtccaggagagaaagtcagccacaatttatttgcttatcctgaaaatgtgaagtaa

SEQ ID NO: 709901 - DNA, 675 bp, Homo sapiens
gattcctaaagacgtcattggtgttgagaagtggaagtgacaaggatccatccctgtgactggggatgcagggtgagtcttaagtgtcccattagctattttctccttggtttccatgtcaagctacagtgtagagctgttgggtggcaaaaggccggtttcatttccaaggaagcacattcrtattagtgccatttttttttggcggggtgggtggcgaggtggtaatttatctcaaaccacttggaagtttactctttaagtttggaagtgggcacttctgacattgttcttgagccattcacttgaccatgtcaaataggcagttgggcacgtgtgtctggggctcagaagggaggcctgagttgtagttacagattcaagtgaggaagagaagcaacaagaataagtcccagtttctggcttgcaaaagtggggctgtggtggccccactggttgaggtgggggccctgccagcagcacaggcttgacactgcccctcagcagtatgaatgcaaaggttgcacaatactttttattttctgtcctctgctcatgaaacgatttgtgatccctctttcttctctctacctagttacataaatacattttcctgattgtccaggagagaaagtcagccacaatttatttgcttatcctgaaaatgtgaagtaa

SEQ ID NO: 709902 - DNA, 1846 bp, Homo sapiens
cttttgttagtatcattttctcatggtgaaactgtgctatttccaggggtaactttctttttctgaaacgctcagcatagtcctgaaaagtagtgaatgttggtctccggttgcacactgatgccaaagttgatgataattgtgatttctgtgactgcccccaccccagacactaaataccttctattcgggttgagatgcagaaaagctaggagaaaaatcatctataatccttttcccacaaaataactaatgcccatattttatttctgccttatggaaatggagtcatgccacaccaaataatagcatttgtacatgtcattaatgattattctgcaacctacagttaaattatgatagtatagtttattagatatgtcatgatttcttaccttcatctctgtttcttacatgtttaagtgacttctccagctatagtagtaggttcctaacctattaagaacttatgcttcgtattttaacccattgaatctacctatcctatgaggtaggcacaattattatctccatatttatagggaaactgaggaaactgaagccagaagtaggggagttgcccagatcacagcccttgagagtggcagagctgggatttgaacccagactggtgggctctggcctctaagcatttcatccctctactattctgcttctagattagccctccttccttatccaagtccaccagtattttctttctttttgattcctcgatcgttcagtggctcaaaccaagatttcaactgtagggattgagttttccttggccttgaaagcagtagatcgaatccctacagttgcccccgctgcctgggacagtggtttccctttaattgtgcttattccttcctttccactttgaagatcatttgtcttaataaggaagataggaacaaaaaaggcattgaggagcctgtgttctctttgttttgccccagtgtgttaggcaagcagcagacctctccctcctggtccttatttggagcagaactgaaaaagccattgtcatcctttgtaatttttcaaatctcagctattctgggccttcgccttccccatgctctgacagttcacgccactcttttgtctggtcccctttggcagataattggactccattaatgtttcatgtttcctttagctgtcaggatgcttgcagctcaatagagggctttatcccagcaactctttctgttcccctggtgtgtttgcttttcatcccgttgctccgcagtttccctgtgtctttcattcattcgttcattcgttcattcatttgtgaaacaagtatcggttgctcgtgtaggcgataggaggcctggggcccaggcccaggggatgcagtggtgagcagtgagtcatttctgatttaatgatccacaacatatggaccrtttccgtccaaggaagtgcaaatcctttttcgaagtagcagagtacaacttagaaagaaataattctttcatttcattaagatcagtgatgaaagaatacttttaaatttcccctaggtagaaatgagaatattctgtctcctaaaatccaatgtctgtattatatttttccactatattgtactttgcctaaattaacctttttttcttttttttctgttttttttgtttgtttgtttgtttgtttgtttgagacagagtttcgctcttgttgcccaggctggagtgcagtggcacgatcttgactcatcgcaacctccacctcccgggttcaagcgattctcctgcctcagcctcctgagcagctgggactacaagcatgcaccaccacgcccagctaattttgtacttttagtagagatggggta

SEQ ID NO: 709903 - DNA, 1846 bp, Homo sapiens
cttttgttagtatcattttctcatggtgaaactgtgctatttccaggggtaactttctttttctgaaacgctcagcatagtcctgaaaagtagtgaatgttggtctccggttgcacactgatgccaaagttgatgataattgtgatttctgtgactgcccccaccccagacactaaataccttctattcgggttgagatgcagaaaagctaggagaaaaatcatctataatccttttcccacaaaataactaatgcccatattttatttctgccttatggaaatggagtcatgccacaccaaataatagcatttgtacatgtcattaatgattattctgcaacctacagttaaattatgatagtatagtttattagatatgtcatgatttcttaccttcatctctgtttcttacatgtttaagtgacttctccagctatagtagtaggttcctaacctattaagaacttatgcttcgtattttaacccattgaatctacctatcctatgaggtaggcacaattattatctccatatttatagggaaactgaggaaactgaagccagaagtaggggagttgcccagatcacagcccttgagagtggcagagctgggatttgaacccagactggtgggctctggcctctaagcatttcatccctctactattctgcttctagattagccctccttccttatccaagtccaccagtattttctttctttttgattcctcgatcgttcagtggctcaaaccaagatttcaactgtagggattgagttttccttggccttgaaagcagtagatcgaatccctacagttgcccccgctgcctgggacagtggtttccctttaattgtgcttattccttcctttccactttgaagatcatttgtcttaataaggaagataggaacaaaaaaggcattgaggagcctgtgttctctttgttttgccccagtgtgttaggcaagcagcagacctctccctcctggtccttatttggagcagaactgaaaaagccattgtcatcctttgtaatttttcaaatctcagctattctgggccttcgccttccccatgctctgacagttcacgccactcttttgtctggtcccctttggcagataattggactccattaatgtttcatgtttcctttagctgtcaggatgcttgcagctcaatagagggctttatcccagcaactctttctgttcccctggtgtgtttgcttttcatcccgttgctccgcagtttccctgtgtctttcattcattcgttcattcgttcattcatttgtgaaacaagtatcggttgctcgtgtaggcgataggaggcctggggcccaggcccaggggatgcagtggtgagcagtgagtcatttctgatttaatgatccacaacatatggaccgtttccgtccaaggaagtgcaaatcctttttcgaagtagcagagtacaacttagaaagaaataattctttcatttcattaagatcagtgatgaaagaatacttttaaatttcccctaggtagaaatgagaatattctgtctcctaaaatccaatgtctgtattatatttttccactatattgtactttgcctaaattaacctttttttcttttttttctgttttttttgtttgtttgtttgtttgtttgtttgagacagagtttcgctcttgttgcccaggctggagtgcagtggcacgatcttgactcatcgcaacctccacctcccgggttcaagcgattctcctgcctcagcctcctgagcagctgggactacaarcatgcaccaccacgcccagctaattttgtacttttagtagagatggggta

SEQ ID NO: 709904 - DNA, 1164 bp, Homo sapiens
tctgaccctttaaaatttttcctgaatctatatgggctattggcactagtaactatacatttgcttctggtaaacatggtccaaacacctccaacagaagtctgtcttctcttactgtttttcaaagtctgcaagcgatagcttgccatcattgtcataatcttaggaagatgtttcttggtaaatactagttttaaattttgcatggcaaatagctctctagactaaaaaaattttaccaaataaaagttcacacttctgtagacaccctacatacataaaaaattatttatttacagaggccacttattttatttgtactattctaataggcatacctgagttaccytagatatataaaatatagccctgtccctaaaacacttatactctaattggagaaataagataaaaattagaggaagtccattattatatggctactttatgataaaataagtacaatagggcaatgattttcaaattaatttttttgtagaatttgttccacaaagtatctcttacttgggagcccatcaggtaaaaagggtaacagtgaagttgctctgttaaggaggaaggcactgggagttatggaagtaacagttctgaagaagacttgcagaccactgctgaacctttaaggatggttgggataggtagagaggtgtgaggaggaggtgcagaagagtggcccacctgaattaagacagcaaatgggtataaattaagaagacagacctgcctggagtgaagcattcatgacagggattatgagagaccaagtatgttgcgcaggagtagcgggtgagaatagcatgtgtagagattatgaatgcctttaactgcttaattggattggtttcaacaggtccttgttttttcacttctgggcctaattacatcaggattgctgagagtctaatctagagaaaagtttgagtaattgtcagaaaaaatttactccataacattttctttcaaaggagaggtcctagctagcaattagacaagagagaaataaaggggatccaaattggaaaggaagaaatcaaattatccttgtttgtaaatgatataatcttacatttggaaaaacctaaagactaccccaaaaaagctattagaactgacaaatttagtaacattgcaggatgcaaaatc

SEQ ID NO: 709905 - DNA, 1164 bp, Homo sapiens
tctgaccctttaaaatttttcctgaatctatatgggctattggcactagtaactatacatttgcttctggtaaacatggtccaaacacctccaacagaagtctgtcttctcttactgtttttcaaagtctgcaagcgatagcttgccatcattgtcataatcttaggaagatgtttcttggtaaatactagttttaaattttgcatggcaaatagctctctagactaaaaaaattttaccaaataaaagttcacacttctgtagacaccctacatacataaaaaattatttatttacagaggccacttattttatttgtactattctaataggcatacctgagttaccctagatatataaaatatagccctgtccctaaaacacttatactctaattggagaaataagataaaaattagaggaagtccattattatatggctmctttatgataaaataagtacaatagggcaatgattttcaaattaatttttttgtagaatttgttccacaaagtatctcttacttgggagcccatcaggtaaaaagggtaacagtgaagttgctctgttaaggaggaaggcactgggagttatggaagtaacagttctgaagaagacttgcagaccactgctgaacctttaaggatggttgggataggtagagaggtgtgaggaggaggtgcagaagagtggcccacctgaattaagacagcaaatgggtataaattaagaagacagacctgcctggagtgaagcattcatgacagggattatgagagaccaagtatgttgcgcaggagtagcgggtgagaatagcatgtgtagagattatgaatgcctttaactgcttaattggattggtttcaacaggtccttgttttttcacttctgggcctaattacatcaggattgctgagagtctaatctagagaaaagtttgagtaattgtcagaaaaaatttactccataacattttctttcaaaggagaggtcctagctagcaattagacaagagagaaataaaggggatccaaattggaaaggaagaaatcaaattatccttgtttgtaaatgatataatcttacatttggaaaaacctaaagactaccccaaaaaagctattagaactgacaaatttagtaacattgcaggatgcaaaatc

SEQ ID NO: 709906 - DNA, 2821 bp, Homo sapiens
tgaaagtagatgccagaatatcatgttactaccacagattgaaatgtctaataatttgattttgtttcttttaaaataaataattattgttgcaggaagtcagggaccccaaacggagggaccggttgaagccatggcagaacataaattgtgaagatttcatggacgctaattagttccccaaattaatacttttataatttcttatgcctgtctttactgcaatctctgaacataaactgtgaagatttcatggacacttatcacttccccaatcaatattcttgtgatttcttacgcctgtctttactttaatctcttaatcctgtcatcttcgtaagctgaggatgtatgtcacctcaggaccctgtaatgattgcgttaactgcacaaattgtttaaacaataggaaatctgggcaccttgaaaaaagaacaggataacagcaatgttcaaggaacaagggagataaccattaggtctggtagcctgagagccaggcggaacagagccatctttctcttctttcaagagcaaataggagaaatattgctgaagtctttttctcagcaaggaacatccctgagaaagagagtgcattcttagtgggaggtctctaaaatggccgctctaggaatgtctgtcttttacggttgataagatgttatcaatgacaaagcgtgcctgaaacttcattagcaattttaatttcgccccgggcctgtgatctcgccccacctccatttgccttgtcatattttattaccttgtgaagcatgtgatctctgtgacccacaccmtatttgtacactccctccccttttgaaaatcactagtaaaaacctgctggttttgtggcttagggggcatcacagaacctgccgacatgtgatgtctcccccggacacccagctttaaaaatttatctctttgtactctttccctttgtttctcagaccggccgacgcttacggaaaatagaaaaggactcatgttgaattatcaggggtgggttcccctgataaatgatagctctgaggacagactgtaggttgaataagactttgcttatttacaaaggttttcttagcttacacatgctccctctctcactctttctaaagcatactgtcacagaggctcctggctcaagtctatcttggactgataatgtcagcatacgccagaagacaactccatttttaagacacctaattattggcgattaaagctttcctgtaatttgtaggatcattccaaaatgcattccactgaacaatgcattctgagactcgtctattttccttctctgtctcacactatgggcaaggtaaactgaaagaatcagacttccaggaggtgttaaggctgtaggcgaatgaccaggcatcagtctcactacctatattctacaaatagcatgcatttcaaagtcatcccattcttggaacacagtagagtatgcagttttaatgtgtgtttctcactcttctcaatagcagatatggcagggcatatagtggaaggtgataagtttaagagttgggagacttgggttctactgtttgtatttactactggccaacacacctaacttctctatgacttagcttcattatctgaaaaaaggattagactagatccctggttctagactctggttgtaccttggaatcacctgggatgcgttactaactggtgatgccttgggtgcaccctaaaaatctctgggcagcttggacatcagaaaggctataaagctttgcatgtgattcagtcaaggttacagtcaaggttaaggaccattgagctgcttgatcaccaaaatacctttattctaaattccaccttacatcacagaatatttcgctgctggctcagtcctggttccccaacactctgagaaaagtgcggacaaaaatgtgtcagatcttcatgcataggggtggcttggaaatcctcaggtaggactaggcagaaaaacatcccttctatctaagcagataagccacagatgaaatggtatctgaccctttgtttcattaacatgccatacagggttcaacataatcttcagaagcctgtcactttttatttgatttggccattaagagagtctcttttacctccacttgctctaattgtaatggtgaaggtttgcgctgctgccaaatggccttgtaatgttattagctgctgcttctcaatctctgcctgctggaaatctcagtttttcccggtacaacttgtgtgtggggtggagaggctgcatccccagaaagtgcacacttgaccctggagaccagggtgaggattggcaggaagaagtgtggaaggctttgcaaccattctccacattgtagactgggtggcttgcaaagtgtcagcttggagaggctccccctcccccagatctcctttcctgaatgtttcttgttagagtgggccacaagagatgcttacatgtgagattcagaggaggcagggaagcggcagccattctgtagctcacacctgttttatctgtggctcatgttgctgggtggggcagtagccaagtcacaactgctctaccttccctgaattttccttcagcttctgtgactcttgggccaggtgcgtgtgtatgtctgtgatgatgggagccggcatatcctgtaggacaactatagcacccagagaggcagcgataactgacctgagttccggtgggtcttcatgggttctgtgtgtgcctgtgggtcccagcccatccctgctctcccgacttcatatccatcttcctctgctgaccacctgcctcttggacttcaagctccaa

SEQ ID NO: 709907 - DNA, 647 bp, Homo sapiens
tacctggtgtatagataaaaaaggatgataatttatattagaaaaaagttgataattgttcaattaaagcatatattttcaatcaaaccatatgacaaataattgttcatgtcccatattttctgacaattcagagagcccacaattctttcagttttctttgatttcagtgttcaacatatggaggaaaargaaagcaattcaatatctctcacttctttcttctaaacacaaggtttattcctgatcttcttcctctactcccagaaatagtcttgcccaatatcaaccctgccaccctcaaaataagcacaccatactttaagctatgatcccatcacgatcaatgtacctgaataaggaaaatatgttctcagtcagggtctatctctgcttgatccagtcctgatcaccttcctggagtaggtaggaggcaattaaatcaatctttgggatggtgatgctgggaaccttttaagtttcccaggtgattctaccatgagaccaaagataagaactattcttctcaataataaatccctaaaatttccttccagttctaccagtttatgaactgaagtcaatttttttatccttctttttaaccagacttcttgatttctgtcattgcgggaaggagcacatcg

SEQ ID NO: 709908 - DNA, 1642 bp, Homo sapiens
gataaacttattcttgatttcttcttccttgttaatacaaatattaaacaataatatcctagatatcaaacttcactgtaacattttcaaaagaaaatgtatttggggtttacttagatatggggtgaatagcgttttaaaataattttattgctaatactcttcttcatgttttttttttttttttgagacagggtctcactctgtcactcagacttgagtgtagtggcatgatcggggcttactgtagcctcaacctcccaggctcaagtgatccttccaccwcaacctcccaagtagctgggaccacaggcctgtgccaacgcacccagctaattaactttttttttttttgagacaggttctcactatatagctcagtttggtttcaatctcctgagctcaagcaatcctcctgcctcagtcttccaatgtgctgggattataggcatagccacagcacccagccatcatgatcatttttaatgctattttgtcaggtttattctagatggctccaaaacatttaaaagctcactttagccattattttatttaatcccaaaatgtagatatcatgaaaatgagatgtggtggtttataaaagttgatctggtgtagaaccagaagtctgtttgaactaactgaaaattcaggcatttagatctaggatatattattttcaaagatgatgtttgtctaggtttatttaggcaactggatttgttgtaaatgttgtgggccttccagtgactaaggcctgaaagaccctgaattttgcgttccatagtgcagttgcactgatggtcaggggtgttgtccccaggcagggcagttgtcattccgctgctgttgcctctgggtgctcatgtgatttttcaggtgtctcatctgtgccttcttgtgagcacatgatcttgttttgagactctcaaaaggcctttcaaatactttttttcttgcaaaatcaagaacgtcattattctttctgtgagtctctcatgggtacctgctatacgccaggcacggtgctggccactaggggtgctaaccaaggcggagagggtggattttaaggaattccaactagggtgaaacgcagtacctaaacattcagttataataccatgccaagaatattatggttgagagactttgaaagtgctctggggagctggaaggaggaatatgaaattatttgattggaggagggttgtcagggaaagttgttgagaggagctgagattttactgtttttcgttttagacaccagcttctgcagcataagcccatggtaagttcgctatttggttctcatatgctgagccacgttttaaggctgtgttttatacctgggattgctgacgatatggtctggcttatgtgatcatttgcataatgcatggtgacagtgaggctaagttcttagctgctggtccaaataggcccagtgtgtgccaagagttgctgaaatggctgccctggcccaaagagggagcctagcacatgccccatgactccagggacaggctgaggctctaagctctgagaggctggtgtttgtataaatggtcaacccaggaaagtgagtacacactactgctgccagggtgtgtgtgcgtgtgtttcttagatcacaatc

SEQ ID NO: 709909 - DNA, 1642 bp, Homo sapiens
gataaacttattcttgatttcttcttccttgttaatacaaatattaaacaataatatcctagatatcaaacttcactgtaacattttcaaaagaaaatgtatttggggtttacttagatatggggtgaatagcgttttaaaataattttattgctaatactcttcttcatgttttttttttttttttgagacagggtctcactctgtcactcagacttgagtgtagtggcatgatcggggcttactgtagcctcaacctcccaggctcaagtgatccttccacctcaacctcccaagtagctgggaccacaggcctgtgccaacgcacccagctaattaaytttttttttttttgagacaggttctcactatatagctcagtttggtttcaatctcctgagctcaagcaatcctcctgcctcagtcttccaatgtgctgggattataggcatagccacagcacccagccatcatgatcatttttaatgctattttgtcaggtttattctagatggctccaaaacatttaaaagctcactttagccattattttatttaatcccaaaatgtagatatcatgaaaatgagatgtggtggtttataaaagttgatctggtgtagaaccagaagtctgtttgaactaactgaaaattcaggcatttagatctaggatatattattttcaaagatgatgtttgtctaggtttatttaggcaactggatttgttgtaaatgttgtgggccttccagtgactaaggcctgaaagaccctgaattttgcgttccatagtgcagttgcactgatggtcaggggtgttgtccccaggcagggcagttgtcattccgctgctgttgcctctgggtgctcatgtgatttttcaggtgtctcatctgtgccttcttgtgagcacatgatcttgttttgagactctcaaaaggcctttcaaatactttttttcttgcaaaatcaagaacgtcattattctttctgtgagtctctcatgggtacctgctatacgccaggcacggtgctggccactaggggtgctaaccaaggcggagagggtggattttaaggaattccaactagggtgaaacgcagtacctaaacattcagttataataccatgccaagaatattatggttgagagactttgaaagtgctctggggagctggaaggaggaatatgaaattatttgattggaggagggttgtcagggaaagttgttgagaggagctgagattttactgtttttcgttttagacaccagcttctgcagcataagcccatggtaagttcgctatttggttctcatatgctgagccacgttttaaggctgtgttttatacctgggattgctgacgatatggtctggcttatgtgatcatttgcataatgcatggtgacagtgaggctaagttcttagctgctggtccaaataggcccagtgtgtgccaagagttgctgaaatggctgccctggcccaaagagggagcctagcacatgccccatgactccagggacaggctgaggctctaagctctgagaggctggtgtttgtataaatggtcaacccaggaaagtgagtacacactactgctgccagggtgtgtgtgcgtgtgtttcttagatcacaatc

SEQ ID NO: 709910 - DNA, 663 bp, Homo sapiens
atatgacggcatttgcaaaaggataggctgttcccctaaattaccttgtatacaaaggaattttcttaggaatctttttttgttcttaattaataagactgattggttagcaatctgccttatgactaagcctgacagagcttaattgaaaagaagcttaattgcaggaaagcaatggaagaaattcattagagaagtcttgaaatctgaaaattatgggcagagcaggctacccgaatggaaattgggcaatttaagatgtcttaattagatttaaaaccacagcttagaaaaactaaattagctatatcgaatcagataaaaaaaatctgagataaaatgcatggttattattggattactcaagatagtctgtatagctttgtgctggtaattctaaaactcaatctttatgaggagtaacaacgacgacaaaaaagacaaagaagacagtgwacatgaacttttaatggtattgaatttattccaagccttatagtaaatgtttaagatgttttaataactgcccactgccaattatcttgaagaaatccaaaaatggtaagcaaatagaagcttaatttcaactttgttggcaaaaaaagatgaagaaacaaaccaaatactccaatttattactgatttgagatttagacatttgca

SEQ ID NO: 709911 - DNA, 631 bp, Homo sapiens
atataaaaaacaacacagattctatttatttctgcctgttgatttcctttctcctcctcctacccccacttcacctctattctcccgcccatctttttcttccttccccctctctctgtctctttgtctctctctccctcctgtccaacatgctttggagaccttacccaacatatataaggagttcaacttcaactacctgagccgtatagacatagagagagatgctctaggaatatcagattatttgttactcttgtgcgaaaggcataataatggctccccaaagctgtccatgacctgattcctagagccggtgaawatgttacattacatggcaaagggaaattagggttggagatggaattaagttcactaattagctgccctcaggattatccaggtggttccaaggaaatcacacaaatccttaaaaaaggaagagggaggaaaaagagagcagtagagagatatgactgtagaagaatggtcaaggagatggaatgtcactggttttatatatggaggaaaggggccatatataaagccaaggagccaaggaaggtgggaagcttctagattctggaaaacgcaaggaaacaggttctctcctagaacttccagaaaagaa

SEQ ID NO: 709912 - DNA, 639 bp, Homo sapiens
tatcgtttctgggtagattcagaaacagagctgtaaatgattctggcaggatgagcatggaagggagaagatattaacaactggaaaatggccttgttgccagaggctccatatgatggcattagaagccacatgatagaattagacttgaggttatatgcaggtctggttaagctcaaagcacccatcaactccttatgaactgattataagacagccatagaggcagctgaatgcaccttttattatctcagtcagggaagtcttcatttgaaatccagtgtgtggggagagtgataagaaatcatgcctatattcctagatgactaccatcctacaatcccacccacccatccctcagtttctatcttcagccccatcacacaggacccgctcattcgggaaagttccaacctagaacatccccattgctccagggaaagaggaaagaagaacagaagcagcaggaggaggagagagagggagggtggaaggaagtacttctgtctttgcaagtggtttaggtgttctgggtggtgccagctgagatgcagctgcttttgtctttggacatcctcccacctgggcacctgggcacctgggygccattctccatctgatgctaatcatctccaccaa

SEQ ID NO: 709913 - DNA, 1329 bp, Homo sapiens
gaataaaaattcattgtgaaatgtctcctatttatagcagtagaacaaagttctgattggtggcaaaaggttatcaatattgagccacttactttaacaaatgcacagtataaaaaaaaaaagtttgtgctaccctcgcaaaatacttccaaagttgtaattcctaggagccattttccgccacggaagcagtactgcagacaatttaccatcaagctgactcagtgcycctcaatgaaacagcacaatgtaaagtacagctcatccatgcacaggaatatgtataagtacatcaataaaaatggagcacacctactgcttgccatcttgctgccatttggcatttttcccatttgttactggttatcaaaactatgacaaactgtagatctatgtccttggcactttagtacttgggaagctataacacttcctagggaaagagccagaggaaaaaagttagcccgtctattcactgacaacaaaggcttccaacaaaaagaaattttgctccttgtagaaatatataatcactgggtaaaaaacaaagtattaaaaatgtatggggtgaaaacacaacaaaataaaccacaaaataacatcctggatgtaaatctgtgacgcttagttgacaaaaaagaatcattaaggtgcttattcaaaaaatagcaattatgtgtatcaaacaatgagtagtatcaaaccatcaataagactcagtaggtgatatcttgcctacacagaagtccaggtaaaagtataagttttatccttttacctgcaaacatacaattctttcagcacaaataatttcaagacagaagaaaggctctcaatattttgaatattctaggcctgaatgctattttccaggaatgaaattactttagactaggtaaacaactttgaagatagcaaggctacccacagtcaaatataattactttgactaccatttctaggactttgtggcataataagctttcagtagtgggctgatcctcccacttgtgataaaaataaagtatatgcattcaagtaaccatacagtaaagaaatcacttacaatatgtacttatatcaacagaattactatttaaaaccaatcaaattgtcaacatttaaaagaactacaatgaaaatttcttctaaaatttttctgtcccaatttggggatgaaaattgaaacaaggacacattaagagtaaaattaatgtggtttatatcattgtagttcttggaagctttctgaaacattaagtaatacattgctgatttccatactctttttaaccttttaaaaaattgacatataataactatacatat

SEQ ID NO: 709914 - DNA, 1442 bp, Homo sapiens
cctgttgagaaagcaagcggactcacagtttttcagtgtctcagggagcctgcagcagtgatccagttccttcaaaaggtctgtggattctcttggctttcctggtatgttcctgtggtagttcttggagcaaaagttcacaatgtgagtctccacacactgttgtgtctgtctgagcgggagctacacgctagtcctgtctcctatccaccatactaatctctcagaattctacttgtggctattttaatttaatttaatttaatttaaaattcagatcctcaaccaaactagctgcatttcaagtgccgaacctgtagctagtaactactatattggacagctaagatgtagaacatttctatcatgcagaaaagttctattggaaagacagcactgggttccagagtttaaacgacttgcccccagaccccatggcgagtaataaagtaccctaggacctaaatctcctgctttcaggtctgagtttctttccacaatatctccctggttgaaatctgggtttgtgtaaccttcaccttgatcctgattctggtttggtaaaacataacaaaaaattttctacatgatgctctttggaggcgttttactcattccctattttctttttaacccctgcctcatgtgacatggcttcaggttccttcatcatcaatatgatctcaaaatatactgtagtgtgtcaatgtcccagctaaagtgtggtgtccagaattaatgacgtagcttagatattgtttcacaagcaaacaatagagaggaacttttttcttccttgtcctaaattcttgcctaagaggacattctatcatatttttggtaaataaatttcattgagcttactgtcattacaaaaaaaattccccaaatcttcaaaatgagcgaaacagttaagaattgttcaggaaattgtagcctgaacaagatttcagtagtatacaacagactttaatgcagtacgttctgtgatagttacagtcaaagagaattagaaccctaggacctggaaaagttcttcactttcctttgctatatgatggagccaaattctttactcagttctcttcgttggaaaatgaacttgatcagattttataatgatcgtgctgctayacatatactctaatttttaattttttaagatgtttgaaatgtttaaaataattgcataggccaaacacatcatcttgatgtaataaaaattaaaataggttttttttttctttaggaggctgtcttagctcaggctaccatgtcaaaaatatcatagactcagttacttaaacaataaacattgtttcttatagttctggaggctgggaagtacaaattgaaggccgtggcaaatctagtatctggtgaggaccaactcctagcttgtggacagcaaccttcttgctgtattctcacatggcccagag

SEQ ID NO: 709915 - DNA, 590 bp, Homo sapiens
aggcatggcttaatgacagggacatcttctgggaaatgcattgctagacgatttcatcatcgtgtgaacatcatagcgtgtacttacacagacctagatggtagagcctaccacacacccaacctatatgctatagcctattgctcccatgctacaaacgtgtagagcatgttactgtactgaatactgtaggcgattgtaacacagtagtaaggatttgtgtatctaaacatatccaaacccagaaaaggtaatgcattttgtgctaggaccttatggcagctatgatgtcattagacaataggaattttccagctccattatagttttgtcggcrcactgtcataagtgtggtctgtggttgaccggaacacagctatgcagcacgtgactgtatccctcctcccatgctcacttctcttttctacctgcttctgcttccaggcaggaacttcatcatctccactgctgtgctgtgggaaaactccactgcagcttctgttcccagaatagctgttttatctagtgagttcactggctgttctgtgagagactattatttctgtgttctgtttctgtttttagtaatt

SEQ ID NO: 709916 - DNA, 818 bp, Homo sapiens
agccaatgagtttatatacaaataactcaaaacctgaataacagtggctctcaaccaaaagacaaataagaagtctgaaagggaatcaattcaagactgtttcagtagctcaattttattattcaaaactcatgccttttccttccttcaatcaaccatcatcagtatattggcttttcatcttcttgctaattgactcatggttgcaaggtggctaccagaactctaacatcatgccctcacaccactgttccagttaagtgggaaggagattatcagaagaaamatgtttttttttcatctgggaagtaaatctgcactcacagacatctccctgtgtctggttagccacaactgttccacaagaatatgcccttgtgaatctctctctgtagggcatctgcaaaccaagaaatcagggattgggtcttattcactttggattcctcagactccagcagaacaataaaacaaagttttcctctggaaacagagtttggattcagctgccacacccaacaaaaggcaactggtatacctgggatcaagaccaggtcccaaccatctctctgtaattccagccctttctttccctctcaaataagtctgcagctcagtatccctcagcaatcctggcccactctatatataactagatgatgatagtaaaataactgtttatattttacataccactttgcaaggccttttgtttaaccctaacatctaccctgaaggtaaatagtatgatccctattttacagagaggaacagaggctcaaggagggtaagtgtagttgcccgagtccacgaagctt

SEQ ID NO: 709917 - DNA, 818 bp, Homo sapiens
agccaatgagtttatatacaaataactcaaaacctgaataacagtggctctcaaccaaaagacaaataagaagtctgaaagggaatcaattcaagactgtttcagtagctcaattttattattcaaaactcatgccttttccttccttcaatcaaccatcatcagtatattggcttttcatcttcttgctaattgactcatggttgcaaggtggctaccagaactctaacatcatgccctcacaccactgttccagttaagtgggaaggagattatcagaagaaacatgtttttttttcatctgggaagtaaatctgcactcacagacatctccctgtgtctggttagccacaactgttccacaagaatatgcccttgtgaatctctctctgtagggcatctgcaaaccaagaaatcagggattgkgtcttattcactttggattcctcagactccagcagaacaataaaacaaagttttcctctggaaacagagtttggattcagctgccacacccaacaaaaggcaactggtatacctgggatcaagaccaggtcccaaccatctctctgtaattccagccctttctttccctctcaaataagtctgcagctcagtatccctcagcaatcctggcccactctatatataactagatgatgatagtaaaataactgtttatattttacataccactttgcaaggccttttgtttaaccctaacatctaccctgaaggtaaatagtatgatccctattttacagagaggaacagaggctcaaggagggtaagtgtagttgcccgagtccacgaagctt

SEQ ID NO: 709918 - DNA, 832 bp, Homo sapiens
tctggtgcgtgactgttgtctctgaaatcattccaaagtgcttactgggtttctatattccatagtgatgagcattgcaggtagaaggaacagtatctggaaaagcagagacgaaaagaagtctatagcatgctccaggaaataactcagtggatgacattaagtgggactgacacagcataaagatgaaaggaagattgcagccattttgtaatgggatttctcatactgcagcttttttaatgggattgcacatactactggttcaggatatttcccctgctttttaaaattgagatataatttacatacaataaaatgtaagtgtacaattcactgagttttgacaaatgtagacagctgcattatactaccaccatcatgccctagaatatttccatcacctcacaacctttccatgtgctcctttgtaatctattccctgccatcccttgtcccaggcagcccttgatttgctttctatcactgtagttttgccttttctgaaatgtggaataaatagactattaagtttctagcttcttccactcagtgtagggcttttgagattcatccttgtatgcgtaatgttgagtggtattccattatattgttatgccacagtttatccagtcaccaattgatggatcttccaattgttttcaatttggagctagtatgaataaaactgtwgtgaacattcaaggatgtgactttctggggatgcatgttttcaatggtctttcaagattattgaaaacatggattgacatatgttaatccatccatggatggatttaaatgattaaattttttgagtgataaactatac

SEQ ID NO: 709919 - DNA, 832 bp, Homo sapiens
tctggtgcgtgactgttgtctctgaaatcattccaaagtgcttactgggtttctatattccatagtgatgagcattgcaggtagaaggaacagtatctggaaaagcagagacgaaaagaagtctatagcatgctccaggaaataactcagtggatgacattaagtgggactgacacagcataaagatgaaaggaagattgcagccattttgtaatgggatttctcatactgcagcttttttaatgggattgcacatactactggttcaggatatttcccctgctttttaaaattgagatataatttacatacaataaaatgtaagtgtacaattcactgagttttgacaaatgtagacagctgcattatactaccaccatcatgccctagaatatttccatcacctcacaacctttccatgtgctcctttgtaatctattccctgccatcccttgtcccaggcagcccttgatttgctttctatcactgtagttttgccttttctgaaatgtggaataaatagactattaagtttctagcttcttccactcagtgtagggcttttgagattcatccttgtatgcgtaatgttgagtggtattccattatattgttatgccacagtttatccagtcaccaattgatggatcttccaattgttttcaatttggagctagtatgaataaaactgttgtgaacattcaaggatgtgactttctggggatgcatgttttcaatggtctttcaagattattgaaaacatggattgacatatgttaatccatccatggawggatttaaatgattaaattttttgagtgataaactatac

SEQ ID NO: 709920 - DNA, 1460 bp, Homo sapiens
tgctaacattttccaaaaactggacatcaattaatgctaatttatgaggaaacttctttggaagagcatagtccagactcataactactgaaaagactcattaatataaacgttaagggagttttttcaaagggaggaattaaggtaaatgcatatcattacagtgaaagctcataatttattgaaaattcagtggaaaggaaactttatgctgtgtgtttccaaagtaatgttttggcacattaatcaaggaaataaaataaggatgaggatgtgatctcaagagagatggtcagtaaaaattcagcttagtgatagctaacatttattaaataagtattatgtgccaggcattagaaacactatcttgtttatttttgcctaacaatgctataaagtagattttcttattatttccatgttgcagtggagaaaagagaaaatcaagcagcctatgttatttgctgtagatcacaaaactaaaaagtggtgaaattcggattcagaatcacctttcttaaccacatgtgctacgacattatactgcctttaacaactgtcagataggtatatgcacaactctaggtgggttcatgcaatgccttattcttcagmctgtctaataataaaaacaaatcattttaatccataagttctactatacatttaaatacacaaattaattatttggccaattttaagtttgaggaaattcattattcctacttttaggtcttaaacatggtaaaaaaaaaaaagtaattagtagatccttaccttttgtgaatctctctaacattttgtgaggcccagataatattcacacattggctggaaaatgaaatttctgtttcttgagatacttgatcatcttatgtaaaatctttacttaaatgaaagtggggaatgggcaagttatctttttttttaggggtaggtaagtgtgtgtgtgtttgtgcgtgtgtgtgtgcatgcatgcgcttatgggagtgtgttttggcagaggaaatacgggatgcagacaagggaaagggaaagcaagaagaatatttctcccagaatctgagactggttaacttttgtctattctatctctagtagatctatttgactttaatgtaaatgttttccctccaacctgtcatagacctgtaattggacagaggattctagcaggatgttgacactcatcatctcagtgcttgatgaaatggatccatccttctagagcagtgcttttcaaacttgaacatgcttctggatcatctggagggcctggtaaagcaaagactaccaagcctcatccccagtttccatttcagtagatctccaggggagcctgtcagtttgcatttctaggaagttcccaagtgatgatattgatggtggtctggggaccgcacctggagaaccaccgaagtggagaggcccactatcaatgaaatgtacatataggctca

SEQ ID NO: 709921 - DNA, 2813 bp, Homo sapiens
ttgagtccaggaggttgaggctgcagtgagctattaccatgccactgcactccagcctgggtgacagagcaagaccctgtctcaaaaagataaaaagagccccaaaagacaacaagaacccactgccccctaacatttgcatgattgacaagaattatcatgattgacaagaaagaagagacacagctgctctgtcacttaagagagagggagtaagatgcctgagaagaaggcctgatcaacaacttcagagggatggaaaaatgattgagagaagaccagaaaggtgaccacctcatgagcgaagatttgaaaagccacttgaagaaaaggaagaaggagaagcttcagttgataggttgattagtgacctctcattgatagactgattactggccttcctggtggaggccatgggggtcttggaagaggtcgagggggcggtgggcgtggagtggccaggaagatgggtttgattctcctggcactcatgagtatgatataagagcagtgcaagccacacagctggcctgaagcaccaggacagacatgtgggcggcagatgtcacaactggggaactgtcaaaggtggattaacagagtccccaaaatttacattcagaaacaattatcttatcattgcagtgacttgcatcaatcaaatataactaaggaaacccttgaaggtgaagaacatgcggtggcaggcattgaaaaggaggagaatgaagctgaggaggtaaaggcagaggctccaaaagggatgactttgagtgagtggaaggctgtccaacataaggactgggcggaggtagaatttcatgtccgaaaaccacgtgaaggtggaagaagttggttcttcataaaccaaagagtgaaaaggctcatgctgaagatttgattgtagaccatcatttccagaagccagcaaatgatatagtgttctgatataatgtctcagctggagattaattctggagaccttggccacccaggacagtggtggcagggtaggatgccatggacctgggcatggtggatgtcagaaccatggcagcaggatccacaaggcagttgcttctgctcttgacatgatgacccaaaggtacccccagctctggcttacctggatgcccttagacaaccctggttcctttgcagactctcctctttaaagctgttgcatgtttagtgcttacaaatgactaagaaatgttttaaaaagaagattgctattcattccattcacacctaaagactcaattttatctgttttagaaatgaacttctctcgctacacagaagtaacaaatatggtagtcagttttgtatttagaaatgtgttggtagcagaaatgttttcataattttcagagattatgcatttttcatgaatgcttctgcattgctgctttaaaatacgcatttccaaatttaaaatatgsatttccaaatttaaaatatcgctgtgaatggttgaaaaaaataagggggctggatgctgtggctcatggttgtaatcccagcactctgggagaccaaggtgggcagatcacctgaggtcgggagtttgagaccagcagagccaacatggcgaaaccccttctctaccaaaaaatacaaaaataagctgggtgtggtggtgcatgcctgtaatcccaactacttggaggctgaggcatgagaattgcttgaacccgggaggttgcagtcagccgagattgcgccactgcactccagccggggtgacagagcgagactctgtctcaaaaaaaaaaaaaataaaaaataaaaaataaaaataataaaaaagcctttcaagttaattctatattctgagcattttgtcatacataaaaatatttttctctataacatggattttagtatgagtgttatgtagttaactagctatagttctgatatttcaaatttttgtttagcatgatttgtagcttttctgcacaggcctgtatatattattcctgttctttctttctttcttctttctatttttgtttgagatggagtcttaactctttctccaggctggagtgcggtggcacgatctcggctcactgcaacctccaactccgttgttcaaatgattctcctgcctcagcctctcgagtagctgggattacagacacgcgccaccacgtccagctaatttttgtatttttagtatagacagggtttcaacatgttggccaggatggcctcgagctcctgaccttgtgatctgcctgcctcggcctcccaaagtgctgggattacaggtgtgagccactgcgcccggcctgttgctgttatttccaaaaatatataacctagattgtgaattgcaggaccaagtgactatttgtaagacttctgatgaatactacacaattgtcctctagaaagagtctgtccattttatccccacaagcagctcctcttgtttttaatatgctggtgttatttttaagcaacgtggataatttaggctataaaaccccataaagcatcaaaatgtggaaagaaatatctatcctcctccaattttattgacgagggcttagaagatctctaggaatagcattcttacatacagttacttaaggaatggagagggcactcacactcactgggtctacaattttcaattttgaaagtggggaaataatcttaactgtatttgttctctttacagcaggatgctcatgggctcccaggcgacagcgtgaagagacacaacaaacgaaatctcattgtaggagaaacattaacaaaggtgaggaatgtcctttggaaaataaaatttttgaagg

SEQ ID NO: 709922 - DNA, 2813 bp, Homo sapiens
ttgagtccaggaggttgaggctgcagtgagctattaccatgccactgcactccagcctgggtgacagagcaagaccctgtctcaaaaagataaaaagagccccaaaagacaacaagaacccactgccccctaacatttgcatgattgacaagaattatcatgattgacaagaaagaagagacacagctgctctgtcacttaagagagagggagtaagatgcctgagaagaaggcctgatcaacaacttcagagggatggaaaaatgattgagagaagaccagaaaggtgaccacctcatgagcgaagatttgaaaagccacttgaagaaaaggaagaaggagaagcttcagttgataggttgattagtgacctctcattgatagactgattactggccttcctggtggaggccatgggggtcttggaagaggtcgagggggcggtgggcgtggagtggccaggaagatgggtttgattctcctggcactcatgagtatgatataagagcagtgcaagccacacagctggcctgaagcaccaggacagacatgtgggcggcagatgtcacaactggggaactgtcaaaggtggattaacagagtccccaaaatttacattcagaaacaattatcttatcattgcagtgacttgcatcaatcaaatataactaaggaaacccttgaaggtgaagaacatgcggtggcaggcattgaaaaggaggagaatgaagctgaggaggtaaaggcagaggctccaaaagggatgactttgagtgagtggaaggctgtccaacataaggactgggcggaggtagaatttcatgtccgaaaaccacgtgaaggtggaagaagttggttcttcataaaccaaagagtgaaaaggctcatgctgaagatttgattgtagaccatcatttccagaagccagcaaatgatatagtgttctgatataatgtctcagctggagattaattctggagaccttggccacccaggacagtggtggcagggtaggatgccatggacctgggcatggtggatgtcagaaccatggcagcaggatccacaaggcagttgcttctgctcttgacatgatgacccaaaggtacccccagctctggcttacctggatgcccttagacaaccctggttcctttgcagactctcctctttaaagctgttgcatgtttagtgcttacaaatgactaagaaatgttttaaaaagaagattgctattcattccattcacacctaaagactcaattttatctgttttagaaatgaacttctctcgctacacagaagtaacaaatatggtagtcagttttgtatttagaaatgtgttggtagcagaaatgttttcataattttcagagattatgcatttttcatgaatgcttctgcattgctgctttaaaatacgcatttccaaatttaaaatatggatttccaaatttaaaatatcgctgtgaatggttgaaaaaaataagggggctggatgctgtggctcatggttgtaatcccagcactctgggagaccaaggtgggcagatcacctgaggtcgggagtttgagaccagcagagccaacatggcgaaaccccttctctaccaaaaaatacaaaaataagctgggtgtggtggtgcatgcctgtaatcccaactacttggaggctgaggcatgagaattgcttgaacccgggaggttgcagtcagccgagattgcgccactgcactccagccggggtgacagagcgagactctgtctcaaaaaaaaaaaaaataaaaaataaaaaataaaaataataaaaaagcctttcaagttaattctatattctgagcattttgtcatacataaaaatatttttctctataacatggattttagtatgagtgttatgtagttaactagctatagttctgatatttcaaatttttgtttagcatgatttgtagcttttctgcacaggcctgtatatattattcctgttctttctttctttcttctttctatttttgtttgagatggagtcttaactctttctccaggctggagtgcggtggcacgatctcggctcactgcaacctccaactccgttsttcaaatgattctcctgcctcagcctctcgagtagctgggattacagacacgcgccaccacgtccagctaatttttgtatttttagtatagacagggtttcaacatgttggccaggatggcctcgagctcctgaccttgtgatctgcctgcctcggcctcccaaagtgctgggattacaggtgtgagccactgcgcccggcctgttgctgttatttccaaaaatatataacctagattgtgaattgcaggaccaagtgactatttgtaagacttctgatgaatactacacaattgtcctctagaaagagtctgtccattttatccccacaagcagctcctcttgtttttaatatgctggtgttatttttaagcaacgtggataatttaggctataaaaccccataaagcatcaaaatgtggaaagaaatatctatcctcctccaattttattgacgagggcttagaagatctctaggaatagcattcttacatacagttacttaaggaatggagagggcactcacactcactgggtctacaattttcaattttgaaagtggggaaataatcttaactgtatttgttctctttacagcaggatgctcatgggctcccaggcgacagcgtgaagagacacaacaaacgaaatctcattgtaggagaaacattaacaaaggtgaggaatgtcctttggaaaataaaatttttgaagg

SEQ ID NO: 709923 - DNA, 839 bp, Homo sapiens
ggtgaaaccctatctctattaaaaatacaaaaaaattaggcaggtgtggtagcctgcacccccgtaatcccagctactgagtaggctgaggcaggagaatcgcttgaactgggagggagaggttgtggtaagtggagaccaygccactgcactccagcctgggcgacagagcaaggctctgtctcaaaaaaaaattgtaaatttaaaaaaaagttgggtggtgtgtccttgcggattgatggcagaaaacagaatctggagagcagcaaagctgagttctagatttttcatttggataaatgtgggaagaattaggtcagtcttattttacttagttttaaaagaatgagtgaggagggcaatgcagttaggaaagaaaacatgaaaggaatgccttgtcctgctcggctggaccctcaagacacccacagtacttttcatgcttgaagattatgatgaaggaggtgagtaataattatagctaccatttattgagtactactgtgtaccagctgctttacatacattacatgtaatcctctcagggcctctgcagtgtagccaatattatccacgtgtttcagatgggaaagctaacactcagagtggtgaagcggcatccctcacctcacacagctagtaattcatgctgactccagacctctttcaggtggatttctgggtaaggaatctggtcagctgaaataacaggtgcccatttccttctaagtctcagggagtgtacaataatcttcctcgtcttgccaccatgaatgttgaatgagaagagtgactagagagatttcatttggtaggggcatatggcagggggaacttgg

SEQ ID NO: 709924 - DNA, 1820 bp, Homo sapiens
ataaatgaagtctccaccaaccagaattgataaaaaacatttagtatagctgttttttttctttttttacataaaaataagtaaaatgctacagatgaagtctgaaatattctgtggcctttgtggtcagtcctgcatccttcctcccatccttagaggggagcgctactggaaattatttacaccctttctgtaattttttatatgtcatatacatacatatatacatctgtgaacaatatatagcatcattttgcacaataatcatttttaatatcccttccccctactggcaggcattcaggttcttttagactttgctcctcaaataatgccgcaggaaatttcttgtgccgatatctttgtgcacatgcgtgagtgtatctgtaggataattttgtagaggcgggcttactggatcaaaagatatgtgcatttgatagtttcaaagaaagggcaccaatttttacttccaccaataatgcatggaacacctatttcttcacatcttctttcacatacaaatttatcaaaatttttaatttttattcatctaatacataaaaaatacctcttatactttgaatttatgtattggaaaccatgtattggtaatgtattagaaatataatagaattatttcttttattataagtgagggtaagcaccttctcatgtgtttgaaagccaggcaggccgggggtggtggctcatgcctgtaatcccagcactttgggaggccgaggtgggtggatcatctgaggtcgggagttcgagaccagcctgaccaacatggagaaaccccgtctctactaaaaatacaagattagccaggcgtcgtggcacatgtctgtaatcccagctacttgggaggctgaggcaggagaatcacttgaacctgggaggcggaggttgcagtgagctgagatcatgccattgcactccagcctgggcaacaagagcaaaaactctgtctcgaaaaaaaaaaaagaaagccagatatatttcttcttctgcggttttttaaggtcttttgcccatttttctttggggctgattatcttattcactcttaagtgtactttgcatgtgaagaaaattaactgtcatatgtgttgcaaatattttcccagttaattacttatgactcagctatttttgccacatggaaatttttaatttttatgaagtcaattttatcaatactaatgtttttaagtggtgatacatttactgttttcttctaattttcttcatttctcccctacttcccatttctaactcaaatcatacctcagattcctgggtctagggtgagatcaacagctggaagccaccacagagttaatccaggtgaaccctggaggttcaacataaccccgaaggctccaggggcccttgacttaactttgccctactgtatatttatagggtatcctaaatctgccctaaccactgacacttcctggagttctttcagtctgaagaaacttctggttccaatttggtctccttaaagacctctgccccaggcaggtctgcatccttggaggcaccatggcagggctggcacagggaagctgggaccttagtgacctactgctgctttttcattcttttcactccctgtggagccgggtttcttactggcagagaagggaaagggagaaaacaagaatgcactcatgctgtcggcctggacttggagattatcagtgtggactcatgcrttccaatacacaaagatggagagagaggtacaggtgtaaaagtgtgtgtaatattttgaatctacttttgtgtgttcttaatttttatta

SEQ ID NO: 709925 - DNA, 2764 bp, Homo sapiens
ctgtcccagtataaaacacacaaggataagaatatgatgctgtctactataactgtgattcagttcttccaaatcctcagatgatgcagaattccagggtaagctgacagaggccccagtaaaatcaacagtgcaagaatatggccagggacaatggctcctgcctgttaaatccagctattcaagaggctgagggaggaggatcgctcgaggccaggagttcaagaccagcctggacaacatggcaaaaccctgtttctacaaaaaatacaaacattagccaggcatggtggtgcatgcctgtaatcccggctacttgggaagctgaagtgggaggatcacttgagcccatgaagcggaggttgcagtaagctacgattgcaccactgcactccagtctgggcaacagagtaagacgctgtaaccaaaaaaaaaaaaaagaaggaaaaaagaaaagagaaagaaaaagagaaggctgaaaatgataaagatgggtggggaagcaccagtctcagtgaggaggagggtgctgctggtgaatctgttgacaagtagaaactgcaagaaatctcctagaagctgaacagcacccatggaggagtgaaaagccaaactaaacgatgacttctagaaaatctgcatggctcaactaaggaaaaaattcagtgctgcccccagggaaagcccaagaggaaatgtattgaaatagtgataaggagcaagtaattttttctaacattgatgacagtcataaaaagccaaagtctgacaaggagacatgactagcaactgcaatggctggacagaccaaaaagaatttatgaggaagaaaaccaaaatgaatcattttccaaatccagagataaagagaaaaaagaagaactttgatgattaggtatagccagaatgtcccgtcaaaaaaaataagcattcctttggggaaaagctgctgccactatgagatacacttaaaaaaaaaaatagaaaaataaaaagagagaaaaagtaacatccaagccagccttccattcccaaaataaattgtcattaatctgaaaattagtaaatcaagaatgtttacattagaaagtccaaaagcactatatcctgaaaaccaccaaaaamggtgaatgactgctgaatgacgggtttcgtcattttttttttttttttttgagatggagttttgctcctgttgcccaggctagagcgcagtggtgcaatctcggttcactgcaacctccacctcccagtttcaagcgattctcctgcctcagcctcctgagtagttgggattacaggcgcgcgccaccatacccagataattttttttttaatatatttttggtagagagggggtttcattcatgttggccaggctggtcccgaactcctgacctcaggtgatccacctgccttggcctcccaaagtgcaaggattaccgacgttagccaccaccctcagcccacttttttttttttttaagagacagagtcatgctgtgttgcccagactggtcagagtcatgctgtgttgcccagactggtctcaaactcctagcctcaagcaatcctcccacctcaacctcccaagtagctggaactacaggcgcaagccaccactgggcttgatcccatttttgtaaaaaataactctcggccaagtgcagtggctcatgtctgtaaccctaacactttgggaggctaaggtgggaggatcgcttgagcccgggaggtcgaggctgcagagccatgacggcaccagtgcactccagcctgagatacagagtgagatcttaaaaaaacaaaacaaaaaaaaaaaaaaaactgcaacacaaagaataagccctatgtaaactatagaccaataaataacaacatattgatatgggctcatcaaatgcaataaatgtgccaaattaatgcaagatgtttgcaataggagaaacgagggaagggaagggaatatgggaactttctgtgctatcggctcaaatttctgtacatctaaagctgctaaaaaaaagtgtaatttttaaattctgaatatgcagacaaatctgcaaataattacttgtatatgcacacaaagagaggtgaaaagacctatatcaaactgttgcccctggttatctacaaaggatgaaaactggaaactagcgcatgagaaggaatttttttacattatacagttggccctccatatccatgggctcttatgtctgtggattcaaccaagcttggatccaaaaagtttaatatagcatctgtatttgaaacatgcagacttttttttcttgtctttattccccaaacaatacagtataacaactatttacatagcatttatattctattaggtattataagtaatctagaaatgatataaagtatttgggaggatatgcacaggttatatgcaaatactatgccatttatatcagagatttgagcatctgtgcatcttgatattcaccaaaggtcctagaagcagtccctacagacaccaagggatgacagtatatctctggactgtctaaactttctacactgagcaataatgtaagtagaggctctgtagcatattgttaagaatttgggtttctcaaatcagactgcatgaaatcaaatcctagctccaccatttgctagctgataaacttccaacagttacttaatttttctccttgccttagtttcctcacctgtaaaacagaaatcatagtatacactcacagagctgccacagcaattaaataatttc

SEQ ID NO: 709926 - DNA, 2764 bp, Homo sapiens
ctgtcccagtataaaacacacaaggataagaatatgatgctgtctactataactgtgattcagttcttccaaatcctcagatgatgcagaattccagggtaagctgacagaggccccagtaaaatcaacagtgcaagaatatggccagggacaatggctcctgcctgttaaatccagctattcaagaggctgagggaggaggatcgctcgaggccaggagttcaagaccagcctggacaacatggcaaaaccctgtttctacaaaaaatacaaacattagccaggcatggtggtgcatgcctgtaatcccggctacttgggaagctgaagtgggaggatcacttgagcccatgaagcggaggttgcagtaagctacgattgcaccactgcactccagtctgggcaacagagtaagacgctgtaaccaaaaaaaaaaaaaagaaggaaaaaagaaaagagaaagaaaaagagaaggctgaaaatgataaagatgggtggggaagcaccagtctcagtgaggaggagggtgctgctggtgaatctgttgacaagtagaaactgcaagaaatctcctagaagctgaacagcacccatggaggagtgaaaagccaaactaaacgatgacttctagaaaatctgcatggctcaactaaggaaaaaattcagtgctgcccccagggaaagcccaagaggaaatgtattgaaatagtgataaggagcaagtaattttttctaacattgatgacagtcataaaaagccaaagtctgacaaggagacatgactagcaactgcaatggctggacagaccaaaaagaatttatgaggaagaaaaccaaaatgaatcattttccaaatccagagataaagagaaaaaagaagaactttgatgattaggtatagccagaatgtcccgtcaaaaaaaataagcattcctttggggaaaagctgctgccactatgagatacacttaaaaaaaaaaatagaaaaataaaaagagagaaaaagtaacatccaagccagccttccattcccaaaataaattgtcattaatctgaaaattagtaaatcaagaatgtttacattagaaagtccaaaagcactatatcctgaaaaccaccaaaaaaggtgaatgactgctgaatgacgggtttcgtcattttttttttttttttttgagatggagttttgctcctgttgcccaggctagagcgcagtggtgcaatctcggttcactgcaacctccacctcccagtttcaagcgattctcctgcctcagcctcctgagtagttgggattacaggcgygcgccaccatacccagataattttttttttaatatatttttggtagagagggggtttcattcatgttggccaggctggtcccgaactcctgacctcaggtgatccacctgccttggcctcccaaagtgcaaggattaccgacgttagccaccaccctcagcccacttttttttttttttaagagacagagtcatgctgtgttgcccagactggtcagagtcatgctgtgttgcccagactggtctcaaactcctagcctcaagcaatcctcccacctcaacctcccaagtagctggaactacaggcgcaagccaccactgggcttgatcccatttttgtaaaaaataactctcggccaagtgcagtggctcatgtctgtaaccctaacactttgggaggctaaggtgggaggatcgcttgagcccgggaggtcgaggctgcagagccatgacggcaccagtgcactccagcctgagatacagagtgagatcttaaaaaaacaaaacaaaaaaaaaaaaaaaactgcaacacaaagaataagccctatgtaaactatagaccaataaataacaacatattgatatgggctcatcaaatgcaataaatgtgccaaattaatgcaagatgtttgcaataggagaaacgagggaagggaagggaatatgggaactttctgtgctatcggctcaaatttctgtacatctaaagctgctaaaaaaaagtgtaatttttaaattctgaatatgcagacaaatctgcaaataattacttgtatatgcacacaaagagaggtgaaaagacctatatcaaactgttgcccctggttatctacaaaggatgaaaactggaaactagcgcatgagaaggaatttttttacattatacagttggccctccatatccatgggctcttatgtctgtggattcaaccaagcttggatccaaaaagtttaatatagcatctgtatttgaaacatgcagacttttttttcttgtctttattccccaaacaatacagtataacaactatttacatagcatttatattctattaggtattataagtaatctagaaatgatataaagtatttgggaggatatgcacaggttatatgcaaatactatgccatttatatcagagatttgagcatctgtgcatcttgatattcaccaaaggtcctagaagcagtccctacagacaccaagggatgacagtatatctctggactgtctaaactttctacactgagcaataatgtaagtagaggctctgtagcatattgttaagaatttgggtttctcaaatcagactgcatgaaatcaaatcctagctccaccatttgctagctgataaacttccaacagttacttaatttttctccttgccttagtttcctcacctgtaaaacagaaatcatagtatacactcacagagctgccacagcaattaaataatttc

SEQ ID NO: 709927 - DNA, 2764 bp, Homo sapiens
ctgtcccagtataaaacacacaaggataagaatatgatgctgtctactataactgtgattcagttcttccaaatcctcagatgatgcagaattccagggtaagctgacagaggccccagtaaaatcaacagtgcaagaatatggccagggacaatggctcctgcctgttaaatccagctattcaagaggctgagggaggaggatcgctcgaggccaggagttcaagaccagcctggacaacatggcaaaaccctgtttctacaaaaaatacaaacattagccaggcatggtggtgcatgcctgtaatcccggctacttgggaagctgaagtgggaggatcacttgagcccatgaagcggaggttgcagtaagctacgattgcaccactgcactccagtctgggcaacagagtaagacgctgtaaccaaaaaaaaaaaaaagaaggaaaaaagaaaagagaaagaaaaagagaaggctgaaaatgataaagatgggtggggaagcaccagtctcagtgaggaggagggtgctgctggtgaatctgttgacaagtagaaactgcaagaaatctcctagaagctgaacagcacccatggaggagtgaaaagccaaactaaacgatgacttctagaaaatctgcatggctcaactaaggaaaaaattcagtgctgcccccagggaaagcccaagaggaaatgtattgaaatagtgataaggagcaagtaattttttctaacattgatgacagtcataaaaagccaaagtctgacaaggagacatgactagcaactgcaatggctggacagaccaaaaagaatttatgaggaagaaaaccaaaatgaatcattttccaaatccagagataaagagaaaaaagaagaactttgatgattaggtatagccagaatgtcccgtcaaaaaaaataagcattcctttggggaaaagctgctgccactatgagatacacttaaaaaaaaaaatagaaaaataaaaagagagaaaaagtaacatccaagccagccttccattcccaaaataaattgtcattaatctgaaaattagtaaatcaagaatgtttacattagaaagtccaaaagcactatatcctgaaaaccaccaaaaaaggtgaatgactgctgaatgacgggtttcgtcattttttttttttttttttgagatggagttttgctcctgttgcccaggctagagcgcagtggtgcaatctcggttcactgcaacctccacctcccagtttcaagcgattctcctgcctcagcctcctgagtagttgggattacaggcgcgcgccaccatacccagataattttttttttaatatatttttggtagagagggggtttcattcatgttggccaggctggtcccgaactcctgacctcaggtgatccacctgccttggcctcccaaagtgcaaggattaccgacgttagccaccaccctcagcccacttttttttttttttaagagacagagtcatgctgtgttgcccagactggtcagagtcatgctgtgttgcccagactggtctcaaactcctagcctcaagcaatcctcccacctcaacctcccaagtagctggaactacaggcgcaagccaccactgggcttgatcccatttttgtaaaaaataactctcggccaagtgcagtggctcatgtctgtaaccctaacactttgggaggctaaggtgggaggatcgcttgagcccgggaggtcgaggctgcagagccatgacggcaccagtgcactccagcctgagatacagagtgagatcttaaaaaaacaaaacaaaaaaaaaaaaaaaactgcaacacaaagaataagccctatgtaaactatagaccaataaataacaacatattgatatgggctcatcaaatgcaataaatgtgccaaattaatgcaagatgtttgcaataggagaaacgagggaagggaagggaatatgggaactttctgtgctatcggctcaaatttctgtacatctaaagctgctaaaaaaaagtgtaatttttaaattctgaatatgcagacaaatctgcaaataattacttgtatatgcacacaaagagaggtgaaaagacctatatcaaactgttgcccctggttatctacaaaggatgaaaactggaaactagcgcatgagaaggaatttttttacattatacagttggccctccatatccatgggctcttatgtctgtggattcaaccaagcttggatccaaaaagtttaatatagcatctgtatttgaaacatgcagacttttttttcttgtctttattccccaaacaatacagtataacaactatttacatagcatttatattctattaggtattataagtaatctagaaatgatataaagtatttgggaggatatgcacaggttatatgcaaatactatgccatttatatcagagatttgagcatctgtgcatcttgatattcaccaaaggtyctagaagcagtccctacagacaccaagggatgacagtatatctctggactgtctaaactttctacactgagcaataatgtaagtagaggctctgtagcatattgttaagaatttgggtttctcaaatcagactgcatgaaatcaaatcctagctccaccatttgctagctgataaacttccaacagttacttaatttttctccttgccttagtttcctcacctgtaaaacagaaatcatagtatacactcacagagctgccacagcaattaaataatttc

SEQ ID NO: 709928 - DNA, 1070 bp, Homo sapiens
atctttagaaaatttattttataccacatacagacatcttaacataatcacagacccataaagattagccatattaactcgacatggggcagagcaagtcattcatattaattctttttaatttgacatatgtgatggacagcaacaattcaggaacatttttgtctttttcttcagtcagactgattcaagtaagctctactaggtacactggaataaatcgatttaaatccttagaaaataggctgggagatgaagcacacttgaaaaatgcataacaaatatactggtattgtgctttttctgccgatatgacccaagaacattagtgtcgttgtacagatcttaaatattttcattagtaccttgagattctagacaaaggatttcccttcctcaaaacatggaggttcagtttatcaaacggtttagcaaatgcaatagtttatattcaaaagccgtttctagagcacttagctccttaatatcgagtgctgctgatcattttctgtaaatgggactaagctcttttaaagccaagatgaatccattgtattaggtatagtttgggataccatcaaaatacaccgtgacatataacattttgttaattttgggggtctcattgaagagttatatagagcagcagtccccaacctttttggcaacagggactggtttcatggaagataatttttccatgttgggggagggggcaggggatggttttgggatgattcaagcacattacatttatkgtgcactttatttctattattataacattgtaatatgtaatgaaataattatacaactcaccgtcacgtagaatcggtaggaaccctgggcttgttttcctgcaactggatggtcccatctgggggtgatgggagacagtgacagatcatcaggcattggattctcataaagagcatgcaacctagatccctcacgtgtaattcacaatagggttcatgctcctatgagaatctaaagctgctgatgatctgacaggaggttcaggtggtaatgtgagtgatgaggagtggctgtaaatacagttgaagctt

SEQ ID NO: 709929 - DNA, 2254 bp, Homo sapiens
tcagaaatgctaagttgcctgaatttgcaccacactttcctgacatagttggggtctgaacccaggtcaggccaactacataatccctgggggtagggatacagctagagggcttccagttaccaagaggtccagcacgaggcctctatacaggagtatcaggtggtggtgagcaatttccgctgtacycagtgacagctgtgagctggacccagggttagaatagcttccctagcatatcaaattttaataactcaattctcatggctgggcttagctgagcaagctgctattactcatcagcttctacacggtatttccctggaacaggttgtttggaacatcttatgtctggaagcattttatcattgaggagacttaaccaagatgcattcaaattgcctagcccactttcccatgcccatgggcagggaaattaagggtattcaggtatagccagggtgtggagttaggcagtcaggtcttattcatttggagttttgtgacaattaagcataagcttggctgaagtttgcttctgcaacatctgtatataaaaaatttgccacatttcttgataaacaaggaaaacagacaagtaaggataggaaacatttaacctacttgagggatttaagtgttttttttttgttgttgttgttttatttgtaaagaactttagcatggtgtctgcctgaaaatgccggctcctagttattattaatggcaaaagcagattcagcaagatttctaggtcataactttttagaagtagccaagtaactattcctgctttaaaactgtagtctatttctccaacaatgttatttccttaaatgactagatatgctcccatcagcattgaggatgtcctgacatattatctctgagactgaaaacaccaagtgtccaaatctttcttgcagtttattcatttttcagatgaccgtgtttatcagtttagaacttagctgagaactttagatttctgtttctacagatcagcagatgtaagctgcacactgtctcaaaaagaagaaatgacttctctttccatgggagagatttgcttgttcctcctttttcagtctctcctgtgttttgaaaccacatttcttgctgttccagtttttgtggtctccgttttctggtctccaagactgttccactctccttttaaggtgatcattccatttcgtccctctggaatttgcagatgggagaagagcgaagagcagtccacatctgcagcctccatttcctagtcactatttctttctctgtcttcagtccctatcattgacagaaactgctttcccaaaggtcactaatgacattctatcagcaaatgtggtgaccttttctgagtcttcatgctgcttgccctttctgagtgtctcatactatggaccatctcttctgtctttatggaaaattcatttttgcttccgttatcctgcaatttctttcttctctccttggttttggatgtggtttttgttccctttctttgctttcccttgcaccctcactcccttaaatacaagcattttcaagttctactttcttctggtggtggtggtggtggtggggattgtgtctcatcctcttttctgactataaatgcatctttgtggacgagttccaaatctatagtaaaatcaagtcctgcctttctaattaaattccaccatgccaagtgcacacatttgattctcagtctgttcttttttctagtggcattactaccttcctgagtgacagggcttgatatcttgggattatttttaagccactcccttcttcccttcccttccatcctaacagtaagtgagccctgttggttctgactgtgaaatatctatcacaaaccagcacttggcagttctttcagaagtgacttaggataaactcaaccatcctgagcctcagtttcctaacccttgcagtgtagatcatgacagatgcagggcaggtgttgttaagggttgatagccctgctattaaagcaccgagagactggtactttattactttgagtagatactttgagttgttcattttgttttgttctgtagaggtggggtctccctatgttgcccagggtggtctctaactcctgggctcaagcaatcctctcgcctcagcctcctagagtgctgggattacaggtgtgagccaccacacccagctacttttagttgttcttgctataatcattacagttgattcttgttattcacagtggttatgt

SEQ ID NO: 709930 - DNA, 1398 bp, Homo sapiens
gtccagcctggggacagagcgagaatccatctcaaaaaaaaaaaaaagagagagaatagcgtaccgtagggccttaaatcttgggcaaggctggtagatagcagggagagagcatatggaggatttaacttaccagctttctgaaggtactggcgctaacagtgtcctgattggtggggtgatgtgagaagccaccaggctcccctgagggagtcagcgatggcctgcctggatggggcttcagaggaagcccagatccaggtgagcagctcggcaactagcagcacaaggttgtgtgttgacttaataagcagtggacttggagccagtcctagctctataactacctagcccatgaccttgagcatgttctttcatttctataggcctctatttctcaaatgttaccattttgtggctgctatatatgtataaatctatatgtgctttttttctggcagagattttgttgaagagaagttaggaagcaaatacgtggtgggaagagccctagattttgcaacctcatttgaagaatcgggaccagccactcctatgtttttcatcctgtctccaggggtggacccactgaaggatgtagaaagtcaaggtgagaaaggcgtcctcttggagccagggctgcatttgccccatgcactttcattcttggggtctattgatttctcttttctggattcaagcttcaaatatgcaacactgcaaatcatacagaagtcagggtcattgctgaaataaaatcagaagatcacccaccagggagagaaagagccactctgggctgtaaaaggcagaactcacagtcccagtttcatgaggaggcctcgtcccctccactcygcctcacccatccccttatcttgccagagcaatctttctgaaatactagtatgatccttccacagggccccacagtgtggcgattcctcaaagacctagagggagaaataccatttgatgcagctatcccattactgattatatacccaaaggaatagaaattattctattaacattataaagatacccgcatgtatatgttcactgcagcactattcacaatagtaaagacatggaatcaacctcaattcccattaatgatagactggataaagaaaatgtggtacggctgggcacggtggctgacacctgtaatcccagcactttgggaggccaaggtgggtgaatcacctgaggtcaggagttcaagaccagcctggccaacatggtgaaaccccatctctaccaaaatcacaaaaattagctaagcatggtggcaggcacctgtaatcccagctactcgggaagctgaggcaggagaatcgctggaacctgggaggcagaggttgcagtgagctgagaccgcactactgcactcca

SEQ ID NO: 709931 - DNA, 1125 bp, Homo sapiens
tatcagtaattccaaaagaaaggagggtgtaatgaggcatgtctgacccccccttcccatcatggcctgaactagtttttcaagttaactttggaatgtcctttgctgagagaaggggtccattcagaatggctgggaggcttaggattttatttctggttttcaagtctagtattgattatggaatgaaagaactaacagcatatgctttgtgcctcaggggaggagagataaagctaactaggccctaaagaacgaataagatgtgcataataaaatcagtaatagagaagaattaaaaatgaaaagcaacagcccccagcaccagccctccagatacgcagtcccccttcccaggccctatgcttttgtccatttctgaatttagttcctttgagaattacttctcatttcctagtaataaccttatatcaccatttttgtattagcagttttagataaagtgtctattcctgatatgaaaaacaaggatttagcgtgcactgtgttctgtctgtgtcgtcttagattctgtatgtgtctgtttggcactgaagcatcacagggccaaatgcattaactatacagtcttccctccacatacacggggtggggactgggaggtattggttccagtccttgcatatcccagtcccatcaccggccctgccatttgtatatacaggcttcacatctctcaaatactgctgtattttcatctgagtttggttgaaaaaaatccatgtgtaagtggacccacacaattcaaacctgtgttgttcaagggtcgactgtactctctttttctatattcttctaaaacaaattttttaattgacaaataataattgcacatatcaatgagacayatagtgaagtttccattcacataatacatagtagtcagatcagggtgattagtatcatgagcagcacaaagtcagacataaccagatccacagacatttgtgtctttctacagtatcagtcttttactgatgctattccaatcataaaagccacaagctttacggaggtaattcttcttagtatatcccatttactcggtagtcagagctgtaggcacacaggctcaagccattccaaaagtcagtcgatattgca

SEQ ID NO: 709932 - DNA, 1125 bp, Homo sapiens
tatcagtaattccaaaagaaaggagggtgtaatgaggcatgtctgacccccccttcccatcatggcctgaactagtttttcaagttaactttggaatgtcctttgctgagagaaggggtccattcagaatggctgggaggcttaggattttatttctggttttcaagtctagtattgattatggaatgaaagaactaacagcatatgctttgtgcctcaggggaggagagataaagctaactaggccctaaagaacgaataagatgtgcataataaaatcagtaatagagaagaattaaaaatgaaaagcaacagcccccagcaccagccctccagatacgcagtcccccttcccaggccctatgcttttgtccatttctgaatttagttcctttgagaattacttctcatttcctagtaataaccttatatcaccatttttgtattagcagttttagataaagtgtctattcctgatatgaaaaacaaggatttagcgtgcactgtgttctgtctgtgtcgtcttagattctgtatgtgtctgtttggcactgaagcatcacagggccaaatgcattaactatacagtcttccctccacatacacggggtggggactgggaggtattggttccagtccttgcatatcccagtcccatcaccggccctgccatttgtatatacaggcttcacatctctcaaatactgctgtattttcatctgagtttggttgaaaaaaatccatgtgtaagtggacccacacaattcaaacctgtgttgttcaagggtcgactgtactctctttttctatattcttctaaaacaaattttttaattgacaaataataattgcacatatcaatgagacacatagtgaagtttccattcacataatacatagtagtcagatcagggtgattagtatcatgagcagcacaaagtcagacataaccagatccacagacatttgtgtctttctacagtatcagtcttttactgatgctattccaatcataaaagccacaagctttacggaggtaattcttcttagtatwtcccatttactcggtagtcagagctgtaggcacacaggctcaagccattccaaaagtcagtcgatattgca

SEQ ID NO: 709933 - DNA, 926 bp, Homo sapiens
gtatttattacaagcccattcccttgttttgctgataaggaaactgatgcttcgaaaatttagtaacaggccatacaactaacaagtagctgaatttggatttcaaccttttacattatattacactgcctcccacataaaattgggaataacaaatgtctataaaaatgaagagagagctccacacttgtggattttaatcacgtgcacccaggcacacagacaaaaccctttcaaataaaagagcaaagtggatgggatttagattcttttctctctttcctttggaattcaacccaagtaaggtatagaaaatgactgtggatgacagctggaaccttgcactggcagacaaagagtcttgttcttcatatttagacataaacacttgcatttcagactaggagacttgtagttagcagatagccatctgcttttgttaggtcctacctggttccccaaatccttgcctctcttctaccaattgstcaatctggctatcctggccacaggtattattaactctggtctttggatgaggacttaaaggagcatcagtcagcccttgtgaagttgacagaactcgcctttgtaggtggtcaggttctgaccctgggcactggtttgatggctcctttattcacccagcgaacattaactgagcacctattacatggcaggtcacatgcagtgttagagctataacagtgaacaaaaacatggatgttgtcaccatgacacgggctgcctcctccagcaaatgagaagctgatgtaaagcaactggtcacaaaattaattatataattatggcacaaggtgatgtaaaatgtcacaaaaagatgccttccctgctccaactggttgtttgcctgtccctacccccatcagtgcccaattatagaaggcaagctcacagttgacagc

SEQ ID NO: 709934 - DNA, 644 bp, Homo sapiens
ccaggcaaggcccggtcagtcaggtgggtgtcttacctggattactctctcaaacatgtgagccagaggcaggaaggagatgagcacatcgtcctgtctcggaaagatcactttctgcaggcgacgggcatgggagacagaaaggaaagaaacactgacaggaagacgacaagagaatcataaaacaataaagaraaaatggtcctggagggtaaacaggaagagggggaggggaatgggagtggtgaggacagagagagaggtgagatgaaagagagaagaaatgagagagagagggagagagagagggagggggaaggtgcagaaagaagagagagacagggcagcataggaagcggagtgttaggtcgcagcgtcagtgggtctaggttatctgcagaagcaaagagccaaatgaagcacacagaaaccagcagagtgggctccgcagggaagtctcctctctgagggcctgcccctcacttgcagtcagtcggctctagcccggctctctccccttcctccccacacctgcaggacctgccccacaccccatttctccaggatccctgggctacccgggcagggattcagaaggtcttggctagtcagcactttctagtccttgcagagaaaggggccca

SEQ ID NO: 709935 - DNA, 1112 bp, Homo sapiens
ggtagaggacttgttgactgcacacaagaagcacatagtactgtgcatgcaagaagcacataggtctgtatgaaatgtattttgaataggggcttgatatggtttggctgtgtccccacccaaatctcatcttgaattgtagttaccataatccccacatgtcacgggaggaagccagtgaggtaattgaatcatggggttaggtttttcctgttctattctcatgatagttaataggtgtcacttgatctgttgcttttataaagggcagttccactgcacacgctctctttgtctgctgccatgtaagacttgcctttgttcctcctataccttctgccatgattatgaggcctccccagccatgtggaactgtgagtccattaaacctctttttcttcataatttacccagtcttggatatttcttcacagcagtatgaaaatggagtaatacagagctcgagggacagtggtcatcaaaatcgtgtgtattgtagatacctgtgcatttttctgaggagagggtccacggcttttatcaggagtccctggcctaaggaagattaggaatcctgttctagtctaaaagtgaataggatctgattgtaggtgattcctctcaaagcagggctgggatttgaggctacatcttcgctgttcaaagaccacgttcttccttagttctcaggcatcactgaacaactgaggacccaggagtgcttattcctataccccttcttttctcctccctccactgtaggagggaccaagccttcttcactccaaagctggctgaaaacagcccctctagcagggcttttyccctcaccctccgattctggaagcccaactgagagcggtcatcagggaaaggtccctgcgtgcagatggcttccttgaacttgaattattcataagctgttgccaagaagccgcagggactcacccgccccactgacaggagaagagagtagttttccatctgttcactcaaaaactcatttccgcccaaatgaggacatttaatcataagtctttcccctctgtctctgctactcccaaatctcagactttcttctaatagaattaggatcctgggaatggggaaaa

SEQ ID NO: 709936 - DNA, 1112 bp, Homo sapiens
ggtagaggacttgttgactgcacacaagaagcacatagtactgtgcatgcaagaagcacataggtctgtatgaaatgtattttgaataggggcttgatatggtttggctgtgtccccacccaaatctcatcttgaattgtagttaccataatccccacatgtcacgggaggaagccagtgaggtaattgaatcatggggttaggtttttcctgttctattctcatgatagttaataggtgtcacttgatctgttgcttttataaagggcagttccactgcacacgctctctttgtctgctgccatgtaagacttgcctttgttcctcctataccttctgccatgattatgaggcctccccagccatgtggaactgtgagtccattaaacctctttttcttcataatttacccagtcttggatatttcttcacagcagtatgaaaatggagtaatacagagctcgagggacagtggtcatcaaaatcgtgtgtattgtagatacctgtgcatttttctgaggagagggtccacggcttttatcaggagtccctggcctaaggaagattaggaatcctgttctagtctaaaagtgaataggatctgattgtaggtgattcctctcaaagcagggctgggatttgaggctacatcttcgctgttcaaagaccacgttcttccttagttctcaggcatcactgaacaactgaggacccaggagtgcttattcctataccccttcttttctcctccctccactgtaggagggaccaagccttcttcactccaaagctggctgaaaacagcccctctagcagggctttttccctcaccctccgattctggaagcccaactgagagcggtcatcagggaaaggtccctgcgtgcagatggcttccttgaacttgaattattcataagctgttgccaagaagccgcagggactcacccgccccactgacaggagaagagagtagttttccatctgttcactcaaaaactcatttccgcccaaatgaggacatttaatcataagtctttcccctctgtctctgctactyccaaatctcagactttcttctaatagaattaggatcctgggaatggggaaaa

SEQ ID NO: 709937 - DNA, 1999 bp, Homo sapiens
ttctgatgttacccagtaccaaatgttgccctaatatcttcttctgcttcttcctttcctcgggtgatatccctcctcctatagcccagcaattgaagttactgtttgaactggtaaattacacaacaataaaaaagattattgaaatgggcgtaacctaactcacaacaggcaaacagatgcctggaaatttacgtaaaacagatgatggaagttaatgtgctttagagaggagagcaagctgcagcccacattgagttggggtaggcccagtcttccaagtcaattgaggaaaactgggaagagcaagggaaacattcaccccacccacttctcctggcccgttaggaaaatgacttccttgtttagttgcagaaataccccacgttttctgaactccaacaaagactctttytcgttttttaaacttactgtttaacttagatatagtaaaaatcattcttggtgtccagttccaagaattttgacaaatgcatagaattgtgtaaccaccactatcatcaagatagagaacaattctagcattcccccaaatccacttattcagcctcttccaatgaagattttacaagttccctttgaaagggccaaaggttgcccaaatccttgttttgacactgctttggggaaaatattgattgacatgaaagaatcatcaatagagacatagaaattttttttccttttttttttttgagacagagtcttgctctgttgccctggctggagtgcagtggtgcgatctcggctctctgcaacctccgcctcctcggttcaagcaattctcctgcctcagcttccagagtagctgagattacaggtgtcgccaccatgcccagctaatttttgtatttttagtagagatggagtttcatcatgttggacaggctggtgtcgaactcctgacctcaactgatccaccctccttggcctcccaaagtgttgggattacaggcatgagccaccgcatctggccaaattttcatataactgatatatttactgttgcttttttttctttaaagacaagttatttttttgaagatatctgctcctaatcggcatgtcccagtggttacttttctgggcttcagcttcctcatctgtaaaattagctcagcagtggagtctccagaggttttgcccattctgataaactgttctcacaccaatcccaagagcttcagcttttctgggcctttctgggcctcagcttcctcatctataaaattagttcagcagtggaatctgcagaaggtcagcccattctgataaactattctcacaccaatcccaagagcacgggacaggaaattgtgacgtcacatctgcattaccttccaggaagcccaggtccagcctctgagaattcacaaatcaaaaatgtgacaaagagaaatctttacaagatttcccccctccccactccaaagcaaaacatgttcccagcatctacacagtcacaaatctgtctaggaaataaggatgcccccttaaaaagagcaaagggaatagagagtgcagttttttgagtgcctgataaaccgacaaacatcagcagctaaactcaaaaagaaaacactgggatcctgggggttgggtgaggggcataaagagatgattcacagaatattttagggcagtgaaactaccctgtaggaaaatatcatgtagcttccatgtcattatacgtatgtccaaacccatagattatgcaacaccaccagtgaaccccagtgtaaactatgaactttgggtgataatgagatgtcaatgtacgctcatctattgtatcactttggtaggaaatattgataatgggggagtttatgcatgtaggggttgagtaggagtatataagaaatccctgatgagcctggtgtgctggcacgcctgtaatctcagttcctcagaggccctgaggaaagaggattgcttaagcccaggaatttgaggctgtactggctataattgctcc

SEQ ID NO: 709938 - DNA, 596 bp, Homo sapiens
aggcattagattatcataaagggtgcgcagcctagacccctcacatgtgcagttcacagtaaggttcatgctacgtgactctaatgccactgctgatctgacaggaggcagagctcactggtaatgcttgcccacccaccactcacatcctgttgtggtggcccggttcctaacaggccatgaactggtacaggcccatggcctgggggttagggaccccagctttagatgactgttgatgtggaagatggctagtggatgtgtttctatccagctataacccaaaggactggaaccaaagtaaaagttggcagttgtattttttattcctatgaggttaaatatcagagatctaagacttgctcaccgcaaatccattttaactccttgagcagagggatataggagaaatggggttaattcagctacttctcatctcttcaggagggatttcaaatcgcctgagagaagtcggggagygtcacatggcaaagtgtgagctggcctgtcagaggtggttccacagctcctagttgcacacaccctaccccagaaaggagggaggcctcagcagagtggctgagtcccccagcacg

SEQ ID NO: 709939 - DNA, 2353 bp, Homo sapiens
aatatttctttccgttggtgaagatgacttacttcatgaacataatttgtattccctaatttgtgtacacaaacaccaaaacaagagatattttaagtacgtgagggtcaaatatttcttagctagctaaccatgttaatacttcatcatgaagaggaggatattggatttcaatttaaatccaaatgtgtctagatttaactgctattaaaatgtaccagtgtgctggttcttaagtcattttgccagtcagaggtggtgaataatgttgtttttactttttatgggtgttcagtttactctagaccaagggttggcaatttttttttcctgtgatacaaaaagtaaatattttaggctttgctggccacacacaacctctgtcccagctgctcacctctgccttgtagcttgaaagcagccacagatgatagacattatgtaaatgagtgggcatttctgtgttccaggagaactatttatagaaacaggtggcaggtgtaacttgaccttggggctggagtttgccatcctctagtctggacccttttatcccacctcagtcagtttatttgggaagtgggattggtgaggggaatgcatagtagagaaactgtttttcagctgagttataatttgaacatacccaaattcacttctttaattaagattcttgtagattaacttagagtactgttatttaacaatctgaacagctcaggctttagataatcactgctgaatttaaaaagtcgaatttagtgtgaagtcaatgagggggatataattctaagggagaattcccccgtttctccatcctagattgcaattattcatgagttgtcattcttatcagacttgagctctttaaagacagggaaaactttacctgccactgtgcagattctatcgacatatagtaggtgcccaataaatgttaactgacagaacacataagaaacaggaggcaaatcatcagttgccataataagcaattaacatataatgatcctgatatatgtgaacatacagagagcgcaggtctcttttctccacatattaaaaaagcaggaccatatacatcccacggcagccatctgctattgctttccaacgcgggctccccaaggcaccacttccttgagaaagctcactgtggctgacctaatcctcagagggtgagcaatgccaactcaggctggctaagaaggctgtggttacgcccaacacaatttcttttcttttcttcttcttttttttttttttttttttttttttaagcagagcacattcaggagtaagtatctccttctaggaactgtccctaaatcataccaacccccctcatcctttgactatttccctaggcacgtgtaagtagaaagccctctccagtcaagtatcccaaagagcatttgactcccatgccttttgtgtgagtctttttgtgtttgttccctaaataagtcgaccacattgaaagattatttgttaagtatctggaatcccccagacatttaacaaatactgtggggcttttgaggtgaggtagactctgatctgtacagcaacccaggaatgaggtgcaatgagccgtgcagtcactgaggaggactgtgtgtttccagggacagccctgtccctaccactccccgtcctgtgctgccccctcatcccttctccctccactcctctgagttggtcaaacctttcagggaaggcaaagcttcctatacacagtggggacaaaaagcttcaagtgcaaacacccttggaagaagcaagaagtggacaaatgaagtgaacttaaatggtggtaaaagtgagatatcagagccttcactgatgttactgagaggcaggatggagtgaaaaggcagtgacgcaaagacatgatgaaggaagcgggttccgaaaagcagggcggacgggtggaaacacaagtggctcattcacagtgcagcctgaggctagctctggcaggtggggctcctgaatcaaacagcatcttgctagcttctagcatcctattttaagaaagtaggaatctatgttgagaatagactagattcccttattagagaaatcacggaatcttccacaaagcaacaaccatctagaattccctaattatcccaataggacagattaattaggtcactttagagaaacaaataaaatacacagaagctgaaagcacagtgcmgaaatggttatatttagaccctgggtcctagggcactgtcagataataaagactttggactctgcaagccataggatctctatcgaaatgattggactaaggatttatagtgtgaaagcagccacagaccatctgtatataaatgag

SEQ ID NO: 709940 - DNA, 613 bp, Homo sapiens
agtgtaaaagtagacatggtctaattcagtgagatttagcagtccatgaggatgtacttggaatataaggggaaaaaaggcatttttaattagttstagtaaatcaagtagtagctgcaagtaaattaagtactcaagtaatacaagtaaatgtggaaaaaacaaatacaggactatttgtatctgaaaaaataatgcagctctctcatgagagccgatgcagtttagatttatcaggcacaaaataaatttagtatactttcaaaggtacattaagaatcataatatcttttgaagtctttactgttcacacatccctggcccttctgttcacttcaaaggagtttgtgaattgcaagagcttttgtgtattaaaggattatatctggtccattgagaatactgtacaggtagaggacatagtgcttgatttttatattactaaataaagaaaactggaaattacttatgtcttttggttataaccaagccattcaatctttctgaaccctaatttatcagcacaaaaaataacaatgattataaacatccattcctaaggagtgttgaaatgaataacatgaaagaattaatactttgagaaaacagatct

SEQ ID NO: 709941 - DNA, 613 bp, Homo sapiens
agtgtaaaagtagacatggtctaattcagtgagatttagcagtccatgaggatgtacttggaatataaggggaaaaaaggcatttttaattagttgtagtaaatcaagtagtagctgcaagtaaattaagtactcaagtaatacaagtaaatgtggaaaaaacaaatacaggactatttgtatctgaaaaaataatgcagctctctcatgagagcygatgcagtttagatttatcaggcacaaaataaatttagtatactttcaaaggtacattaagaatcataatatcttttgaagtctttactgttcacacatccctggcccttctgttcacttcaaaggagtttgtgaattgcaagagcttttgtgtattaaaggattatatctggtccattgagaatactgtacaggtagaggacatagtgcttgatttttatattactaaataaagaaaactggaaattacttatgtcttttggttataaccaagccattcaatctttctgaaccctaatttatcagcacaaaaaataacaatgattataaacatccattcctaaggagtgttgaaatgaataacatgaaagaattaatactttgagaaaacagatct

SEQ ID NO: 709942 - DNA, 613 bp, Homo sapiens
agtgtaaaagtagacatggtctaattcagtgagatttagcagtccatgaggatgtacttggaatataaggggaaaaaaggcatttttaattagttgtagtaaatcaagtagtagctgcaagtaaattaagtactcaagtaatacaagtaaatgtggaaaaaacaaatacaggactatttgtatctgaaaaaataatgcagctctctcatgagagccgatgcagtttasatttatcaggcacaaaataaatttagtatactttcaaaggtacattaagaatcataatatcttttgaagtctttactgttcacacatccctggcccttctgttcacttcaaaggagtttgtgaattgcaagagcttttgtgtattaaaggattatatctggtccattgagaatactgtacaggtagaggacatagtgcttgatttttatattactaaataaagaaaactggaaattacttatgtcttttggttataaccaagccattcaatctttctgaaccctaatttatcagcacaaaaaataacaatgattataaacatccattcctaaggagtgttgaaatgaataacatgaaagaattaatactttgagaaaacagatct

SEQ ID NO: 709943 - DNA, 2151 bp, Homo sapiens
atacagcaaagtgtaatgctctgcacaaaagtaagagggaattcccaggcatctgaagaagagaagagagctgaaaatgaaggtgctaaccattgtgagcctctgtgtggcagcataaggacttgagcaaggtaggctggccggtaggggtcacacagaaaaggaaacaaagccttacacctggctgggaggggctgagagctgacgtttccatggaaacctggaagacagaagcctaaatacccttaagtgtataggtgaactgaaaaaaataataatcatcgacctactctcccaggaaggcaactgctaaaggatttaagctgagctctggatataaggagagtggggaaagttgtctttagaatcaaggagcaaaaaccactatggaaaacaagacaggtttttaaaagagaaattctataaatgtaaaatgaagtcattaaaattaaacactaaatttgacacaaccaaaagagaatcacttaaccagatggcagatcaggaaaaattagaaagtttgaacaaagataaagtgatagaagatcattgaagactttcaaccaaggtatagaaggtaacatgaaaatatctcacatagacgtaatagaagagctaggagaaaatagaaaggggaccggaaatatttgaagaggtaatagaatcttccaaaattgttgcaaggtaaagtgggcatgtcatattttaaggtaattaaccatttcaagaatgtataactccaaaataaaacaagagctataagggaacaagtaaactaccattccagtagaaggggaaagggaggaaaaccggaaacatagaaacagagttaaaatagaaaatacaaaacaggatcgtagaaattaatccaaataacagtatgaaacagtttacctaaaaccaaactcgtctatcagataatactagactcagtttttttaaaaagtcaattatgctgtggtgatttacagtagacacaccaagacacagaaacaaaggttgaaaataaagggctggaacaaagacatttaaggaaaattccaaccgaaaggtataataatgtcagatacaataagtttctaaggcaatgttgttaggaataaacgtggttacttcctaatcataaaaggtacaggttaccaggaatataatttcaaatatgtatattagttaacactgcctcaaaatatggcagatattttagagaattataagataaattgataaaaccatttgggagatttcactaaaaatttcttggtaattaataagcagacaaatcagaaacaatatagaagatctgaaaaatagagttgaccagctctaatgggtccctgtatccaatagttagagatgggcattgtttttaggcacatgtgaaataatggcccccccgttctggcccagcagaaattatatacttggcaacaagtctcatcacattttaaataaactgtcaaaaagataacattctcatgtttccgcaatttaattttaaaatgaaattaaatttttttgaaggtaaaatacattttggaaatctaaactgtttaactcttagaacgaacagtggaaaagagaaaatataactgaatgataaggaaaatatatacacatcagattgatgtgatgcagccaagtggcatgtagaagaaactctagtattagtataggtttttcctatactttccatgtagtatgaacattttatataagtattttaaatgcttatttaaaaaaggaaattacaragttaaccaaaacaaggatttgtagagaaaaggcatatgtaaggaaagaagtagtctgggcgtggtggctcacgcctgtaatcccagcaccttgggaggcagaggtgggcagatcacctgaggtcaggagttcgagaccagcctgaccaacatggagaaaccccgtctctactaaaaatacgaaaattagctgggcgtggtgatgcacgcctgtaatctcagttattcaggaggctgaggcaggagaatcacttgaacccgggaggcggaggttcagtgagccaagattgtgccacagctctccagcctgggcaacagagtgagactccatctcaaaaaaaaaaaaaaaaaaaagtaaaaaggtacagaaatgaaataaagatacagtaatgaaaattat

SEQ ID NO: 709944 - DNA, 1149 bp, Homo sapiens
tagaaaaattgtggagtttctagccatggtaaaacaaaacaaaacaaaaacccagagggtatgataagcagaaatcagaaaaagaggtagagggtcaggtttaaggaacattgaaaggccttttcctaaaatgtttttttatggtggggcaaaatgagttactcctagcagctttgagagcatgctaaacctggttgcttcttaacactcacctactgcttctgtattcctgctggcactcccttttgcctcttacagcatttaagtagcatgataccccatccctcctacttttgaactctcctcctttgcctataaaaacctaaatcagactacatgtttcgaaatgagcatgaaaaaccatttcattgacttagagaatggattctctgaggtcctaataagaaactttaccacccaggtcgggcacagtagctcacacctgtaatcccagcattttgggaggctgaggtgggtggatcacttaagatcaggagttcgagaccagcctgggcaacatggcaaagccccttctctactaaaaaaaaaaaaaaaaggaaaagaaaaaaaaaaaaacaaatgaaaagaaagaaaaaagaaacccaaccccagcmcatccccatcctcagagttcctgaatcaagggttgggaggaacaaggtctcacacctacagtctgacctggatcacccaaggcgtgctggagctggaaacaagatatttaaaaatatatttcaaaatgtttccaatgtctgaaatgtttgtaattgttgggactttcttactgataaacttggctcaattactgagcactatcaatacagttttatttcttaaagtaattatatagttttgcataaaaagccctgtttctataattaaattctgtcaattatctgatcatgtcaaaagactgtcaataaattattattaatgatgataagagaccttgaaatgattaaaatatttgttattatttattctgctcaatatgttgacttttaaatcttcttaattcttgaacgccagagaaatgctgaaattcctggaggttttgaatagttcataactaacattaatattttatgaaattcaataaacacataaaatgattctaaaaacttaataacttgggaaggcaccagctta

SEQ ID NO: 709945 - DNA, 1149 bp, Homo sapiens
tagaaaaattgtggagtttctagccatggtaaaacaaaacaaaacaaaaacccagagggtatgataagcagaaatcagaaaaagaggtagagggtcaggtttaaggaacattgaaaggccttttcctaaaatgtttttttatggtggggcaaaatgagttactcctagcagctttgagagcatgctaaacctggttgcttcttaacactcacctactgcttctgtattcctgctggcactcccttttgcctcttacagcatttaagtagcatgataccccatccctcctacttttgaactctcctcctttgcctataaaaacctaaatcagactacatgtttcgaaatgagcatgaaaaaccatttcattgacttagagaatggattctctgaggtcctaataagaaactttaccacccaggtcgggcacagtagctcacacctgtaatcccagcattttgggaggctgaggtgggtggatcacttaagatcaggagttcgagaccagcctgggcaacatggcaaagccccttctctactaaaaaaaaaaaaaaaaggaaaagaaaaaaaaaaaaacaaatgaaaagaaagaaaaaagaaacccaaccccagcccatccccatcctcagagttcctgaatcaagggttgggaggaacaaggtctcacacctacagtctgacctggatcacccaaggcgtgctggagctggaaacaagatatttaaaaatatatttcaaaatgtttccaatgtctgaaatgtttgtaattgttgggactttcttactgataaacttggctcaattactgagcactatcaatacagttttatttcttaaagtaattatatagttttgcataaaaagccctgtttctataattaaattctgtcaattatctgatcatgtcaaaagactgtcaataaattattattaatgatgataagagaccttgaaatgattaaaatatttgttattatttattctgctcaatatgttgacttttaaatcttcttaattcttgaacrccagagaaatgctgaaattcctggaggttttgaatagttcataactaacattaatattttatgaaattcaataaacacataaaatgattctaaaaacttaataacttgggaaggcaccagctta

SEQ ID NO: 709946 - DNA, 2763 bp, Homo sapiens
cccccaccccacaggtacaaggaaaacttatgaacaaagtagttcactaaaattctcaaaacaatatgtcaatggcaaacctcctaacttatttttcaagaaatattcattttctgcaactgcctaaaaactaagtaaaatgtcccattttctttaagtataaaatattagaaatatcatcaactcttcagtagcttacatcttcagattaactctacaaccaaaacttcttcctgtaagtagcccccaaaatagtctgtttttttctttattccccagtcaaagtatcagtccaggctctgaatactcctttactttgaaatctgacttttctaaacaacagatactgagagttttattactcttctacgatgcaaaaatatacattactttcttctagaaattctattgccttatgtaaaaggatgactttcctttcaatgttcacaaggtttgtcttcaagtggacctaaattctaacatttcttcaatctttcttatctgactgttctattctgttctagtcctctctattgtactctcttttgttcaaagaatcctttatctcctgttttcaactcaccaacattaatctgattttaccacctacattttcagtgccacgcttgttcacattcatttgacaggtatttattgtgtgtctactattgtgtatcctagcattgcagatacagcagagaataaaaatagacaacatttctactctcacatagcttatgttttagctgggaaaggcacacaacaaataaataaatatataatgtctaggtggtaatgggttttaaagaaaacttaagcagactaagaggacacccactagaggcagaactatctagacagcttggttagagagggcccttctgatatgatgatatttgaatagatgtctgaataaggtgagggggtaaaagatgtaaaaatctgatgtatcatcttaggtagaagcccaggtatcagcatctttaacataaggaaaattacttaacttccataagcctcagttttcttctctgtaaaatagcaatgatgataacaccactgttttggggttattgtaaaaattagagctaatgcctgtaaaagattagaaaaggacccagtgcaataaataatcatcattatctcacacggctatgtaagaaagtttaaaaatttaggatacaccaacaatactttctgaaaatttaggatacacccataatgctttctgaaaactacctaaaaatcatttcagagtttatagcaaattaagtagcttcttaaacacaagtctgaaaaaccaacaaatctctgagtcccagtattctaattttctagatgtaagatcttgggaagcttatacaatttctccaaatttgaatttctttgtctgtataatgggttgtattaaggccgagcacagtggctcatgcctgtaatcccagcactttgggaggctgaggcaggagaatcactagagcccaggagttcaagaccggcctgggcaacatggcaagaccccatctctactaaaaatataaaaaattagcctggcatggtagcatgcatcggtagtcccagctatccagatggctgaggtggggaagattgcttgagccagggaggtcgaggctgccataagcagtgataatgccactgcactctagcctggacaacagtgtgacaccctgtctcaaaaaaaaaaaataaaaagttgatgtatgaaaaaggcctagcacaatgcttgacctaaacaaatgttgatttctttttccacagctttttctacatttacttagatagggtagcacaatttgttcatataatttgatgcacataattaatttcttcatataatttgatgcatggaattaaacaagttaccttttatagatgaaatatttaaaggtgatcccatatggtcacaataaccttgaggttattggggtattgggagaaggcagagaggagcaagaaaattaagtagttggcctgtgaccaactgcttctaccaaataccccaaaagtagccttttacagaatttttctctattaaaaacaaaaaagtttttcctcaagaaagtttgtttacgtcaggagagatttatcattttaccaaaagtggggaagtccttgaaaacacccaaagttttccttactaaaaattcctcatgaagtttgacyttcctaaactcccaaaattcctaatcccataaaaaaaatggcccccaaaaggggaggggatggtgaggcctccaaaaattactacatcttcaactatctggctgaatgttgaaataaaagatttttaaaataaaaaataaaaattattgcatccaatattgattaaaggcaaaaagaccaatgtattcaaagtcaactgaagaaaacaaagggtgcaaacacaagataaagtagcatcactttgaggaactaatttaaaccagaaagcaagctttgaaacagaaaagacaaaatacaattcaaatcctggctgagttccaaatttggacataaatcctttcacagatgatatgctaaaatgggtttgttcattcagcaactattacgaagagcctactgcatgtcagttatctctctgggcactggggaagcaaaagcagacacaacagacaaaacccctgccctttggggcgtacacatggatggcgacaagagatgatacacaggtgagagatatggcaagtcagatggtgataagtgccatggaaaaaaataaagccagaaagttgtgtgaaatgc

SEQ ID NO: 709947 - DNA, 591 bp, Homo sapiens
atcttctctgaaacatacatggaaaagtggaaagtgttctttgtagctgataagaactcatgaagtgatgtagaatagaaccagagaagggaccttagagttcaattgtccaacaagctcattttcagctgagaaaactragcctcagagaagagaaactttaatataaatcatggtcattgcaaatacatttaaaatgatgaaaatctctcctgtccatttaccttctgcagattatctttcattccaatgcagcaagtgccattttctctggatttttttccttctgttgttgactcgtctttctcagtgctgtaaacttcttgttgactcatcgctgaaatgaattatttgtgtttatttaacattcagtctgcacttttttactcatgttaaatatgtggactctgggactacctggatttgaatcctacttttatcagatgttggataagagacttaatctctctggcctgcatttcctcatctttaacatagtgataaagttgtagctacataatagatgttagaagagaataaaatgagattatagatgtaagagtgtgtgtgcgtgttttgtgttttttttgt

SEQ ID NO: 709948 - DNA, 1614 bp, Homo sapiens
tttgtttttaatgaaatgggctggtgggtgaattggactctttcaaggagctctcccaggacaaagacatggtcatgcatattcaccagaccatatccagcatctagcacagctcctcaaacataagaggattccaattcgtattttaagagaacaaaaaaaaccagaatatcaaataattggttacatccaaaaacctgtcaatccggaaaatttctcacattcgtctacctccttgacctggatcttttcaggtttatcacgttttcccccaagagagcctccagaagtgaagacggygtataatgcaatatgaccactagatggcagcacgaacccacctcagaattatccctaaagcggccacagaccctagaccagctgtttcaactgagcctgcacaactgagcagactgtgaatagttaagactgccttggctggtgtctttccctatacccttccttttgttttaattataagaaatctatatgagtttcactattgataggaacataaatgatctgttgtttcagccctaggatattgatattgcctttatataaattgttgatattttgttcatcatggatttcctttcattaattttgattaatgcaaattttaagttactttcaccttagtcctgaaaaaacaagactgcttccagggaccatcaaaataatcttacagagagactaggtagtatgcatctgtgggagatgcatctgtgcacactggagacctccagtatatacagcaggagctcagtaacaatgtttttcagtgaaccaggacaaggatattcagtgtatgggtacttaaaaaaatgaatgcatgctcaaaaggtgagaccttcctttcctactacatgttttttttctttctttcttttttttttttttttcactaattcatggtcttcttcatcacctctctcctcctccttccagagctccatctgcttccctgggtactacattgtgagacactttgctcccttcctttttatttatttatttttattcattgattgattgactgattgagacacggtcttgctctgttgccaggctggagtgcagtggtgtgatcacagctcactgcacccttgacctcctgggctcaagggatcctcctgcctcagccccgagtagctgggactaaaggcacccaccaccacacccagctaatttttgtttttttggtttatttgtagagatggggtcttgccatgttagccaggctggtctcaaactcctgggctacagtgattccccacctaagccccccaaagtgttgggattacgggcacgagccactgcacccggccaccctgccccttttaaaaatctcctttctattctctctctgctggcccaccttacccagagaagttttctttagttccatctcctgttctatttcattttttcttagatcccagaggaattaagaagatggggtggctgggaagggaaatggggagaatctcagagaatggaaggatcagagagctggaagccaaatctagactctaagctcctggggcacagaacatccccaccagacttagcacagtgccttgcacaaaacaggtgtacaataaatatcca

SEQ ID NO: 709949 - DNA, 1614 bp, Homo sapiens
tttgtttttaatgaaatgggctggtgggtgaattggactctttcaaggagctctcccaggacaaagacatggtcatgcatattcaccagaccatatccagcatctagcacagctcctcaaacataagaggattccaattcgtattttaagagaacaaaaaaaaccagaatatcaaataattggttacatccaaaaacctgtcaatccggaaaatttctcacattcgtctacctccttgacctggatcttttcaggtttatcacgttttcccccaagagagcctccagaagtgaagacggcgtataatgcaataygaccactagatggcagcacgaacccacctcagaattatccctaaagcggccacagaccctagaccagctgtttcaactgagcctgcacaactgagcagactgtgaatagttaagactgccttggctggtgtctttccctatacccttccttttgttttaattataagaaatctatatgagtttcactattgataggaacataaatgatctgttgtttcagccctaggatattgatattgcctttatataaattgttgatattttgttcatcatggatttcctttcattaattttgattaatgcaaattttaagttactttcaccttagtcctgaaaaaacaagactgcttccagggaccatcaaaataatcttacagagagactaggtagtatgcatctgtgggagatgcatctgtgcacactggagacctccagtatatacagcaggagctcagtaacaatgtttttcagtgaaccaggacaaggatattcagtgtatgggtacttaaaaaaatgaatgcatgctcaaaaggtgagaccttcctttcctactacatgttttttttctttctttcttttttttttttttttcactaattcatggtcttcttcatcacctctctcctcctccttccagagctccatctgcttccctgggtactacattgtgagacactttgctcccttcctttttatttatttatttttattcattgattgattgactgattgagacacggtcttgctctgttgccaggctggagtgcagtggtgtgatcacagctcactgcacccttgacctcctgggctcaagggatcctcctgcctcagccccgagtagctgggactaaaggcacccaccaccacacccagctaatttttgtttttttggtttatttgtagagatggggtcttgccatgttagccaggctggtctcaaactcctgggctacagtgattccccacctaagccccccaaagtgttgggattacgggcacgagccactgcacccggccaccctgccccttttaaaaatctcctttctattctctctctgctggcccaccttacccagagaagttttctttagttccatctcctgttctatttcattttttcttagatcccagaggaattaagaagatggggtggctgggaagggaaatggggagaatctcagagaatggaaggatcagagagctggaagccaaatctagactctaagctcctggggcacagaacatccccaccagacttagcacagtgccttgcacaaaacaggtgtacaataaatatcca

SEQ ID NO: 709950 - DNA, 1614 bp, Homo sapiens
tttgtttttaatgaaatgggctggtgggtgaattggactctttcaaggagctctcccaggacaaagacatggtcatgcatattcaccagaccatatccagcatctagcacagctcctcaaacataagaggattccaattcgtattttaagagaacaaaaaaaaccagaatatcaaataattggttacatccaaaaacctgtcaatccggaaaatttctcacattcgtctacctccttgacctggatcttttcaggtttatcacgttttcccccaagagagcctccagaagtgaagacggcgtataatgcaatatgaccactagatggcagcacgaacccacctcagaattatccctaaagcggccacagacccyagaccagctgtttcaactgagcctgcacaactgagcagactgtgaatagttaagactgccttggctggtgtctttccctatacccttccttttgttttaattataagaaatctatatgagtttcactattgataggaacataaatgatctgttgtttcagccctaggatattgatattgcctttatataaattgttgatattttgttcatcatggatttcctttcattaattttgattaatgcaaattttaagttactttcaccttagtcctgaaaaaacaagactgcttccagggaccatcaaaataatcttacagagagactaggtagtatgcatctgtgggagatgcatctgtgcacactggagacctccagtatatacagcaggagctcagtaacaatgtttttcagtgaaccaggacaaggatattcagtgtatgggtacttaaaaaaatgaatgcatgctcaaaaggtgagaccttcctttcctactacatgttttttttctttctttcttttttttttttttttcactaattcatggtcttcttcatcacctctctcctcctccttccagagctccatctgcttccctgggtactacattgtgagacactttgctcccttcctttttatttatttatttttattcattgattgattgactgattgagacacggtcttgctctgttgccaggctggagtgcagtggtgtgatcacagctcactgcacccttgacctcctgggctcaagggatcctcctgcctcagccccgagtagctgggactaaaggcacccaccaccacacccagctaatttttgtttttttggtttatttgtagagatggggtcttgccatgttagccaggctggtctcaaactcctgggctacagtgattccccacctaagccccccaaagtgttgggattacgggcacgagccactgcacccggccaccctgccccttttaaaaatctcctttctattctctctctgctggcccaccttacccagagaagttttctttagttccatctcctgttctatttcattttttcttagatcccagaggaattaagaagatggggtggctgggaagggaaatggggagaatctcagagaatggaaggatcagagagctggaagccaaatctagactctaagctcctggggcacagaacatccccaccagacttagcacagtgccttgcacaaaacaggtgtacaataaatatcca

SEQ ID NO: 709951 - DNA, 647 bp, Homo sapiens
ttttaaatatcatataatactggttggrtgcagtggctcatgcctgtaaacccaggactttgggaggccaaggcaggaagactggttgagccgaggagttggaaaccagcctgggcaacatagtgagatcccagctctacaaaaaaaaattttttttaattagccaggtgtggtggcacgtgcctgtcatccgagccacttgggaggctgaggtggcagaatcacttgagcccaggagttcaaggctgtggtgagctatgatcacaccactgcactctagcctgggttacaaagcaagaccctgtctctaaaaataaaaaaatttaaaaaaaatcatacaataccacttaattcattttgataccatcatcccagaaaccacagtaccatccaattttgcctaggataaaaacaaggccgaaaactgatttgctgaagactttaaggtaaaatgctatacagtcggaaactgataaacaggagttttacaacaaacaagattttcttaccaaaacatacatttctcctgggaaagagtctttctgattgtttgatccttttttaccatcaggtgattccttttcttatcaattcctatagaaaaggttgactaggccagttgtggtggctcacgtctgtaatcctag

SEQ ID NO: 709952 - DNA, 647 bp, Homo sapiens
ttttaaatatcatataatactggttggatgcagtggctcatgcctgtaaacccaggactttgggaggccaaggcaggaagactggttgagccgaggagttggaaaccagcctgggcaacatagtgagatcccagctctacaaaaaaaaattttttttaattagccaggtgtggtggcacgtgcctgtcatccgagccacttgggaggctgaggtggcagaatcacttgagcccaggagttcaaggctgtggtgagctatgatcacaccactgcactctagcctgggttacaaagcaagaccctgtctctaaaaataaaaaaatttaaaaaaaatcatacaataccacttaattcattttgataccatcatcccagaaaccacagtaccatccaattttgcctaggataaaaacaaggccgaaaactgatttgctgaagactttaaggtaaaatgctatacagtcggaaactgataaacaggagttttacaacaaacaagmttttcttaccaaaacatacatttctcctgggaaagagtctttctgattgtttgatccttttttaccatcaggtgattccttttcttatcaattcctatagaaaaggttgactaggccagttgtggtggctcacgtctgtaatcctag

SEQ ID NO: 709953 - DNA, 1087 bp, Homo sapiens
cgcctgtgaacagccactgcacttcagcctgggcaacatagtgagaccctgtctcaaaacaaaacaaaarcaaaagcaaaagcgaaaagagaaacaaattgacctttccagtcttgaaatttgagaaagtgacatttgccttatctgagttcctttctcaggaaatcaaccatcaggcctcccagatggtatcaaggaactgaaacttaccagatcactgcatttggacaaggagatgcgggacccctcatctatcataatggcctaacagaccacctgctgcctgttgatcaactcctcttccttacccctccctaattcctgtcttactgcatgtagttacatttcttccttcctgtataaacctctaattttagttggtcagggagacgaatttgaaactgatctcccatctccttggctggagcacccaattaaagccttcttccctggcactactgattggctttctgtgcagcaagcggcaggacctacaccaaatccccggcattttggcaacagcactggtcatgctagggaaaaagttcaagatttcaacttccaagacccagggaagcctctcacaatttctaaagggcagggcagaagagatctttgaaagtgaatctgaatgagtataaaaatgcagtttcactttaaattttccaaaaagcttattaaattagtattttcatgtgcttttgaaaactttatttatttatttatttatttatttatttagagacagagtctcactctgtcacccaggttggagtgcagtggcgtgctctcgactcactgcaacctctgcctttcaggctcaagcgattctcctgcctcagcctcctgagtagctgggattacaggtggcaccaccaccatgcccagctaatttttgtattttttttttttttgagacagatttcgctagttttgctcttgttgcccaggctggagtgcgatggcgcaatcttggctcactgcaacctccacctccctggttcaagtgattctcctgcctcagcctcccaagtacctgggattacaggtgcccgccaccacatccagctgattttttgtgttttag

SEQ ID NO: 709954 - DNA, 1087 bp, Homo sapiens
cgcctgtgaacagccactgcacttcagcctgggcaacatagtgagaccctgtctcaaaacaaaacaaaaacaaaagcaaaagcgaaaagagaaacaaattgacctttccagtcttgaaatttgagaaagtgacatttgccttatctgagttcctttctcaggaaatcaaccatcaggcctcccagatggtatcaaggaactgaaacttaccagatcactgcatttggacaaggagatgcgggacccctcatctrtcataatggcctaacagaccacctgctgcctgttgatcaactcctcttccttacccctccctaattcctgtcttactgcatgtagttacatttcttccttcctgtataaacctctaattttagttggtcagggagacgaatttgaaactgatctcccatctccttggctggagcacccaattaaagccttcttccctggcactactgattggctttctgtgcagcaagcggcaggacctacaccaaatccccggcattttggcaacagcactggtcatgctagggaaaaagttcaagatttcaacttccaagacccagggaagcctctcacaatttctaaagggcagggcagaagagatctttgaaagtgaatctgaatgagtataaaaatgcagtttcactttaaattttccaaaaagcttattaaattagtattttcatgtgcttttgaaaactttatttatttatttatttatttatttatttagagacagagtctcactctgtcacccaggttggagtgcagtggcgtgctctcgactcactgcaacctctgcctttcaggctcaagcgattctcctgcctcagcctcctgagtagctgggattacaggtggcaccaccaccatgcccagctaatttttgtattttttttttttttgagacagatttcgctagttttgctcttgttgcccaggctggagtgcgatggcgcaatcttggctcactgcaacctccacctccctggttcaagtgattctcctgcctcagcctcccaagtacctgggattacaggtgcccgccaccacatccagctgattttttgtgttttag

SEQ ID NO: 709955 - DNA, 410 bp, Homo sapiens
gtcagccgggtgtgatggcgggtgcctgtaatcccagctactcgggaggctgaggcaggagaattgcttgaacccgggaggcagaggttgcagtgagccgagatcatgccactgcactccggcctgggtgacagagggagattccatctcaaataaaaaaaaaaaatctacaygttcatactcggagccacatttagaagtgccagtttccattgttcagttcccacctatgagtgagaacgcttggacacaggaaggggaacatcacacaccagggcctgtcgtggggtgggggggtcgggggagggatagcattaggagacacacctaatgtaaatgactaggtaatgggtgcagcacaccaacatggcacatgtatacatatgtaacaaacctgcacgttgtgcaca

SEQ ID NO: 709956 - DNA, 410 bp, Homo sapiens
gtcagccgggtgtgatggcgggtgcctgtaatcccagctactcgggaggctgaggcaggagaattgcttgaacccgggaggcagaggttgcagtgagccgagatcatgccactgcactccggcctgggtgacagagggagattccatctcaaataaaaaaaaaaaatctacacgttcatactcggagccacatttagaagtgccagtttccrttgttcagttcccacctatgagtgagaacgcttggacacaggaaggggaacatcacacaccagggcctgtcgtggggtgggggggtcgggggagggatagcattaggagacacacctaatgtaaatgactaggtaatgggtgcagcacaccaacatggcacatgtatacatatgtaacaaacctgcacgttgtgcaca

SEQ ID NO: 709957 - DNA, 1253 bp, Homo sapiens
cttctggggcacagtccagacacaaagctgaggcccctgggcagcactgcatcttcacccatgctcttggggccttagcgggctgctgcagcctcagtacccgttctctccacagtcacctgggtccacggcccttccatcaaaacccttgggccagatgtgtttggggatttcagaaaagtcatatgaccacttgctagggagaccccagcaggctggggagagggcttcacgggcatccactgccctgtgtctgcagcaaggcctctgaacactcaaactgcagaggtcaagggaaaaccacaaacagcttctcacgtgcttagggccaatttgaccrtccaatgcttttagcatcaattctaagaaaaatatttcagtgttgggggctttttggatttcataattttggctaagagattgtgaaactgtggatctctgactttcagcatgacagcaactcaggaaacatgaggacatcctccagctgccctggcagccaggcatcgccacgccactcagttctggccagcatgcagtcagggcatgaaggatgtgatctgccgactgcacacaggccttgagctgctgggacctcaacccagggcagccccagggaccgtaggtcctccagtggggaagcaccaggacctgacccccgtggagacccgagacccccacctgctgtctgagcacatcacctggggtctcttcgaggacctgatgcccagtgtaacaattcactcagcttcagcatccatttgctaaaaatcagactacactcccaggattaccaggagaactaaaggagacaacttacgaggaagcacccaacgtagtccctaaaacacaaaagcactccgtacagctcacctccttccttcatgcttcctaaccctgttctgtcttactgtttcagcttattgtcctgaccagactacaattcttagggacacaccccaagtcttctgtaatgcttatttgttgaataagcgaacgagtgagtgaatgactgagcggggaatgaatggataaatctctatagtcataactgcactagctgtgcagtggatgctaatcaaactctcagaactgtgacatccagaaacgtccaatgcaatagaaagactaggaattggctgatcttgggcaactcccttggtaccaccaagtcctggaagatgagttgtgtccaaggtcctgaggatagcaacgggccacgtggcctctgtccaccaagatgtcccagacaa

SEQ ID NO: 709958 - DNA, 614 bp, Homo sapiens
agaaccatgaaaattgagccaagcatttggaatttggtcctgcataaggagcaaaaattcaaatttcatatattttagagttaggaaagaaataatgtggaggatatgtaggggagaattagaaagtggctttgaaaaatagaggtcttattttaggtttctagatttgtctgagcagagatgctaggaaaagttatactctgcagaaaacagaggaataaacattgaatttgatatcagcaggctaggagtccacacgtataggtcccattcacatgaagagatggaacataatttctatatctctatttccttttaaataaaaattggaatgttggaaatcatattaagaaaacaaaaatggaagcaaagataagatggtagggctgcatccagaggcaatggatgaagaaatgacagttygattaatgttccaacagccttgttgacacatcttatccttctgctcagtcatctgtagatctctccctgtgtaaagaatccaagtgtcaactcaagatctttgtcttgaaagactaaaatctggtccaagtttaatgttcaatcttaatatttctttaaatacctttatgaatttattcaaattctgatca

SEQ ID NO: 709959 - DNA, 623 bp, Homo sapiens
taatgattacttattagttaagtggacatggagcttttacataaaatgccagtggcacagagacctttccaatggccgtgcaggctgtgatgggcagggtagggctgtgggcctgggagagttggagctcccaggaggatggcttacaaaacatcccctgaaccccagcaggtctggctgggcctcacctggagctcagcccaggaggcccctggaaaggtgagctgttgcccctttggggccgaatcattgtccgagcaagagctttctctgcagaaccagagaccagcccaggaggcagctccctagagcccagaagaaatggagagaacggcccctgggcctccctcctggagaagaagctgcctgtgcagtctggattgggtttttcttgtgccaagaggggaatgcacaccgatgatttacgcagacatttatagaaagcatacggctttgctcattcataaaatggaagaacagwgtgttttctgccctggctgggctctggggcagctctcagggtagtgcggctgattgtaatcgtttctggacatgccctgatttgcctgcggggagaaggccaaggttgcatgggaacaggccacagatggagccccaagtgc

SEQ ID NO: 709960 - DNA, 1218 bp, Homo sapiens
tccaggtacacatatttcctgctactgaatggcttagactgggatttgcaaggaactacgaagtccaagacctttgcctttcttttagaagaaggcaccagctggttctccaatgttgaaggtcttctccagagatgtgagttcattgtaggacccatcccagcatttagacatagctctgaccctttgttcagggcaagataatcagatggtcagtgcagaggatgccccatgataccaattctggcagtggctgggcagggtttgctcttgtgatcagacacaaggtgaacctgggcagggatttttgggtgtttttatttaaggatatcccaaaccctttgagcagtgtctggcacatagcaggtactcaaaattggatggatggatctatatattcctgggccacaggggcatgcagaaggagtgaaaaaacaagaaggaagacaaggaagacattgttttggctgctgacatttcctgaaagatctgaggcgtccccttcacttcgggcatgggacccagacggctgagtgatgggtgggcagccctttttctccagctctgcttgcctcattcccagccctctatcctgagctccagggaaggccctcatgcgatttagcatcagagctctaattagatgactttcttaccctgggcacatgtctggaccttctgggccactggtggaggaatagaggaagaaaccccagcccctctggtgtgtggtagtctgggccccttcaacatggccgcttccatatcccaaccgcaagcgcacctgatcaccatatccctgttactcccatggaatgactgtgatggtacctgggtcaacacatacatttgggcatctacacagcgccacattgttttccatttataacttatctattttgttatccatctaagcacccgttaatcactcattcatcacaaggcctctgagactatactacattttaattatgtttctagggaggaaggatgatacagacctgaatgagacacctctgtagcatttggggcttccctgtacccatcctcattcactgtccatgtcagggaagcagggagggtggtgtggaacagggactagggccagacagctctggattggaatrtgggtctgccacctgctctgtgactctgcagcttagagaggttaaaggacattgaaacatacagttgataatagtacctacctcatgaggt

SEQ ID NO: 709961 - DNA, 1152 bp, Homo sapiens
tgaggcaggagaattgcttgaatccaggaggcagacgttgcagtgagtggagatcatgccagtgcactccagcttgggcaacaagagcgaaactccatctctaaataaataaataaaaataaaagggaaatacaaacatgcttggggtgcagacttcgaggcagggaggcccacattgcatcttatttaccaattacaacatatatgctttggggtcagtggttctaacagtgtggtccctgggagccacctgagtatcacctgagagcttgctgaaaatgtaaactctgtgacccacctttagactcactgaatcagccactctgcaggtgtgtccagaaatctatgtttcatgagccttccaggtgtttgagaaccactccttggataattcttaaygtaaggggtctcagttctgctgacatgtaagggtcacttggggtgaattttaaaaacatagaccaattatatcagaatctctggagtgtagagaatgggcatccaaaaacaaaaacaacttttttgcagcccagtttgagagctactggcttcacctctcagatgctatttggccatatctgaatggagatactaattcctaatgccagtgcagtagaagggaagacacaggggttagcagatgagaagcacctgccagggagaacattccaataagaaataacttctgtgaacctggccccaactccattcagatggagacttgcttttttcaaagagggcacttgactctgacattaataatgacagagggaaaagaaatgagggaaggagaggaagaggaacaaacaagattgggtttgtggcaatgccccagagacccgtgatctccgttgttagcctacacatagagggagaggtattgtatctcttgatctctgccatctctgcttcaccttctattgggaagtggctgttggttttcaactataaagttcccttgagtgttgaggttcctaatctagtgtttacaaggcatctcaagaaaaaacagaaaactattagatcacctttctagccctggaccacctaccaagaacccatcctctgctctgatgtttttgcttttttatttttgctggatgcatgagcgtgcaggactagagcttcagcttccttccttctttcctcctc

SEQ ID NO: 709962 - DNA, 1152 bp, Homo sapiens
tgaggcaggagaattgcttgaatccaggaggcagacgttgcagtgagtggagatcatgccagtgcactccagcttgggcaacaagagcgaaactccatctctaaataaataaataaaaataaaagggaaatacaaacatgcttggggtgcagacttcgaggcagggaggcccacattgcatcttatttaccaattacaacatatatgctttggggtcagtggttctaacagtgtggtccctgggagccacctgagtatcacctgagagcttgctgaaaatgtaaactctgtgacccacctttagactcactgaatcagccactctgcaggtgtgtccagaaatctatgtttcatgagccttccaggtgtttgagaaccactccttggataattcttaatgtaaggggtctcagttctgctgacatgtaagggtcacttggggtgaattttaaaaacatagaccaattatatcagaatctctggagtgtagagaatgggcatccaaaaacaaaaacaacttttttgcagcccagtttgagagctactggcttcacctctcagatgctatttggccatatctgaatggagatactaattcctaatgccagtgcagtagaagggaagacacaggggttagcagatgagaagcacctgccagggagaacattccaataagaaataacttctgtgaacctggccccaactccattcagatggagacttgcttttttcaaagagggcacttgactctgacattaataatgacagagrgaaaagaaatgagggaaggagaggaagaggaacaaacaagattgggtttgtggcaatgccccagagacccgtgatctccgttgttagcctacacatagagggagaggtattgtatctcttgatctctgccatctctgcttcaccttctattgggaagtggctgttggttttcaactataaagttcccttgagtgttgaggttcctaatctagtgtttacaaggcatctcaagaaaaaacagaaaactattagatcacctttctagccctggaccacctaccaagaacccatcctctgctctgatgtttttgcttttttatttttgctggatgcatgagcgtgcaggactagagcttcagcttccttccttctttcctcctc

SEQ ID NO: 709963 - DNA, 629 bp, Homo sapiens
tttctccatgttgctcaggctggtctcgaactcccgacctcaggtgacctgcccacctcggcctcccaaagtgctgggattacaggcgtgagccactgcacccggcctttatcttttaataagatacaagrtctattaatttttataagtactaatgtctgaataattggtgttcataactattgttcatcaaaacataacttcaaaaacatgaaaagaaaagttactaagagaagatattttcaatacacacctatgaacaagttggatcgataatacataaatgacaataacaaatcaataagggaaggataagtaacttaatgggaagatgagcagaaacttgagtgaggaaacatatctgtccaataagcatacataggctgctcattgttagtgatcaggaaaagtcatatcaagatcgcaatgcaatactattttaaactgtgttaattgggaagaacttaaaagtctgaaatatcaaatgttggggaagatctggagaataaattggtgtaaccagttgggaaaccgtttggcattaccttttaaagttgagcattcacatgctttatgatccagcaatgtgacgatatagcagcagtttcctatatcaaaagaaactttga

SEQ ID NO: 709964 - DNA, 629 bp, Homo sapiens
tttctccatgttgctcaggctggtctcgaactcccgacctcaggtgacctgcccacctcggcctcccaaagtgctgggattacaggcgtgagccactgcacccggcctttatcttttaataagatacaagatctattaatttttataagtactaatgtctgaataattggtgttcataactattgttcatcaaaacataacttcaaaaacatgaaaagaaaagttactaagagaagatattttcaatacacacctatgaacaakttggatcgataatacataaatgacaataacaaatcaataagggaaggataagtaacttaatgggaagatgagcagaaacttgagtgaggaaacatatctgtccaataagcatacataggctgctcattgttagtgatcaggaaaagtcatatcaagatcgcaatgcaatactattttaaactgtgttaattgggaagaacttaaaagtctgaaatatcaaatgttggggaagatctggagaataaattggtgtaaccagttgggaaaccgtttggcattaccttttaaagttgagcattcacatgctttatgatccagcaatgtgacgatatagcagcagtttcctatatcaaaagaaactttga

SEQ ID NO: 709965 - DNA, 629 bp, Homo sapiens
tttctccatgttgctcaggctggtctcgaactcccgacctcaggtgacctgcccacctcggcctcccaaagtgctgggattacaggcgtgagccactgcacccggcctttatcttttaataagatacaagatctattaatttttataagtactaatgtctgaataattggtgttcataactattgttcatcaaaacataacttcaaaaacatgaaaagaaaagttactaagagaagatattttcaatacacacctatgaacaagttggatcgataatayataaatgacaataacaaatcaataagggaaggataagtaacttaatgggaagatgagcagaaacttgagtgaggaaacatatctgtccaataagcatacataggctgctcattgttagtgatcaggaaaagtcatatcaagatcgcaatgcaatactattttaaactgtgttaattgggaagaacttaaaagtctgaaatatcaaatgttggggaagatctggagaataaattggtgtaaccagttgggaaaccgtttggcattaccttttaaagttgagcattcacatgctttatgatccagcaatgtgacgatatagcagcagtttcctatatcaaaagaaactttga

SEQ ID NO: 709966 - DNA, 1739 bp, Homo sapiens
ctatgtgtgtatgcatgtgtgagtatatattttaaaacttgattacattttgttttttagccgaacattatagcttaaaatagtttcttatacttttagctatttttctaaaacctgacttgtagtggtgtacaatagtcaattttatgagcatagcaatactctgtttcacaatttcagtattactaggtactttctggtgtgtgccgtggaagagcctgcatcctatgtcatataatggcaacatttcctaacattggaaaaggtattccatttctaggtggccaaaaagtgccaaatatctatgatatggtcacaggtggacaatgtagttttatgataatgaggacatgtgttctgtcttttttttttktttcaaatttattttcttagaccatatgacatctattttgccatatagtgtcaggaagtaatttaaccttaaacattttttttcctaaaagtttaacttattgtcctagaaccatttattcacttaaccgttctctctcagttgatttggaatgtcgtaggattatttccttgattctcagatgcaaatgactgtgagattcatccctgacttagaaaccacagcaagttgaaattcttttttttttttttttttttttgagatggagtctccctctgtcgcccaggctggagtgcaatggcatgatctcggctcactgcaacctccaactcccgggttcaagcaattctcctgcctcagcctcctgagtagctgggattacaggtgtctgccaccatgcccagctaatttttgtatttttagtagagaggggatttcatcatgttggccaggctggtgttgaactcctgacctcgggtaatccacctgcctcggcctcccaaagtgcagggattacaggtgtgagccactgtgccggccaaaattcttgagtcacatcctgatttcagaaatattaaaatgaagacaatgtggtactaactcgtcataccaatctgggtgtttctcggctttctagtctcttgcactgacctattttgaagcatattatttatctgcttataatatttatgtttgtttatttattctcatttattcctctaccccatctccattctctttctttccagctcccataagcaactattttaacattttaaatatgcatttgtttatttgactgtatcattttgaatgtgtattatcgtgtggcctatattgttattttttttctgttgtagatctcactctgttgtcactttttagactacatcctatgtgtctgagagccattgtgttgctgtttctgatagccgggtagcactttgtggtgtgttcacagatctcatctcttcagggtttgtatcatgttatgccaggtccactaaataaattttgaggttttccacgttttgttttataatatgttggcaaactttaacatgtacagaatacatgttccttaaaagtttgaaaaatttaatctgtaaaacaatttgcctctggtgccatttggggaatagttgttaaaattccacacacacacacacacacacacacacacacacacacacaaaacaaaacaaaaaaaaaacaaaaaaaaaacaaaacaacaaaaaaaaaacaccccatcattctttctgtcatttttgatttattcaagtttttttcttcttatagggaaatttttaagaattaatatttttgagaacatatacttttcaaatctagtagcctatagttacta

SEQ ID NO: 709967 - DNA, 641 bp, Homo sapiens
catcattcaaagcttttaaatagtttacacaactacaacatgtgctatgtggatcatgtatttttaaatgctgttatcacaaggtgaaactataatttgccaattggctctccactctcatttctactatctttttccttttcatctctctaacatttttgatatttagtgtttaatctcttttcacatgttttttcttttcatttagggagagctttggaagtttgtcctctacatcactgagttgattctccgcagtgttgtctgttattctattcatggaaatttaagcctgttgtttatttgtatggtggtctggcttattgaggcttggtctatttcacttcagactgcttctcagtctgctttctcattttgataggaagtattatgaaataagttttaaatactttaaacttttgagactgagtgcacggacttaaattctagctatgccacttacattatttttcctcttaaccaaattattaaatttytgaaagctttggctttctcatctttacaatggatatgctactagtatttatccaagggctgttataaacattaaatgagatcatccacctattatacttagcatagtgtctgacacataatagcaatacaaaaaaagattgcca

SEQ ID NO: 709968 - DNA, 635 bp, Homo sapiens
gtacaaagcacttttcttcatcaagcttataaagagttcattgccatgggatatggctgcgtatatttttcagtgaaaaattcagaacattgtgccctttttgaagaggtggtttggatattgagccagcagtctgctagttcaggaatttatatatttcactccatgaatgaacctctattgtcctgcagactgctgtgctatgacataaaacacaatggaaagtagcgatcttaggaaaatgtcaatttatctttttaatttcataatctgctttcttttgggaggactgtttgttggttttcatttgttaaatttgcacccagagccatttttatttgatttaaaggatcgcaaaacctttactattacttaaaattaaataattagaattgtgtaataattaaattgcagtagtgtgakgctgggaatatagtatctaatctgacaggagaaaactttctctgactccatcacacaggctctcccttatgcggccttccttctttcattactgcctctaattctgactgaagtgactcccaaccaagggttactgcatgggaccactgttcctgactcctccatcacccacagagggaatggagctatgacggccaaggtggcaggagtat

SEQ ID NO: 709969 - DNA, 1400 bp, Homo sapiens
tcccttctctgattcacttttcttccaaagtcagttttgtgtcttactgcttcctggagtagatttttattgcattttgcatttttaatttgtctgaaatctttcccaattctgttttcatatcagcctgatatatatttaattttttwaaaattagaactttttggccagtgcagtggctcacgcctgtaatcccagcactttgggaggccgaagcgggcagatcacggggtcaggaaatcgagaccatcctgactaacacggtgaaaccccatctctactaaaaatacaaaaaattagccgggtgtggcggcgggcacctgtagtcccagctactcgggaggctgaggcaggagaatggtgtgaatccgggaggcagagcttgcagtgagctgagatcacgccactgcactccagcctgggtgacagagtgagactccatctcaaaaaaagaaaataaaaatataaataaataaataaacaaaaattactactttttatatgccatagagtgtcagatgggtgttgtctagtggttagcagtggaattatcctgtcacttcttagctgtgtgatgtctgctaagttatttatacctctctctacctcagcccatttcctcccctgtaaaatggggataataacagtacctacttaattattaggaggattaaatgagttaatatatgtaaattacttggaatagaacctagaacagaaaaatcacttagtaattgtgagctattattataatcattgtcgtcatcttcctgtttttctgctccaggttcttagaggtctgatcttcttgttgtggttgccaaacagttttctagttttttctttggtttctggttaatattaagatatttcttaaagcatggtttttctccctttgaatctttggaatgttctgcaggacttttttaatagaccttggctatgtttttgtttgatttgtttatccattccagaacaggcagatctcttcctcaacctgggttagcaaacagattcaatgtctaacttgcccttgttactgttttgggtattttagaatccccttagttcagcaacagggaccctaaaatgagctcagtttcccgtaactaaatgaaggcagctccctggggggaactagaggcttctgtcatcactctctggtctctgttagtcagcctgggtggagagtatgaaaaccagcaatcttgactgccagagtccctttagctaccactggaggtataatgacagttcacatgtccaccctattctgatttttaatgtgttgtttggaagcagaagtttgagagaggctgttacaagggaagtctaactgggaaggtcatatagtactctggccacctccgtcctcatttctctgcatcagggctgttgcc

SEQ ID NO: 709970 - DNA, 1058 bp, Homo sapiens
tgttggtcaggcgggtctcgaacacccaacctcaggtgatctgcctgcctcagcctcccaaagtgctaggattacaggcatgagctgccgcgcccggccaatagctcattatttatatgcaaatattccaaaatccaaacaaatacaaaatctaaaaacttctggtcccaagcatgtcagatgaggaatactcaacatgcaataacaggtaacaaaaaaatgtataatttatatattttaaaggcaatagttttattttcctggattatttaatagtgactttttatgcatactcattgtgagaatggtagaatgaaaaaagtttcagggcactcgaagaggaggggaggagaaagacactcaacagcccaggatactttaccrtttatgtattgttactttaataccttagtttacaaactgtttaaaatggccaggtgtgatggcccatgtctgtaatcacaacactttgggaggccaaagcaggaggatctcttgaggccaagattttgagatcagcctaggcaacatagcgagacccccatctctacagaaaaatgaaaaatttaaattaaagaaactgtttaaaatgacaaaagtagtgaagtgttctgccaatcttcttatgctaggataaccttccaaaagcagctatcttctgtgggggaaaagatggagtaaggtgaaaaaatggaatccaaggaagatccccaaggatttgaaactgaatcagggtcacaaaaacaggcagcaaaagttgaggaaattctttagatttgtctccttctagccatcgtaattattatgtatgtagaatctgaagcacaggtagaaaaattcacgattgagggattggttcatttgcttacttaaatattcaagggctttttttaaaaaaacaaaccatggctgggcgccgtggctcacgcctgtaatcccagcactttgggaggccgaggcgggcggatcacgaggtcagaagatcaagaccatcctggctaacacggtgaaaccccgtctctactaaaaatacaaaaaattagccgggtgtggtggca

SEQ ID NO: 709971 - DNA, 799 bp, Homo sapiens
gcatactataaagcagtgacaattctaaacctttaaaatgagtttttgttrctactcactttggttgcttgggataaaaatatacagtattatataatccctttcttcagagaaatgaaagccttttcagacattattaattttcagaactttcctgtaagctagttgaaagatacttatcactattcttattgaatgaatggaaaaacatttgtacaatctgagaaccaatctctttaagatgaattaataagtcagtaggcataagggaataagggagaacagaatttatgttttttaacttttaatttttaagacaggatctcactttgtggcccaggctggagtgcagtgagttgagtataatggctattcacaggtatgatcatggttcactgtggcctcaacctcatgggctcaagtgatcctcctgcttcagcctcctgagcagtgggactacaggcataacttgcaattggctagaaattccatgtgttgactcttgggatctggtgttttcctttgaaaacttgccttgttgattttagttatgtggcaaattggcatgatttgtccttcattaaatcataatatatgataatttaggtagccatcggaattctgttggattttcttttttctagccctctttctcaatgatggaaggaaggtaataggcagtactgcttatgattaagagccgttgttttggaaacaggctctgctgaaaatttgattctgcaacttattaacagtatgattttaggaagcatacttaatcagccttatctgtaaaaaa

SEQ ID NO: 709972 - DNA, 1229 bp, Homo sapiens
ggaagaacgttggggacttgcattcactctttttcaagaggagattaaacacaaaatcgatttaatggagcatctgtaatcttaaatacgagaagtcaagagctaaagctataatagaaaggttagctttcctccattgttcacacaatctaactcatatttttggaacttaattatcaatgaaagctaccacatcaatgcaatacagtataggcaaattacaagaaccttttacttctcccaactgggtttaaattgcaaatcttaacactgaacagtgtgcttttggcattgaatattcaatacagggaaatgtgttttaagtgaaccacccaagggcccaggaacatttgcttaataatgatactttgcaattctatagggcctttcaggcaaggatctcaagtggaatgctctttaactataccctgcatgggaaaccttgggaatattttaaagtgctcacttaaggcctattggaaagaatcttttagtatagatttcacagtatgattttaagaaatgaggtactgcagaattttcagtctcaggggtatcatattcatggggatttggtggttactgaacatttattagttactttatgtaaaggttaaaatgtacattttctccaactttttattttcaaaaaatttaaacctacagaaaataatggtacaatgaaacatttaatttcaaagaacacccatattcccttcacttaggttcatcagcttttaacattttgtgacaattgcttagatttttctaagtagatggatagctagacagacagacatatatggatctactatatctgaatagataggtagatgtcrgatatgattatttgtttgttcatacacatacataaacttacctcttttatctatttcaagtaagtggtaaacatcactgcactttattcctaagtactaaagcgtgcctatcctgattaaagggtattctacataaccataaagaatattcttattgttgagtttttaaatacattccaatggttttattttatttttgtattcagaatatccataagttttatcagtgttgtctacaaacttaggaaatgagatttaagccagtactggtatacaaaattctaaaatactgttgtattacctaggcatcttgggaattttagaacctgagattctaattaagaaattgctgtataaccagattttaaaaacaattgaagaaacaaaacc

SEQ ID NO: 709973 - DNA, 799 bp, Homo sapiens
gtgcccgccaccatgcccggctaattttttttgtatttttagtagagactgagtttcactatgttggccaggctggttttgaactcctgacctcaagyagtctgcccacctcggcctcccaaagtgctaggattacagacgtgagccaccacacccggcctctgaaaccctttctgatccagtagaagttcgtctctgtttcttggctattaaatgtgtgggcctcagagccaaactatatcaagatcctagatttttcctgaactccctaggagggtcagtgctgtagcccctcctaccctggctgctccgggaagtccctgcctgccattacggtcatctgtgtgccagcaaaactgggaacctcagaaccatctggattgctggggcccacaggttggctgtgagtacctgcaattcttggctttaatttgctaataaaagtgtcacgtcagagctgagtttgaaaagttctgttgcccttccccacaacaacattctggcagccccttgctatgagccagactccgggtcgggttctggtgacagacacacctctactccttcttttttttttttgagacggagtctctctgttgcccaggctggagtgcagtggcacagtcttggctcaccacaacctccgcctcctgggttcaagtgattctcctgcctcaagctcccgagtagctgggactaaaggtgcccaccaccatgcctggctaatttttgtatttttagtagagatggggtttcactatgttggccaggctggtctcgaactcctgacctcgtgatc

SEQ ID NO: 709974 - DNA, 699 bp, Homo sapiens
gaactcctgacctcaagcgatccacttttctcggcctcccaaagtgctgggattataggcgtgagccaccatgcccggcctgggaaattatttctgtgtgacaaaaaataatctgaatgaccagcttcattgggttttctttttctaccttccacatgtgaccatccattagggatctagtaataacatttttaagtcacaaactttgagagggaccagctatttttattatcccatttatataagactgctatctaaaaattacaacagttctgggacatatactgatatgagtcaatccaaaaatgtaatttggacatcaaagtaagaccagatggtgacttgttaattggagacaccaaattaatgttaataatacakaaaattgtcctctaactatgatggtattatacaataagtctgtactatttagagtctaaatgttcttgtcactcaatgagatgtgctttaactcaagacaaggtttactgctatttttttcagggctcctgaatacctgggcaatacctagtgtccttggctcccctctactgctgtgtggctgttactgtgtgtgaggtctttagcctacattaaggaacatttcaagaatctaaaaatgtgtttttggattccttcaagggaattggctggaaacattgctccttccatcacacaatgtgactgctttaagagaaa

SEQ ID NO: 709975 - DNA, 699 bp, Homo sapiens
gaactcctgacctcaagcgatccacttttctcggcctcccaaagtgctgggattataggcgtgagccaccatgcccggcctgggaaattatttctgtgtgacaaaaaataatctgaatgaccagcttcattgggttttctttttctaccttccacatgtgaccatccattagggatctagtaataacatttttaagtcacaaactttgagagggaccagctatttttattatcccatttatataagactgctatctaaaaattacaacagttctgggacatatactgatatgagtcaatccaaaaatgtaatttggacatcaaagtaagaccagatggtgacttgttaattggagacaccaaattaatgttaataatacagaaaattgtcctctaactatgatggtattatacaataagtctgkactatttagagtctaaatgttcttgtcactcaatgagatgtgctttaactcaagacaaggtttactgctatttttttcagggctcctgaatacctgggcaatacctagtgtccttggctcccctctactgctgtgtggctgttactgtgtgtgaggtctttagcctacattaaggaacatttcaagaatctaaaaatgtgtttttggattccttcaagggaattggctggaaacattgctccttccatcacacaatgtgactgctttaagagaaa

SEQ ID NO: 709976 - DNA, 699 bp, Homo sapiens
gaactcctgacctcaagcgatccacttttctcggcctcccaaagtgctgggattataggcgtgagccaccatgcccggcctgggaaattatttctgtgtgacaaaaaataatctgaatgaccagcttcattgggttttctttttctaccttccacatgtgaccatccattagggatctagtaataacatttttaagtcacaaactttgagagggaccagctatttttattatcccatttatataagactgctatctaaaaattacaacagttctgggacatatactgatatgagtcaatccaaaaatgtaatttggacatcaaagtaagaccagatggtgacttgttaattggagacaccaaattaatgttaataatacagaaaattgtcctctaactatgatggtattatacaataagtctgtwctatttagagtctaaatgttcttgtcactcaatgagatgtgctttaactcaagacaaggtttactgctatttttttcagggctcctgaatacctgggcaatacctagtgtccttggctcccctctactgctgtgtggctgttactgtgtgtgaggtctttagcctacattaaggaacatttcaagaatctaaaaatgtgtttttggattccttcaagggaattggctggaaacattgctccttccatcacacaatgtgactgctttaagagaaa

SEQ ID NO: 709977 - DNA, 1139 bp, Homo sapiens
atcccatctctacaaaaatgaaaaattagccgggcgtagtggtacatgcatttagtcctagctacttgggaggctgargcaggaaaatcgcttgaacctgggaggcagaggttgcagtgagccgagatcatgccactgcactccagcctgggtgacagagtgagactgtgtctcaaaaaaaaaaaaaaaaaaaaaatgcctcagttttgttaagaggaaaaagcaaatcctaagttacagtggaacttatgaacaccctagcctagagatttaatttagtgatgaaaaggtacagagagagtctttcaagaaaggacctagtctgctcgcgttctctctctctctctctctatatatatatatgtatatgtgtgtgtacatatggaccacttcaagctacacacacacacacacatatacacgtgtatgaatatatatatatggctataagtggtgcgacttgcaggtactccctttgttcacctttgtaaagatgttattgccagttcagtgtgtatttctatagtatatatgtaaacaatttgtcatccttttgttgctgcttttgaaactagttcatggcttcagtgggggagagatttaaataatatgggtttataatttctgcattattaaatgcagataacttgtgattaaagagtatgttattggaatcatgtttgcctgagttttactttggaggagttgaacagctgactccagccgagaggtcccctacagagacgggatgttggagacccacgggaatctggcttgtgggaattgcacagcaccctttttatcataccgcagcatggcctttcctgtctcgattgtgggaagctggagtgcctctgcaatgttcagtagtgtgcttgggttttgagggtcaaagatttttaatctttgccacaggcatgttacacatcttaaaattgtgtggtctcaactgaactgctccaaggagaagaaacactgccttgggcgcccagtgttggattacaggtgtgagccaccacacccaggctgtattgccactttcgagcgaagaaatgggcaaggcagaataaacaagttatgaattggctagtctgaataatttcagggagctccagagtatatagactgcttttagctag

SEQ ID NO: 709978 - DNA, 1139 bp, Homo sapiens
atcccatctctacaaaaatgaaaaattagccgggcgtagtggtacatgcatttagtcctagctacttgggaggctgaggcaggaaaatcgcttgaacctgggaggcagaggttgcagtgagccgagatcatgccactgcactccagcctgggtgacagagtgagactgtgtctcaaaaaaaaaaaaaaaaaaaaaatgcctcagttttgttaagaggaaaaagcaaatcctaagttacagtggaacttatgaacaccctagcctagagatttaatttagtgatgaaaaggtacagagagagtctttcaagaaaggacctagtctgctcgcgttctctctctctctctctctatatatatatatgtatatgtgtgtgtacatatggaccacttcaagctacacacacacacacacatatacacgtgtatgaatatatatatatggctataagtggtgcgacttgcaggtactccctttgttcacctttgtaaagatgttattgccagttcagtgtgtatttctatagtatatatgtaaacaatttgtcatccttttgttgctgcttttgaaactagttcatggcttcagtgggggagagatttaaataatatgggtttataatttctgcattattaaatgcagataacttgtgattaaagagtatgttattggaatcatgtttgcctgagttttactttggaggagttgaacagctgactccagccgagaggtcccctacagagacgggatgttggagacccacgggaatctggcttgtgggaattgcacagcaccctttttatcataccgcagcatggcctttcctgtctcgattgtgggaagctggagtgcctctgcaatgttcagtagtgtgcttgggttttgagggtcaaagatttttaatctttgccacaggcatgttacacatcttaaaattgtgtggtctcaactgaactgctccaaggagaagaaacactgccttgggcgcccagtgttggattacaggtgtgagccaccacacccaggctgtattgccactttcgagcgaagaaatgggcaaggcagaataaacaagttatgaattggctagtytgaataatttcagggagctccagagtatatagactgcttttagctag

SEQ ID NO: 709979 - DNA, 1175 bp, Homo sapiens
ctgtgggccgtccggagacagaacctcccaggcagctgtaagctgttgtggcagcagggactgtaggagttggcgtggcctgcagctgacggcgccagcatggagagggtgcagttctccctggtcctgaagaatgtgtggccaagaagcccgaggcggggagggttccttggggccagagggtggcgttcccagcaaaggacagtccttctggtgtcacagtctcctttttcacactggaatgttctttgttttgtgaagggatggcgatggtcacagtggtggtttctcgaagtttacgtgacaacatgtaaaaatgggcatctctaggtgggcttttgtgacatctgaacttctgatggggcagccgtgatactgcagtgagctgggaggtccacctcaccagttaccatgcttgatcattttcataaacttgcccagggaataaaaactggttggggagggctcctgggcccccatagagtaaggggtgacttcaggccccaccacaagtcagcagtacagctggcctgtccctcagcatgcccctgcacacctgcggccactgtggcctgtccctcagcgtgcccctgcacacctgccrccactgtggcctgtccctcagcgtgcccctgcacacctgcggccactgtgccctgtccctcagcgtgcccctgcacacctgcagacactgtgacacatcactgcagacgcagtagttcagatgacacggctgtatcagcttctggttctggggtcagagtccaaacagtccacagggctccattccttctggaggctctgggggacaactcgtttcctgcctttcccagtgtccagaggcacctgtgtgccttgcctcggggccccttcctccccattcacagccacagcgcagcctctctgactctcagcctcccgcctcctctcatgaggtcacccaggatcacctgccattttaagatcctcaagcccacctgcacatcccttttctgccatgaggggacatgttcacaggtcccagggattaggatgtggacatcttttgggggcagtgattcactcagtctcatgggccccatctctctgagctcacccaagacccttaaaccagggcccggggccaacattgagcaggcaagggaaagactaccaggagatgagaggaggctgcc

SEQ ID NO: 709980 - DNA, 1175 bp, Homo sapiens
ctgtgggccgtccggagacagaacctcccaggcagctgtaagctgttgtggcagcagggactgtaggagttggcgtggcctgcagctgacggcgccagcatggagagggtgcagttctccctggtcctgaagaatgtgtggccaagaagcccgaggcggggagggttccttggggccagagggtggcgttcccagcaaaggacagtccttctggtgtcacagtctcctttttcacactggaatgttctttgttttgtgaagggatggcgatggtcacagtggtggtttctcgaagtttacgtgacaacatgtaaaaatgggcatctctaggtgggcttttgtgacatctgaacttctgatggggcagccgtgatactgcagtgagctgggaggtccacctcaccagttaccatgcttgatcattttcataaacttgcccagggaataaaaactggttggggagggctcctgggcccccatagagtaaggggtgacttcaggccccaccacaagtcagcagtacagctggcctgtccctcagcatgcccctgcacacctgcggccactgtggcctgtccctcagcgtgcccctgcacacctgccgccactgtggcctgtccctcagcgtgcccctgcacacctgcggccactgtgccctgtccctcagcgtgcccctgcacacctgcagacactgtgacacatcactgcagacgcagtagttcagatgacacggctgtatcagcttctggttctggggtcagagtccaaacagtccacagggctccattccttctggaggctctgggggacaactcgtttcctgcctttcccagtgtccagaggcacctgtgtsccttgcctcggggccccttcctccccattcacagccacagcgcagcctctctgactctcagcctcccgcctcctctcatgaggtcacccaggatcacctgccattttaagatcctcaagcccacctgcacatcccttttctgccatgaggggacatgttcacaggtcccagggattaggatgtggacatcttttgggggcagtgattcactcagtctcatgggccccatctctctgagctcacccaagacccttaaaccagggcccggggccaacattgagcaggcaagggaaagactaccaggagatgagaggaggctgcc

SEQ ID NO: 709981 - DNA, 639 bp, Homo sapiens
aaatgaggcccaaggaggcagcaggattgattgggggtcagcagctagtttgagccagagcgggactgagaggccgagcctcctgcccctgcggctgcctggcctggctccccacttccccagcagctgcgtttcctgtgagggcctggtgctggactctgtgcacatagctggctccagttgccttgtgatgactggggcttggcacggttaacccagttccttcctggcatctgccggttccacttcctcctgtcctcctccgtgcccaggaggaagcaggaacttcccgtctgggccgcatggcctttgggggtatcctaaaacagatcactcccmccatttctatccaggagctgggggatgtctgggggtcggggggcaatggagaggtcccagaatcctttgtggcttcaggacagcaatggattgcaaagagggggttctcacgcagctcttcaggcttcgggtgatgacccatccctgagtcatcaaatctgtgtcgcgggtggcaacaggattatcatttatttcctataacaaagcagaagaggaaaaaaaaatcagtgcatcacaaaataaagccaactgttgcttgccaagacttatgtttgttctctgcactttggggcaaactaa

SEQ ID NO: 709982 - DNA, 1111 bp, Homo sapiens
tgagatttgttttcttcatgttattaaaatgatgcttaaacagattaaataatgtatctaaagccttttaacttgttagcagttgaatgggactctaattaatgtccactgatccccagattcaggaactattcattaaccaacatgatgtctgttttaggcacactatggcttatgagttttgataaaattcaaagctaaacctgggatccgtaactcagagagaaaagctccttttcttccttcaaataagtaacatgcatattcgcttgtyggtgtcttctcaaaataaatattcccaggaaagaagatagtccatttttcctgaattgtaactttctaaggttcttatcaggaagtatttaacgtttttaaaattcagtttattcactgagagaaatatagtaaatttctttcattgattaagagacgtagaatgcaagaaaaaaaataagctgtttgaaaggactcctgctaactgcaccaaactacaactattacccagtaagataatagaggaaataaatggttctttccctgaagtgtttacattgttatctacagtctcttaaacagtagcagagctgtggttctcttgatttgctcactcattctgttattagagaaattcttaacttcttccatggggaactatttttctgtcttcactcttttcctagggcccgttcccagttcatcaggacactgtcagaatgtggaaagtgtgtgtatgcttctttcttcccatatgtggtgtggttgcacagttatctcccacacctaatgagcgcacagattttatgcaggacaaaaggtgattacacatttccagtcaatttgcttctgcaatgctggccatacagatgttggaatgaagcatgtgtttacaaagctaaagatatgtgcagtatagacagaggaaaattttttcacagtcgacaaaatatagcattacttactgtgtagagtgaaatccattgataaaacagtgagttttgaaaaaaataatattagctctcttagatatgagttgtaactctagatgataaattaactccttataaattaactaatttttaaggagacttcattaaattaagcatttaattga

SEQ ID NO: 709983 - DNA, 1111 bp, Homo sapiens
tgagatttgttttcttcatgttattaaaatgatgcttaaacagattaaataatgtatctaaagccttttaacttgttagcagttgaatgggactctaattaatgtccactgatccccagattcaggaactattcattaaccaacatgatgtctgttttaggcacactatggcttatgagttttgataaaattcaaagctaaacctgggatccgtaactcagagagaaaagctccttttcttccttcaaataagtaacatgcatattcgcttgtcggtgtcttctcaaaataaatattcccaggaaagaagatagtccatttttcctgaattgtaactttctaaggttcttatcaggaagtatttaacgtttttaaaattcagtttattcactgagagaaatatagtaaatttctttcattgattaagagacgtagaatgcaagaaaaaaaataagctgtttgaaaggactcctgctaactgcaccaaactacaactattacccagtaagataatagaggaaataaatggttctttccctgaagtgtttacattgttatctacagtctcttaaacagtagcagagctgtggttctcttgatttgctcactcattctgttattagagaaattcttaacttcttccatggggaactatttttctgtcttcactcttttcctagggcccgttcccagttcatcaggacactgtcagaatgtggaaagtgtgtgtatgcttctttcttcccatatgtggtgtggttgcacagttatctcccacacctaatgagcgcacagattttatgcaggacaaaaggtgattacacatttccagtcaatttgcttctgcaatgctggccatacagatgttggaatgaagcatgtgtttayaaagctaaagatatgtgcagtatagacagaggaaaattttttcacagtcgacaaaatatagcattacttactgtgtagagtgaaatccattgataaaacagtgagttttgaaaaaaataatattagctctcttagatatgagttgtaactctagatgataaattaactccttataaattaactaatttttaaggagacttcattaaattaagcatttaattga

SEQ ID NO: 709984 - DNA, 1111 bp, Homo sapiens
tgagatttgttttcttcatgttattaaaatgatgcttaaacagattaaataatgtatctaaagccttttaacttgttagcagttgaatgggactctaattaatgtccactgatccccagattcaggaactattcattaaccaacatgatgtctgttttaggcacactatggcttatgagttttgataaaattcaaagctaaacctgggatccgtaactcagagagaaaagctccttttcttccttcaaataagtaacatgcatattcgcttgtcggtgtcttctcaaaataaatattcccaggaaagaagatagtccatttttcctgaattgtaactttctaaggttcttatcaggaagtatttaacgtttttaaaattcagtttattcactgagagaaatatagtaaatttctttcattgattaagagacgtagaatgcaagaaaaaaaataagctgtttgaaaggactcctgctaactgcaccaaactacaactattacccagtaagataatagaggaaataaatggttctttccctgaagtgtttacattgttatctacagtctcttaaacagtagcagagctgtggttctcttgatttgctcactcattctgttattagagaaattcttaacttcttccatggggaactatttttctgtcttcactcttttcctagggcccgttcccagttcatcaggacactgtcagaatgtggaaagtgtgtgtatgcttctttcttcccatatgtggtgtggttgcacagttatctcccacacctaatgagcgcacagattttatgcaggacaaaaggtgattacacatttccagtcaatttgcttctgcaatgctggccatacagatgttggaatgaagcatgtgtttacaaagctaaagatatgtgcagtatagacagmggaaaattttttcacagtcgacaaaatatagcattacttactgtgtagagtgaaatccattgataaaacagtgagttttgaaaaaaataatattagctctcttagatatgagttgtaactctagatgataaattaactccttataaattaactaatttttaaggagacttcattaaattaagcatttaattga

SEQ ID NO: 709985 - DNA, 1878 bp, Homo sapiens
agccaaactccatctaatagacttggcaggagagcaaagtatgtcgacgtattttttaattttgtagattctttttggtctccttgctaggcagaaattgctatagttgttaatttcagccattttcttaccaccacccgacacacacaaatgcacacactcacacctattcacacacacacacacacactctctctctctctgtcacacacacacactccttctcttatatatattgatgtctgcatttatgtctgcacctatgtctatgtctatagcatatacatcagcatctgtgtctaaaccctgaccctgtcaactgtcagacgccaggattttctagttgcagaatcactttctttgtaatcagagcatctccaccctatattaaacttcttcagtgttcttctttcctcagatttaactaatctgataaaagcattcatgctaggacatcagtggaactcttctgttatcatttgatatgatacttgaagacaaaaggatggtagaaaagaagtagaaacttggagaactttggcaggacaatgaaggatgtattttgtgtagaagtaccttaaagcctacatttgctgtaaagataactcttcacagagatattttatccagaaccatgattcactaatattccaagattaataacttaatttcaaaaacatagaaaagataaaactatcctagatagcactttcaaactttactttgattataggtgtcagttggtaaaagtattggtagagtctgtgaatacataggtttggtaaaggcttaatgacttgataaaagtataggtcatttttgtaaggtcatgagtggttgattaaagcaggacacattactggcagctgtttaagtctgacaacacaaattaaaacactacttggtatggtttggctctgtgtccccacccaaatcccacctcaaattgtagcctccataatccccatgtgtcaagggtgggaccaggtggaggtaatkggatcagggggttagtttcacccatgctgttctcatgataatgagtgagtctcatgagacctgatggttttataagcgtctggcatttccgctgcttgtactcactttgtcctgccaccctgtaaagaaggtgcctgcttctcctttgccttctgccatgattgtaagtttcctgaggtctcctcagccctgcagaaccctgagtcaactaaatctctttcctttaaaaattatccagtcttgggtatttcttcatagcaatgtgagaagaaactaatacgctactatagaaaaagaaacatagatccttttcaaacctgatattatgaatttgctaataatatcacctctgtaatgtaattatctgcttatcttcccttatattttaaactctgtctttgcttttctttttctctatgtgtgattctgaagaggcacaatgcaaatgattgtattgatattaatatgtgtgagtagtggtgtatacacaggtagataattgactgtctatgttatttttgctttaattaatgtaaattagtaaagtttattttgaaaatgttctctctattggaagattttaaaaaacaataacttacaccaaaacaattgtcctttgtgaaggttgaactcattcaggagataactgactcgtcatctaacatctcataagctctgaataaaaagtaaatcagtattttaagaaagtgcatttgtgattttggacttgttgtattaaggtgaaatataatgtggtttgtcatcaatctctccgtgtggcataaaagggctgacttgttgaaatttcataggtttttatttacagagaaaacaagaccctgttctgcccagagtcctatcagtccacacattcaaagg

SEQ ID NO: 709986 - DNA, 1878 bp, Homo sapiens
agccaaactccatctaatagacttggcaggagagcaaagtatgtcgacgtattttttaattttgtagattctttttggtctccttgctaggcagaaattgctatagttgttaatttcagccattttcttaccaccacccgacacacacaaatgcacacactcacacctattcacacacacacacacacactctctctctctctgtcacacacacacactccttctcttatatatattgatgtctgcatttatgtctgcacctatgtctatgtctatagcatatacatcagcatctgtgtctaaaccctgaccctgtcaactgtcagacgccaggattttctagttgcagaatcactttctttgtaatcagagcatctccaccctatattaaacttcttcagtgttcttctttcctcagatttaactaatctgataaaagcattcatgctaggacatcagtggaactcttctgttatcatttgatatgatacttgaagacaaaaggatggtagaaaagaagtagaaacttggagaactttggcaggacaatgaaggatgtattttgtgtagaagtaccttaaagcctacatttgctgtaaagataactcttcacagagatattttatccagaaccatgattcactaatattccaagattaataacttaatttcaaaaacatagaaaagataaaactatcctagatagcactttcaaactttactttgattataggtgtcagttggtaaaagtattggtagagtctgtgaatacataggtttggtaaaggcttaatgacttgataaaagtataggtcatttttgtaaggtcatgagtggttgattaaagcaggacacattactggcagctgtttaagtctgacaacacaaattaaaacactacttggtatggtttggctctgtgtccccacccaaatcccacctcaaattgtagcctccataatccccatgtgtcaagggtgggaccaggtggaggtaattggatcagggggttagtttcacccatgctgttctcatgataatgagtgartctcatgagacctgatggttttataagcgtctggcatttccgctgcttgtactcactttgtcctgccaccctgtaaagaaggtgcctgcttctcctttgccttctgccatgattgtaagtttcctgaggtctcctcagccctgcagaaccctgagtcaactaaatctctttcctttaaaaattatccagtcttgggtatttcttcatagcaatgtgagaagaaactaatacgctactatagaaaaagaaacatagatccttttcaaacctgatattatgaatttgctaataatatcacctctgtaatgtaattatctgcttatcttcccttatattttaaactctgtctttgcttttctttttctctatgtgtgattctgaagaggcacaatgcaaatgattgtattgatattaatatgtgtgagtagtggtgtatacacaggtagataattgactgtctatgttatttttgctttaattaatgtaaattagtaaagtttattttgaaaatgttctctctattggaagattttaaaaaacaataacttacaccaaaacaattgtcctttgtgaaggttgaactcattcaggagataactgactcgtcatctaacatctcataagctctgaataaaaagtaaatcagtattttaagaaagtgcatttgtgattttggacttgttgtattaaggtgaaatataatgtggtttgtcatcaatctctccgtgtggcataaaagggctgacttgttgaaatttcataggtttttatttacagagaaaacaagaccctgttctgcccagagtcctatcagtccacacattcaaagg

SEQ ID NO: 709987 - DNA, 1558 bp, Homo sapiens
cttgaatttgaacttggctgactttcatatttaatagcctcatggtgggtctccaataacaggataattgaattaaggaacacagtccatctgagtggatatggtaggcttcaccacagtgccttttggaagggaccaacttttggaaggggttgctgtggctcaagcctgtaatcccagcactttgggaggccaaggtgggcagatcacgaggtcaggagatcgagaccatcctggctaacacagtgaaaccccatctctactaaaaatacaaaaaaattagctgggtgtggtggcgggcacctgtaaycccagctactcgggaggcagagacaggagaatagcgtgaacccgggaggcggagcttgcagtgagctgagatcacgccactgcactccagcctggatgacagagcgaggactctgcctcaaaaaaaaaaaaaaaattattataatggacaacgaatcattctacgtatttatagggtacatgccataatcaaatcagagaaattggagtatccatcacctcaagtatttatcatttctttgggttaggaacatcccaattccatccttttagttatttaaaaatacagaataaattattattaactatagacaccctattgtgttactgaactgattttctgagtttggtatatgaaagttttaaaccaagacaatccctatgagttgataaaaaggatagaagacacagattgccttggtagaaaggagtatggtgggcaccaatcaagagtttcagaaccttgaatgatgagatgaggtttcaggaataggtctcaggccaaaggtggaaggcaataaaagccagaaaccaggtacaaagtccagttaaacacatgggtcacccattattgagaaaaggtggaaagttgaagcatgatgctttcttaggtttctaaagtttaatgtgctcacagacatatcagatagcattcctccagctgcatccaacagtgctctcttttattggttctagttctggataaaatttagttacctttggcagatctagcattgctgcaataggaaggaaaggagagaggaccagaaaagattccaagtgcaaaatgtgcccttaggtgtaggcccaaggtggctatgaatcctatccctgaagtcatggaaattactaagatagtcccctccttttattaaaaaaaaagataatttcttcaaacaactccaaactgtatacacattttataatgatgatttatttcaaaatcttaaatactgactgaatattcaagtagggaattaagtcctatctttgacattttctttatgtgttatctttggtgatgctaagtgttcgatttcaatttggccagtttcaataaactttctagtcaattttgggacacatgtgattcaaagttgtactttaaaatagtaaaccttgtaggcaggtataaaacatttaaccatctaatttacttaatcctattattgttatttcatgtggttagtgttcagtaacacttagaacattttttaaaaatgaattgattatacaattatttcatata

SEQ ID NO: 709988 - DNA, 1872 bp, Homo sapiens
aaggacaatctagatggcaaagatttcccaggcttctgctgaaaactgaaaacaatttggcttttagatccctttatagttgaatcaaggtgaaagcaagaagtcagaggccagcaagaatctatgtgaagcaaagggcttagaaatcactaagcaggaggtagggagcctacagaatctggggagtggaacctgaggtgattctctccactgcttcttttttcttttctcttctcttctttttctttttttttttttttttttttttgagacagggtcttgctctgtcgcccaggctggactgcagtgacataatcatggctcactgcagccccaacttctcgggttcaagtgatcttctcatctcagcctcctgagtagcttggaatacaggcacatgccaccacatctggctaattttcataatttttttagagatgagtttcrccatgttacccaggctggaccactgctctctctcagagtaagaagacaaggggcagggaatccagaattgacactgctcatcattgagatgcacaggatgggagtcaggtgataagtcctcattttggcaaggtagacccactgaagaacaatcttccctgcctgccagcatcttatatttgcataggatttatcataatggaaacgtgggtatttttcatgagatggtatcatggaataggttctagaacgacccaggcctctagtcccagttaaccatttgctgactcagtagagctctctcttcacccatagaatggagctaatacctcccttcctgtttccggcatttccatgaagatagtttatcaattattgagtgctgagatgtatttagcatgtccttgcaccatgacctggtggcagaagctgagcggtcatacagtgggttgtagtagggtctagctagctaagccaatggtgttttatgatgtggacaagctggagatgcagagcatcagacaacaccttgatggacggaatataaaggcctagtatctggcttgtgttttttgggtataacgtggtgactccacagcctctccagctcaggacagcagggctttgaaagcagagaatttgggtatgaatcctagattttccaatgactaactctataatatggaggagttctatctgattatcctcgaatcatcctttgtaaaatggaataatatgcttctcttccttcgatttgttgtaaggagccaatgaaactgtggccataaagcccttagctcttactaagaaatcagtaagatgtagtgtcaatgagaatgctttgtgcttataggtgccaagcgcatatgacttgtttttgaaaatctcctcagagaaagaaagagaatgaacgcaggtctaaaatatgttgataaaggggggaaaaggatactctactgctgacatcaggcacagcatgatagagatgctaggaagaccccatctggcccatgtcacctgggtttatcaggtttctcatcagatttcttcccttcctaacagtgaccctaaacatcaaaagattttggggtgagttctctgatagaaatagacagggaggccaggtgcagtggctcacacctataatcccaacactttgggaagccaaggtgggcggatcatgaagtcaggagatcgagaccatcctggctaacactgtgaaaccccatctctactaaaaatacaaacaattagccgggcgtggtggtgggtgcccgtaatcccagctactcaggaggctgaggcaggagaatggcgtgaacccgggaggcggagcttgcagtgagctgagatggcgccactgcactccaacctgggcgacagtgtgagactctgtatcaaaaaaaaaaaaaaagaaaagaaata

SEQ ID NO: 709989 - DNA, 1872 bp, Homo sapiens
aaggacaatctagatggcaaagatttcccaggcttctgctgaaaactgaaaacaatttggcttttagatccctttatagttgaatcaaggtgaaagcaagaagtcagaggccagcaagaatctatgtgaagcaaagggcttagaaatcactaagcaggaggtagggagcctacagaatctggggagtggaacctgaggtgattctctccactgcttcttttttcttttctcttctcttctttttctttttttttttttttttttttttgagacagggtcttgctctgtcgcccaggctggactgcagtgacataatcatggctcactgcagccccaacttctcgggttcaagtgatcttctcatctcagcctcctgagtagcttggaatacaggcacatgccaccacatctggctaattttcataatttttttagagatgagtttcaccatgttacccaggctggamcactgctctctctcagagtaagaagacaaggggcagggaatccagaattgacactgctcatcattgagatgcacaggatgggagtcaggtgataagtcctcattttggcaaggtagacccactgaagaacaatcttccctgcctgccagcatcttatatttgcataggatttatcataatggaaacgtgggtatttttcatgagatggtatcatggaataggttctagaacgacccaggcctctagtcccagttaaccatttgctgactcagtagagctctctcttcacccatagaatggagctaatacctcccttcctgtttccggcatttccatgaagatagtttatcaattattgagtgctgagatgtatttagcatgtccttgcaccatgacctggtggcagaagctgagcggtcatacagtgggttgtagtagggtctagctagctaagccaatggtgttttatgatgtggacaagctggagatgcagagcatcagacaacaccttgatggacggaatataaaggcctagtatctggcttgtgttttttgggtataacgtggtgactccacagcctctccagctcaggacagcagggctttgaaagcagagaatttgggtatgaatcctagattttccaatgactaactctataatatggaggagttctatctgattatcctcgaatcatcctttgtaaaatggaataatatgcttctcttccttcgatttgttgtaaggagccaatgaaactgtggccataaagcccttagctcttactaagaaatcagtaagatgtagtgtcaatgagaatgctttgtgcttataggtgccaagcgcatatgacttgtttttgaaaatctcctcagagaaagaaagagaatgaacgcaggtctaaaatatgttgataaaggggggaaaaggatactctactgctgacatcaggcacagcatgatagagatgctaggaagaccccatctggcccatgtcacctgggtttatcaggtttctcatcagatttcttcccttcctaacagtgaccctaaacatcaaaagattttggggtgagttctctgatagaaatagacagggaggccaggtgcagtggctcacacctataatcccaacactttgggaagccaaggtgggcggatcatgaagtcaggagatcgagaccatcctggctaacactgtgaaaccccatctctactaaaaatacaaacaattagccgggcgtggtggtgggtgcccgtaatcccagctactcaggaggctgaggcaggagaatggcgtgaacccgggaggcggagcttgcagtgagctgagatggcgccactgcactccaacctgggcgacagtgtgagactctgtatcaaaaaaaaaaaaaaagaaaagaaata

SEQ ID NO: 709990 - DNA, 651 bp, Homo sapiens
ggaaagcaacagagggccaccactggccttgttctttaatttaattttcatatcagaaagacttcattgagtttggggaaatggagcttaattctccctgttccccagtgttggcaactccgaaaagaatttcccaaaggaatgaccctgtccacaggagtccaagagagatgggcagtggggttccaarttcagagtgcggggatagcccccacctggaggagacctttatttagtcatactccaccactgtgcttttgcctactaaatactataaccaccggtgatcattatgtgataattagcacaggccttttttataactcccagagcactaccccaaaataagtgattgtgtcaggtggcaaggctactcctagagacaattcctgactcactcattcattcactaaatatttagtgaactactgtgggccaggccctatgctaggcagccatgagcaggaaggttgttgtccctggtattacagtgccgacatgttgctggatggctaggcactgagcaagtttacccacgggatatgtgtatccaaagtggaaatgcagtgtgtataagaggggcacccaactcaatgtggctgggagagggataacaggaagcctcccctataatagtaactttgaagatga

SEQ ID NO: 709991 - DNA, 1298 bp, Homo sapiens
cacaacctggtctaattctccatgcccttgggatggcctgggtctgtgataggaaatatgtttttctgtctctatttgagcaacaacatccttcttatcagctgctccaatgaggaagacactgatgtccttttgcaggaaactaacaggaaaagaaagaaagcttaccactaaatacacatcctgagggtgaaatgaaatgactgcagtgtaggaaagggctgaataaataaatacaccattcctrttgtatagtcagacttcctgggggcgagtcctcatctctttaccctgtctttcccttctaaaatccgctaacctgccaagggaccgaacaaagttttctctggctattaacaggtatggaaacatacaagtctcctctgtcccagacacagaggaaacacagaatagagaataggaaggagagaaaaccagagccacaggaagaggaacttgatattggtgtacatctccccttcatgtttacagaactttcccagcaacttctgctttgagcctttctgtgtacaaatctggtaatgtttgggaacatttcgggagaggaaagggccagggctagtgcagctcagaaaatcatccgaactctttaaatcacagctgcacaggtgacttgatttagagggagaggtgtaaactgtcattatctgtgaatactgagctctaatcctgtagagctgcagtggagactgctagagaagatgattcctgatctgaaaacaattccagcctggaggatcctaaggcatttccttgtaagggtagttttcttctgtgcggaaaagaaatgaaagaacatgtgcaaatatgggtgggagaagaagaaacagagacagagagagagagagacagataagttgcaaaaacttggatctttgtatttctttcttttctttttcttttcttttcttttcttttttcttttttttttttttttttgagacagagtttcttctttcttgttgcccaggctggagtgcaatggtgctatctcggctcaccgcaacctccgcctctcgggtttaagtgattctcctgcctcagcctcccaagtagctgggattacaggcatgagccaccgcacccggcctggatctttgtatttctacggtgtttttagtttaaggatcatttacactttaggaggtttttgttttttctgtctttcttatgtaataattatgggtgagccctgagaaatgactcaaagcaaaaataatggggttttcttgattatagttcctcatttttcctggccacaggccaaccctcaatat

SEQ ID NO: 709992 - DNA, 435 bp, Homo sapiens
agaacagaaacaaggactcgsaatttctttttttctttctttcttttttttcttttttttttttgtctgagacagggtctcactctgcggcccaggctgcagtgcagtggcatgatcttgaacagccttgaatttccaggctcaggtgatcctcccacctcagcctcttgagtaactgggaccacaggtgcataccaccatacctggctaattattttgttttgtcctgttttgtagagacaagggttttgccatgttgcctaggctggtctcgaactcctgagctcaagggattcacctgccaccatctcccaaagtgctgggactacaggcatgagccactgcacctggccagtactggcagtttcactcagctttcactaccagagtatcattcacttaagaagtgttgagcttctactacatgccaggcat

SEQ ID NO: 709993 - DNA, 1536 bp, Homo sapiens
tatttgttaccatagagtagtcccttagtaaaagttgcaaattgcttattcagtttatttccaaatgtggagttattattgtgacagggaaatttttcaatagttctaagtaactattgctaatatgagaagagcacttttgaatatagaaatgatatacctctgcacttatttccttccatttatggtagaaattctgtgacaaataaagaatatgtcgattcctcagattggtcctcttcttttgaagtattgaattttttgtgtttgcctatcttgcctgcatrgggaaaagggggaggatctaggtttatcacactgggagtgttggaataagttccttcaaagattaagtcttatctttctagctcagatggagggatagggagatttaaataacatagtgacataggctttgtggtaggcagaataacggcccctcaaagatgtccacatcctaatcccaggaaccagtgaatgtgttaggctaaatggcaaaggggaattaagcttgcagatggaattaatactgctaatcatccgaccttaaaatagagagattatcctggattatccagctgggcccagtgtaatcagaagggtccttaaatgtaaaagaagaaggcgaaagatgagtcagtgtcagggtgatgcagcaggagatggatttgatcagccattactggctttgaagagggaaggggctgcaagccaaggaatgcatgtgacagccttcaaaactggaaaagacaagcaaatgagttcttccctagagcctccagaaggaacaaagccctgccaataccttgatttttagctcagtgagactcatttaggacttctgatcatcagaactgcaagaaaatatatttgtgttgtttcaagcaccaagtttgtggtgcttgttataggagcaataggaaccaaatactagctttgagtcagatctagattcaatgctcaaacccatcaatcattaattatttgaaattaaacaccttttgaaaaaccattctaaatctttgtttcattgcatataaaatgtgtataataatatctacttcagagtagatattggtaatgctggtaataataatagtggtaatatcaataatagtggctgcatttgctgaacgctaaattctggttacagagccaagtaatctacatactgggtataacattcttagctcataacttttccactaactcaccaacactcaaaaacaaacccttgatctaggtactactattgtctccatttaaagatgagttgaggcacagaagttaaatatcttgccaatagttaaagacctagtacatacaggagcttgtatttaaacgtaggcagagttcagagcccatgctcttaaatggaggccatcatgctttgatttaccatagtattaccctataccagataggaggcccatttgcctaggaggtcagggagggaacagatatatggggtaggaatgtcactcctctgcctgagatactctattcctgtttgtagttctagctcagttacctaga

SEQ ID NO: 709994 - DNA, 1536 bp, Homo sapiens
tatttgttaccatagagtagtcccttagtaaaagttgcaaattgcttattcagtttatttccaaatgtggagttattattgtgacagggaaatttttcaatagttctaagtaactattgctaatatgagaagagcacttttgaatatagaaatgatatacctctgcacttatttccttccatttatggtagaaattctgtgacaaataaagaatatgtcgattcctcagattggtcctcttcttttgaagtattgaattttttgtgtttgcctatcttgcctgcatagggaaaagggggaggatctaggtttatcacactgggagtgttggaataagttccttcaaagattaagtcttatctttctagctcagatggagggatagggagatttaaataacatagtgacataggctttgtggtaggcagaataacggcccctcaaagatgtccacatcctaatcccaggaaccagtgaatgtgttaggctaaatggcaaaggggaattaagcttgcagatggaattaatactgctaatcatccgaccttaaaatagagagattatcctggattatccagctgggcccagtgtaatcagaagggtccttaaatgtaaaagaagaaggcgaaagatgagtcagtgtcagggtgatgcagcaggagatggatttgatcagccattactggctttgaagagggaaggggctgcaagccaaggaatgcatgtgacagccttcaaaactggaaaagacaagcaaatgagttcttccctagagcctccagaaggaacaaagccctgccaataccttgatttttagctcagtgagactcatttaggacttctgatcatcagaactgcaagaaaatatatttgtgttgtttcaagcaccaagtttgtggtgcttgttataggagcaataggaaccaaatactagctttgagtcagatctagattcaatgctcaaacccatcaatcattaattatttgaaattaaacaccttttgaaaaaccattctaaatctttgtttcattgcatataaaatgtgtataataatatctacttcagagtagatattggtaatgctggtaataataatagtggtaatatcaataatagtggctgcatttgctgaacgctaaattctggttacagagccaagtaatctacatactgggtataacattcttagctcataacttttccactaactcaccaacactcaaaaacaaasccttgatctaggtactactattgtctccatttaaagatgagttgaggcacagaagttaaatatcttgccaatagttaaagacctagtacatacaggagcttgtatttaaacgtaggcagagttcagagcccatgctcttaaatggaggccatcatgctttgatttaccatagtattaccctataccagataggaggcccatttgcctaggaggtcagggagggaacagatatatggggtaggaatgtcactcctctgcctgagatactctattcctgtttgtagttctagctcagttacctaga

SEQ ID NO: 709995 - DNA, 617 bp, Homo sapiens
cggcctcccaaagtgctgggattacaaatgtgagccaccatgactggccaggatttttgaaagttattatttttattttttttctcactctgttgctcaggctgaagtgcagtggtgcaatcgtggctcactgcggccttaatctccagggctcacacagtcctcctgcctcagcctcatgagtagctaagtctacagcacgtgccaccatgcctgcgtaattttctttttttaattttttttgtggagactgggtctcgctctgttgcccaggctggtgtcaaactcctggcctcaagcaatcctcttgcctcggcctcccaaagtgctgagattacaggcacctggccggactttttaataagtggcattcctctttacttaaatcttctgatatgcatcatctccccttaattcctctccctttgcaatatgcactgctgaggggaaggaccaggccacatgtgaagggcgccccccccscccagagttaggcagttcccaaactgcaaaactgtctgtggtgtccctggctcaggaggcaaacccagttgaacacagttgctctacaagctgtcaaagctggacctgtcacagtgtggggattgcagcagtca

SEQ ID NO: 709996 - DNA, 1081 bp, Homo sapiens
tttgtttttttttttttttttgagacggagtttcgcttttgttgcccaggctggagtgcaatggtgagatctcagtttaccgcaacctgcacttcccgagttcaagcgatactcctgcctcagcctcctgagtagctgggattacaggcatgcgccaccacgcccagataattttgtatttttagtagagacagggttcctccgcattggtcaggctggtcttgaactcctgaccttaggttagcctcccgccttggcctcccgaagtgctgggattacaggcatgcgccaccrcacccgacactttctggggacatctgggataaggcagggattctgcctcatcaaagtaatttgagggttggaaggttgcagcagtgcatttctgccatgctaatgtggacgttgggagaatggagacagcagagtctggaggcaattcatcaagctgtgggtggaggtctcaggaaggaagcgggcaccagcttcagagagcctctcaatgagattggccactgcctcgggtttacccaggggaaagtggaggaggttagtgctgcctgggggcctggcaaagccttactagaagaggtatacctttctcttaactcaagctagcaggaaaagaggtgaagtggactactgctgatcccccccccccccctttttttttttctttttcttctctttttttgagacagagtctcactctgtcacccaggctggagtgcagtggtgtgatctcggctcactgcaacctctgcctcccagcttcaagcgattctcctgcctcagcctcccgagtagctcggattacaggtgcatgccaccacactcggccaatttttgtatttttagtagagacagggcttcactatgttggccaggctggtctcgaactcctgaccttaggtgatcttcccacctcggcctcccaaagtgctggaattacaggcatgagccaccatgcctggcctctgatcccactttcggttaggggtttggctctggagttgaggaagctcagaattgtcaaatctggaagcttgtgggatctcctggagcctcactactcaaaggg

SEQ ID NO: 709997 - DNA, 1081 bp, Homo sapiens
tttgtttttttttttttttttgagacggagtttcgcttttgttgcccaggctggagtgcaatggtgagatctcagtttaccgcaacctgcacttcccgagttcaagcgatactcctgcctcagcctcctgagtagctgggattacaggcatgcgccaccacgcccagataattttgtatttttagtagagacagggttcctccgcattggtcaggctggtcttgaactcctgaccttaggttagcctcccgccttggcctcccgaagtgctgggattacaggcatgcgccaccacacccgacactttctggggacatctgggataaggcagggattctgcctcatcaaagtaatttgagggttggaaggttgcagcagtgcatttctgccatgctaatgtggacgttgggagaatggagacagcagagtctggaggcaattcatcaagctgtgggtggaggtctcaggaaggaagcgggcaccagcttcagagagcctctcaatgagattggccactgcctcgggtttacccaggggaaagtggaggaggttagtgctgcctgggggcctggcaaagccttactagaagaggtatacctttctcttaactcaagctagcaggaaaagaggtgaagtggactactgctgatcccccccccccccctttttttttttctttttcttctctttttttgagacagagtctcactctgtcacccaggctggagtgcagtggtgtgatctcggctcactgcaacctctgcctcccagcttcaagcgattctcctgcctcagcctcccgagtagctcggattacaggtgcatgccaccacactcggccaatttttgtatttttagtagagacagggyttcactatgttggccaggctggtctcgaactcctgaccttaggtgatcttcccacctcggcctcccaaagtgctggaattacaggcatgagccaccatgcctggcctctgatcccactttcggttaggggtttggctctggagttgaggaagctcagaattgtcaaatctggaagcttgtgggatctcctggagcctcactactcaaaggg

SEQ ID NO: 709998 - DNA, 1492 bp, Homo sapiens
atacaacagtttaaaattcatatggattgtatttttttcttttaaaaatggcaaaatgtttttggcaaatgtaagcaaatgacttggactgcgttgggtctcaccagctctgagccgggtcagtcatagccaggcgaggcctactgcttcctgaggtcactctgtggggctgggggaaggtggatgcccgccactgggaggtgctggccccccacctggctccccctcaggccctcagtcttgaacatggaaatggagctggtgagaggtgccaattacaaactccagcacggatcacccattagcatcactgagagaactctggggccttgaaccacatgcagactgggtgagtcgtctacacagtgacccatattgcgaaagtcagagagaggagtggtgcttccacccctccgacttgtgcgcccgcccccacccccacctggaggaagagggtggcacggggtgtgtcactagtgcttaatctggcaatgttttcaacttgtgggttttttttttttattttttttattttaggaaacttcttttaaaaaatgttttctgttttgtatgtgtatgtgtatccagaaatgtccatcctccaagctggccaccactgttccctgaatttggcagtgcctgttgcttgcagctgtcagcatcctgaaaaccatgaggtgccttcaaagtagactctgtggcccagccgcgcragtggcctccaggaccctgccgcacgatgtcattctctccttattctgaatcctgtctggctctgatgctgagaaaaaggacaaagtcggtgtgtctgtctgcgtgtgtgtgcatctgtgcctgtgtgtgtgtactgagttttggttttttttggaacctttttttctttttttaagaaaaaaatgacccttggattactaatacagagttcagccctcctttagtcactataaaacggactccatgttttcacaccactcatggtcttccaggttatagataaactttgtcctatgtgtctggtttgcgggcacagggtccctccccaggttgtctagggtcagagtagaggcaaagaactcactggtgctcagcccgccctcgtggtttttgatgtagcgtttatagtttttcctcaggcactgccacgtggtggtgtacaggatgaaggcgaaggatttgagcgcgatggcgatgctgacatacaggtatcggtagaccacattgtcgtagaggacgcaggcgccttgctccccacagaacgtgctccagaacaggcaggtggagtcgatgccagccccgaagatgaggggtggagggatgaagcctgttaccgggaaaagaatgttaaggttctggatctggtggccagtgctcccctgttcctgtctctgcctagcttttcttatagcactgctaggcaaatatgtctgactccgtggctcaaagacatgctcaggaggcaaagcgcatgagtttgtgtcccagttctgccttt

SEQ ID NO: 709999 - DNA, 2416 bp, Homo sapiens
tggcaattgcatttackcttcctttcccactgcttagggtagggttcacacatacactttattgatatcaataagtatatgacaagctcccaagatacttttggaagtgtttaacgattgcttgatgagtgttaacatatctagatctgatgtaactattgcttcacccccttagtaatggggaattcagggcccattttctaggtaagtgatacagaggtttggtgtttattcagtagttatcatgaacggggaaagacttaatgactgcaacagttgaaggactaaccttccaatctttaagacgtgttgacatagcctgccttgttacacatgagggatgatgataaatgcacaatacactgtcatgggtacaccagggttaattacacaacccagaggaatagctgtaatttcatccctttctcccatatgcatgaaatagtgtaggaagaaaagtgagggagaattaagtttttagagggataaatgcgaatccatatgtgtgtgagtgataaacatttttctacaaactgctctacttattaataacagatcacttggaacatacctcacaaccaatcagaatatacgagtgtgtcaggaaacagcactgcttgttctttgagaacagggagtgtgattaagcacagggaggcaagcaatttggttttcatgttttgaaagctagaaaagtcatatgaaccttctcgatgagctcgatgcaggcagccaggtccatcccgaagtcaatgaactcccactcgatgccttccttcttgtactcttcctgctccagcacgaacatgtggtggttgaaaaactgttgcagtttctcgttggtgaagttgatgcacagctgctccaggctgttgaactacagaacaagataaatataggaaattacgcataacaagtattctatctacagagtatctattagtattttcttctgaatttaaggcattttggtttattaaattataaaccttcagattgttttcctattatatagttctaaacaaagtagaattgattctttgaatacttattttccaagtaactgcatgagatcatgcatactaggcaaaatactgttaaatgaggactctgaaatatttccttagagtaattttaaaaaggtgttctcatgctcatctgcttggatccaggatagattttgactattttaacctctcagggatcaacttttgagacttctagactcaaaagaatagaattttctcttttcctatttatacctatttacttttcatatcttttcaaagactcctttcagtaggaattacatttgtatattttgtaaggtacattttgtaaatgtgattttgtatgctctaacaagaggatttgcactggctaattttctgtcagttcactactcacatcaaagatctcaaagccagcaatgtccaagaccccgatgaagtactgcctgggctgcttggtgtccagctgctggttgatgcgggtgaccatccacaggaacatcttctcgtagatggctttggccagagcacccactgcattgtacaccttcaacagaagtgatagtttagttttttaaattgaaaacagtgatgaactcctgagtcacttgcggttcaaataaatcagacaatttaagtcatgtttacctgctgcacagtctggcctttggttacgaactcattgccgaccttgactctgggatagcagagagatttgagcaggtcagcagagttcagacttgtcagataagcagctttgtcagcaactgtgtgaacaaggtgagaatggtgaaactgaccatggcttacacaatttaaaatgtaaatgatgatgacaaagaaaaaaggtttcactcaaaaagtaagatgtgcaaatgtcattgaaaccttttcatttgttcatattgcctcaaaagcattgccaccacttgcactaattttagtcatttcttgtgatgataaattggaggttggggaatcgatgctgtctgtgatatttaacctggcaaaagtagaccacagataaaaataatttgagaaaccctaacctagaggagtagtgacagaaatattcagatctctgtttctttcagtgcctgtgggcacacagattatcctgaaataaaatatgttttagtcaaatagcaaatatgagcttatgaaaagccaatgaataatggaatgagcagaaatcacaaatctgctaaataatgtaaaacgtcaggcagtgtgtaatttccttctcgtaatacttttgcccttcacgagctaggtcagagaaagtaaaaacacggtccctgcctctgaaaagttcactatgtcagctttgtcaagtggaagataccaacagggggtggtaccttccgtgccatctggctctgcctgctcttccctttgcttttgct

SEQ ID NO: 710000 - DNA, 2416 bp, Homo sapiens
tggcaattgcatttacgcttcctttcccactgcttagggtagggttcacacatacactttattgatatcaataagtatatgacaagctcccaagatacttttggaagtgtttaacgattgcttgatgagtgttaacatatctagatctgatgtaactattgctycacccccttagtaatggggaattcagggcccattttctaggtaagtgatacagaggtttggtgtttattcagtagttatcatgaacggggaaagacttaatgactgcaacagttgaaggactaaccttccaatctttaagacgtgttgacatagcctgccttgttacacatgagggatgatgataaatgcacaatacactgtcatgggtacaccagggttaattacacaacccagaggaatagctgtaatttcatccctttctcccatatgcatgaaatagtgtaggaagaaaagtgagggagaattaagtttttagagggataaatgcgaatccatatgtgtgtgagtgataaacatttttctacaaactgctctacttattaataacagatcacttggaacatacctcacaaccaatcagaatatacgagtgtgtcaggaaacagcactgcttgttctttgagaacagggagtgtgattaagcacagggaggcaagcaatttggttttcatgttttgaaagctagaaaagtcatatgaaccttctcgatgagctcgatgcaggcagccaggtccatcccgaagtcaatgaactcccactcgatgccttccttcttgtactcttcctgctccagcacgaacatgtggtggttgaaaaactgttgcagtttctcgttggtgaagttgatgcacagctgctccaggctgttgaactacagaacaagataaatataggaaattacgcataacaagtattctatctacagagtatctattagtattttcttctgaatttaaggcattttggtttattaaattataaaccttcagattgttttcctattatatagttctaaacaaagtagaattgattctttgaatacttattttccaagtaactgcatgagatcatgcatactaggcaaaatactgttaaatgaggactctgaaatatttccttagagtaattttaaaaaggtgttctcatgctcatctgcttggatccaggatagattttgactattttaacctctcagggatcaacttttgagacttctagactcaaaagaatagaattttctcttttcctatttatacctatttacttttcatatcttttcaaagactcctttcagtaggaattacatttgtatattttgtaaggtacattttgtaaatgtgattttgtatgctctaacaagaggatttgcactggctaattttctgtcagttcactactcacatcaaagatctcaaagccagcaatgtccaagaccccgatgaagtactgcctgggctgcttggtgtccagctgctggttgatgcgggtgaccatccacaggaacatcttctcgtagatggctttggccagagcacccactgcattgtacaccttcaacagaagtgatagtttagttttttaaattgaaaacagtgatgaactcctgagtcacttgcggttcaaataaatcagacaatttaagtcatgtttacctgctgcacagtctggcctttggttacgaactcattgccgaccttgactctgggatagcagagagatttgagcaggtcagcagagttcagacttgtcagataagcagctttgtcagcaactgtgtgaacaaggtgagaatggtgaaactgaccatggcttacacaatttaaaatgtaaatgatgatgacaaagaaaaaaggtttcactcaaaaagtaagatgtgcaaatgtcattgaaaccttttcatttgttcatattgcctcaaaagcattgccaccacttgcactaattttagtcatttcttgtgatgataaattggaggttggggaatcgatgctgtctgtgatatttaacctggcaaaagtagaccacagataaaaataatttgagaaaccctaacctagaggagtagtgacagaaatattcagatctctgtttctttcagtgcctgtgggcacacagattatcctgaaataaaatatgttttagtcaaatagcaaatatgagcttatgaaaagccaatgaataatggaatgagcagaaatcacaaatctgctaaataatgtaaaacgtcaggcagtgtgtaatttccttctcgtaatacttttgcccttcacgagctaggtcagagaaagtaaaaacacggtccctgcctctgaaaagttcactatgtcagctttgtcaagtggaagataccaacagggggtggtaccttccgtgccatctggctctgcctgctcttccctttgcttttgct

SEQ ID NO: 710001 - DNA, 2416 bp, Homo sapiens
tggcaattgcatttacgcttcctttcccactgcttagggtagggttcacacatacactttattgatatcaataagtatatgacaagctcccaagatacttttggaagtgtttaacgattgcttgatgagtgttaacatatctagatctgatgtaactattgcttcacccccttagtaatggggaattcagggcccattttctaggtaagtgatacagaggtttggtgtttattcagtagttatcatgaacggggaaagacttaatgactgcaacagttgaaggactaaccttccaatctttaagacgtgttgacatagcctgccttgttacacatgagggatgatgataaatgcacaatacactgtcatgggtacaccagggttaattacacaacccagaggaatagctgtaatttcatccctttctcccatatgcatgaaatagtgtaggaagaaaagtgagggagaattaagtttttagagggataaatgcgaatccatatgtgtgtgagtgataaacatttttctacaaactgctctacttattaataacagatcacttggaacatacctcacaaccaatcagaatatacgagtgtgtcaggaaacagcactgcttgttctttgagaacagggagtgtgattaagcacagggaggcaagcaatttggttttcatgttttgaaagctagaaaagtcatatgaaccttctcgatgagctcgatgcaggcagccaggtccatcccgaagtcaatgaactcccactcgatgccttccttcttgtactcttcctgctccagcacgaacatgtggtggttgaaaaactgttgcagtttctcgttggtgaagttgatgcacagctgctccaggctgttgaactacagarcaagataaatataggaaattacgcataacaagtattctatctacagagtatctattagtattttcttctgaatttaaggcattttggtttattaaattataaaccttcagattgttttcctattatatagttctaaacaaagtagaattgattctttgaatacttattttccaagtaactgcatgagatcatgcatactaggcaaaatactgttaaatgaggactctgaaatatttccttagagtaattttaaaaaggtgttctcatgctcatctgcttggatccaggatagattttgactattttaacctctcagggatcaacttttgagacttctagactcaaaagaatagaattttctcttttcctatttatacctatttacttttcatatcttttcaaagactcctttcagtaggaattacatttgtatattttgtaaggtacattttgtaaatgtgattttgtatgctctaacaagaggatttgcactggctaattttctgtcagttcactactcacatcaaagatctcaaagccagcaatgtccaagaccccgatgaagtactgcctgggctgcttggtgtccagctgctggttgatgcgggtgaccatccacaggaacatcttctcgtagatggctttggccagagcacccactgcattgtacaccttcaacagaagtgatagtttagttttttaaattgaaaacagtgatgaactcctgagtcacttgcggttcaaataaatcagacaatttaagtcatgtttacctgctgcacagtctggcctttggttacgaactcattgccgaccttgactctgggatagcagagagatttgagcaggtcagcagagttcagacttgtcagataagcagctttgtcagcaactgtgtgaacaaggtgagaatggtgaaactgaccatggcttacacaatttaaaatgtaaatgatgatgacaaagaaaaaaggtttcactcaaaaagtaagatgtgcaaatgtcattgaaaccttttcatttgttcatattgcctcaaaagcattgccaccacttgcactaattttagtcatttcttgtgatgataaattggaggttggggaatcgatgctgtctgtgatatttaacctggcaaaagtagaccacagataaaaataatttgagaaaccctaacctagaggagtagtgacagaaatattcagatctctgtttctttcagtgcctgtgggcacacagattatcctgaaataaaatatgttttagtcaaatagcaaatatgagcttatgaaaagccaatgaataatggaatgagcagaaatcacaaatctgctaaataatgtaaaacgtcaggcagtgtgtaatttccttctcgtaatacttttgcccttcacgagctaggtcagagaaagtaaaaacacggtccctgcctctgaaaagttcactatgtcagctttgtcaagtggaagataccaacagggggtggtaccttccgtgccatctggctctgcctgctcttccctttgcttttgct

SEQ ID NO: 710002 - DNA, 3808 bp, Homo sapiens
tcttcttgatcctcagagcatcatttctgctcctgatctcagcatccagtgtactctgcattgactccacaactctgagatggttcctctttagctgatcgagttcttcatctttttcagcaatttttcggtcaatctcagatttcacctgatttagctcaagttgaatgcgaagaattttgccttcttcatgctcaagagatgccttaataaaagcaacatttatttaggttacctaaagagctttttatttctttcacattatgataatttccccaagaaggcattaaaaaacccataaactatcatacgtcttaatgtagcctattagctctgcattctcaaggtacaattcagtatttttcactgaattacttgtgttattccctaaagatttgcaacatgatagagatctcagttgctattaattttcaatttatttataatgcagagctaagcaaatgaaaaatgtacctctgcttcctctagggaagtctgtagttcactcttctcatgatcaagttgtttctttactttctccagttcatggatatgctttccaccctctgcaatttgctctgtcaggtcagaaatctcctctgtaataataaagtaccaaatttcagttaagtagaaagaaaaattgaaaagatgtctccctaccatttttgaaatagaatgattacagtgactcacgttgtaagttcttattctctcgctttagagtttcaagatgatccagggattcctcgtaggcattcttcaccttgaacagctcagtgctgagagaacgcgactccttctgggaggcctcaagttcagcctgagtttcctcatacttctgtttccattctgccagaacctggaagtatatagaaaataagcctttgaaaccaagaatgatgtcagtttcccccaaggggagctggtactgtggaccaccttgtcaaagtttctttgcttcttatcgagagctatgcaggcagcattagatcgttccacatcaatcatgaggtcctctacttcattctgtagcctctgctttgtcttttcaagagaagcacatttggaattcacagcttctacatgttcttctgcatcctgcagacgctgggctagcttcttcctgaaaattgggtcagtatgagtgaccaagagcagactcagagtcaccacagtgccctttataaagctgctgactaggaaagcatatttccccaagagttgtctacaagttgttgaatttttctaaacattttcactctcttagaattctgttttccctgttgagttcttatttttatccatctcaggtattgccaaacatatttacgaagcacctgtgtgtgtgtatgtgtgtgtatgagagaaagagaatataagttagcactagagctgagtgagcaatgtgaaaatttgctcctctttctttgtttttatttcactaagctggccctctatagtgtggcacattttcttgaactttgcctggggtgagaagtagaaaacaggaagagacagtacatttctcttttgaaacctgggatttagagatctgtaactacttgtggaaaagggctgagttttatttactttgaggaagaaatggcaaccatgaacaggaagcatatcaccaaggaatggtagcattgagtagtatctttaagcattttctagtatggttctgtttattttgcaaatgaggaaactgcggcccagagtgatatgttcaaggtcatacaatgaatcagtaactttctggatttggtggcctttgataataaatattactgcattattgcatttcccaaatttcctctaaaatcttgtctactactcttcaccaacctatgtaattcatgacctttcccagcccacactcttatctagaactctctctggaaatgcttgctacaaactctttcatcctgtttaattctaacaactactgagataaattaaatttagaaaggcttctttcactargagtataatgctttttttccttctatgtgtaaatctgtaaatctcatgacttgtagtccgcaaacagtacgtgtaattagtgaatacatccattgatataggttgttagttgaaataatgacagcatatgacaaccttaatataaacattcaatactccatctgaggaaaaactgattattgttaattgtaatactcataataatttaccagagagtctcaatgtctcaatttttccttctattaaaagatactaattctatttaattcataaataatattctgataattaataatccatcttggtggaaagaaatttaagatgcttctggacaagaatgggtggagggatctggtctcattccattctccagtggacatacactgggctttaagaagaagaatatggtggaatccaccaacctataataaaataagctgaagtctttcatgtgtccccaagcccggaatattctctttcttctatttttccttcactgcctttacttttatttcttcctgctcccctgcactaaaagcacatacttggcctcctccagctcctctgtgcgctggatggcgtccgtctcgtacttggtcctccactgggcaacctcactgttggccttggacattcccctctgcagctcagccttggcttcctgctcctcctcatactgttcccgcagcaggtcacagtcatggcgggctgactgcagggcatgggccagagtgctcttggcctagaccaaccaaaaactatgtgatataagtttatcttctgatcattgaaattctctatgcaaagttcaatagtgtgttatgttgcacggttcaagtgattgaaagtatcagctggagaattctcaccttagtctcctcttctagctgcctctttaattcttcaatctgttgtgtaaatgcttgtttgcctcgggatagctgagaaaccatagcatctttttcatctagctgtcgtgaaaactcacctgtggaagacaaaacatcaatgatttagttctgttgtctaggtaaacaataatttaaagaatggaataacattgtaaccctcttatttcatatgatgaaaaaacccctcaagattttcagtgatgttgagaaggttatttcttgctttttaaaaaatgtatgagttttctttgatattttagaattcgagaacttttgagtaatgctgagtcacaaaaaatctcctgagcccagggagcttaattcttttccccaattgtcgcttagaatcattgcattttactgtctcataataaaaagatggaggaataagtaagacatgataaatgaatgtacagagcttgagaaattacttgtatttgataggtaggtaaaggcttgtctttcattcgtcacctctccgaaggttgatgctatttatttactgacctgattctgtgtgtaaacgtgccttctgggctgacaactcatttattaagcgttgttgctcttcttcctttgtttttatttcactaagctggtcctctagggtgcggcacattttctcaaagtttgcctggggtgagaggtagaaaacaggaagagacaatacatttttattctagaggctgggatttagagatctgtaactacctgtggaaaggggctgatttttatttacttttctatcaatcttgcatggtggctataaagtagtagaggcatttaatttggctaaataatgaacacatgattatcaaaattatattctctttgaaagtgtgaacatcatttaaattctgcatcatttagagtatggtttttagataaaccttttttgtaattacattttt

SEQ ID NO: 710003 - DNA, 3808 bp, Homo sapiens
tcttcttgatcctcagagcatcatttctgctcctgatctcagcatccagtgtactctgcattgactccacaactctgagatggttcctctttagctgatcgagttcttcatctttttcagcaatttttcggtcaatctcagatttcacctgatttagctcaagttgaatgcgaagaattttgccttcttcatgctcaagagatgccttaataaaagcaacatttatttaggttacctaaagagctttttatttctttcacattatgataatttccccaagaaggcattaaaaaacccataaactatcatacgtcttaatgtagcctattagctctgcattctcaaggtacaattcagtatttttcactgaattacttgtgttattccctaaagatttgcaacatgatagagatctcagttgctattaattttcaatttatttataatgcagagctaagcaaatgaaaaatgtacctctgcttcctctagggaagtctgtagttcactcttctcatgatcaagttgtttctttactttctccagttcatggatatgctttccaccctctgcaatttgctctgtcaggtcagaaatctcctctgtaataataaagtaccaaatttcagttaagtagaaagaaaaattgaaaagatgtctccctaccatttttgaaatagaatgattacagtgactcacgttgtaagttcttattctctcgctttagagtttcaagatgatccagggattcctcgtaggcattcttcaccttgaacagctcagtgctgagagaacgcgactccttctgggaggcctcaagttcagcctgagtttcctcatacttctgtttccattctgccagaacctggaagtatatagaaaataagcctttgaaaccaagaatgatgtcagtttcccccaaggggagctggtactgtggaccaccttgtcaaagtttctttgcttcttatcgagagctatgcaggcagcattagatcgttccacatcaatcatgaggtcctctacttcattctgtagcctctgctttgtcttttcaagagaagcacatttggaattcacagcttctacatgttcttctgcatcctgcagacgctgggctagcttcttcctgaaaattgggtcagtatgagtgaccaagagcagactcagagtcaccacagtgccctttataaagctgctgactaggaaagcatatttccccaagagttgtctacaagttgttgaatttttctaaacattttcactctcttagaattctgttttccctgttgagttcttatttttatccatctcaggtattgccaaacatatttacgaagcacctgtgtgtgtgtatgtgtgtgtatgagagaaagagaatataagttagcactagagctgagtgagcaatgtgaaaatttgctcctctttctttgtttttatttcactaagctggccctctatagtgtggcacattttcttgaactttgcctggggtgagaagtagaaaacaggaagagacagtacatttctcttttgaaacctgggatttagagatctgtaactacttgtggaaaagggctgagttttatttactttgaggaagaaatggcaaccatgaacaggaagcatatcaccaaggaatggtagcattgagtagtatctttaagcattttctagtatggttctgtttattttgcaaatgaggaaactgcggcccagagtgatatgttcaaggtcatacaatgaatcagtaactttctggatttggtggcctttgataataaatattactgcattattgcatttcccaaatttcctctaaaatcttgtctactactcttcaccaacctatgtaattcatgacctttcccagcccacactcttatctagaactctctctggaaatgcttgctacaaactctttcatcctgtttaattctaacaactactgagataaattaaatttagaaaggcttctttcactaggagtataatgctttttttccttctatgtgtaaatctgtaaatctcatgacttgtagtccgcaaacagtacgtgtaattagtgaatacatccattgatataggttgttagttgaaataatgacagcatatgacaaccttaatataaacattcaatactccatctgaggaaaaactgattattgttaattgtaatactcataataatttaccagagagtctcaatgtctcaatttttccttctattaaaagatactaattctatttaattcataaataatattctgataattaataatccatcttggtggaaagaaatttaagatgcttctggacaagaatgggtggagggatctggtctcattccattctccagtggacatacactgggctttaagaagaagaatatggtggaatccaccaacctataataaaataagctgaagtctttcatgtgtccccaagcccggaatattctctttcttctatttttccttcactgcctttacttttatttcttcctgctcccctgcactaaaagcacatacttggcctcctccagctcctctgtgcgctggatggcgtccgtctcgtacttggtcctccactgggcaacctcactgttggccttggacattcccctctgcagctcagccttggcttcctgctcctcctcatactgttcccgcagcaggtcacagtcatggcgggctgactgcagggcatgggccagagtgctcttggcctagaccaaccaaaaactatgtgatataagtttatcttctgatcattgaaattctctatgcaaagttcaatagtgtgttatgttgcacggttcaagtgattgaaagtatcagctggagaattctcaccttagtctcctcttctagctgcctctttaattcttcaatctgttgtgtaaatgcttgtttgcctcgggatagctgagaaaccatagcatctttttcatctagctgtcgtgaaaactcacctgtggaagacaaaacatcaatgatttagttctgttgtctaggtaaacaataatttaaagaatggaataacattgtaaccctcttatttcatatgatgaaaaaacccctcaagattttcagtgatgttgagaaggttatttcttgctttttaaaaaatgtatgagttttctttgatattttagaattcgagaacttttgagtaatgctgagtcacaaaaaatctcctgagcccagggagcttaattcttttccccaattgtcgcttagaatcattgcattttactgtctcataataaaaagatggaggaataagtaagacatgataaatgaatgtacagagcttgagaaattacttgtatttgataggtaggtaaaggcttgtctttcattcgtcacctctccgaaggttgatgctatttatttactgacctgattctgtgtgtaaacgtgccttctgggctgacaactcatttattaagcgttgttgctcttcttcctttgtttttatttcactaagctggtcctctagggtgcggcacattttctcaaagtttgcctggggtgagaggtagaaaacaggaagagacaatacatttttattctagaggctgggatttagagatctgtaactacctgtggaaaggggctgatttttatttacttttctatcaatcttgcatggtggctataaagtagtagaggcatttaatttggctaaataatgaacacatgattatcaaaattatattctctttgaaagygtgaacatcatttaaattctgcatcatttagagtatggtttttagataaaccttttttgtaattacattttt

SEQ ID NO: 710004 - DNA, 1390 bp, Homo sapiens
agagtaacttttttggtttccatgaattattttccctgccttttttttttcttcctgttttagatgcatttcagttacctgagagtaatccaattgtataggattggagtcccttgactttcccatatcattcccagtgtactagccagaacctgagatttccctgctttctatttttctcactaaaagggctattctgaactctctctcctcacctgctttcctatccttctcttctgtttaaagaagtcggtgttagtacagcttgaaatttaacagggcttgaattacagaaggcacaactgaagttagagaagaaaggatttttgttctgaaaattagcggtgagacagaccactctgaataaacggtgatatctggaaataatttttgaaatgcccaaaatccttcgtaactttaagaaattgaaaaggggtggggagggtcgtctataagagtgtctgtcattagaataagacttcttaaagtaatgtttgttaacaattggtaacaaggtcatttccaaacatagttcctggagccagttggctttggattggtagaaaccattgttgttccttcagagtcctcatctttggtaatttattttagaactaaagactgaagacagatgtccttgaacaaaaggtctgtcctagaatgggtggattgcatgaattcgtggattgtactatagtgaattggtataattctcttgtagcctaaatataatttggatccagaaatattaaaattttgaggacattatagtgatgaaatatttgaaatcagaacagttctagaaatattatgactctgggacttacagagccttttttgttttgtttcagtttactctgactgtactgttagtagtatggtctatgcttgtgctctcctctcagattwgtttgtttgtttgtttgtttgagacagggttttgctctattgcctgggctggagtgcagtgacgccatcacagctcactgcagccttgaactctcaggatccttgatcctcccacctcagcctcccgagtagctgggaccacaggcaagcgtcaccacacccggctaatttgtttgtattttttgtagatggtgttttgccatatagcccagactggtcttgaactcttgagctcaagcagtctgcccaccttagcttcctgaagtgctggcattactggcatgagccgccacgcccagcatttggatatttctataacagggttctctttcgtgggctgtagtgtagaccacacttacccttcatgatggagaatataattcctctccttttacaacctaagctaaagctcagtgtgtttgtttggttgtggtaaagtctggggtgggggtttgatttggggctttagatagtaaatgtt

SEQ ID NO: 710005 - DNA, 1390 bp, Homo sapiens
agagtaacttttttggtttccatgaattattttccctgccttttttttttcttcctgttttagatgcatttcagttacctgagagtaatccaattgtataggattggagtcccttgactttcccatatcattcccagtgtactagccagaacctgagatttccctgctttctatttttctcactaaaagggctattctgaactctctctcctcacctgctttcctatccttctcttctgtttaaagaagtcggtgttagtacagcttgaaatttaacagggcttgaattacagaaggcacaactgaagttagagaagaaaggatttttgttctgaaaattagcggtgagacagaccactctgaataaacggtgatatctggaaataatttttgaaatgcccaaaatccttcgtaactttaagaaattgaaaaggggtggggagggtcgtctataagagtgtctgtcattagaataagacttcttaaagtaatgtttgttaacaattggtaacaaggtcatttccaaacatagttcctggagccagttggctttggattggtagaaaccattgttgttccttcagagtcctcatctttggtaatttattttagaactaaagactgaagacagatgtccttgaacaaaaggtctgtcctagaatgggtggattgcatgaattcgtggattgtactatagtgaattggtataattctcttgtagcctaaatataatttggatccagaaatattaaaattttgaggacattatagtgatgaaatatttgaaatcagaacagttctagaaatattatgactctgggacttacagagccttttttgttttgtttcagtttactctgactgtactgttagtagtatggtctatgcttgtgctctcctctcagattagtttgtttgtttgtttgtttgagacagggttttgctctattgcctgggctggagtgcagtgacgccatcacagctcactgcagccttgaactctcaggatccttgatcctcccacctcagcctcccgagtagctgggaccacaggcaagcrtcaccacacccggctaatttgtttgtattttttgtagatggtgttttgccatatagcccagactggtcttgaactcttgagctcaagcagtctgcccaccttagcttcctgaagtgctggcattactggcatgagccgccacgcccagcatttggatatttctataacagggttctctttcgtgggctgtagtgtagaccacacttacccttcatgatggagaatataattcctctccttttacaacctaagctaaagctcagtgtgtttgtttggttgtggtaaagtctggggtgggggtttgatttggggctttagatagtaaatgtt

SEQ ID NO: 710006 - DNA, 1390 bp, Homo sapiens
agagtaacttttttggtttccatgaattattttccctgccttttttttttcttcctgttttagatgcatttcagttacctgagagtaatccaattgtataggattggagtcccttgactttcccatatcattcccagtgtactagccagaacctgagatttccctgctttctatttttctcactaaaagggctattctgaactctctctcctcacctgctttcctatccttctcttctgtttaaagaagtcggtgttagtacagcttgaaatttaacagggcttgaattacagaaggcacaactgaagttagagaagaaaggatttttgttctgaaaattagcggtgagacagaccactctgaataaacggtgatatctggaaataatttttgaaatgcccaaaatccttcgtaactttaagaaattgaaaaggggtggggagggtcgtctataagagtgtctgtcattagaataagacttcttaaagtaatgtttgttaacaattggtaacaaggtcatttccaaacatagttcctggagccagttggctttggattggtagaaaccattgttgttccttcagagtcctcatctttggtaatttattttagaactaaagactgaagacagatgtccttgaacaaaaggtctgtcctagaatgggtggattgcatgaattcgtggattgtactatagtgaattggtataattctcttgtagcctaaatataatttggatccagaaatattaaaattttgaggacattatagtgatgaaatatttgaaatcagaacagttctagaaatattatgactctgggacttacagagccttttttgttttgtttcagtttactctgactgtactgttagtagtatggtctatgcttgtgctctcctctcagattagtttgtttgtttgtttgtttgagacagggttttgctctattgcctgggctggagtgcagtgacgccatcacagctcactgcagccttgaactctcaggatccttgatcctcccacctcagcctcccgagtagctgggaccacaggcaagcgtcaccacacccggcwaatttgtttgtattttttgtagatggtgttttgccatatagcccagactggtcttgaactcttgagctcaagcagtctgcccaccttagcttcctgaagtgctggcattactggcatgagccgccacgcccagcatttggatatttctataacagggttctctttcgtgggctgtagtgtagaccacacttacccttcatgatggagaatataattcctctccttttacaacctaagctaaagctcagtgtgtttgtttggttgtggtaaagtctggggtgggggtttgatttggggctttagatagtaaatgtt

SEQ ID NO: 710007 - DNA, 662 bp, Homo sapiens
taatacacttgaattttactttgaagagtagggaccaatatgtctccacacatattttattaatcatgggcgttttgccagactgatgggatgcatctggtaaattcactctgtgtgtgtaagtgtgtgtgtgtgtgtgtgtgtgtgtgtgtgtcactgacttaccacatgtaatgattaaatgatacatgtaaytacattatttatttatggtaattgaaaagaaagtactactaaggtaattattgactttcctaatatcagaccacttatgctcagagcaggacacagaacttacgaataatgcctattttgtaacccagtattttcttctcaaattttgaataacaatttgaataatttaaatgatatcttaaatcctcattttaatgtaaccctttaataaacaaagaggtaatgataggccgggcatggttgctcacacctgtaaacccagcacattgggaggccaaggtggcagatcacctgaggtcacgagtttgagactagcctggccaacatggcaaaaccccatctctactaaaaatacaaaaattaggtaggcgtggtggtgggcgcctgtaatcccagctactcgggaggctgaggcaggagaatcgcttgaacccaggaggtggaggttgtagtgagttgagatcgtg

SEQ ID NO: 710008 - DNA, 662 bp, Homo sapiens
taatacacttgaattttactttgaagagtagggaccaatatgtctccacacatattttattaatcatgggcgttttgccagactgatgggatgcatctggtaaattcactctgtgtgtgtaagtgtgtgtgtgtgtgtgtgtgtgtgtgtgtgtcactgacttaccacatgtaatgattaaatgatacatgtaattacattatttatttatggtaattgaaaagaaagtactactaaggtaattattgactttcctaatatcagaccacttatgctcagagcaggacacagaacttacgaataatgcctattytgtaacccagtattttcttctcaaattttgaataacaatttgaataatttaaatgatatcttaaatcctcattttaatgtaaccctttaataaacaaagaggtaatgataggccgggcatggttgctcacacctgtaaacccagcacattgggaggccaaggtggcagatcacctgaggtcacgagtttgagactagcctggccaacatggcaaaaccccatctctactaaaaatacaaaaattaggtaggcgtggtggtgggcgcctgtaatcccagctactcgggaggctgaggcaggagaatcgcttgaacccaggaggtggaggttgtagtgagttgagatcgtg

SEQ ID NO: 710009 - DNA, 662 bp, Homo sapiens
taatacacttgaattttactttgaagagtagggaccaatatgtctccacacatattttattaatcatgggcgttttgccagactgatgggatgcatctggtaaattcactctgtgtgtgtaagtgtgtgtgtgtgtgtgtgtgtgtgtgtgtgtcactgacttaccacatgtaatgattaaatgatacatgtaattacattatttatttatggtaattgaaaagaaagtactactaaggtaattattgactttcctaatatcagaccacttatgctcagagcaggacacagaacttacgaataatgcctattttgtaacccagtatttycttctcaaattttgaataacaatttgaataatttaaatgatatcttaaatcctcattttaatgtaaccctttaataaacaaagaggtaatgataggccgggcatggttgctcacacctgtaaacccagcacattgggaggccaaggtggcagatcacctgaggtcacgagtttgagactagcctggccaacatggcaaaaccccatctctactaaaaatacaaaaattaggtaggcgtggtggtgggcgcctgtaatcccagctactcgggaggctgaggcaggagaatcgcttgaacccaggaggtggaggttgtagtgagttgagatcgtg

SEQ ID NO: 710010 - DNA, 662 bp, Homo sapiens
taatacacttgaattttactttgaagagtagggaccaatatgtctccacacatattttattaatcatgggcgttttgccagactgatgggatgcatctggtaaattcactctgtgtgtgtaagtgtgtgtgtgtgtgtgtgtgtgtgtgtgtgtcactgacttaccacatgtaatgattaaatgatacatgtaattacattatttatttatggtaattgaaaagaaagtactactaaggtaattattgactttcctaatatcagaccacttatgctcagagcaggacacagaacttacgaataatgcctattttgtaacccagtattttcttctcaaattttgaataacaatttgaataatttaaatgatatyttaaatcctcattttaatgtaaccctttaataaacaaagaggtaatgataggccgggcatggttgctcacacctgtaaacccagcacattgggaggccaaggtggcagatcacctgaggtcacgagtttgagactagcctggccaacatggcaaaaccccatctctactaaaaatacaaaaattaggtaggcgtggtggtgggcgcctgtaatcccagctactcgggaggctgaggcaggagaatcgcttgaacccaggaggtggaggttgtagtgagttgagatcgtg

SEQ ID NO: 710011 - DNA, 677 bp, Homo sapiens
cggggaggcgggcaaggggtggtagagggtgaaagaaagccctgggcctagagttcagtccccagtgagaaaaaacccggaagaggcttcagaaaaaggaggtgagcacagggaggcctcctgcctccgttctgctttccctttaaaagctgccgttctcaaatacccggcaccagtgagttatacctgagttaatcaaaaactctgagctgcatcctggccttgaacttcagtggatttgaaatttatcatgtataggtcattttcaagtggatgcatgtaagaaatgcattctctttaggggtcctctcacctccccgcaaatgcagcccacctcttgtgcttccaaagccctgggagaccaagccactcacctgggaactgatagccatagcttggagcaaatccggggtagccacggccataggtcgccacgaagttgggatatccttgaacacaaagagaaagatcagagtcctgttagtacagccgcctcaggtctggggtaaaatctcacggagggtggcaatgaggaaagcctgagttattttccttcacagaataatttgtctcycatgagggtttttttattaagggtctgggtcacctctctcctgtggccgggggcgctgctgtcagctgttgctaattaacccatatttgggcagccagacccc

SEQ ID NO: 710012 - DNA, 604 bp, Homo sapiens
caaattgggatttgtggggccaacttcctaggcttgtttaagaggtaattgagataaggcatgtacaacagtgctgaaaggaaatatattaaattataagagattgcaatcttctattcctagtcatctaagagagccagcccaagttttagacttttttgatgcagaactaaagaggggaagctaagggtcttgtttcagaaagggctgagatttattcatgggaaagaaaaaatagacacaactagaaggaaacaaggagatggagaaacgtaagaaagaaaacctggcaggctyagattttcagagagaagtcttttcagtgcgtagttgagaatgagtcctgagaatgaggttggacagcagaagtatagaagagatgaggggaggccaatggcttaggggaaggaaggcattaagaagtgatgtgtataggagctagaattataaaatcttagaagaaagcatgggagcaaatcttagatatgacacaaaaggaacaagcaactaaagaaaaaatagataaatgggacttcatcaagattaaaaacttttgttctgcaaatggtaccattaagaaagtgaaaaaggcaacccacagaac

SEQ ID NO: 710013 - DNA, 634 bp, Homo sapiens
ttttccacagtcacactttatgcttagatgtgaagatttcactttccttggattcacctgcttctatagagataaatctgcaagtagaggatgttgccataagtttgtgagtgtgccttctggaaggtctctagggtggaggcaagcatgcttttcttccttacaaaaatccccctaatatagctaacttaaaaaatgtaagtaaacattacattcaaaggaaaataatgtagatcaggtgtctagaggaaaacacctgggtgtaatttggtgtcatcttcacttatacttaaatgttgcccaggccagcttattctaacctcataccagacactgactctatttgccactatgacttcttgttctagttcttcccaccccaagctttttactattccctgtcaaccctttttacccaaccctcaaccaaccaaccaaccagcattatctcacttacagacatcaaaggtgccatcaagaggggggcagcatatgccattaaatgggaaaacctattttcagaaccctggttaactaacaaggggtwagtgtccagaagagataaagaacccttatgaataaataaggaaaaggaagtcaatccaatagaggaaatgggtaagaaaaaaaaaaa

SEQ ID NO: 710014 - DNA, 634 bp, Homo sapiens
ttttccacagtcacactttatgcttagatgtgaagatttcactttccttggattcacctgcttctatagagataaatctgcaagtagaggatgttgccataagtttgtgagtgtgccttctggaaggtctctagggtggaggcaagcatgcttttcttccttacaaaaatccccctaatatagctaacttaaaaaatgtaagtaaacattacattcaaaggaaaataatgtagatcaggtgtctagaggaaaacacctgggtgtaatttggtgtcatcttcacttatacttaaatgttgcccaggccagcttattctaacctcataccagacactgactctatttgccactatgacttcttgttctagttcttcccaccccaagctttttactattccctgtcaaccctttttacccaaccctcaaccaaccaaccaaccagcattatctcacttacagacatcaaaggtgccatcaagaggggggcagcatatgccattaaatgggaaaacctattttcagaaccctggttaactaacaaggggttagtgtccagaagwgataaagaacccttatgaataaataaggaaaaggaagtcaatccaatagaggaaatgggtaagaaaaaaaaaaa

SEQ ID NO: 710015 - DNA, 605 bp, Homo sapiens
gaaaagccatcttgctatgccagcttgctgacccagagctgtgagataatgcatatatttttttaaaaggctgctaygtctctggggatttgttacacggcaataaatgcagagtgcatcccctcctaagggtctcacctgcacatcgtagtgggccatgaggacggcaaagctgctcaggtgggtgcaacggcagatggtgctggtgtctctggtgcctattgtgctgcagcctgtggtggcccagtgaccacatccattctggccatgctcccagaagacacagagcaccttctgtctcgggatcactgactgcaggaacagaacacaggtgtgggctgggcatggtggctcacgcctgtaatcccagcactttgggaggctgaagcaggtggatcacttgaggtcaggagtttgagaccagcctggccaacatggtgaaaccccatctctactaaaaaaaaaaaaaaaacaaaaaaacaaaaattagctgggcgtggtagcacacacctgtagtcccagctattagggaggctgaggcaggagaatcgctcgaacctgggaggcggagactgcagtgagctgagatcgtgccactgcactcc

SEQ ID NO: 710016 - DNA, 605 bp, Homo sapiens
gaaaagccatcttgctatgccagcttgctgacccagagctgtgagataatgcatatatttttttaaaaggctgctatgtctctggggatttgttacacggcaataaatgcagagtgcatcccctcctaagggtctcacctgcacatcgtagtgggccatgaggacggcaaagctgctcaggtgggtgcaacggcagatggtgctggtgtctctggtgcctattgtgctgcagcctgtggtggcccagtgaccacatccattctggccatgctcccagaagacacagagcaccttctgtctcgggatcactgactgcaggaacagaacacaggtgtgggctgggcatggtggctcacgcctgtaatcccagcactttgggaggctgaagcaggtggatcacttgaggtcaggagtttgagaccagcctggccaacatggtgaaaccccatctctactaaaaaaaaaaaaaaaamaaaaaaacaaaaattagctgggcgtggtagcacacacctgtagtcccagctattagggaggctgaggcaggagaatcgctcgaacctgggaggcggagactgcagtgagctgagatcgtgccactgcactcc

SEQ ID NO: 710017 - DNA, 609 bp, Homo sapiens
atccttgggctggcttcattgttcctcccgggaagagtccagggcagctgacacatgatcccagcatggcacgccggggacaggggaggcactctgctgtccctgactgtatttaaaaaaaaaaaatccacaagcaaaatccctaatgagcaatgttccacagtaagtcctgcctcagaactgtgcaggcatcagaaacaggaatgcctgagaaacggccacggtcccaggagctgaggaaacaccacgcctgatgccacgtagggtcctggatggagccctaggccaggaaagggcattagaggaaacccaggaaacttggatagagtgtagattttggtcagtaataatgtatcatgtgacaaatgtatcacactcatgaactgggcatggggtactcacaactytaaattattctaaaaatattgatataaatttaagaccaaaaccatggccaggcgtggtgcctcactcctgaatcccagcactctgggaggccgaggtgggcagatcacctgaggtcaggagttcgagaccagcctggccaacaaaccctgtctctattcaaaatacaaaaactagccgggcatcgtagtgtgtgcatgtaat

SEQ ID NO: 710018 - DNA, 609 bp, Homo sapiens
atccttgggctggcttcattgttcctcccgggaagagtccagggcagctgacacatgatcccagcatggcacgccggggacaggggaggcactctgctgtccctgactgtatttaaaaaaaaaaaatccacaagcaaaatccctaatgagcaatgttccacagtaagtcctgcctcagaactgtgcaggcatcagaaacaggaatgcctgagaaacggccacggtcccaggagctgaggaaacaccacgcctgatgccacgtagggtcctggatggagccctaggccaggaaagggcattagaggaaacccaggaaacttggatagagtgtagattttggtcagtaataatgtatcatgtgacaaatgtatcacactcatgaactgggcatggggtactcacaactctaaattattytaaaaatattgatataaatttaagaccaaaaccatggccaggcgtggtgcctcactcctgaatcccagcactctgggaggccgaggtgggcagatcacctgaggtcaggagttcgagaccagcctggccaacaaaccctgtctctattcaaaatacaaaaactagccgggcatcgtagtgtgtgcatgtaat

SEQ ID NO: 710019 - DNA, 2475 bp, Homo sapiens
aaaatcttttttctttacctaaatggtaacttcttgcaacttgattcttttacttcatggttatatatctaatttgacaagtgtatcacctatatgatatcatatacagtatcacttattgtatgacatgatattctttcacttcatgatttatttccttcccagtacttagagggtcaccccattcatttaaactcctgcataatccacggtatggatgcactgtagtttatttaataattcccccattgatgaattgttagattaggcttagttttcttgttacatgcgttgctgcaatgaaatccccgtacatgcttctttgtgaatatgggcaagtattcctgtggaatagatatctagaaatggaattattggggtgaagactatgtagactatgtagatataaaattttaattgcccccaaaraagacacttctggagagtttatatgatgactgtgtgcaggatagtttaggaagggagagactagagatggagacaccagccagacaacgtaacaccatccaggtaaagagggagggacaacaagccccatcactgtataactgaagaaatcgctttcatgaaatattaaagcaatataaaaccaaaaatgaatttatattaatatgatataaattaattatattaatatgatttgaattagttcaaagttatgtattaggtaaaggggcaacttcctttcaaatgctgtgaaaggatgtcttttatttcttctgatcctgaactggcttaggaaaacagacctgaactaggaaggtgtataaatgtgaggctatttgttttaatattagaaactatatatagagatcaaaactttgagctcataatctaggatttgatgagactacaaaagggcatctaatcaagtctactgctctcaggaaaaattaattccaaagtctattaagttgtatattttatttattaaaactatgaaggtaagactctaggagaggtatgggcagggttagggctctggaaagttcaaatacaagtccaaacgtttagagttgaaaaatgtgtattcaatattattctaaactctattattcatactaatcgacatctaataacttatcaaggcaatattttccttttcctagagatttatcctgcaataaaatacagtctattgaaagacatacatttgaacccctaccatttttgcagtttatgtaagttacaaatataactttattgcatttggaatttttataaaacttaattataaacctctttgctattcattttgaaatgattaaaatttgaccagtagaaaggaactaaaattatatagcaaactgtttttgtctctagcaaggattagtgtgagaattattacacagatcatagtgaatcatcagagagcagtggttctcaactgatgtgattttgtactcaggtgacatttggtaatgtccagagacagttctggttgataaaactgtgggtgtgctcctggcatctggtgggcagaggccagagatgctgctaaacatcctccaaggtataagacaaacctccatggcaaagaattatagagtccaaaatgttgatggcactgaagttgtgaaatcctgttctagagaaataaagatcacttagcacagatatttactgagcattcactgttttgtatctaatgcaccacatatgcaatgttaaattataaatcataagccagtatcttccacagggagatttctttagtgcttagagaaaggattgacgttacgttccatcctatataaattagactcacagcaaatgataaatgctctgaaataatttttttttcctttggcttatgttttttttttttttgtagaaatcttggttgcaatttactaacagaactgagctttggaacatctcaggcctggcacagaatgcagtttttacacaagttgtaagtgaaatagaagatgaataagtgtaaacatctatttatgtataaaaactcatacaattattggttagctgggtataagcccattatgaactctgaaaagtatgtcttaagatccatttgtttttttcaaatggggaaactaaggtacaaagaggccaagagacttacatagcttatatatgacctgctctgcttgtcctagttctgacctatggcatgggcaagaaaaggcatcaaacaagtgacccccaaattagtcttattcctgggtggggtggctcaggcctgtaatcacagaactttgggagccgaggcgggtggatcacctgaggtcaggagttcaacaccagcctggccaacatagtgaaaccctgtccctactaaaaatgcaaaaaaattagctggttgtggcggtgcagttttttgctccctgggggactttgtgttaagctttcttccttgcagctaaatgttgcagacatttaagcagttataaactctgcatatgagcaggaatcaaagttaaatccaaagtg

SEQ ID NO: 710020 - DNA, 620 bp, Homo sapiens
ggccacattcagccccctggccacagacacagacacagacgcagagaccggactaacactgggtggaacaaaggtggtggcagggtggacacgcatggaagggggcctgggggcaggccctgtggagcctgaggggctgagtgggcagcaagagcgagcgtgagtgggtgggtgagtgaggagcctcttacctcgaatcggagtgctttctgtaagggaagcagagagaaccaggtgaatgtcacaaggcggttgttggggggccggggggccccagggaagctgggctgggccgtaagccaggcctcagcactctgccccagggaggggatcgagccagccctgggcatacggaccctgcgggctttgctgaggaagctaggagaggcctcctaggagcagggtgaggtctgagggcttgtcaaagcaggagggtttcctgtagaaggcgggaatctctgggggtggagggatggagtctagaagcctctctggatgggtgaggggcgtctctatgcccagggaaggtctgtcagcctggccctttggtggccttccctctgggctgagggagggaggtwcatcacccccccttccttctttccgtcttagggagccca

SEQ ID NO: 710021 - DNA, 583 bp, Homo sapiens
gccatcccagaaagcgaactgcctatctgactcacgactcattaaagttttatgagggagtcaagccaaaccaagaagcacctaatctgctgaccctaaagaatcaagcactaaaacatggatattgtttgaggatattaaattcttgtatggttgattattcacaatcctcatagagattgccycaaattcttccttattatattttacctttcatttacagaagccatagctcactggcatagttacttcatatcccaatttaaaattaccaaagatacaaatattactgattttcttttatccattaattagttcacgttgattgagatgtccatctattgaaatgtaggatatgctgggtgcggcacatcaggtagtaaacactacatgactgccttttaaactgtaggaaaattgtgttccacaaaagggcagataattgagggaaaaatgtatgctcatttttttcaacaatattatattaaaactaccctctcactgttttcctaccaaaaagtaaagctaacaatttcaaaattatttaatagctcatattctttgagcacaatgcaaaagctaa

SEQ ID NO: 710022 - DNA, 599 bp, Homo sapiens
tcaggccctgagccgggtgcttcatacagtctggtctgctgggaccagaaacccccatcagagatgctcccagagttgaggacattctgagaggatgacctcgcagccactccaagcctgagggcaagcagagaaggccggtgcccccctcccaggctgaggggccagcctttgcttttcccccaaaaggtaggggcctaagagaggtagcagtgcttccccggctttccaaaactcccctttccccaggattttggcccaaattagtggtggaagcccctccctttttgagggtcctcctctgagcgccgcgctgtcacctctgctctgcgttcgcaggagaatgcccaggactgcggcggcgcctcggacacctcagcctcgccgcccctactcctgctgcctgtgtgtgcctgggggctactgccccaactcctgcggtgacaccacccagcctgacctgtgttttggcaaggtgatccttccagagccatcccamaaagtcagcactgacatgggatgcagctaactgcagttgggtcgcccccaggccaacgctcctctcaatcctgggctggtggcccctggctccggagaat

SEQ ID NO: 710023 - DNA, 1289 bp, Homo sapiens
tgttcccacttatatgttataaaaatatgtaagtatatgtaagtgcatatgttctagaataattaatgaaaaatatttaaaaccatactcttggtacagaagaacatatggaagaacctcgggtctgaagtgagaagaatacttactttgttctgcctgcattttttttaaccatgtatcatattacttgtttaatttaaaaaatagtatacaattagaaattagaattctaaatactaattgtatgtattagaaagaatatatgtaagtttatatattataactgggctttacatatccaatctcatttaaacatcacaatgaccccacagggtatttttatttctagttcacaggtaaaggaaaacaaaattcaccatactttataaaaaataaacaggacaaagtcttcaaatttataagcacatattatccataatattttgtattcaaaaggcttaatgtcttacatttcaacttttttgagttattctgaactctaactagactaccctggaaggaagaaactcaggaccaaagcatacacgttttacatccatctgggttcccagaaagtgctacgcacacaaatgtttaatgaatatttgataatatctcaatgctcttgagtgctaagaacattttcagaaatcattaatttctctctaaactggactgcagcaagtaagtcctaggagttcaagcttttcaagtccttggcactatacctcttaactcatgatatgtaagcttattttagacaattagttgaatatccaataaggattatcacagtcaatccaaccagaaataccaaaacaggaagagaccagggtatatgctagctaataaattccatgaggttcaaggttcttagtggggaaaggagtagggcaaagtaggagaacccagataccataaaaagaaggtaacaggtggatttagtttcatatatgtggatacatagactaagaattagtcaaagaaacagagtaagaattagtcaactgttggtttcataaatcatgtgaatttgctgtaggatttctccaagggctttygaagtatgtagggcaagaagaaacaaaaatctaaagaataccaaacctgggcatgtacctgggccaagcacatgatactattgagattataaattatgttattaatgcccatttctgaaagaggaaacagaataatggcttctatttaattatattatttaaagctcacaaagctattcacacacaccatttcattttgtttcaggggagaggcagcaaacatttact

SEQ ID NO: 710024 - DNA, 1469 bp, Homo sapiens
ttcggccatcttggctcctcctcgagacctttcttgtaatcaccccattttaaagatgaggaaggggcacagggcaatgaactaacttgcccaagtttgcatagctatgaagcagtggagctgggattccagcctgggtgtgtggctcccaagtctgtgcttttaactgctatgctgtgtggcccccaactaaggtataaatgggaggggtattttgctttgaatacgatgccttaattatcaggccttcaactagagtttatgcagtgtgtgcgcttctgtctttaccaagaggaccaagggaggagcaacagtgaaggagggagtgaacgtccccaggctgggtggtgtctgtaggggtcctgggggcatgccatggagcccccaggccatgccatttggaaagcataaggggtaggcaaaggggaggccttttcatctgctactacctgagaggtagacttggctttgaggccatattttcccagggatcagtgattcatattacctgagatcctcaaccaaacaggcccccgggcctcttcctaaatagatgagaatctctggttggggtgagggaacccagaatcagcctgactttctgagacaaacttaaaacttgagggacccttctcgtggactgagtccttggaagcagatcttgggagctgctgggcctgcatttgaacttggggccttcatgggaccccagtcagtactggtggttggcagggctcagagcataacatgtgggggaccccacggcgccccgcccaggtgagagcagtccccctctcgtgccgagaggctccacaggttttgcctgtgcaccctaggccccactggagacgtggaaacatcgaagagctacggcctgaacaccaggatgtgggatgggtagtaagagagtgctgagctgcatgtcctagccctgggctctggttccagttctacctctgcctggtggcacggccttgtcacttcacttctctgagttttaggtttctcggctgtgaaataaagataataattcctacctcactgagttatggcaagggcaaatgagaatatagatagaaatgctccgcccagctctaccaaaaaaaaaagtatatatatacacacacatacacacacattagctgggcatggtggcttgcacctgtagttttagctgcttgggaggctgagacgggaggagtgcttcarcccaggagttcaaggcagcagtgagctatgattacaccagggtgatggggcgagaccccatgtttattttttaaaatgctctggaaaaatgcaaagtgccatataaacatagaggcattattgtgatcattattactgttatgattcaaactagacagatatatttgtctctaaaatacttactgtttttttttttctggcacattcctctgtgaacctttttcctcagcctcctctcaagataacttagagatgcaaaa

SEQ ID NO: 710025 - DNA, 646 bp, Homo sapiens
tttgaaacaagtgctttcatgatccccagttagagatgaaaacaatcaagatgtaaagagtacaagtggtttcccaagcttacagctgagccaggatttaaatccatgcgtatatgactcactctgatgtctagcttcaagtactttcagttggggtttgaacagtggaaagaattttaaagtcagaaaggagaggacagggcaktgtaaacaggaggaacagctggagcagtggctcagaggcaggaagtatgcacatgtccaaaagtccatatatagattttgtttgacaggaacacggagcttagaatggaagcagtggggataagactgggctgactgtgtaagtcactgtaaagaccttgagtgacaagctacagagactgacgtttctcctgcaggaatgtgcaagacttgaatttcagaccatgccattccagttactttacaaggtatatttcattagaatgaagcaagacgaaatcttgaaatagtcttatttgtaccattctgtttcacttttctttgttgggaaacctttccctggtcaacaagagacatgcacaatgattttttattctttttttttttttgagacagggtctcattctgtcacccaggctagagtgcagtggcccaatcacag

SEQ ID NO: 710026 - DNA, 646 bp, Homo sapiens
tttgaaacaagtgctttcatgatccccagttagagatgaaaacaatcaagatgtaaagagtacaagtggtttcccaagcttacagctgagccaggatttaaatccatgcgtatatgactcactctgatgtctagcttcaagtactttcagttggggtttgaacagtggaaagaattttaaagtcagaaaggagaggacagggcattgtaaacaggaggaacagctggagcagtggctcagaggcaggaagtatgcacatgtccaaaagtccatatatagattttgtttgacaggaacacggagcttagaatggaagcagtggggataagactgggctgactgtgtaagtcactgtaaagaccttgagtgacaagctacagagactgacgtttctcctgcaggaatgtgcaagacttgaatttcagaccatgccattccagttrctttacaaggtatatttcattagaatgaagcaagacgaaatcttgaaatagtcttatttgtaccattctgtttcacttttctttgttgggaaacctttccctggtcaacaagagacatgcacaatgattttttattctttttttttttttgagacagggtctcattctgtcacccaggctagagtgcagtggcccaatcacag

SEQ ID NO: 710027 - DNA, 1397 bp, Homo sapiens
ttttttttgagactgagtcttgctgtagcccagactggagtgcagtggcgtgatgatctcggctcactgcaagctcagcctcctgggttcacgccagtctcctgcctcagcttcccgaatagctgtgactacaggcacccgccacaatgcccggttaatttttttgtatttttagtagagacggggtttcaccgtgttagccaggatggtctcaatctcctgacctcgtgatccgcccacctcggcctcccaaagtgctgggattacaggcgtgagccaccgcgcccggccataaattatttttatttataccaaactgcttatctgccgagcctttttaagtatttgagtttgtaacctgatgtgttgcatccctctttgaaatttcccagaaaagacacagatgagacagttaacaaaatgcttgaaagaaatttcatttccctttaggaagtcttgtgctgcaggtgagctagtattcaaagaaccttccctctggtgcctggcaggcatgatgcaaattacttctccctgtctctcttcccagaaagtcattctaaggcctagacaattagaccaccatagagattgcctctaaaactcacttactgtttaagggctaaatctgtacattaacatatacttttttccacccccaaggattagggccagcacttcagcccattaaaaagttaaaaaaggcaggggaagaccttaaactgtaatgaacttttggaaaactgacccaatttgctgtttttacattttactttgttttaggtgaaataaagctaaccaggtttgcttttccattttccaattctgctgtaacacatttttttttcctagtaaagaagatcttgcttgcagtaaattaatacttggaaactacaccaattccttgaggatgattattgctacctttgctaatttttctctatttttttttcttttttctctcttgttttcaaagaagctcctgattcagtggaatcttccttctgagtatattttgtatactctggtagacacactctctaaacaaaaaatactatcaactacaaaagtaggttttagaaatgctaatagttataattgyatatatattatatatacatatataattgcacatatatatatatacacactatatacataaaattgcatatatacatctgagactggcttaaagaagaagttggctaggatcacagttaaattcatagcacagagggaggtagaataggatggccgactagagaagcctaaggcccatatcccccacaaaaaatgaccaaaacaatgaacaaacaactatatttaaactagagtgtttgaaggagagcactggggtacaggaggaagagaagaaaaaaacctgtgcaactaaggttgac

SEQ ID NO: 710028 - DNA, 572 bp, Homo sapiens
tgactttgcgtttttacggcaacttcactatttccttgacgatttggttgcttcttttttgagtttctcatggtctttcttcaagtgtagtaagcacacaggacagaaatccctctccaaccacaatccctctccatctgactaactttgtatatttttagtagagatgaggtcttgctawgctgtccaggctggtctctcttatgccacattctactctgcttggatgaatttccaagcacaaaatgagaatttcagtttaatatatgcaaatcacagtcattgtgttgaaaacaactggaaagagaagggactgggagttggtgagagaaaagggtaaaagctgtaggcagagtgctatcagaaacatttttcagagaggtgtgggaacaataaaagcaggtgaggtcttagaactccaactctgcactctatcccagagccagcacacgcaactgggcaggtatcccacccaaaaacaccctccaagagggaaggcaggggctgaaattcagccctcacccactcactgtgctcctaggtgctgggctacagcagccagcaggagtaac

SEQ ID NO: 710029 - DNA, 1690 bp, Homo sapiens
aataatctatttgacttaacccaatagatctaaaatactttaatacataatcaatgttgmaagtattaatgattacatttttttccttactgagtctttgaagtccaatgtttgtttgacacatacaacacatctcaatttggactagccagacttcaagtgctcaacggccccatgtggctagtggctaatgtactggacagctcaggtctagaaagcaagggctgataaatgaaaaggaagcaaatagcatccattgataggaatacaagttgtgtaggatgtaagccactgactttgagtgccgatttcttagttttattttagtgaaaataaaatcagttcacacccagtatcagttccctaaccctatattcccctaaggtcccagattactcaacataggatattcctaccacaaagagttttcgttcccttttggaccctcttatgaagagttgtcattcttcacattcttaggcatgatggacctctgaatgacaggttcccatctgaccaaaaagcctccaatttcagctttgagttatttcagacttttcagatggaagtcattttatatctgtggtttcaaacctgaccagtcatctaaatcacttgagtatttaaaacaaaaaacataacacgcgccctggacctgctgaatcccaatccagagatgcgctcggtgatgtgtatttttaaacgccttcacagatgactgtgatgggctttcagccctgggaaccactgagcatcatctgctttgctgaaaagatccagagacttcatcaggcaccatagcagagacacagcaaggccccgactgacaaatcctctaggagaaacactcctattaaaaatgttgtagccttggccgggctcagtggttcatgcctgtaaacccagcacgttgggaggccgaggtgggaggatcacctgaggtcaggagttcgagaccagcctggccaacatagtgaaaccccgtctctactaaacatacaaaaattagcctggtgtggtggcaggcgcctgtagtcccagctacttggaagcctgaggcaggagaatcgcttgaacccgggagaaggaggttgcagtgagccaagattacaacactccagcctgggtgacagagcaagactcaaattaaataaataaataaataaataaataaatgtagccgcggggggacggggaggaagttgtttatttcctcatggctgggataatggcagtagtggaggtagaagcttcttgggtgcagcctattttaggcaggccgagcccagtccatggaacaggaaacagtatctgcaggtgggggaccaacatgagagaggaccacgggtctcgagttggcctgagggtgtgggtaaggaggaaatgcacagtgggtaacccgcccgcccctacacacattctgtttttttacttctggcttttctggcagtcagtgaactctcttaatcttaaggcatggcgtgtaatagcagagcaaacctgtgttgcaaagggacaacctgaaagagcatgactgaaggggaaataaaactcacccggtccttctggatttcagtttaatcactgggtgtgcccttggcaccaggatcataaaacagacctggtttccttcctttgatgtagttaaagagccctggatttgtcgtcggggcacctgagttccagtccc

SEQ ID NO: 710030 - DNA, 910 bp, Homo sapiens
gatccgcctgcctcggcctcccaaagtgctgggattacaggcgtgagccattgcgcccagccgaatttgttgttttttaacaggaaaatccttactgaagtttcaagattcccattctaatgatttttaaatctctattgaattcaatgaattcaaatctctctctcttttttttttttttttttttttttttttgtgagacagagtctcgctctgtcgcccagactggagtgcaatggcatgatcttggctcactgtaacctctgcctcctgggttcaagcgattctcctgcctcagcctcctgagtagctgggattattggcacatgccactacgcctgcctaatttttgtatttttagtagacacagggtttcaccatgttggtcaggctggtttcgaactcctgaccacacgatccgcccacctcggcctttcaaagtgctgggattacaggcgtgagccaccatgcccggcctctaatctgtttatgtttacagatttgtttttgcctcactcacagctactatttgtatttttactgagcttctttggacaaggttaaggagcttcttttcctgacttctgttgatttttggtgctccgtgtttggagttcataattacacaacctcaggggttttctggggttaggggaaaacagcagcttgaaggctyaggaagtggctggagttctggaaatagagtccagaacatagacttagaaaaccctgatgaacctgtgtgacctggtcctccaaggactgagcaatgttgcctctcctggctctggaaacacagcacacgggggcttccagagtgagcaggaagttgctggccataccttcccaagccccagagatgcattcaggctatttgaggattgtcattaaggcttagagaaaattgttg

SEQ ID NO: 710031 - DNA, 1479 bp, Homo sapiens
tttcaatgcattttgcctaaagtgttatagaccctttcactagtgagagaacatcaaagccacrctaatttatttaaaatttgtcttgagctcagacatccgggaatgtgaaagtcagaacatttctatactactaaggtagtatagaaagaccatgagcttaggggtcagaccaacctggcttctgctccccaccttagaaggtgagtgacattgggctagtaacttcacctttctgaagcctccgttttctgatctgtaaaatggggataatgttaggtaacgcctaaaaattgatggggacaatatcaatacttaatagttaattattatagttaatagtaagcaatagacttttgagtaatggttgctattattggttctattaccaactttcagcagccttgggatttaaataacagccagcaactacacagaaaacagtcttttaacacactattacggattagaactaggtagtatagctcagctactgattaaaaaaaaaaattaaaaaaaaaagaaatcctctgaatcgattaaatgcagtgaacttccaaagtgcacatttcaaatgaataagtgtgggctggcaagaggcacagtaccattacagtagaagcggaaagaacgtgaggaatgaggctttcccaagttagacctgtggtagttcaggtcttgacgggccaccttggtgtttcttcacaatcagcgctaagtgcatagcatatgtgcatggaattcctggatcagcagtcgctgtgggtcagaatccagatcttggccttgcagacccgttcagaagaaacaaaggctgtctagacctcccgtttgtgaaataaacttgacttgcactagaagagctccaagggtccttgtaacattacaaataatttcataattctctgtttctggaaaaagtaaagacgggcctggagaggcggtaattacactttctgttctctcttagtctctctcatcccattaaacacagcctagatcaggtggagacgcctctcaataaatactatgaaagaatccacgctttcctaattgtttggcttcttaatcaaaagaagagcttcctttcaattgttaatgatgcaaatcaatagggtatgtggaagaaatgacacctattcagaaagctgtgaacgtctgaagtgctaatggtgatgattaggtattatgcaaagaaaaagcgagaatcaattctattctccacacactgccagtgggactcagtcctacggggagaggagcaagtccagaactgtctgccaaatatgagggtgaaatattaaagccaccttcatggataaccaaacactatgctgagtttcaaaaggggaaaaccaaacaagcaatttgatgctatttttactccttagggacaaaggcaaactgaacaggaccgactttaaatgtaacgtaatgattcaaggaacctatatgctttatcttccctcgggatgttaa

SEQ ID NO: 710032 - DNA, 1479 bp, Homo sapiens
tttcaatgcattttgcctaaagtgttatagaccctttcactagtgagagaacatcaaagccacactaatttatttaaaatttgtcttgagctcagacatccgggaatgtgaaagtyagaacatttctatactactaaggtagtatagaaagaccatgagcttaggggtcagaccaacctggcttctgctccccaccttagaaggtgagtgacattgggctagtaacttcacctttctgaagcctccgttttctgatctgtaaaatggggataatgttaggtaacgcctaaaaattgatggggacaatatcaatacttaatagttaattattatagttaatagtaagcaatagacttttgagtaatggttgctattattggttctattaccaactttcagcagccttgggatttaaataacagccagcaactacacagaaaacagtcttttaacacactattacggattagaactaggtagtatagctcagctactgattaaaaaaaaaaattaaaaaaaaaagaaatcctctgaatcgattaaatgcagtgaacttccaaagtgcacatttcaaatgaataagtgtgggctggcaagaggcacagtaccattacagtagaagcggaaagaacgtgaggaatgaggctttcccaagttagacctgtggtagttcaggtcttgacgggccaccttggtgtttcttcacaatcagcgctaagtgcatagcatatgtgcatggaattcctggatcagcagtcgctgtgggtcagaatccagatcttggccttgcagacccgttcagaagaaacaaaggctgtctagacctcccgtttgtgaaataaacttgacttgcactagaagagctccaagggtccttgtaacattacaaataatttcataattctctgtttctggaaaaagtaaagacgggcctggagaggcggtaattacactttctgttctctcttagtctctctcatcccattaaacacagcctagatcaggtggagacgcctctcaataaatactatgaaagaatccacgctttcctaattgtttggcttcttaatcaaaagaagagcttcctttcaattgttaatgatgcaaatcaatagggtatgtggaagaaatgacacctattcagaaagctgtgaacgtctgaagtgctaatggtgatgattaggtattatgcaaagaaaaagcgagaatcaattctattctccacacactgccagtgggactcagtcctacggggagaggagcaagtccagaactgtctgccaaatatgagggtgaaatattaaagccaccttcatggataaccaaacactatgctgagtttcaaaaggggaaaaccaaacaagcaatttgatgctatttttactccttagggacaaaggcaaactgaacaggaccgactttaaatgtaacgtaatgattcaaggaacctatatgctttatcttccctcgggatgttaa

SEQ ID NO: 710033 - DNA, 2673 bp, Homo sapiens
tcccctcacctcagtctccctcctgagcagctgggaccacaggcacgtgccaccatgcctggctaatttttgaaaaaattttttgtagaaatgaggtctcgctatgttgcctaggctgatcttgaactcctgggctcaagcgatcctcctgccttggcctcccaaagtgctgggattgccggcatgagccactgcacctgctttattgtgatttattctctacagtattttgttagagtttggctgggtgtggtggctaacacctctaatcccagcactttgggaggcgggaggatcacttgagcccaggaggtcaacgctacagtgagctatgattgtgccactgcactccagcctgggcaacagagcaagcccttgtctcaaagaaagaataaatcacactggattaaaaaaaaattttcaaacatgagtcaagaagcagcctgtgaaatatcaggctcagccccaactacatttcagggctaactaggcccagagacccactgttggtgctatttcgtcagctcttatccaggaccctgatccaggctctcctcaacattcgcaagagagtgtttgagaaagaatggttaaaagcaagtgttcagtcgcacacactcagagagatggcacagtttgtaatcctagctctgtgggtctcagagtatggcccctggccagactcagcagcctcaccttcccagacctcccgactcagaaactccagggcggggactcaggaatctgctttaaccacccctccagtgatcctcgtgcatggtcaagtttgagaagcattgtatatcctagctgaatctttctttaggatggatatcttccttgaggatggataatgccatctttctaggatgagtgatggagctgcagaggcatttcagaaggtcggtcactaggtttcaagggcttaaggtgacacagaaactgcastgttgtagaagcaaaccaaggacaacagtgcacccagctaggttagatcaaagtggcgggtagcgaaggggagtggcagcctccctttcacagaaggtttgctatcacaccccacccgcagacaaagccccctgggtatcacactgaggggccatgcacggaaggtgggcaccatgcaatgaggcaatccacaccagcctcaaaggtgctactctctgctagtcaaagtctacctagaagacacttccagacaaaggccagcctcagtaaccaagacgtgcctgcaatgattaactgaacagttttttaaaacctggaaggtgtttgtgtgctcagatcacatcctacgtggttgggcaaaagctggcaaagtgtgacacatagctgacactggaaaacgggaatccaggtgaaaaacagttttctaggtgcaggtaggagaaagggggcaaacaaaatctgacagatacacgagagagaactccagggtgttggccaggcgcagtggctcacgcctgtaatcccagcactttgggaggctgaggcgggcaaatcatgaggtcaggaatttgagaccagcctggcctacatggtgaaactctgtctctactaaaaatacaaaaaaattagctggacatggtggcgggcgcctgtaatcccagctacttcagaggctgaggcaggagtatcgcttgaacctgggaggtggaggttgcagtgaactgagatcatgccaccacactccagcccgggcaacagagtgagactctgtctcaaaagaaaaaaaaaaaagaactccagggcataaactgcatgggagtcccctaccctctgccccttgggcccaggtctctcaattccatacactcagagttggatctcttaaacaaacaggcaattgcccagatggcccgaccaggcctccactcattggtttctttctggtcctctgactgttgtgcctcgcctgtctttctcccagacgttgttggaattcccacctccacatgcccacccctagatccagcttcctggctggtgcctgggagcgtggcttctgcccgcccactggcctggcctcagaggtctgccctaccctgacgctagcaactgctcagactaggcagcccgtggatggaactgcctgatgctgtcctcccatgcaaagagaatggagccctggaagaaggctctctggagtcaccccaacaaaacaccatgtgagccttgcacttccttgcagtgtggcagggcacatctcacatgggtgcttgcagggatgtggaggtgggaatgtgagagggtggggaggggtgtggagtggccaggatccaggggagaatgccccacggagacagagacccttggcttggtatgaagggagcacaagaaggagtaaatccaggacacggctagactgtggcacccctgtgggagtgcccgcacttagggacacatgaccttgggggaattctggacagcttagaggcttactccatgacagaagatacttcccttctggagacctcaacttctctctgtgttagttggctgaggctgccatcacacaatatcacaatcttggtgactcaaaaaacagaaacttatttcctcacagttccctgggctggaagtccaagatcaaagtgttgacaagcttggtttcttctgaggcctcagtgtgccaacaaggacccttgctgtctcttcccactccgaatttcc

SEQ ID NO: 710034 - DNA, 2673 bp, Homo sapiens
tcccctcacctcagtctccctcctgagcagctgggaccacaggcacgtgccaccatgcctggctaatttttgaaaaaattttttgtagaaatgaggtctcgctatgttgcctaggctgatcttgaactcctgggctcaagcgatcctcctgccttggcctcccaaagtgctgggattgccggcatgagccactgcacctgctttattgtgatttattctctacagtattttgttagagtttggctgggtgtggtggctaacacctctaatcccagcactttgggaggcgggaggatcacttgagcccaggaggtcaacgctacagtgagctatgattgtgccactgcactccagcctgggcaacagagcaagcccttgtctcaaagaaagaataaatcacactggattaaaaaaaaattttcaaacatgagtcaagaagcagcctgtgaaatatcaggctcagccccaactacatttcagggctaactaggcccagagacccactgttggtgctatttcgtcagctcttatccaggaccctgatccaggctctcctcaacattcgcaagagagtgtttgagaaagaatggttaaaagcaagtgttcagtcgcacacactcagagagatggcacagtttgtaatcctagctctgtgggtctcagagtatggcccctggccagactcagcagcctcaccttcccagacctcccgactcagaaactccagggcggggactcaggaatctgctttaaccacccctccagtgatcctcgtgcatggtcaagtttgagaagcattgtatatcctagctgaatctttctttaggatggatatcttccttgaggatggataatgccatctttctaggatgagtgatggagctgcagaggcatttcagaaggtcggtcactaggtttcaagggcttaaggtgacacagaaactgcagtgttgtagaagcaaaccaaggacaacagtgcacccagctaggttagatcaaagtggcgggtagcgaaggggagtggcagcctccctttcacagaaggtttgctatcacaccccacccgcagacaaagccccctgggtatcacactgaggggccatgcacggaaggtgggcaccatgcaatgaggcaatccacaccagcctcaaaggtgctactctctgctagtcaaagtctacctagaagacacttccagacaaaggccagcctcagtaaccaagacgtgcctgcaatgattaactgaacagttttttaaaacctggaaggtgtttgtgtgctcagatcacatcctacgtggttgggcaaaagctggcaaagtgtgacacatagctgacactggaaaacgggaatccaggtgaaaaacagttttctaggtgcaggtaggagaaagggggcaaacaaaatctgacagatacacragagagaactccagggtgttggccaggcgcagtggctcacgcctgtaatcccagcactttgggaggctgaggcgggcaaatcatgaggtcaggaatttgagaccagcctggcctacatggtgaaactctgtctctactaaaaatacaaaaaaattagctggacatggtggcgggcgcctgtaatcccagctacttcagaggctgaggcaggagtatcgcttgaacctgggaggtggaggttgcagtgaactgagatcatgccaccacactccagcccgggcaacagagtgagactctgtctcaaaagaaaaaaaaaaaagaactccagggcataaactgcatgggagtcccctaccctctgccccttgggcccaggtctctcaattccatacactcagagttggatctcttaaacaaacaggcaattgcccagatggcccgaccaggcctccactcattggtttctttctggtcctctgactgttgtgcctcgcctgtctttctcccagacgttgttggaattcccacctccacatgcccacccctagatccagcttcctggctggtgcctgggagcgtggcttctgcccgcccactggcctggcctcagaggtctgccctaccctgacgctagcaactgctcagactaggcagcccgtggatggaactgcctgatgctgtcctcccatgcaaagagaatggagccctggaagaaggctctctggagtcaccccaacaaaacaccatgtgagccttgcacttccttgcagtgtggcagggcacatctcacatgggtgcttgcagggatgtggaggtgggaatgtgagagggtggggaggggtgtggagtggccaggatccaggggagaatgccccacggagacagagacccttggcttggtatgaagggagcacaagaaggagtaaatccaggacacggctagactgtggcacccctgtgggagtgcccgcacttagggacacatgaccttgggggaattctggacagcttagaggcttactccatgacagaagatacttcccttctggagacctcaacttctctctgtgttagttggctgaggctgccatcacacaatatcacaatcttggtgactcaaaaaacagaaacttatttcctcacagttccctgggctggaagtccaagatcaaagtgttgacaagcttggtttcttctgaggcctcagtgtgccaacaaggacccttgctgtctcttcccactccgaatttcc

SEQ ID NO: 710035 - DNA, 2673 bp, Homo sapiens
tcccctcacctcagtctccctcctgagcagctgggaccacaggcacgtgccaccatgcctggctaatttttgaaaaaattttttgtagaaatgaggtctcgctatgttgcctaggctgatcttgaactcctgggctcaagcgatcctcctgccttggcctcccaaagtgctgggattgccggcatgagccactgcacctgctttattgtgatttattctctacagtattttgttagagtttggctgggtgtggtggctaacacctctaatcccagcactttgggaggcgggaggatcacttgagcccaggaggtcaacgctacagtgagctatgattgtgccactgcactccagcctgggcaacagagcaagcccttgtctcaaagaaagaataaatcacactggattaaaaaaaaattttcaaacatgagtcaagaagcagcctgtgaaatatcaggctcagccccaactacatttcagggctaactaggcccagagacccactgttggtgctatttcgtcagctcttatccaggaccctgatccaggctctcctcaacattcgcaagagagtgtttgagaaagaatggttaaaagcaagtgttcagtcgcacacactcagagagatggcacagtttgtaatcctagctctgtgggtctcagagtatggcccctggccagactcagcagcctcaccttcccagacctcccgactcagaaactccagggcggggactcaggaatctgctttaaccacccctccagtgatcctcgtgcatggtcaagtttgagaagcattgtatatcctagctgaatctttctttaggatggatatcttccttgaggatggataatgccatctttctaggatgagtgatggagctgcagaggcatttcagaaggtcggtcactaggtttcaagggcttaaggtgacacagaaactgcagtgttgtagaagcaaaccaaggacaacagtgcacccagctaggttagatcaaagtggcgggtagcgaaggggagtggcagcctccctttcacagaaggtttgctatcacaccccacccgcagacaaagccccctgggtatcacactgaggggccatgcacggaaggtgggcaccatgcaatgaggcaatccacaccagcctcaaaggtgctactctctgctagtcaaagtctacctagaagacacttccagacaaaggccagcctcagtaaccaagacgtgcctgcaatgattaactgaacagttttttaaaacctggaaggtgtttgtgtgctcagatcacatcctacgtggttgggcaaaagctggcaaagtgtgacacatagctgacactggaaaacgggaatccaggtgaaaaacagttttctaggtgcaggtaggagaaagggggcaaacaaaatctgacagatacacgagagagaactccagggtgttggccaggcgcrgtggctcacgcctgtaatcccagcactttgggaggctgaggcgggcaaatcatgaggtcaggaatttgagaccagcctggcctacatggtgaaactctgtctctactaaaaatacaaaaaaattagctggacatggtggcgggcgcctgtaatcccagctacttcagaggctgaggcaggagtatcgcttgaacctgggaggtggaggttgcagtgaactgagatcatgccaccacactccagcccgggcaacagagtgagactctgtctcaaaagaaaaaaaaaaaagaactccagggcataaactgcatgggagtcccctaccctctgccccttgggcccaggtctctcaattccatacactcagagttggatctcttaaacaaacaggcaattgcccagatggcccgaccaggcctccactcattggtttctttctggtcctctgactgttgtgcctcgcctgtctttctcccagacgttgttggaattcccacctccacatgcccacccctagatccagcttcctggctggtgcctgggagcgtggcttctgcccgcccactggcctggcctcagaggtctgccctaccctgacgctagcaactgctcagactaggcagcccgtggatggaactgcctgatgctgtcctcccatgcaaagagaatggagccctggaagaaggctctctggagtcaccccaacaaaacaccatgtgagccttgcacttccttgcagtgtggcagggcacatctcacatgggtgcttgcagggatgtggaggtgggaatgtgagagggtggggaggggtgtggagtggccaggatccaggggagaatgccccacggagacagagacccttggcttggtatgaagggagcacaagaaggagtaaatccaggacacggctagactgtggcacccctgtgggagtgcccgcacttagggacacatgaccttgggggaattctggacagcttagaggcttactccatgacagaagatacttcccttctggagacctcaacttctctctgtgttagttggctgaggctgccatcacacaatatcacaatcttggtgactcaaaaaacagaaacttatttcctcacagttccctgggctggaagtccaagatcaaagtgttgacaagcttggtttcttctgaggcctcagtgtgccaacaaggacccttgctgtctcttcccactccgaatttcc

SEQ ID NO: 710036 - DNA, 980 bp, Homo sapiens
gggcagttcctctgcacatgctctcttgcctgctgccatgtaagatgtgcctttgctcctctttcccctttcaccatgattgtaaggcatccccagccatgtggaactgcaagtacattaaaactctttttccttttttttttttgagacagagtctcgctcttgtcgcccaggctggagtgcaatgacacgatcttggcttactgcaacctccacctcccaggttcaagcaattctcctgcctcagcctcccaagtatytgggattacaggtgcccgccaccacacttggcaaatttttgtatttttggtagagacagggtttcaccatgttcgccaggctcgtcttgaactcctgacctgaggtgatccacctgccccggcctcccaaagtgctgggattacaggcatgagccaccatgtctggcctaaacctctttttctttataaactacccagtctcgcgtatgtcttcacagcagtatgaaaatggactaatacactggcccaaagtgaacacctccataagcctgtcacatgaacaacttctgaaaatttgctttagaagctttatctaattgggaattaatgagagacagaaatgaagtgagaaaatgaagggggggaaaaaggtttatcaaaggaaaaagaaaaactagaatcctaaaaaaatgaagcaattttgagaagtaatcttaaagtgggcaatatggtttttagtctgatcatagaatgagtttcactccctgaatgagtgtgacctgacctggtctttctgaaagatcactttttcctgtgtaatttagtatgcatacgaatcacacataggctgactaatcaactgctgaagattctgcatctgtatcgcaagatgagaacaatctaaagaacagcagaaattttaaaaagatatatcatgaatatatataatctattatagttacacctgttatattttagaaggaactataggaagcctac

SEQ ID NO: 710037 - DNA, 1206 bp, Homo sapiens
ggggacagagtaagatcttatttcaaaaaaagaagaagaaaaagaaagaagaagctttgtagcatatctttattttataattttataaatactttatacaaatatttatttgatatcaaatattcaagtaagaatgcaatctgttattattcatatgagacaatatagaccatgacaatcttctagaattataggaattgttaatcaattaatgtcaataaacaataatttattgagcatttactatgtaaaggctgatgtgctaggtgctgaatagaatattggttttaaatttatatagcagtacctgccatcaagaaacttacagactaagttagaaaataagagaataatccatctgtgataagaataggacagtcttttatttccagccttaccttgactctcacattcatggcttcctctgccttgattctcaggaggaaaataaaatatctagggggtaaatgtgaaacacaaccagcttctcaggagggttctctggagtagatatgaactgtttgtttggtttttgagagagtctctctctgtctcccaagctggagtgcagtggcacaatcatggctcactgcaacctccacctcccgggttcaagcaattctcgtgccacagcctccagagtagctgagattacaggcctgcaccaccactcccagctaatttttrtattccttttttttctttttgagacggagtctcactctgtcaccctggctggagtgcagtgacatgatctcagctcactgcaacctccgccttccgggttcaagcaattctcctgactcggtctcccaaatagctgggattacaggcacccgccaccacagctggctaatttttttgtatttttagtagagacagagtttcaccacgttggtcaggctggtttcgaactcctgacctgaagtgatccacccgcctctgcctcccaaaatgctaggattacaggcgtgagccactgcgccaggtctaatttttgtatttttagtggagacgggttttgctatgttggccagactggtctcgaactcctagactcaagcgatctgcctgcctcggcctcccaaagtgctgggattataggcgtgagccactgggcccagccatgaactgttttaagccactatttaatatcaccttgacccagacctccagagcaagctgaaacaagactagagcttgttt

SEQ ID NO: 710038 - DNA, 636 bp, Homo sapiens
tatccacccacccaaccagtatccatggagttctgtgctttccattgaactggtcacagatgattctgtgattatgacatgggccctgctccttgcaatcaatgccaccttctcaggaaacctggtagctgcaaatttttcccacccccagcacaagaccccaccctgcctgtcactcaggctcccgcagccagagctaaagatagaattgagggcagcgttttaagtcagcagcgcacagacctggctggccgaatgggaagggggagctaagcygagttaggagaccgcctcaaagcagtcaggctgcgcttctctgataatggaccgttcctatgagactggcagtagctgctgctggccttcctcttgtggagagatccttggaccgggctggtggagctttggtctgacacctcactccaggctccagccttccctgacctgcagatagattctgctggctttttctcctctgtacccactgctctgctgaccctagggctttgattattcccaaaaccagtgaagaccccacttctatggatctgttcagccctcatgctgatgttcacaggttagggtgagggccagggggagctgaaagatgaggcccagggttggggaggtcaggcc

SEQ ID NO: 710039 - DNA, 636 bp, Homo sapiens
tatccacccacccaaccagtatccatggagttctgtgctttccattgaactggtcacagatgattctgtgattatgacatgggccctgctccttgcaatcaatgccaccttctcaggaaacctggtagctgcaaatttttcccacccccagcacaagaccccaccctgcctgtcactcaggctcccgcagccagagctaaagatagaattgagggcagcgttttaagtcagcagcgcacagacctggctggccgaatgggaagggggagctaagccgagttaggagaccgcctcaaagcagtcaggctgcgcttctctgataatggaccgttcctatgagactggcagtarctgctgctggccttcctcttgtggagagatccttggaccgggctggtggagctttggtctgacacctcactccaggctccagccttccctgacctgcagatagattctgctggctttttctcctctgtacccactgctctgctgaccctagggctttgattattcccaaaaccagtgaagaccccacttctatggatctgttcagccctcatgctgatgttcacaggttagggtgagggccagggggagctgaaagatgaggcccagggttggggaggtcaggcc

SEQ ID NO: 710040 - DNA, 917 bp, Homo sapiens
gaatcctgctcattccaccagccccccacagcatctcctcaggcaagggttagagatctcaatgattgttctcctagcgccaaagaaatgaagtattgttaagatgaaatgaaacagtgtatagagcatctgcacaagacctggcacttattaaattatttaagaatcaatacaaatcatattttatagtaaatgtttacatcgtagatttaatagataattcattgagatagtacatttttaaaaactcttaacacagttcctggcacatggcaggagctcaaaaaagtctaccrtccatccatctctccttctgtctctttttttttttgagacagaatctccctctgtcccccaggctggagtgcagtggtgcaatctcgactcactgcaacctccacctcccgggttcaaacaattctcctgcctcaaccttctgagtagctgggactacaggcatgccaccacacccagctaactttactatttttagtagaatcaggatttcactatgttggccaagctggtctcgaactcctgacctcaagcaatccacctgccttggcctcccaaagtgaggggattacaggcgtgagccacctcacctaaccttctccttctacctctattgtacctctctctcaatagctctccagtgcccaacctggctcagtgtgccttcactactctagctgttaacattctcattgacatgacagagccctgccatcatagcacagttagggcccacagtttgtgctggaataacaggcttgggagccagagggagaggattatataccagggtgtggaggagagatgggatgaaggcttcagtgaaaccaaatatgtgtttgctgtaatgcacagccttacatgggtgccccaagcactgcttgctgctgggaccatgggcg

SEQ ID NO: 710041 - DNA, 917 bp, Homo sapiens
gaatcctgctcattccaccagccccccacagcatctcctcaggcaagggttagagatctcaatgattgttctcctagcgccaaagaaatgaagtattgttaagatgaaatgaaacagtgtatagagcatctgcacaagacctggcacttattaaattatttaagaatcaatacaaatcatattttatagtaaatgtttacatcgtagatttaatagataattcattgagatagtacatttttaaaaactcttaacacagttcctggcacatggcaggagctcaaaaaagtctaccgtccatccatctctccttctgtctctttttttttttgagacagaatctccctctgtcccccaggctggagtgcagtggtgcaatctcgactcactgcaacctccacctcccgggttcaaacaattctcctgcctcaaccttctgagtagctgggactacaggcatgccaccacacccagctaactttactatttttagtagaatcaggatttcactatgttggccaagctggtctcgaactcctgacctcaagcaatccacctgccttggcctcccaaagtgaggggattacaggygtgagccacctcacctaaccttctccttctacctctattgtacctctctctcaatagctctccagtgcccaacctggctcagtgtgccttcactactctagctgttaacattctcattgacatgacagagccctgccatcatagcacagttagggcccacagtttgtgctggaataacaggcttgggagccagagggagaggattatataccagggtgtggaggagagatgggatgaaggcttcagtgaaaccaaatatgtgtttgctgtaatgcacagccttacatgggtgccccaagcactgcttgctgctgggaccatgggcg

SEQ ID NO: 710042 - DNA, 917 bp, Homo sapiens
gaatcctgctcattccaccagccccccacagcatctcctcaggcaagggttagagatctcaatgattgttctcctagcgccaaagaaatgaagtattgttaagatgaaatgaaacagtgtatagagcatctgcacaagacctggcacttattaaattatttaagaatcaatacaaatcatattttatagtaaatgtttacatcgtagatttaatagataattcattgagatagtacatttttaaaaactcttaacacagttcctggcacatggcaggagctcaaaaaagtctaccgtccatccatctctccttctgtctctttttttttttgagacagaatctccctctgtcccccaggctggagtgcagtggtgcaatctcgactcactgcaacctccacctcccgggttcaaacaattctcctgcctcaaccttctgagtagctgggactacaggcatgccaccacacccagctaactttactatttttagtagaatcaggatttcactatgttggccaagctggtctcgaactcctgacctcaagcaatccacctgccttggcctcccaaagtgaggggattacaggcgtgagccacctcacctarccttctccttctacctctattgtacctctctctcaatagctctccagtgcccaacctggctcagtgtgccttcactactctagctgttaacattctcattgacatgacagagccctgccatcatagcacagttagggcccacagtttgtgctggaataacaggcttgggagccagagggagaggattatataccagggtgtggaggagagatgggatgaaggcttcagtgaaaccaaatatgtgtttgctgtaatgcacagccttacatgggtgccccaagcactgcttgctgctgggaccatgggcg

SEQ ID NO: 710043 - DNA, 1109 bp, Homo sapiens
gatcagtaacaatgatgacagatgtggactaagggccaggcctgcccaattttgctattattgtgttagtcccaggattcttgtagatttctcagagggatggcaggtgcatccataatgatgatattgaccatcccatcagcaggtaggtgggagatccaaaccagatttaagttgatttggaaagttaagttcttggaccagaatgtcatgggacaaatttatacccaataatatgccttatcgattatgtatcatcaattttgaatcttattcacttatactctcttgaagtcactttttgaaccaattaccaatatcatgtctcttttttttcttttgagacgggatctcacgctgttgcccaggctggagtgcggtggtgtgatctcggctcactgcaacctctgcctccctggttcaagcgattctcwtgcctcagcctcctgagtcgcggggattacaggcgtgtaccaccatgcctagctaatttttgtatttttagtagagacagggttttgccatgttggccaggctggtctcaaactcctggcctcaagtgatccatccatcttggcctcccaaattgctggaattacagatgtgagcaaccacttctagcctgaatatcatgtctttacaactgtgtctgtcttttttttctggagaatttctgctacttgaagtttatgcacttctcccatttgatgttattctcagcagcaataacactacttcatctgtgttaattgtcactaaactttggtgatctctttttcaacttgcttccactgtgagcagaactcaattaactacaaaacttgtctcttctcctattattgaccacccctcctacttgcattaatgtctttaggctcaaagtctcctcatccctctttccattctcatttctgaggacgttctgttgtcttgctatcttaaaggcacagaacatcataaaagattatgaatttattctctattatggctatatccaaacttcttactctctaaactctgttgttgcagtttgtttaaagctttctttttattacgctctctgactttactttcttcctactacttttccactgaattataagcaccac

SEQ ID NO: 710044 - DNA, 941 bp, Homo sapiens
ctttagaagactgaagcaggtggattgcttgagaccaggagttggagaccagcctggtcaacacggagaaaccccatctctactaaaaatacaaaaatcagcctggtgcggtggcacacccattagtcctagctactcaagaggctgaagcataagaattgtgtgaacccaggaggcggaggttgcagtgagtcgagattgggccactccattccagcctgagaggcagagcaagactctgtctcaataaacaaacaaacaaacaaacaaactgtccaggtgtggtggcacagccctgtagtcggagctaataaagaagctgaggtgggaggatcgcttgagcccaggatatggaggctgcggtgagctatgatctcaccactgcactccagcttgggggacagggcaagtctgtctcaaaaaaataaaagaaattgaatacattgatattttgccaggaccctgccttctacaggcatctagtctaatgggactgggagtaatcaaggcagatgacctaatcccagtgtccaggatgtaactagagagctacgggcatgcagaagttggaagatgagggaaggcatcacagaggctgtggggtgaactgayttcaaggaatgggtccttcccttcagagccacatgtgtgcgggacacccagacaaaaacacaaacacaaagtcgagtggagggcatttggaaggagcagtgaagccaagccaggaaataccaagatggcgagccagtgtggttgtagagattgtagagagggtagaattggcactgtggaccctggcctcgatagagaaaggcatcagctaaggaagttgttcaggtgggcagtgaggttgtcgtgctttggaaagatgttcaggctgcactaggaagccccctggcttggggagagactccaggaaaccccagcagggagcatttgac

SEQ ID NO: 710045 - DNA, 941 bp, Homo sapiens
ctttagaagactgaagcaggtggattgcttgagaccaggagttggagaccagcctggtcaacacggagaaaccccatctctactaaaaatacaaaaatcagcctggtgcggtggcacacccattagtcctagctactcaagaggctgaagcataagaattgtgtgaacccaggaggcggaggttgcagtgagtcgagattgggccactccattccagcctgagaggcagagcaagactctgtctcaataaacaaacaaacaaacaaacaaactgtccaggtgtggtggcacagccctgtagtcggagctaataaagaagctgaggtgggaggatcgcttgagcccaggatatggaggctgcggtgagctatgatctcaccactgcactccagcttgggggacagggcaagtctgtctcaaaaaaataaaagaaattgaatacattgatattttgccaggaccctgccttctacaggcatctagtctaatgggactgggagtaatcaaggcagatgacctaatcccagtgtccaggatgtaactagagagctacgggcatgcagaagttggaagatgagggaaggcatcacagaggctgtggggtgaactgacttcaaggaatgggtccttcccttcagagccacatgtgtgcgggacacccagacaaaaacacaaacacaaagtcgagtggagggcatttggaaggagcagtgaagccragccaggaaataccaagatggcgagccagtgtggttgtagagattgtagagagggtagaattggcactgtggaccctggcctcgatagagaaaggcatcagctaaggaagttgttcaggtgggcagtgaggttgtcgtgctttggaaagatgttcaggctgcactaggaagccccctggcttggggagagactccaggaaaccccagcagggagcatttgac

SEQ ID NO: 710046 - DNA, 941 bp, Homo sapiens
ctttagaagactgaagcaggtggattgcttgagaccaggagttggagaccagcctggtcaacacggagaaaccccatctctactaaaaatacaaaaatcagcctggtgcggtggcacacccattagtcctagctactcaagaggctgaagcataagaattgtgtgaacccaggaggcggaggttgcagtgagtcgagattgggccactccattccagcctgagaggcagagcaagactctgtctcaataaacaaacaaacaaacaaacaaactgtccaggtgtggtggcacagccctgtagtcggagctaataaagaagctgaggtgggaggatcgcttgagcccaggatatggaggctgcggtgagctatgatctcaccactgcactccagcttgggggacagggcaagtctgtctcaaaaaaataaaagaaattgaatacattgatattttgccaggaccctgccttctacaggcatctagtctaatgggactgggagtaatcaaggcagatgacctaatcccagtgtccaggatgtaactagagagctacgggcatgcagaagttggaagatgagggaaggcatcacagaggctgtggggtgaactgacttcaaggaatgggtccttcccttcagagccacatgtgtgcgggacacccagacaaaaacacaaacacaaagtcgagtggagggcatttggaaggagcagtgaagccaagccaggaaataccaagatggcgagccagtgtgsttgtagagattgtagagagggtagaattggcactgtggaccctggcctcgatagagaaaggcatcagctaaggaagttgttcaggtgggcagtgaggttgtcgtgctttggaaagatgttcaggctgcactaggaagccccctggcttggggagagactccaggaaaccccagcagggagcatttgac

SEQ ID NO: 710047 - DNA, 941 bp, Homo sapiens
ctttagaagactgaagcaggtggattgcttgagaccaggagttggagaccagcctggtcaacacggagaaaccccatctctactaaaaatacaaaaatcagcctggtgcggtggcacacccattagtcctagctactcaagaggctgaagcataagaattgtgtgaacccaggaggcggaggttgcagtgagtcgagattgggccactccattccagcctgagaggcagagcaagactctgtctcaataaacaaacaaacaaacaaacaaactgtccaggtgtggtggcacagccctgtagtcggagctaataaagaagctgaggtgggaggatcgcttgagcccaggatatggaggctgcggtgagctatgatctcaccactgcactccagcttgggggacagggcaagtctgtctcaaaaaaataaaagaaattgaatacattgatattttgccaggaccctgccttctacaggcatctagtctaatgggactgggagtaatcaaggcagatgacctaatcccagtgtccaggatgtaactagagagctacgggcatgcagaagttggaagatgagggaaggcatcacagaggctgtggggtgaactgacttcaaggaatgggtccttcccttcagagccacatgtgtgcgggacacccagacaaaaacacaaacacaaagtcgagtggagggcatttggaaggagcagtgaagccaagccaggaaataccaagatggcgagccagtgtggttgtagagattgtagagagggtagaattggcactgtggaccctggcctcgatagagaaaggcatcagctaaggaagttgttcaggtgggcagtgaggttgtcgtgctttggaaagatgttcaggctgcactaggaagccccctggcttggggagagactccaggaraccccagcagggagcatttgac

SEQ ID NO: 710048 - DNA, 1107 bp, Homo sapiens
tgccactgcactccagcctgggcaacagaaagagactgtctcaaaaaaaaaaaaaaaaaaaaaaagaacatgctctcttattcaaggttacccttctatcactccaaggattcaccccataatcttatctttcttgatatgttacactcactaaaatgttcacatcaaatcaagtttgtagacacttgtccttaccaccttacaaaaagtgagatggtatcaacagaggtaagacactgcttttacctgcatgtcacttttggcagctttcgcagcattgaaaagatcattggctggtggctctgactgtttccggctatgacgatgtaccgcttgggaccctttctttggatattttgccacctgatacacataaaaagatcagaaatatgaaaaaaaggtaacagtgacattaacacttggtttcatcattatcacacaartaggcttacgctgccaattccacagcagtctgagttagactcagtcctgaaataattgatttttatattatgaagtttattaacttttttccctttaaaaaaaaaattccttgagtctccttcccgtatctctataaccaaacatccttttcttttcttttcgaaatttctcttcttcctatttccgtcccttaatactttgtaaatcttgtccttttttgaaccatatcacctgaacctcttaggttttctcttttttttgagacggagtctcgctctgtcgcccaggctggcgtgcagtggcgtgatctcggctcactgccagctctgcccccggggttcgtgccattctcctgcctcagcctcccgaatagctgggctgcttcccccacaagattcaaaaacaaaagaaaactggctgactcaccggcgttgttttcagtggtcgttttgctgctttcttcttcacaccgcgattgaagctgtcctcaaatcattttcttgtcttcttgtctatttgtatgaattactgagttacattctcattgctacttatttaagcaaagtattcttagtttgttaagaacaaagaactacaaattgtgttcattttctgtcctttcctgttcttagactaaattacctgaaatacatcaaaatatat

SEQ ID NO: 710049 - DNA, 1291 bp, Homo sapiens
aaacacataaattacatggtatactgtatactctgatgctaaagaataagtgtctatttttcaattaaatatatataaaaaaagatttgaatgtttaaattaattgacagctgatctaaaaaaaaaaggtaatcagaatttttcattagttgtcactacctagcaaatgtacaaccagaaaggaattccacagtggaactagactcctgtcgtcctcctgactgctatagaatgtaggaacatcaccataatgagagcagggctcttaccctgggaatagacctcgcttctaaattccccaattgcatcatggtaacactgagataaaaccaacaattaccagccaggatgtcagcctcatccatggactgggtactgaaaaggatcacatgatctgctctacgctctctcaggaggctccacacttgatctctggaaaagggatccaatccagtagttggttcatctaaragcaaaatctacagagaatgaagatatataaaatatgtctctctttcacattaactgtatccagaagatagcatgaaaaacaataaataccataaaataataaccatccagccatttttctccaatatacttctatttatagttaaacatagcaggttctctcttgatgcattacaatgaaagctctaccacttttagtggtaaaagaacttgacattttgcagacattcgacctgcttccttccccatgcataatctcacttacttgaggatctcctaaaatggtaatcccaaaagtcagctttcttttctgtccttcacttaaatgtttagcaaggttatcttgaatgttttgcatgtccaattccaataatattcgttgtacctatatgagaaaatacgcaacttttaaaatccaaaatgaagaagacatttatgcagccaaaagacacatgaaaaaatgctcatcatcactggccatcagagaaatgcaaatcaaaaccacaatgagatatcacctcacaccagttagtatggcgatcattaaaaagtcaggaaacaacaggtgctggagaggatgtggagaaataggaacatttttacactgttggtgggactgtaaactagttcaaccattgtgcaagtcagtgtggcaactcctcagggatctagaactagaaataccatttgacccagccatcccattactgggtatatacccaaaggattataaatcatgctgctataaagacacatgcacacgtatgtttattgtggcactattcacaatagcaacacttgaaaacaacccaaatgtcca

SEQ ID NO: 710050 - DNA, 1291 bp, Homo sapiens
aaacacataaattacatggtatactgtatactctgatgctaaagaataagtgtctatttttcaattaaatatatataaaaaaagatttgaatgtttaaattaattgacagctgatctaaaaaaaaaaggtaatcagaatttttcattagttgtcactacctagcaaatgtacaaccagaaaggaattccacagtggaactagactcctgtcgtcctcctgactgctatagaatgtaggaacatcaccataatgagagcagggctcttaccctgggaatagacctcgcttctaaattccccaattgcatcatggtaacactgagataaaaccaacaattaccagccaggatgtcagcctcatccatggactgggtactgaaaaggatcacatgatctgctctacgctctctcaggaggctccacacttgatctctggaaaagggatccaatccagtagttggttcatctaaaagcaaaatctacagagaatgaagatatataaaatatgtctctctttcacattaactgtatccagaagatagcatgaaaaacaataaataccataaaataataaccatccagccatttttctccaatatacttctatttatagttaaacatagcaggttctctcttgatgcattacaatgaaagctctaccacttttagtggtaaaagaacttgacattttgcagacattcgacctgcttccttccccatgcataatctcacttacttgaggatctcctaaaatggtaatcccaaaagtcagctttcttttctgtccttcacttaaatgtttagcaaggttatcttgaatgttttgcatgtccaattccaataatattcgttgtacctatatgagaaaatacgcaacttttaaaatccaaaatgaagaagacatttatgcagccaaaagacacatgaaaaaatgctcatcatcactggccatcagagaaatgcaaatcaaaaccacaatgagatatcacctcacaccagttagtatggcgatcattaaaaagtcaggaaacaacaggtgctggagaggatgtggagaaataggaacayttttacactgttggtgggactgtaaactagttcaaccattgtgcaagtcagtgtggcaactcctcagggatctagaactagaaataccatttgacccagccatcccattactgggtatatacccaaaggattataaatcatgctgctataaagacacatgcacacgtatgtttattgtggcactattcacaatagcaacacttgaaaacaacccaaatgtcca

SEQ ID NO: 710051 - DNA, 940 bp, Homo sapiens
ttgaacccaggagggggaggttgcactccagcctggttaacaagagtgaaactccatctcacaaaaaaaaaaaaaaaaaaaaaaagttaacctgcctgacagtgattttcccaatcaaatcaacctctcctaacgtttcgtaacataccaacatatgctcccatttcatggtacctgtcactgctctaatcttacatttatttgagatatttttgctttattaatgagagtatctattgtagctgcctgaggatttagaccacatataatcctgatgcttgacatagggcttagcacatagcaggtactcagtaattatttgttagataaatgacaaatatttggctgggtgcggtggctcacacctgtaatcccagcactttaggagactgtggcgggtggttcacttgcagtcaggagttcgagacccgcttgatcaacatggtgaaacccccgtctctactaaaaatacaaaaattagctgggcrtgctggcacgtgcctgtagtcccagctactcgggaggctgaggcaggagaatcacttgaacccaggaggtggaggcttctgtgagctgagattgtgccactttactccagtctgtgagactctgtcctccaacccccccaaaaaagtcaaatatttgttatatagtatcaatgaatgaatacgtcatttattagacatttccagggggaaggaagatcacagggcctaacccacctctgccaaattcctcagcatcagaatgtgcctgttctcttgtatgatgttgttctcatcttgatacatataagacctgtgaaatgagtaaaaggacagaaagggaagagttccgaagaggatctggggaagcctccattgagctctatgtaaaacaccttctgagccaaaatgctgtaaacctagaaatgaacctgggacatcattcctgggatttt

SEQ ID NO: 710052 - DNA, 606 bp, Homo sapiens
caaaacattccaggacatcatactttaatgtggcacatatataaaatatctaagtacaatttactacctttctaacttcaattattatacttaattaaaattaaagttttaaaaaaatctgtttcttctttagtgctctgtaatgtcamcttcatcatgaatcaattgaccatatacatgtgtttatttctggactttccttttaccctactggtctgtttgtccttatgtctataccacctagccttaattacaataaatcttgatatctagtagaacataatttatacattgtttccctttaaggatgtcttgattattttcagtcttatgcatttcctaatgaatttagggataaggctgccaatttcctccaagatacctgctggtgttttggttgggattgcactaaatctagaaatgaatttgagatatttgacatctttactatatggaatcttatctcacatgaacaagagatatcctgtcattaaaaatatgatagccaaatgggaaaaagtaaaacatgatcccctacctcacaccacacacaaaaatcaattccaggtagactgaagtcctgaagttccaagtgtgaaaactaaa

SEQ ID NO: 710053 - DNA, 2914 bp, Homo sapiens
tatgttgcccagggtggtctcaaactcctgtgctcaagtgaccctcccacctcattctcaagtggctgcaattacaggcaaccagcctgacttaaaacagtatcttaaggtagatggtgattagcacatgtagtatgcttaacatttaatattataataagacatcacagcggctgtctcatgattaaggctgtgttcccttgttggtgaggaaattaattatgacttgataaatagaacatgttttaagaagtggctatatagctctggataaaacgaacaaaagaattagaattcctgcggggaatatatacaagactttatttagtcaagtaaaaaaaaatcactaatgtttaactgaagaaagagaaattgaataatatagttctatttcaacatgtgggttcacagatttattctaaccttccaagtaaagttgttccactagtaaagttgttctggagtatattttttttaaaaaaaacacttaaaatgttccacttctttcatgaggctaagtcaactctgatatcaaaccaaggggaaagaaatgaaattataggtgagtttacttagttatatacaaaaggaaattattagcctctgctgatggagaacagaggctgtgaataaatggagatccataacatgatcctacatgaatgtttcaatattgtaatcctgtaagttacttttacattgacagttctgaaattcatgttgagtgttaattaggcaggaatcagaagggaggttttgtagaaggtcgtatccatgggttttttatatttgaaaagtgttttcgatgtatcattgggggagattaaatgtctttgacagttgtccaactagaaataaagtcagcatcccatttgactccttacacagaagttcattctatactcattacagatgtaagaggttaagatggtagaggagaatgtagagtatttctgtgcctttaggttcaggaggtctttgataagcaggacaaggtccagaagccatgaagagagaatgacaggactgtgtagaagatttaaacctttttcatggcgtaagatactgtatgcaaagttaaaaggcatatgacaggctgagagatatcttaaacatacattagaaaggatatagcccttgaaaaagggctgttggaaagcagcaaggataaggtgcacagtcttgcagagcatgtcaacaaaatttattggatgaagaaattaaaatggttaaatagaagaagttctcaacctcactaatgatcagataagtgcagattgtaaaagtcctcatccccaccaacacaaaccagcagaaattttatgtgaatgtgaagtttggataatatccagtattgtcgcaggtgtgagaaaccgtattttcaaatattgagagggtaaattagaggaaagccattttagagggcaatgtggtgttacctgtcagcattttgaatataattaccctttgccacaattctacacctagtcagttatgttctcaaaaagcacaagtgcagaaatatagatgcataagcaaatgtgttgcagaattgtgaaaaatttggaaaaaatgtttagtgctattaaagttatgggttacttaagttacagaaaatcagtttagtagatcactgtgtagttacggaaaatgagatggatctctactcaaagatgtcttgcagtttatgaactgagatgtaacttcatgactaacatgatgacatcgttattaactacataaactttataaagcttaaaaaatgcattcatagtatcttatttgttgtttttgtttacaatacaaatagaaaccatgcacacagatacaagaactccttccctgttgtttgtttttgttttgttttgtttttggtagcgggcggggtgagctgctctcatgttattccatgagtttttttatgtgttgcttgttgtgcrtggttcattttttgtttttattttttgagacggagtctcgctctgtcaccaggctggagtgcagtggtgcgatctcggctcactgcaacctccacctcccgggttcaagcgattctcctgcctcaccctcctgagtagctgggactacaggatagtctcgatctcttgactcatgatctgcccaccttggcctcccaaagtgctgggattacaggcataagccaccgcttccagcctgtatatggttcatttaaatcaaatgagatactccttgagacatgggggaagttgaatgtgagttatcctttggccaagacttaaagatggtatatgagtttgtctgctgtgctccctagacctgacccgattcatgcttctgccaggttgtaaacctgttttgtcctgctgaattggcagagcagtcccaaaagaactgtaactaaggtatgcacatactgaagaaagggatatagtatttctgggagagccctaaggaaggtagacttctgttgcagtcattctgaagaattatgggtggtgattcttgcacaagcccagctcatacatctaggctagatgatgcttagatatctttatcagtgcctggggatgttttaaggcctctggttgggtttaagcctgctgggagaaacctcggctaaaaacagttgaaaagcttttcctgatcctgtgcttgagagcagcattttacctctagggagtgctttacttgccatccataggatgctaggcacatttcaaagaaggactgttttaggaaagtggtttcttatctcttaaatgtattgaggctcattttatggcctatcatatggtctatcttggagaaagtcccatgcgctgttgaatacaatgtgtattctgtggttgttggatgaaatgttctgtatatatctgttaagtccatttgttccaaggtatagtttaattccattgtttctttgttgactttc

SEQ ID NO: 710054 - DNA, 2914 bp, Homo sapiens
tatgttgcccagggtggtctcaaactcctgtgctcaagtgaccctcccacctcattctcaagtggctgcaattacaggcaaccagcctgacttaaaacagtatcttaaggtagatggtgattagcacatgtagtatgcttaacatttaatattataataagacatcacagcggctgtctcatgattaaggctgtgttcccttgttggtgaggaaattaattatgacttgataaatagaacatgttttaagaagtggctatatagctctggataaaacgaacaaaagaattagaattcctgcggggaatatatacaagactttatttagtcaagtaaaaaaaaatcactaatgtttaactgaagaaagagaaattgaataatatagttctatttcaacatgtgggttcacagatttattctaaccttccaagtaaagttgttccactagtaaagttgttctggagtatattttttttaaaaaaaacacttaaaatgttccacttctttcatgaggctaagtcaactctgatatcaaaccaaggggaaagaaatgaaattataggtgagtttacttagttatatacaaaaggaaattattagcctctgctgatggagaacagaggctgtgaataaatggagatccataacatgatcctacatgaatgtttcaatattgtaatcctgtaagttacttttacattgacagttctgaaattcatgttgagtgttaattaggcaggaatcagaagggaggttttgtagaaggtcgtatccatgggttttttatatttgaaaagtgttttcgatgtatcattgggggagattaaatgtctttgacagttgtccaactagaaataaagtcagcatcccatttgactccttacacagaagttcattctatactcattacagatgtaagaggttaagatggtagaggagaatgtagagtatttctgtgcctttaggttcaggaggtctttgataagcaggacaaggtccagaagccatgaagagagaatgacaggactgtgtagaagatttaaacctttttcatggcgtaagatactgtatgcaaagttaaaaggcatatgacaggctgagagatatcttaaacatacattagaaaggatatagcccttgaaaaagggctgttggaaagcagcaaggataaggtgcacagtcttgcagagcatgtcaacaaaatttattggatgaagaaattaaaatggttaaatagaagaagttctcaacctcactaatgatcagataagtgcagattgtaaaagtcctcatccccaccaacacaaaccagcagaaattttatgtgaatgtgaagtttggataatatccagtattgtcgcaggtgtgagaaaccgtattttcaaatattgagagggtaaattagaggaaagccattttagagggcaatgtggtgttacctgtcagcattttgaatataattaccctttgccacaattctacacctagtcagttatgttctcaaaaagcacaagtgcagaaatatagatgcataagcaaatgtgttgcagaattgtgaaaaatttggaaaaaatgtttagtgctattaaagttatgggttacttaagttacagaaaatcagtttagtagatcactgtgtagttacggaaaatgagatggatctctactcaaagatgtcttgcagtttatgaactgagatgtaacttcatgactaacatgatgacatcgttattaactacataaactttataaagcttaaaaaatgcattcatagtatcttatttgttgtttttgtttacaatacaaatagaaaccatgcacacagatacaagaactccttccctgttgtttgtttttgttttgttttgtttttggtagcgggcggggtgagctgctctcatgttattccatgagtttttttatgtgttgcttgttgtgcatggttcattttttgtttttattttttgagacggagtctcgctctgtcaccaggctggagtgcagtggtgcgatctcggctcactgcaacctccacctcccgggttcaagcgattctcctgcctcaccctcctgagtagctgggactacaggatagtctcgatctcttgactcatgatctgcccaccttggcctcccaaagtgctgggattacaggcataagccaccgcttccagcctgtatatggttcatttaaatcaaatgagatactccttgagacatgggggaagttgaatgtgagttatcctttggccaagacttaaagatggtatatgagtttgtctgctgtgctccctagacctgacccgattcatgcttctgccaggttgtaaacctgttttgtcctgctgaattggcagagcagtcccaaaagaactgtaactaaggtatgcacatactgaagaaagggatatagtatttctgggagagccctaaggaaggtagacttctgttgcagtcattctgaagaattatgggtggtgattcttgcacaagcccagctcatacatctaggctagatgatgcttagatatctttatcagtgcctggggatgttttaaggcctctggttgggtttaagcctgctgggaraaacctcggctaaaaacagttgaaaagcttttcctgatcctgtgcttgagagcagcattttacctctagggagtgctttacttgccatccataggatgctaggcacatttcaaagaaggactgttttaggaaagtggtttcttatctcttaaatgtattgaggctcattttatggcctatcatatggtctatcttggagaaagtcccatgcgctgttgaatacaatgtgtattctgtggttgttggatgaaatgttctgtatatatctgttaagtccatttgttccaaggtatagtttaattccattgtttctttgttgactttc

SEQ ID NO: 710055 - DNA, 1979 bp, Homo sapiens
tactatgggcagggtgtcttctcaaggctttatgtttgctagctcctggaattctcagaacaactcttataagatagacattacgattgtccttattttacatatgagaagataggttatttaggaaagttaatcactttgcctgggacctcagaaatgtcaagtgggagaacgggggcttgattgtaggtggtaaccacaccttgggagtcgggtgaaagcacactttattctctgaaggcagaaaaggaggctgttcaaccctttaatgccatggggtaaaatgccttttactagacattgagaaagtaggagtatggccattccagttgtgttatcctgaacactcccattttccgatcctccctttttctcctttgaaaattttaataataggatgagatgacatttcatagcattatggcctttaagttataattttgttatctgacagatgcccagaaacattaggtaaggccacacctcagatagatgacagtttatcctacaaacgtagataaacaaatacacacctggacctccaacaaatacagggcttcccaagccagatctagtgatgtaatatttaacaaatatttgtatttaatacaaatagaatttggtaaatgtcagaattactaggtgtattattctttctcttcttcagaaacagctcttatttaagaggctgcaaaaatatttatatccttccctcagaaatatgtcatctgcattcatctgcattcatgtacatatgcattcatttttcatagaaccacagactcacccaaacagtttaagctaaaaacttctgctttgtgtgtttttgagaagttatgtattttatttctgggatgatataattttggattttaattcctttcctctttaccaaatgttcacattcacccttatacccacatgtgtttctatgtgcaataagtataacaacacatatactgaaaaatgttgctttgttaggttgttatccaaaataaaataatattaaaaaggaaaacctatggcaatgcttattctcaaccctactaaaatagtgacttgttttaggatgatgatttttactaatacttatgttcgtcttctccctacatttaacatgtcagtgtttctatttctgatataaccattgcattattatttctcatcacaatattaatactttgccatgaatcaagttttgacacatatatttcatccctatgcttttaatttattcaaaaattctataaatgtttcataaatgttagtcctatatattagtactgtctgtaacaaaatataatgtaacattwgtcgatcaaaatacaaagaacaacagagctgaaaagtataaaacaacaacaaagagttgagtttattgcttgcctggtatattagttttgtagggctcctaaacaaagtaccatagactgggtggctgaaacaccagaattttattttctcacattcaggaggctgggagtccaagattcaggtaggatcagtttcttctcgtgtctctcttcttagcttgtagatagctatcttatccgtgtatcttcacatggtcttccctctgtgcctcattctcacttagttgtctctttaaagatcctctctccaaatacagtcacattctgggatatggggggttaggatttcaacacatggttttatctgggggtaggggagagtacaattcagcctgtaacacctggaaatggagagagtgttcactctagagtaaggtcagtgagtcactctgattaaaagtggaagggctagacacagggtaaacaaaggaagtttccctccaataaggcagcattctgaagggcattattcaattggtcaaggagaggaccctgggtctcctttgggatgggcttgcaattgatctggttcacgccacaaaatcacaggcacaggtcgggttaggcttctagggtgtagtgtcttgactcaggcactttcatatg

SEQ ID NO: 710056 - DNA, 1403 bp, Homo sapiens
ggtagttcaaaatccaaagaagaaaagaacctggaggactacagctctaaattttcaggtctatggttgtctgtgctttcccctgttgcgctttattggatggtaggaaatggtaaccacagttatctttttccccatatgattaaccagttgttatatcatcttttgttgaaaatactttgctttctcaacaaaaggtgatgtaacaactggttaatcatatggggaaaaaatacttttgttgaaaatactttgctttctcaacaaatggtgatgtaacaactggttacatcactggctcagcttcacgagaggcaaagcataattgctgcagagtcttttatactccacctcayaccagttagaatggcgatcattaaaaagtcaggaaacaacaggtgctggagaggatgtggagaaacaggaacatttttacactgttggtgggactgtaaactagttcaaccattgtggaagtcagtgtggcaattcctcagggatctagaactagaaatatcatttgacccagcaatcccattactgcatatatacccaaaggattataaatcatgctgctataaagacacatgcacatgtatgtttattgcggcactattcacaatagcaaagacttggaaccaaagcaaatgtccaacaatgataggctgcattaagaaaatgtggcacatatacaccatggaatactatgcagtcataaaaactgatgagttcatgtcctttgtagggacatggatgaagctggaaaccatcattctcagtaaactatcgcaaggacaaaaaaccaaacaccacatgttctcactcataggtgggaattgaacaatgagaacacatggacacaggaaggggaacatcacactctggggcctgttgtggggtggggcgaggggggagggatagcatttggaaatataactaatgttaaatgacgagttactgggttcagcacaccaacatggcacatgtatacatatgtaacaaacctgcacgttgtgcacatgtaccctaaaacttaaagtataataataaaaaaagaaaatattttgctttcctatcctttagttttactaaaaccttgcatgtggttaccctatagaatctcacgagtcttcttatttacccgatcctgagttatacatgctctttccctcctaaactactgaatttcttgttttaaatctataatattccacgtactagatatgaatgtagtggctagttgtttaaatttcttaagctttggttttctcatcaatataatgagagtaattatagtaccaacctcatggggctgttgtgaggattaaatgagtgattataagtgaggtgtttagaactgtgctaaatggctactattattatttattacaaccatcatcact

SEQ ID NO: 710057 - DNA, 2313 bp, Homo sapiens
catggtgataccccatctctactaaatatacaaaattagctgggcgggtggtgcgtgcctgtaatcccagctacttgagaggctgaggcaggagaatcgcttgaacctgggaggcagaggttacagtgagccaagatcacaccattgcactccagcctgggcaataagagctaaacttcgtctcaaaaaaaaaaaaaaaaaaaaaagaagaaggagaagaaatgaggtcctgtctccgaggatcagttggtagttaatggctaagctaactggtgatagagtggtcaaaagtaagtcctcaaggccagatacctgcacttgaacctcagctccatcagctagatgagtcacgttctcccagccgcagttcctcttctgagaaatcgacataatgagagtactgacctcatcaggctgttgtgaaaataaaataatgactgaatcacatttcacacagcgctttccgtttagtaagtgctcaaatagtattgggcatccttcttatttgtgttatttgatgctgagtgtgagcactttctctgtgtcagggtaagccaatgatctgagtagggcttgataatgccattggagagtctgacaagatcaaagtgtaaatgggagagaagaggaaaagaaggaaagaaatgagagccacatatctactggcaaaaggaaaagtgcaaaatttccaagggcaggctgctgaaggcctgccagagcgggtaagtggagaggctgggccagagaggcagaggggctgctcacctagatcaggcccaagaagcggtttgagtgggtctcactgtgtcaggatagagaggtcaggtgtagtcaatacatgaataggaaggtgcagggcaagaagtaggtcagacaacagcaaaggtgtgcatgcccacaggattgctgtagatcaactggaactgaggcctgtggcttgtgatgcagctgtggctaacagctcctatgcatgctgatggcttcacgtctcaagcaccagtggagtctctcagcttttctgcttcagaattttctcctcagcttggaagcttgctcagtccaacttgcagatacagccacagaagaaaggggcgggagctgggtagtaggggagtgggagagtgccaatggaagatgaaggttgctggataaatgtcccaacctctcacacttcagcaggacaattttgggtggtttctatatggttcttcaaaagtgtgcagggagattgagccaattgtccacagtgacaacccagctcagtaatgtatctttcattggctttccgtccttcctgtatcactctcctctctccctccccgtcttccttggatatcttcccaagtaaactattgtcacccaagttcttgtctcagggtctgctttaggaggcaccaaacctaagttgttttattactaacacaaatctgaagctgagattccaaaaactgaaacaaaaactaacttaaatagaatgtagtcttgaygtgggggctcacgcctgtaatcccagcactttgtgaggccaaggcggatggatcacttgagtccaggagttcaagaccagcctgggcaacatggcgaaacctcatctctataaaaaaatagaaaaattagccaggtgtggtggtgcaggcctgtagtcccagctacttgggaggctgaggtgggaggatcgcttgagcctaggagggtgagactgcagtaagccaccatcatgcctctgcactccagcctggaagacagagcaagacactgtctcaaaaaaataattaataataaactaaaaataaatataatagaatgttgaagaaacatggtctaagtggaaattaggagtgattttgccaatggaaaatttcaagaactaatagatcctgttccagcaggtgtgactagagaaagagggaaaaaaaaaaagaatagagtcaaaatcattgtataagctagatgtgctcagataaaccaaacgtgggcaggcatatgaatagaagaaaaaacaaactgcaggagtattagaagaaaatgtaagcaatcctgggaaaatagtcctcagaaattctcacaaaggaccatatatgaggttgttcattacagggttgtttgtggtaaggggagttgaaagctccaggggctcgatgctgggggaagggatgagggtagcagttagaatcaagaaactgagggtaccatggctatgtggaagggctgtaaaacagtgctgagagaagacagtcagaataaggcctgtggcacaatatcatttacctaaatacatatatataaaaaaaattttatttatttatttatatg

SEQ ID NO: 710058 - DNA, 662 bp, Homo sapiens
ttccacaacatctattaccatgtgcaatgcacagtattgatgcagtaaatggacaaagaagagcaaaatcctcttccaggaatatacagaccagtaatgcagacataaacaagtgagcatgatataaaagtctttgtggccaaggctttcagcagctccattctttcttctcataatctctgtaatgcacatcttgttcataatcaggatcgactttagattatggagtctacctctcagccttccttcttactaaaagtctagccatactcctgagggtcttcaatttctgttgacacttggtccatcacccttacttcatagattctyggtaaatttcaatgactttaagagctgacccaggttttgtgggatgtgaagcatgttacaagccctctttaaaaacaagagttcagtttacaaatgcaaaaatagcacgaagtataagaaaataaattcacaacaaattacaaatcttaaaaagctatccaaaaccacattgtgtaaaaggattaaaataacaatatttaaattaactaactgcttagtaaactttttataggctgggcatggtggttcatgcctgtaatcccagcactttgggaagccaaggtgggcggtagatcatctgaggtcaggaatttgaaaccagcttggccaac

SEQ ID NO: 710059 - DNA, 3273 bp, Homo sapiens
tgcaaatgagaatgggtccatggaaaaatgattatagggtcaaaccttaaaaataggaataccagggtgggattagaaatgaagatgcattgtcttcagatttactagaaatgtgtggcctttccaatatcgtaaatgaactaacacagaagcagaaaaccaaatatcacaagtttttacttacaagtggtggctaaacaaagaatacacatggacataaaaatggagaaagtagactctgggaactccaaaaggggaaagggtgggaggggaatgagggttgaaaaattacctattgtgtgcaatgtccaatatttgggtgatgggtacaatagaagcccaaccaccagcattatacatgcagtactcatgtaacaaagaaggacatatactccctgaatctaaaatttaaaaaaagaaagttatggcctgtaaagagcagtttcaatcaccccgggaaggtgaagcaattaagtgtccaggtgcggaagcttttagatttgttgagcatcacgagattcagtccactgtgtaataaagcttcccaaatttgtttccgtaaccttgttctctgtctgaggtacaccctactcagtcatcagtaaagtctcctgctgagaacttgcacaagggattgtgtctcaggcaccagctggaaacatcatttatgttgtactgatcttcctggcaagagactcagcctctatggacacagggaatctgggagcctgtctccctgcttcgcgttaaaagaaatcattcctctttccttccaaaatcaactaagttcaaacccaatcacataagttcaactccgtaaactgtataggttatacgattcaaaaccacactgggccctaaataggagatatctaattcacctaaggttttctccgtgtaaatacagagaaagcgctaatatttggacttgaatttattataaatgaaaaacagttcttagagggagccagagattctgatgagaaatcaggcttctgacttctatttttttccttgaaaatcactactctttatttttttctttttaatcacagaatatactgtcattctaggtaatgatgaaaacctaaataaatgactgtttactgaattcctactaaactccaggtactatgctaggcattttacagtttatatttaatatgtcaaattcgtttataaattttatatggaaaaaatttgtaataataggagaaagagaaattcaggattggaaagraagatgttgatgagaaaaactcatggttttgcactacagctttagaggaagggagctgagtcaaaacccaccagaactgtcccttctgaatgggaaagaaggtcagctgttctctagtggcgggatggaaccccactaaaagaacctactgagcttcactctcctctggctaaaattatacaaatagaaacaggggcatgacttttctttatgggattctccctaaagtttccctaagacttttcctttctggaatatcaggaaataagaaaaaatggtgggtatcattattatttaataaatgtgaaatattatgatggagaaaaattaggaaacttgcccaaggcacaacttctcattactggggaatataaatcagtatacttgtccagacttaattagtgagcttccttaaatcattccaaacactattacagtcctccttacactgaatgttgattaaatgtatgcaaatctgttgcctttcctaagtttgaactactttactaaatgtgttcatttttactttcctcccacccccgttgtacttagtactgttcacccatcctttcaatcgatatttactgagttgtgtggcactgtgccaggaatagtctgtctcatggaatattgaatgtagttggtgctacagacaataataaatgccaacaataattattataaaaccgtatttgtaattaggacaaatcatggcaaccagttcttgactacgagtataattgcacacctcttttctccttatggtgaaattctcaaagaattattagcaagaagaaggtctgaagtgagatctctgatgcaagcttagacttgccatcaaccagagtgctgggtggtggatcaggaccaccaggcaacctcggatccctttcagcctggcaagcttctgcatttggccattatcagtctgtttatcaggtctcagatgaggagaaacaagtaaagaatagcattaacaatacttgtgttagattttaaaaatagttcctggacaaataaattttaaaaaaaaagtcaatgaaggttttttatcttttcccattatctaatgtccttcatggaccttacaaatgtctagtgatagaaacattcttgataaaattgaagataaaggtaatctagtcgttctatctgctgaaattgataataatttaattctttttacatttaaaattgtataattctgtattataacagaaacgcatttttatattataaaaatcaaacatatcaaaagtaagcattttatttctttctttaatatctctcattatctacaattatattcccttccataggtatataatctcaggtgtatacttcaaatgtactcttcacagttaatgataaacacatgtatgcacaaaataaacatagattctgtttttaggtaaatggaattgtactttgcacatgtctttcaaccaaagataattttgtccccaggagacatttggcaatacctgaagacatttttgattttcacagtttggggtggtaggtggttttactggcatttattagaggccaaagatgctggaaatcactctacaaagtacaggatggccccctacagcaaataattactcagtcccaaatattaatagaaccaatgttgagaaacagctctataagatgttctgtcacctgcttttttacagatctacttcatcgcttaagcaatggcatagtatttgcttttaccatatgaattttccataatgtatttttattttaaattatgatctgattcaaacatagtacatgtactcatgtaatcatcatccatataacattttagatatttttaaaatgaaaatattatagatataactgtacagtctcctgccgtctaatcatcctcttactctgactcaaaagtcaacctctatccagaagcagttatgtttcctgtacatctatatactgtgcttttgctacatatgtattaatccagaaataacacagtattgatttttatgcatttagaagtcacatgaatgataacaaac

SEQ ID NO: 710060 - DNA, 653 bp, Homo sapiens
tcgcagtgcttgacatatttctgtgcttcctccacacccgacccataactgtcttttaggatcaggctgccgggctagaatgggaatgccacattgttaacccactctcttcctgaagccactctgtcaaactgaaaggttttatggatattttgttgttcaaatcatttttaaaaattccattccactgcctgggatggtgaacagttgtatttcaaactttacaatgtcctaaatgtctcgactctatgctcccttttgttcctgattgtaaattggtcaaggctaggtcagaacaaaggacactatgaaaacccaagtcagagrttaccaggactggctgttggctccaatgacctgaatatgagagaactgaggagcacatggcatcaaactcatctgtgcaccagtatccatcttctagggaactcgtaaaatacagcaatgggaagaggagccttccctgcattgtaacattctaaatcagaatctttgaggatgttgtgatgttttggaaagacctcaggtgactccaatataccttaggtcacttaggaagcatttaatgcacaaattaaatccacagcctatgaacccatagataaaaggtgacttgcaaaagtttacctgacaatctagtcaccaaaccagat

SEQ ID NO: 710061 - DNA, 663 bp, Homo sapiens
gcagggatggtttccaagaatgcctgagttgcacatgtggcagatacgaagttttaaaaaattctcggcagaataaatttggaatattattgacctcagaggtgtttgtctgacgtggtttaatgattgtttctgtagtaagaataatttcataactctggcgggaatttaaaggaattatcagcaagcgattattcatttttgtgttttccttgaaaaatggctttggagttaatgggctttggatttactctacacctgaaaaacctcagtggctcagtggaaataaataaaatcaatctttagatatccaagctctgcagctgtttcatccagctcactggccatccctagcaagcaggggcagcttcaagggctttttctctttctttcttggaggctttcttttcagcaatgaagtagagtagaccaatttcttgcctgtgatttggtgcctgatgaatgaggggccttgatcaggaatgatcctgagtgatgggcaggaaatggatccccccttgtgaaaacaaaatattgacttctaaagagttttttttcttttttttaattggaaaaggtatcttttatttttattattattctttaagttctgagatacatgtgcagarcgtgcaggtttgttacataggtatacatgtgcca

SEQ ID NO: 710062 - DNA, 655 bp, Homo sapiens
agcctgctcctggcgatgaaccctagccccactccagggccacagtaccccagcctcacacatgcactccttctccccaaggccagggcagagggcctcactgtttccctggcctgctgtcagcttgcaaccaggagacagaggccagctgggatctgccccaccttccccccmatactgctcccctcaaccaggacagagaacatggcctcctctagggccctgcctcccaagccttaccctcacacaccaagtaccttttcagctttttaactgcccccagccaggcccacggaagcctgtgtcactctggcacaagctgccaccaccagccacctacacacccccccagcacacctcgcacgggaccacagccccagctgtgctgctaagggccaagcacaaaggctccagtgagcaaatgttcaagcccctggtagccaggcctccccttgccgagccgctgccaacccaccctgtgggaagtggccccagccatctcctctagaccacggcaggcagccccggggtccccagacccctgtccaggccagcatgtctgcagccccgacatctgcttcctctgtcgcccaatccaaaatcgacgaaatggagggtcctctgggctgggccacattcacattcccctccccct

SEQ ID NO: 710063 - DNA, 1070 bp, Homo sapiens
acgccactgcattccagcctgggcaacaaagcgagactctgtctcaaaaaaaaaaaaaaaaaaacaaaaaacaaaaacaaacaaamaaaaaaaaacgtggcagcaaggcagcagctccatccatcgaggcacatcttcaggaaagaacctgtggtctgagatgagacacaccacctgcctgggactgaggttgtgcacactgaaatcacagcagtcagatgagaaaccccgggtcagagggagagacagactttgcagagcaggtaagtcggcatctgactgagaccaccgatttggagatgtccccccaagactgtttatgcctcttagagaaccacagtccgagtggaaatgcaggtggaagctggagtcacgtatttcattgatgaaacctggccctgagggaggcccgggagcgaacctgccttttgccggtgctcacgctggagctggttgctccacttcccgtttcacagatgaggaaacagagaccggaggatgaatctgtttgctccaaggtatcagggctgataagtgccaggagtggggccaggccgtggggcccagggtctgtgctccccaaccctcctcccccggggttcccaagatgctgcgctgggtgggatgcaaaacatccacccgattctacagccttccttgaactgggcatgcaggtgggactgtgctagaacaagagctccagctgcctggaattctttctggaatgaggtaagatgtatatatgcgtctatatctaagccatgaaatcatctgctcagtggacctgctaactccacaaatattttcaaaatgccatcaagaaccaggaagattgccaaagataaagggagcctgctccattaacataatggaaagcaatccacccccgcatcagtggagttcatagaacaatgtgtggcccacggtgggggtgtgggtccccagggcctgggcagtcctggcccgcgctgggcgttcagcacgtttgcagctgtgattgggccgaggccatgggaaggtggaagacatcagacccaaacaaaggtgctccctggaacagaccagggccc

SEQ ID NO: 710064 - DNA, 649 bp, Homo sapiens
gcttcctctactctgttgtaattgctttttaagctgctgatcttgactgtgagctctaggagggaaaggagagggtctccttcttcactgctttgtctccaggcctgaaagagggccaagaacacagtgactgcttagtaaataaacattaaataatttggaatgttttcccaaccaaaagaagaaaagaaaatgatttagggacattacatgaaagaaaccaatgaagcctagtgttttttcctcactgtttgaatttgagcatattgggtagacaaaactcctggcttcrttctctaagcccctaactctttctttttgtcaacttatttctctctgtctctttttgttctgttctttgctgacctctttctccctcctttatttccttcccttaatccctttcttctctctataacttgggcttgtttttgtctatttctctgaattatttttctagaggaaaaatattaatagatattgatagcttaagaaattgataggggggaaacagttcttgatagcttaagcacaactcctagaagaataaaaataaaatatttaacttttaagctagcagaagaaaatcccatctatttaatagaatataagaaaggaaaggggaagaagaagatgtggaaaatagaaa

SEQ ID NO: 710065 - DNA, 1388 bp, Homo sapiens
ggaaagtaatacctttatgacctcatcaactgatactatttctaagtctgctcgacaggccagtcgaggtttttatctaatccccattcccatgcatgtaattgtctgcctaatattcctacttggccactggacaaatgaaaatcagttgaacaagcccaacattaaatcaatattctcctcctttcaccaaacaagttctatgcccagattgatttgtagggatatcagcattgctacattctctcactcacactgtagaaatgtatcttctaatctcatgagaaatgttaaattcttcttgggaacacagttactttgtgtatcggctacagtcaccaaattaaaagtgtttgagaatctgataggacaaattcatgtgatgtacattgtaggttagtgaagcagattgaataaaatatgttatatgagatttgcagataataaaatggttacttttgtgtaccataaaattatctgcagtcctgttattttcagatctaccctctaaatatgaaatatgagatgataccttcattgtattggcctaattctttgaacatttattatctatgtcaactcttttctccgaccccttctgagataagaatacacacatgtacacacacatgcagagacagagactgagagagagactgcaaggaactttaatgaagcaaatctaacatatatgtataataccataaaaaagaaaatgatagtcaaataatacaatttcccctctctttgtctctctctctctctctctctctgtgtgtgtatgtctctctctctctccctccttctttgtgctttccagtataattatatgtgaagatgcctattatactgattcattagatttaatgaagtagataactttttaattttagagaacaaattatgccataaatataccaaattatatgtttttgtatagctgtatttcatgctcgtgaatgcaaaattaattcctttcaytgacgttagcaaggaaaatactaagtgcgtaaattgcaactccattttctccaatattttttagttatttgactaacatatttcttatgtaacctgtgcttcaagattgactgaaagaaattgtgtctaaaaaaagaatatatacaacaaacccctagagaagtgaaatcctcctttctttctgtctctttaagctttgttgattaaaacatggctgccttttctgaattagactggcaaggtgtcagagtcttgatgaattgtttaagttctgaatatggttgcaatgtaagcaggaggaaacatagaaaaccttgggaaaaggaatgtcttcttagaatacaaaataagtaatgcaaccatgttacaaatagatgtggaaagagaagacatgaaatattagactt

SEQ ID NO: 710066 - DNA, 1388 bp, Homo sapiens
ggaaagtaatacctttatgacctcatcaactgatactatttctaagtctgctcgacaggccagtcgaggtttttatctaatccccattcccatgcatgtaattgtctgcctaatattcctacttggccactggacaaatgaaaatcagttgaacaagcccaacattaaatcaatattctcctcctttcaccaaacaagttctatgcccagattgatttgtagggatatcagcattgctacattctctcactcacactgtagaaatgtatcttctaatctcatgagaaatgttaaattcttcttgggaacacagttactttgtgtatcggctacagtcaccaaattaaaagtgtttgagaatctgataggacaaattcatgtgatgtacattgtaggttagtgaagcagattgaataaaatatgttatatgagatttgcagataataaaatggttacttttgtgtaccataaaattatctgcagtcctgttattttcagatctaccctctaaatatgaaatatgagatgataccttcattgtattggcctaattctttgaacatttattatctatgtcaactcttttctccgaccccttctgagataagaatacacacatgtacacacacatgcagagacagagactgagagagagactgcaaggaactttaatgaagcaaatctaacatatatgtataataccataaaaaagaaaatgatagtcaaataatacaatttcccctctctttgtctctctctctctctctctctctgtgtgtgtatgtctctctctctctccctccttctttgtgctttccagtataattatatgtgaagatgcctattatactgattcattagatttaatgaagtagataactttttaattttagagaacaaattatgccataaatataccaaattatatgtttttgtatagctgtatttcatgctcgtgaatgcaaaattaattcctttcactgacgttagcaaggaaaatactaagtgcgtaaattgcaactccattttctccaatattttttagttatttgactaacatatttcttatgtaacctgtgcttcaagattgactgaaagaaattgtgtctaaaaaaagaatatatacaacaaacccctagagaagtgaaatcytcctttctttctgtctctttaagctttgttgattaaaacatggctgccttttctgaattagactggcaaggtgtcagagtcttgatgaattgtttaagttctgaatatggttgcaatgtaagcaggaggaaacatagaaaaccttgggaaaaggaatgtcttcttagaatacaaaataagtaatgcaaccatgttacaaatagatgtggaaagagaagacatgaaatattagactt

SEQ ID NO: 710067 - DNA, 607 bp, Homo sapiens
atgggtgcattttgttttcctgatctctcttttattagaaacatagaccttgtttcaactacctattgatgcgtaacagatcacaccaaacttgtggcttccaacaacaacaactacccattttgctcaaaaacttgcactttgggaagctctcagagatgggctttccacagggcctctgtttcctcacagtattatggcagtgctctaagaacaagtatcccaacaggcagcaggtggaagctgtttcttctgataatctaactttgcaagtcacatcatatcatctctgccacatttacaggccacccagactcaagggaagaaaacagaggcctcaycatctcagtgggaggcttgtcagcatcacattgcaagaagagcatgtgggatgggagatatagttacaaatatttttggaaaacacaatctgccatatgttttaagagtccgagttaggcagaagtttcagatccaacttctccaccctgcatagccaaaggtcttatctcctctccccatgtagatgttaaaacatgtgttactagattccatggacttaacagcaccacccccatgcagcatagctgcaaaatctgcacacatg

SEQ ID NO: 710068 - DNA, 1016 bp, Homo sapiens
aaaaaatatatatttatctcatctcatcataagtccctttccatttccaagtgcctgattcttgacaggaaatgactgtagcaggaataataaaagaaactaaaatttagaaatcaacggaaattactgtaccatttagcatttgctcaacactgcacagcattttaagttactggtgcyggagcgactggggttatgacagcgcagatggctgcagaccctagttcgtgacatctgtacatttcagctttagagtcagctacatgaaaattcgaacgaccagcccaggtaaaacagagaagagaggttagcctgggaaaggtgtatcagtttatattctagaaacagaagtctcctgaccttcctgtgcttttggccctggacgtccctccttaccacgactctgggagcgggctcagtcctgcccctgcaggtggccccgggatcgctaggctccacagccactggcttctcccaacctgtctcacctctttcccctgggctggggtgtgggcttgatcagtccctggaggagacagctctgcggccttcgagggtcccagcgacacccactccacaagcgcaggagcgtgctggtcccagtgatgattcgctccctttgttaattactcagtgtttcttgttttaggatttttaactatacactgtaaaagaatccttgctgctgttcattgtgttttgagactgagattccttttcacctgtgcgaggaaaggggccgagccttgaggggcagcacaggatcccagggcctgcctccccgtccagttgctctgcggtggatggagggggcgggggggcggggaacagtacggggtgctctccagcagatactgagaagtgacaataagtactcaaaacgtttgggttttgtttgtttgtttgtttgtttgagactctcgctctgtcgcccaggctggagtgcagtggtacgatctcgactcactgcaacctccgcctcccgggttcacaccattctcctgcctcagcttccc

SEQ ID NO: 710069 - DNA, 1115 bp, Homo sapiens
ccacttcctgggttcaagtgattctcctgcctcagcctcccgagtggctgggactacaggcgcctgccaccacgcccagctaactttttttgtatttttagtagagacggggtttcaccatgtttgccaggatagtctcgatcccttgaccctgtgatctgcccacctcggcctcccaaagtgctggaattacaggcgtgagcctctgtgcccggcccatctgtggtctctttagatggatttacctagtctgggtagtaaaaaaaaaaaaaaagattacgtaacacataatcttttgtgtctggcttctttcactgagcatgtttttgctgttcatccatgttataacattatcagcacttcattccttttcatagttgaataatatgattgaataaaaatatggctttatatgtataaataagaatgcaaatgttgccacctgtttaagagtttctgacctcacatgattactttatggttatgaatccatgtttaatctgttgcctactagatgttgtgttaaggcttaaagatcccatatccataagacaatttttttcacttctattgtagactggtaaatcccccgcaggagtgaatcttttatcatttgcatatgatctagaagcaaaagcaaacagtttggtgagttcaaatcgtccggttaaatactgtagtagttgtagatgtcaaatgtcagtaccattcttagggaagctgctggagaggttcctcacactgtgagtaatcccttgttcataaacacctctcttgtgtgtgtcattacrtttccgtccacagccattgccatgtgtcccaaacccctctgagccttgaatgttgccaggatggtgtcgggttgatgcagggcaggtgaaacctgctttattgaggcagtggcagggttacagctcagagactgctcttctggaggggggctaccccataggcagtgtgcagaaagtagcagcctagggacagttttgtagtcttatttataaccgctttcaatggaatgctaattaagtggcaggttgttcagaaatagctagaaaatgagtggtaacttcccagtgttgccatggcaatggttagctgtcatggcgctggcg

SEQ ID NO: 710070 - DNA, 1115 bp, Homo sapiens
ccacttcctgggttcaagtgattctcctgcctcagcctcccgagtggctgggactacaggcgcctgccaccacgcccagctaactttttttgtatttttagtagagacggggtttcaccatgtttgccaggatagtctcgatcccttgaccctgtgatctgcccacctcggcctcccaaagtgctggaattacaggcgtgagcctctgtgcccggcccatctgtggtctctttagatggatttacctagtctgggtagtaaaaaaaaaaaaaaagattacgtaacacataatcttttgtgtctggcttctttcactgagcatgtttttgctgttcatccatgttataacattatcagcacttcattccttttcatagttgaataatatgattgaataaaaatatggctttatatgtataaataagaatgcaaatgttgccacctgtttaagagtttctgacctcacatgattactttatggttatgaatccatgtttaatctgttgcctactagatgttgtgttaaggcttaaagatcccatatccataagacaatttttttcacttctattgtagactggtaaatcccccgcaggagtgaatcttttatcatttgcatatgatctagaagcaaaagcaaacagtttggtgagttcaaatcgtccggttaaatactgtagtagttgtagatgtcaaatgtcagtaccattcttagggaagctgctggagaggttcctcacactgtgagtaatcccttgttcataaacacctctcttgtgtgtgtcattacgtttccgtccacagccattgccatgtgtcccaaacccctctgagccttraatgttgccaggatggtgtcgggttgatgcagggcaggtgaaacctgctttattgaggcagtggcagggttacagctcagagactgctcttctggaggggggctaccccataggcagtgtgcagaaagtagcagcctagggacagttttgtagtcttatttataaccgctttcaatggaatgctaattaagtggcaggttgttcagaaatagctagaaaatgagtggtaacttcccagtgttgccatggcaatggttagctgtcatggcgctggcg

SEQ ID NO: 710071 - DNA, 1115 bp, Homo sapiens
ccacttcctgggttcaagtgattctcctgcctcagcctcccgagtggctgggactacaggcgcctgccaccacgcccagctaactttttttgtatttttagtagagacggggtttcaccatgtttgccaggatagtctcgatcccttgaccctgtgatctgcccacctcggcctcccaaagtgctggaattacaggcgtgagcctctgtgcccggcccatctgtggtctctttagatggatttacctagtctgggtagtaaaaaaaaaaaaaaagattacgtaacacataatcttttgtgtctggcttctttcactgagcatgtttttgctgttcatccatgttataacattatcagcacttcattccttttcatagttgaataatatgattgaataaaaatatggctttatatgtataaataagaatgcaaatgttgccacctgtttaagagtttctgacctcacatgattactttatggttatgaatccatgtttaatctgttgcctactagatgttgtgttaaggcttaaagatcccatatccataagacaatttttttcacttctattgtagactggtaaatcccccgcaggagtgaatcttttatcatttgcatatgatctagaagcaaaagcaaacagtttggtgagttcaaatcgtccggttaaatactgtagtagttgtagatgtcaaatgtcagtaccattcttagggaagctgctggagaggttcctcacactgtgagtaatcccttgttcataaacacctctcttgtgtgtgtcattacgtttccgtccacagccattgccatgtgtcccaaacccctctgagccttgaatgttgccaggatggtgtcgggttgatgcagggcaggtgaaacctgctttattgaggcagtggcagggttacagctcagagactgctcttctggaggggggctaccccataggcrgtgtgcagaaagtagcagcctagggacagttttgtagtcttatttataaccgctttcaatggaatgctaattaagtggcaggttgttcagaaatagctagaaaatgagtggtaacttcccagtgttgccatggcaatggttagctgtcatggcgctggcg

SEQ ID NO: 710072 - DNA, 1115 bp, Homo sapiens
ccacttcctgggttcaagtgattctcctgcctcagcctcccgagtggctgggactacaggcgcctgccaccacgcccagctaactttttttgtatttttagtagagacggggtttcaccatgtttgccaggatagtctcgatcccttgaccctgtgatctgcccacctcggcctcccaaagtgctggaattacaggcgtgagcctctgtgcccggcccatctgtggtctctttagatggatttacctagtctgggtagtaaaaaaaaaaaaaaagattacgtaacacataatcttttgtgtctggcttctttcactgagcatgtttttgctgttcatccatgttataacattatcagcacttcattccttttcatagttgaataatatgattgaataaaaatatggctttatatgtataaataagaatgcaaatgttgccacctgtttaagagtttctgacctcacatgattactttatggttatgaatccatgtttaatctgttgcctactagatgttgtgttaaggcttaaagatcccatatccataagacaatttttttcacttctattgtagactggtaaatcccccgcaggagtgaatcttttatcatttgcatatgatctagaagcaaaagcaaacagtttggtgagttcaaatcgtccggttaaatactgtagtagttgtagatgtcaaatgtcagtaccattcttagggaagctgctggagaggttcctcacactgtgagtaatcccttgttcataaacacctctcttgtgtgtgtcattacgtttccgtccacagccattgccatgtgtcccaaacccctctgagccttgaatgttgccaggatggtgtcgggttgatgcagggcaggtgaaacctgctttattgaggcagtggcagggttacagctcagagactgctcttctggaggggggctaccccataggcagtgtgcagaaagtagcagcctagggacagttttgtagtcttatttataaccrctttcaatggaatgctaattaagtggcaggttgttcagaaatagctagaaaatgagtggtaacttcccagtgttgccatggcaatggttagctgtcatggcgctggcg

SEQ ID NO: 710073 - DNA, 617 bp, Homo sapiens
cacaggccacgcccacacaaggcagcgcccctccaccaaagccacgcccacctgccccgcccctcgtcagttgccyccacatgaggccacgccgcacccactcggttcccctctctgaactcatgggaatgacccaagcaggtcttgtctttgcgcctcagtttctccaacacggaagtggccacagctgatttccgtgcctctgtctgagctgggaaacgaccctcaccggcttggaggaagccttggtccccagcccggcccccatctccgcgccggcttgcactccccagggacggggagctcaccccctcccagagccctggagtggaggtttgatgcctgtcaggctggggcccggggatgggtctgggggaggcacttctgagaaaaggtggaaacggttctcagaaaccccgaaaccctgagggactcttttccttctcagaaatgctccccccgccccagactcgggaaaacgcctgttcgagaaagctgggctggctgtgggcaagaggcttggaccggcccctgtggagcccctgctccaggctgctgggaatgtcccccttctccagctgtgacctccaccccaggcaagtgtttcctgccacctg

SEQ ID NO: 710074 - DNA, 626 bp, Homo sapiens
cacttaccagttctgtaatcttaattgaagtactgaatcttaattgaagtactgaatcttaattgaagtactgaattgaagtacttcaatcttaattgaagtactgaaactataagtttcagattctaaattggcagatgggattccaccctgtttggaaaaactcaaactgtgtttttcctctgctctcactccacaataacaatcatcaacacagacacacttctgtgaccaaatgtgatgsgggggggtttctcccacacacccagcagccaatcagttctgcaccgtacatcagctaggtgtcctccaattccatcctgacactatctacctggacatatcagcagagggctcagtcccacaaaattgccaccaccttcccaccagtcacaagtctgggcctccagagcttcttatgactggcttcacattgaggtttccatgactccctgtttgggttggattagtttgctcaaacagctctcaggactcagggaaacacatacttaggcttaccggtttgtaataaaggactttacaaaggatgcagatgaagagatgcacagagcatggcatgtgggaaggggtgtggagcttccatgccctccccagatgcaccacac

SEQ ID NO: 710075 - DNA, 959 bp, Homo sapiens
tttgtataaaaccaacttagttctgtgagaagagttgtacgtttttaatatttttgttctttttgtagactgcaggaacaaaaatagccttcctatagtaaggtggcaattcacattaagaatgtagataagcaaatttaaacttttaaatgtaatttgtctaaaaaaattgaaaaacagtgtatagtaaaaatctctcttccaaccaacggaaagtacttttatgtaagatcctttaagttactgacttgaatctttacgtaaggtaatttgctagtatctattttataaataatgttatttaatactgttttattttctatagaatcctggtgtttttccatgtaaatttttaaaaattcttaaagtatgtatccctcattttcccctatagttgtttgcttctacttctgtttttaagagatagcatctcagttgtttaagctggaatgcagtagcatgatcatggcttactgcaaccttgacttcttaggctcaagcagtcctcctgtctcagcctctagagtagctgggatcacaaatgcatgccaccatacctggctaacttttcttttcttttcttttttatttttttgagatggagtctcacactrtcaccgggctggaatgcagtggcgtgatctcagctcactgcaacctctgcctcccaggttcaagtgattctcctgcctcaaccttccaagtagctgggattacaggtgcccaccaccatgcccagtgaattttttgtattttttttgatagagatggggtttcaccatgttggcctggctggtctcgaactcttgaccttgtgatttgcccacctcggcctcccaaagtgttgggactacaggtgtgatccatcacacccggccaacttttctttttttttttttttaagagacagggtcttgctctgttgtccaggttggtctcaattcctgggcccaagcaat

SEQ ID NO: 710076 - DNA, 959 bp, Homo sapiens
tttgtataaaaccaacttagttctgtgagaagagttgtacgtttttaatatttttgttctttttgtagactgcaggaacaaaaatagccttcctatagtaaggtggcaattcacattaagaatgtagataagcaaatttaaacttttaaatgtaatttgtctaaaaaaattgaaaaacagtgtatagtaaaaatctctcttccaaccaacggaaagtacttttatgtaagatcctttaagttactgacttgaatctttacgtaaggtaatttgctagtatctattttataaataatgttatttaatactgttttattttctatagaatcctggtgtttttccatgtaaatttttaaaaattcttaaagtatgtatccctcattttcccctatagttgtttgcttctacttctgtttttaagagatagcatctcagttgtttaagctggaatgcagtagcatgatcatggcttactgcaaccttgacttcttaggctcaagcagtcctcctgtctcagcctctagagtagctgggatcacaaatgcatgccaccatacctggctaacttttcttttcttttcttttttatttttttgagatggagtctcacactatcaccgggctggaatgcagtggcgtgatctcagctcactgcaacctctgcctccyaggttcaagtgattctcctgcctcaaccttccaagtagctgggattacaggtgcccaccaccatgcccagtgaattttttgtattttttttgatagagatggggtttcaccatgttggcctggctggtctcgaactcttgaccttgtgatttgcccacctcggcctcccaaagtgttgggactacaggtgtgatccatcacacccggccaacttttctttttttttttttttaagagacagggtcttgctctgttgtccaggttggtctcaattcctgggcccaagcaat

SEQ ID NO: 710077 - DNA, 959 bp, Homo sapiens
tttgtataaaaccaacttagttctgtgagaagagttgtacgtttttaatatttttgttctttttgtagactgcaggaacaaaaatagccttcctatagtaaggtggcaattcacattaagaatgtagataagcaaatttaaacttttaaatgtaatttgtctaaaaaaattgaaaaacagtgtatagtaaaaatctctcttccaaccaacggaaagtacttttatgtaagatcctttaagttactgacttgaatctttacgtaaggtaatttgctagtatctattttataaataatgttatttaatactgttttattttctatagaatcctggtgtttttccatgtaaatttttaaaaattcttaaagtatgtatccctcattttcccctatagttgtttgcttctacttctgtttttaagagatagcatctcagttgtttaagctggaatgcagtagcatgatcatggcttactgcaaccttgacttcttaggctcaagcagtcctcctgtctcagcctctagagtagctgggatcacaaatgcatgccaccatacctggctaacttttcttttcttttcttttttatttttttgagatggagtctcacactatcaccgggctggaatgcagtggcgtgatctcagctcactgcaacctctgcctcccrggttcaagtgattctcctgcctcaaccttccaagtagctgggattacaggtgcccaccaccatgcccagtgaattttttgtattttttttgatagagatggggtttcaccatgttggcctggctggtctcgaactcttgaccttgtgatttgcccacctcggcctcccaaagtgttgggactacaggtgtgatccatcacacccggccaacttttctttttttttttttttaagagacagggtcttgctctgttgtccaggttggtctcaattcctgggcccaagcaat

SEQ ID NO: 710078 - DNA, 959 bp, Homo sapiens
tttgtataaaaccaacttagttctgtgagaagagttgtacgtttttaatatttttgttctttttgtagactgcaggaacaaaaatagccttcctatagtaaggtggcaattcacattaagaatgtagataagcaaatttaaacttttaaatgtaatttgtctaaaaaaattgaaaaacagtgtatagtaaaaatctctcttccaaccaacggaaagtacttttatgtaagatcctttaagttactgacttgaatctttacgtaaggtaatttgctagtatctattttataaataatgttatttaatactgttttattttctatagaatcctggtgtttttccatgtaaatttttaaaaattcttaaagtatgtatccctcattttcccctatagttgtttgcttctacttctgtttttaagagatagcatctcagttgtttaagctggaatgcagtagcatgatcatggcttactgcaaccttgacttcttaggctcaagcagtcctcctgtctcagcctctagagtagctgggatcacaaatgcatgccaccatacctggctaacttttcttttcttttcttttttatttttttgagatggagtctcacactatcaccgggctggaatgcagtggcgtgatctcagctcactgcaacctctgcctcccaggttcaagtgattctcctgcctcaaccttccaagtagctgggattacaggtgcccaccaccatgcccagtgaattttttgtaytttttttgatagagatggggtttcaccatgttggcctggctggtctcgaactcttgaccttgtgatttgcccacctcggcctcccaaagtgttgggactacaggtgtgatccatcacacccggccaacttttctttttttttttttttaagagacagggtcttgctctgttgtccaggttggtctcaattcctgggcccaagcaat

SEQ ID NO: 710079 - DNA, 1097 bp, Homo sapiens
cacatgataaagggagcagtactggaaagccatgtatttgcttgtgtgtgcatgcttgtcaatgtctgtgtggttatgcagatccatgagggggtttcttaatgcagtttaatggaatccatttggggtgaaaggtgttattttgtctaaagaaatctccccctcgcagtccagctctcagacagactctgcaacagggtcaccatctggggatgtctgatagatctgggacatgcgatcgaaaggactctccttctcctcatcgttgtccacctcccggtccccggggggaacggcgttgggcatcatgtggatgtaggcagctgcgatttccttgtggaagaccgtgtcttggttgtaggagatgagctcattgctgatgttcaccgtctccaccggcgtgcgggagcagacgtggctgcaccccagcagctgggcaaacaccttccggaagtcggcgttgaaggcatagtgactgggttgagtgaggagttggcccagcagaaccagatgaagacrtcgaatgtggtctcactgacgcaggggaagccggccggagggcctttggggtgtccactgcagaaagggaccatgcagttaaggatgaagaagggcagccagcaacacacgaagacccccatgatcaccgacagggtcttgagaacctcggtctccttcttgatggaaaaccgcaggctggtgtcgggcgcgcagcctgcgctgctccggcagctctgcacgtgctctgcggccctctccagggaggaaatcctgcggatctgcacctgggcgatgcggtagatgcgcgtgtaggtcacgatcatgatggccatggggatgtagaagctgatgagcgaggaagagatggcgtaggttcgattcaggctggagtcacagttctctgccctcacgtcgggctcccaaacggcctcctcccagggcgtccagttggccaggttgtttggcaggtccagcccacctcaagagaccgcctggtccctgtgccagttgagctggaccggaatgaaggagatgaggctggacaaggtccaggccgggcggaccatgaccaaggccatgcgctgggtcatcttgcg

SEQ ID NO: 710080 - DNA, 1405 bp, Homo sapiens
cacccacaccgcagcgtgagttagagctgtgtcctttctgattgccaagtaatatctcattgcatggtctagctgggttgacatcccattgcacactctagctgggctgtgaaggagcaggctgcttgtgcacatgggtaacagatggatgtacagtgagacgtcagtctgtgcacatgggtaacaggtgggtgcaccgtgaggtgttggtctatgcacatgggtaacaggcgggtgtgcagtgagacgtcagtctgtgcacatgggtaacaggtgggtgcacagtgaggtgttagtctgtgcacatgggtaacaggcgggtgtgcagtgagatgtcagtctggtgcgcgtgggtaacaggcaggtgtgcagtgaggcgtcagtctggtgcacgtgggtaacaagtgggtgtgcagtgaggcgtcagtctgtacacgtgggtaacaggtggatgtgcagtgaggtgtcagtctggtgcacgtgggtaacaggcgggtgtgcagtgagatgtcagtctgtgcacatgggtaacaggtcggtgtgcagtgagacgttggtctgtgcacatgggtaacaggcaggtgtgcagtgagatgtcctctcctcctgccggccacacgtccccgctcccagggcacagatgtgccagtcactttctgagcaactacttcaaatcttcagaacaacccttcaagaagtatttctagtttactgatgaagatagacagacagatataaacaacttgcccaaagccacgttgccagtcagggccactgaggcctggcccgttccaaggtgcgggctcatctctccctccccaggactgcaggaatcagtcgggggagcggcaggccccagccattccactgcgtgcaggtttcctgccaattaagctttccagccttgggctgagaagaggatgcctgtgtgttgcctcatcgtccccaggagttcctgtcctgtctctaagatgcatgagggctggagcagccatgtggttacagaaagctgctccccctcagggcccccagaggaagtcagggcccttcctttatgcgtgtggtgagccccaggcagctagaatgggacaccggtgagcacaccaatgaggctgaagaccatcacatccattatctgagcacggatggcccagctacctgtggaaagcaccacaagcctttgctggcggaagtgggttggtgacttgttccacttttctcttatttatttatttattttgagayggagtttcgctcttgttgcccaggctggagtgcaatggcacgatctcggctcaccacaacctccacctcccgggttcaagcgattctcctgcctcagcctccctagcagctgggattacacgcatgcaccatcacgcctggctaattttgtatttgtaat

SEQ ID NO: 710081 - DNA, 1136 bp, Homo sapiens
aataagttaaaaatgagcattattctacaatatacatattgtatattgtatatacataaaaaacatatatatatttgttttttaaccacttgtctcatttaatgaatttattccttaaggccaccatgggaagttgggaggtaagtattattattttcttgatttttcagatgagcaaatggggtctcagtaggattgagtagcttgcccaagtccgagggctagtaaatggcagagtaaagatttggttacaggtaggttcacaccagtgcctgcgtgcttcaacagtgtaacaaatatttattgagtgtgtattargttctaactactttttacataatgctttatttaactctcactgtaaccttttgcagcaggtattttcatcctggttttatggatgggggtgtggctgctcaaagaggttaaaggatggacctacaatatcctatggctaagaaatggcagctccagaatttcctctcaggttcccctgaagccaaagagtgtctctccactgtgccctgtgttccagttcaggtccaggctggggaccatcaacagagtattgagatcctggcccacatcaggctagcgggtgtgctgccccccttgcttttgacagtatctgtcacaaccacaggcctccccttccaaagcagggcaacaaagttgcattgcagtgtgcatgatcatttgacagggagccacaccgccattgtggttggaaaatccagagactcctggggaaattgtagagaatgccgtccacatgatgatctgattatatgcatcaccatcagcacgacttcgtgcttggctcttaatacacccttagtgggagtgggccagggagggggaccctcttcccccaggagcatttttcacttgtggcctgtgggactggggcacagagactatcaagagaatgtgtgggatttatccacagtccccaggcctgcctccctccctgatgggtggctgtgaacaggttttgcttacaattttggcaagacagtttgatcatgagttgggtataaaaatattcaggggaggacaatgactcatcattggggaatgagagggaacaaatgcgatgtaatgtgggtttagcaggtggtcactatgatgtgaaa

SEQ ID NO: 710082 - DNA, 1477 bp, Homo sapiens
gaaaaccagacactaaaagtcaggagaagaatggggtgcagggagcccctcccctcccactctggtgtgggggctccttccacagcccagaccttgatttgggaacaggtgcagctcccagagacaagaggccagtccagggaggcagagtctcctgtctgtggagggtcccactccctgcatccttgccagacagacgccagcctgctcagtggacctgggagattgctgccaaagggacactgcaccatcgcagggcctagactaccagcaagttcaaggctctctaagccagcaacacatcagaatcaaccagggagactgcctagagtacacatccccaggctcttctccaaacccacttaatcaggatctccagggctgggctgggaatcttaaagtttcaaggataaggccaagcatggtggctcatgcccataatcctagcattttgggaggccaaggtgggagaatcatttgaggccaggagtttgagactaggcctgggcaacaaggtgagaccctgtctctataaaaaattaaaaaatttagtcagatgaggtggcgtgcacttgtagtcccagctacttgggaggctgaggcaggaggatygcttgagcctacgagtttgaggctacagtgagccgtgattgtgccattgcactccagcctggatgacagagccagagatgtctcaaaaataaataagtaaaaataaagtttatcaggtgattccaatgcacagcagggtatgggaacacagagctggtcccactccattttgtaccgattttcactggagattaaaatgttccataagggttagttgcatgtagaccctgtggcaaacacttcacacattatctcacctaatcctcacaagaagcctcacaagaaaacaacaaaaagttgtccttcttttacagattaggaaattgaggccttgggaggttaagcaatttgtccaagttcacaaactagaaaaatggaaccagggacttaaacccatgtatctggattccagagcctgaacctttcaccaccatctcaggctgtctctctgatggggaaactgaggctcagaaagcagcctcttgtccacagttacagaacttatcagggttagagctgggtctagaatcaatgtgtgtagactcccaggctggtgccaattaaaaggagtagagacttcctgctgcatgccaggttcagtgccattctcttaaagccgaacaagtctagcaggtggcctctgggtcccaaagcccactggcggctcaggccaatcgagccattcaggaacctctctgggaaaccagggttcccaaccctgctctgttagccttggaaccaatgtgtaggaagtcaagttttcccagctctgtaggagacactcacaggtagctggtgcccaaagatcacagtatgatggtatgatgatcaaactccatcaagtttttatttttatttttctaga

SEQ ID NO: 710083 - DNA, 1477 bp, Homo sapiens
gaaaaccagacactaaaagtcaggagaagaatggggtgcagggagcccctcccctcccactctggtgtgggggctccttccacagcccagaccttgatttgggaacaggtgcagctcccagagacaagaggccagtccagggaggcagagtctcctgtctgtggagggtcccactccctgcatccttgccagacagacgccagcctgctcagtggacctgggagattgctgccaaagggacactgcaccatcgcagggcctagactaccagcaagttcaaggctctctaagccagcaacacatcagaatcaaccagggagactgcctagagtacacatccccaggctcttctccaaacccacttaatcaggatctccagggctgggctgggaatcttaaagtttcaaggataaggccaagcatggtggctcatgcccataatcctagcattttgggaggccaaggtgggagaatcatttgaggccaggagtttgagactaggcctgggcaacaaggtgagaccctgtctctataaaaaattaaaaaatttagtcagatgaggtggcgtgcacttgtagtcccagctacttgggaggctgaggcaggaggattgcttgagcctacgagtttgaggctacagtgagccgtgattgtgccattgcactccagcctggatgacagagccrgagatgtctcaaaaataaataagtaaaaataaagtttatcaggtgattccaatgcacagcagggtatgggaacacagagctggtcccactccattttgtaccgattttcactggagattaaaatgttccataagggttagttgcatgtagaccctgtggcaaacacttcacacattatctcacctaatcctcacaagaagcctcacaagaaaacaacaaaaagttgtccttcttttacagattaggaaattgaggccttgggaggttaagcaatttgtccaagttcacaaactagaaaaatggaaccagggacttaaacccatgtatctggattccagagcctgaacctttcaccaccatctcaggctgtctctctgatggggaaactgaggctcagaaagcagcctcttgtccacagttacagaacttatcagggttagagctgggtctagaatcaatgtgtgtagactcccaggctggtgccaattaaaaggagtagagacttcctgctgcatgccaggttcagtgccattctcttaaagccgaacaagtctagcaggtggcctctgggtcccaaagcccactggcggctcaggccaatcgagccattcaggaacctctctgggaaaccagggttcccaaccctgctctgttagccttggaaccaatgtgtaggaagtcaagttttcccagctctgtaggagacactcacaggtagctggtgcccaaagatcacagtatgatggtatgatgatcaaactccatcaagtttttatttttatttttctaga

SEQ ID NO: 710084 - DNA, 1477 bp, Homo sapiens
gaaaaccagacactaaaagtcaggagaagaatggggtgcagggagcccctcccctcccactctggtgtgggggctccttccacagcccagaccttgatttgggaacaggtgcagctcccagagacaagaggccagtccagggaggcagagtctcctgtctgtggagggtcccactccctgcatccttgccagacagacgccagcctgctcagtggacctgggagattgctgccaaagggacactgcaccatcgcagggcctagactaccagcaagttcaaggctctctaagccagcaacacatcagaatcaaccagggagactgcctagagtacacatccccaggctcttctccaaacccacttaatcaggatctccagggctgggctgggaatcttaaagtttcaaggataaggccaagcatggtggctcatgcccataatcctagcattttgggaggccaaggtgggagaatcatttgaggccaggagtttgagactaggcctgggcaacaaggtgagaccctgtctctataaaaaattaaaaaatttagtcagatgaggtggcgtgcacttgtagtcccagctacttgggaggctgaggcaggaggattgcttgagcctacgagtttgaggctacagtgagccgtgattgtgccattgcactccagcctggatgacagagccagagatgtctcaaaaataaataagtaaaaataaagtttatcaggtgattccaatgcacagcagggtatgggaacacagagctggtcccactccattttgtaccgattttcactggagattaaaatgttccataagggttagttgcatgtagaccctgtggcaaacacttcacacattatctcacctaatcctcayaagaagcctcacaagaaaacaacaaaaagttgtccttcttttacagattaggaaattgaggccttgggaggttaagcaatttgtccaagttcacaaactagaaaaatggaaccagggacttaaacccatgtatctggattccagagcctgaacctttcaccaccatctcaggctgtctctctgatggggaaactgaggctcagaaagcagcctcttgtccacagttacagaacttatcagggttagagctgggtctagaatcaatgtgtgtagactcccaggctggtgccaattaaaaggagtagagacttcctgctgcatgccaggttcagtgccattctcttaaagccgaacaagtctagcaggtggcctctgggtcccaaagcccactggcggctcaggccaatcgagccattcaggaacctctctgggaaaccagggttcccaaccctgctctgttagccttggaaccaatgtgtaggaagtcaagttttcccagctctgtaggagacactcacaggtagctggtgcccaaagatcacagtatgatggtatgatgatcaaactccatcaagtttttatttttatttttctaga

SEQ ID NO: 710085 - DNA, 418 bp, Homo sapiens
ccctcagtcagtaacaggaaccatgataatcacaccacatcccaagtctccctgcatgtacttgttccggcctcctaaccccaagccaggggctcttgctgtttcatctacaggttagagcactggggtgctgggaatggggtgtcccagtggtctaactgctcactgcataccccaactttagagttcttagggcctggccatggaacacagaaggctctatacctcctgaggctgagtaggggcyggagcccagtctgaggataatggccagcagagaaaatgaggctcccaggtcagcctctaagctgcaggcagagctctgggcctcctcctggggctgacccaccagtgcatgcaatgaacactgtggcagggttaggcatggtgcaggcaaacccctaaagtgtctctaggc

SEQ ID NO: 710086 - DNA, 648 bp, Homo sapiens
ccctggtgggcacagcaccaacctcccaatgtctgtttgcagccaggcttttgatccatttgacctctcctgttaacccccaaggacactgtggcctgtatgaggactatgagctatccccaagtgacctggcccatcagcacatgaggacagccacctaggatacccattcccaaaggatttcaatcccccagtctctctttcaccttaactttaagcagtgctggagtaggtgagatgtcctatactcccccatataggttttygtgggaatggtcccacacttcttcccaagtgttcatttgtttttttttttttttcctgtgaggaacgtcactgtttcagaaatctgctcctaaatttccctgcagggagcatcagccacagagaagactttgctccagggactccccttaccctaggacacctgacctctgacttatagcaacctgtatcaattagatcactccatggcttccatagtgtcaacaggggagctgttagcacttggtctctgaggagcacgggttcaaggcaatgggaggctggcagcccagaagcttcagagctgccatttaggtgggagataaattaaggggcctggttggaagtgtgcactcaactaggggtcaggggtccactgtttct

SEQ ID NO: 710087 - DNA, 628 bp, Homo sapiens
taccattcatccatcaatggacacttgattggctcccaacttttggctattgtgaataatgctgctacaaacatgagtgtagaaagcttcatttatgccagcatgcaggtcccctcttctagcttaccaacattattttctagagagatgccacaacaaacataaattcacagttaagggatgctctcaatggattttctctgtctgtctgtctgtctatctgtctctctctctctctctctmtatatatatatgtatatatatttttttaagcagagacagggtttcaccatgttgcctaagctggtctcaaagtcctgagctcaagcgatccacccacctcagcctcccaaagtgctgggattatgggcatgagcctcaatggattttctttaatatatcaagtctctagttgactccttacgaagaaaagagaatttgctgttgttgggagcaaaatgtctgttgcagttagtctctgtccgggagtcgtgccctcctgaatataaactcagggccagagccaagactttaatttgtgaagcacaagtattgatttggtgacaccattgtcttcccctgatgctgttcctatcaacccaaattatctgtgtgaacataggagcca

SEQ ID NO: 710088 - DNA, 1290 bp, Homo sapiens
aataatgtatcaataacagatattaaagaaaatgatagaatgggagacagaacaaaaaataacttcaatattttataactagtaagtgaattgtaacaagaaacaacaggaagcagtaagtgggaggaaattatgagttcagtaccaacatattaatttaggcagaaaaggaactaacaatgaaggttatttggcggttactgaaaaaggaaacttgaaaagaacataagatataataactagagttgctaytttaggtatgccataagtacaagaaggtagctgaaccatggaagtctccactcatagtggagaggaacattagagctgaaggtttaacaggagcaactccaagcctgatgatggaaggaatgaaaaggagccaaaagacttaaagaaacacaaatagtgtaaaagtgaatgcactggagagggtttgatcaacaagtgggaaacattagaatagaactgatagagttctgaacagagaaaagcaacagatttagagctaagtctgcattttgcgtttgattccaacttctattctagaaactccaatctcgcttgattgagctaaatatgtgaaatataatgacaaaaaaagcgtcaaaaatcaaatatggagtccttctctctgtgaatttcctagtattaatagttcactgatatttactatttggagaaataataagtattactaaaaaacacataaaataggaaaaagtatgtctagtatttggcagtttttttctatttcataatatttgcaaacctgagcttacacagaaaaaaggttttttaactaaaagtggatgttataaattcattaatatataaaatgtaataatgttatatttcttattatgataattctcaaattatcatttttctgttactttttatgttaaccacaggggataggttgaagaaaatacagaccactccagcccacggaaagagcctgctttttaattaatattttagatctttggttttcaaatataattaataattcagcagattgatgtcttaccactgttctagaaattgccccatggaaacctaaattaccttacctgctatttcaagcaccttgacttaactttttttttatattccttatatgttcatgcttctcttagttcttggcattcacacctgcaattacattctgcatgctgcctgtaattatcttgctgctatcagagtctgcatggtttcccacgtttcagatccacacaagcatacttatgatcataattacagtcctgtatttttgttcagcaattt

SEQ ID NO: 710089 - DNA, 1290 bp, Homo sapiens
aataatgtatcaataacagatattaaagaaaatgatagaatgggagacagaacaaaaaataacttcaatattttataactagtaagtgaattgtaacaagaaacaacaggaagcagtaagtgggaggaaattatgagttcagtaccaacatattaatttaggcagaaaaggaactaacaatgaaggttatttggcggttactgaaaaaggaaacttgaaaagaacataagatataataactagagttgctactttaggtatgccataagtacaagaaggtagctgaaccatggaagtctccactcatagtggagaggaacattagagctgaagktttaacaggagcaactccaagcctgatgatggaaggaatgaaaaggagccaaaagacttaaagaaacacaaatagtgtaaaagtgaatgcactggagagggtttgatcaacaagtgggaaacattagaatagaactgatagagttctgaacagagaaaagcaacagatttagagctaagtctgcattttgcgtttgattccaacttctattctagaaactccaatctcgcttgattgagctaaatatgtgaaatataatgacaaaaaaagcgtcaaaaatcaaatatggagtccttctctctgtgaatttcctagtattaatagttcactgatatttactatttggagaaataataagtattactaaaaaacacataaaataggaaaaagtatgtctagtatttggcagtttttttctatttcataatatttgcaaacctgagcttacacagaaaaaaggttttttaactaaaagtggatgttataaattcattaatatataaaatgtaataatgttatatttcttattatgataattctcaaattatcatttttctgttactttttatgttaaccacaggggataggttgaagaaaatacagaccactccagcccacggaaagagcctgctttttaattaatattttagatctttggttttcaaatataattaataattcagcagattgatgtcttaccactgttctagaaattgccccatggaaacctaaattaccttacctgctatttcaagcaccttgacttaactttttttttatattccttatatgttcatgcttctcttagttcttggcattcacacctgcaattacattctgcatgctgcctgtaattatcttgctgctatcagagtctgcatggtttcccacgtttcagatccacacaagcatacttatgatcataattacagtcctgtatttttgttcagcaattt

SEQ ID NO: 710090 - DNA, 1290 bp, Homo sapiens
aataatgtatcaataacagatattaaagaaaatgatagaatgggagacagaacaaaaaataacttcaatattttataactagtaagtgaattgtaacaagaaacaacaggaagcagtaagtgggaggaaattatgagttcagtaccaacatattaatttaggcagaaaaggaactaacaatgaaggttatttggcggttactgaaaaaggaaacttgaaaagaacataagatataataactagagttgctactttaggtatgccataagtacaagaaggtagctgaaccatggaagtctccactcatagtggagaggaacattagagctgaaggtttaacaggagcaactccaagcctgatgatggaaggaatgaaaaggagccaaaagacttaaagaaacacaaatagtgtaaaagtgaatgcactggagagggtttgatcaacaagtgggaaacattagaatagaactgatagagttctgaacagagaaaagcaacagatttagagctaagtctgcattttgcgtttgattccaacttctattctagaaactccaatctcgcttgattgagctaaatatgtgaaatataatgacaaaaaaagcgtcaaaaatcaaatatggagtccttctctctgtgaatttcctagtattaatagttcactgatatttactatttggagaaataataagtattactaaaaaacacataaaataggaaaaagtatgtctagtatttggcagtttttttctatttcataatatttgcaaacctgagcttacacagaaaaaaggttttttaactaaaagtggatgttataaattcattaatatataaaatgtaataatgttatatttcttattatgataattctcaaattatcatttttctgttactttttatgttaaccacaggggataggttgaagaaaatacagaccactccagcccacggaaagagcctgctttttaattaatattttagatctttggttttcaaatataattaataattcagcagattgatgtyttaccactgttctagaaattgccccatggaaacctaaattaccttacctgctatttcaagcaccttgacttaactttttttttatattccttatatgttcatgcttctcttagttcttggcattcacacctgcaattacattctgcatgctgcctgtaattatcttgctgctatcagagtctgcatggtttcccacgtttcagatccacacaagcatacttatgatcataattacagtcctgtatttttgttcagcaattt

SEQ ID NO: 710091 - DNA, 1290 bp, Homo sapiens
aataatgtatcaataacagatattaaagaaaatgatagaatgggagacagaacaaaaaataacttcaatattttataactagtaagtgaattgtaacaagaaacaacaggaagcagtaagtgggaggaaattatgagttcagtaccaacatattaatttaggcagaaaaggaactaacaatgaaggttatttggcggttactgaaaaaggaaacttgaaaagaacataagatataataactagagttgctactttaggtatgccataagtacaagaaggtagctgaaccatggaagtctccactcatagtggagaggaacattagagctgaaggtttaacaggagcaactccaagcctgatgatggaaggaatgaaaaggagccaaaagacttaaagaaacacaaatagtgtaaaagtgaatgcactggagagggtttgatcaacaagtgggaaacattagaatagaactgatagagttctgaacagagaaaagcaacagatttagagctaagtctgcattttgcgtttgattccaacttctattctagaaactccaatctcgcttgattgagctaaatatgtgaaatataatgacaaaaaaagcgtcaaaaatcaaatatggagtccttctctctgtgaatttcctagtattaatagttcactgatatttactatttggagaaataataagtattactaaaaaacacataaaataggaaaaagtatgtctagtatttggcagtttttttctatttcataatatttgcaaacctgagcttacacagaaaaaaggttttttaactaaaagtggatgttataaattcattaatatataaaatgtaataatgttatatttcttattatgataattctcaaattatcatttttctgttactttttatgttaaccacaggggataggttgaagaaaatacagaccactccagcccacggaaagagcctgctttttaattaatattttagatctttggttttcaaatataattaataattcagcagattgatgtcttaccactgttctagaaattgccccatggaaacctaarttaccttacctgctatttcaagcaccttgacttaactttttttttatattccttatatgttcatgcttctcttagttcttggcattcacacctgcaattacattctgcatgctgcctgtaattatcttgctgctatcagagtctgcatggtttcccacgtttcagatccacacaagcatacttatgatcataattacagtcctgtatttttgttcagcaattt

SEQ ID NO: 710092 - DNA, 621 bp, Homo sapiens
atgaggattaaatgaactgatgtgtctctaaagcacttagaaaagagctgaagacagaatgttaactattaacataacagtttcatcatcattgttgccatcagctatttgtgtaagttatttgtgtaaggaaaagcaacatcttatgttgcctctttatcacccaggacactacagagttggttttagcaattgtgggtactatctagaaaatgatatgcttgctcctaaatgtttaaccactggcatccgtggaggggtgggggtataccaaatttgtagtgcctgctgacttccayggtataatttcatataaacatgagttgttgaaaggacttgaaaagagatgagcacaatcagctgttacaaaacagcagggcagactccagaccaccactgcatctaaccatctccttgtttctttcacacaaagatgtgtgtttatcaatcaagaggaatacacttgatgactgcaagatctgatgacagttgaggcatggaaatcagtttacccgagagtctgcaattagactcacagagtagaattctcactgcagctaaccttactcatattaagcacaaaaatatgagcttgggaaaagaaaaggcaagccaactgaa

SEQ ID NO: 710093 - DNA, 1145 bp, Homo sapiens
tcagcacatttttaacacagttcttttttttgttgttgttatttccctttaattatcttactaataaaggaaaactgtcccctttaaaaaattacattaaatgtagcttctagtatttgttgcccatgtctcctattcccattttgttgtttatttaggctaggagtgccctttggaataaattttgaaagtctgtgcaaaactggcctatggtagacaatgtttattatctacaaatgagtgatttaataatgaatgcataaaattttctgactacaaaaatgaaatttcctaaagaatcagttcaattttattctaacagatcagaatttctcttcagattattttgctgtaaaggagacaaccataacttttctttaaaaaaaaagcaaaagagagaaaaaaaagattaatttgggccattgactagttcctttcccattttaaaaagaaggtagttgtcataaacaatgttacatataattttgtttttaaaagcctaagtagtattttaagtatctttgacttaacacattttggtacaatatggatattcataactagagaaaaaaagaattggcatttacaaagtttaattaaaaataagatgtttggtttgcgaaaaccaggcccataattttgaaagcacattgcccactttcttctctaataggagggtacagctactcattactgatgattgaattataaattctctaaggcagagactattttctgcctcattagcaacttgtgtgtgcagagggacaggttggtcagtctyatgatgacttacaacttaattaatacatacatacattaacttattggatatccttaaccttccgagaaggtagtggaggaaatttcttccattttttggatatttcctctatgccagcatccccaggccccccatgctgtacaacttccttggagttgggccacgtacaacctgcaagaagactttcctgcctcctaagtgttttccagagggacagcatggggagtctgggtggaaaatcattgattgtgcaggactgtttcatttaatatccccagacctcactcaaagtgccagcactgccctcctgccatcgtgacattcagaaatgcccctccccaccaaccaccagatgcccctg

SEQ ID NO: 710094 - DNA, 1145 bp, Homo sapiens
tcagcacatttttaacacagttcttttttttgttgttgttatttccctttaattatcttactaataaaggaaaactgtcccctttaaaaaattacattaaatgtagcttctagtatttgttgcccatgtctcctattcccattttgttgtttatttaggctaggagtgccctttggaataaattttgaaagtctgtgcaaaactggcctatggtagacaatgtttattatctacaaatgagtgatttaataatgaatgcataaaattttctgactacaaaaatgaaatttcctaaagaatcagttcaattttattctaacagatcagaatttctcttcagattattttgctgtaaaggagacaaccataacttttctttaaaaaaaaagcaaaagagagaaaaaaaagattaatttgggccattgactagttcctttcccattttaaaaagaaggtagttgtcataaacaatgttacatataattttgtttttaaaagcctaagtagtattttaagtatctttgacttaacacattttggtacaatatggatattcataactagagaaaaaaagaattggcatttacaaagtttaattaaaaataagatgtttggtttgcgaaaaccaggcccataattttgaaagcacattgcccactttcttctctaataggagggtacagctactcattactgatgattgaattataaattctctaaggcagagactattttctgcctcattagcaacttgtgtgtgcagagggacaggttggtcagtctcatgatgacttacaacttaattaatacatacatacattaacttattggatatccttaaccttccgagaaggtagtggaggaaatttcttccattttttggatatttcctctatgccagcatccccaggccccccatgctgtacaacttccttggagttgggccacgtacaacctgcaagaagactttcctgcctcctaagtgttttccagagggacagcatggggagtctgggtggaaaatcattgattgtgyaggactgtttcatttaatatccccagacctcactcaaagtgccagcactgccctcctgccatcgtgacattcagaaatgcccctccccaccaaccaccagatgcccctg

SEQ ID NO: 710095 - DNA, 1501 bp, Homo sapiens
ataaagttgctaacagttaagaagcattttgaaaaacaaagaaatggtaataattttaaaccccaaagtagtaaactttacagaattgtctattggaatgatttttacatcggcaattaaaaatttataatgtgtatgtttttattttaaaggttgtctatacttattaaggaaatttagaaaataaaaaattatctggcagttttattttaaaaaatgtaaatacttttagtatcattttgagaagctccattactttcagattctaaaatgctatttgaggaacagattttctttcccaatatagaagataaaacatttggacaaaaataagcatttctttcttaccaaaaattttgtgaattttaactggcattttcaatgtggaacttccatggaggacaaaataaaatattaggaaatattagattactcaaggaaaaaagacatattaaccaaagagctgaaatacattgatatgtttgacacatgtggatattaagtttgagagaggaaagaaagactgtgtacagaatcctgacttagacaatttttgaggaaaacaaaaaatctcattttatttccaggtaaaatgaagttaaaaaattttccagccagagacagaattattggtctcatgaggcaaaaaaacttgttcgtaaattattgtattctacatttttactaagggggacttacataaatcttgctgtagttaagaaagttattattttttattattgattattgagcactcctcctttctccacctttttatgagcatttgctgcacattgcacaccaaggaagaaataagcttttacaggtagttttgtaataggtgttgctgacctgtttttggtctgtgctacgtggtcatgaggatctgtaataatcataaaggattcacctggtcctgcagcggccgtatgttgcaattctctattggattttatttaaaacttgagacttaataaagatgacaaaaggagttactgagagtaattgaatccacctcaataaggagaattctgtcatttaccatgtatacaactaaagctaaagatctgactgtttatctcttayggaaactgctgatagctcctaactggtgtgtctatacaaattgtcttgttccagactgtttttctgtatgccccaggctgctcttttcttacctagaaagactacttactgcttcagagctcagattttgacatcttagtctttgtttttgcccttgctcagagtgcagccctttaactgcagggtcccatcctgtgtttctgtgatagctttgttttcctctaatctgccttgtaaatactggcccaggttaagcattgccacagtgctattctttatgacttgggacacagtttatgctcagtatcttgtgttacgcgaatgtgacttctattgataaaaaaggctagtaaagtatgaaagatatgcaaatagttttttcatgtagctgtcactggccatccactgtaatcac

SEQ ID NO: 710096 - DNA, 1682 bp, Homo sapiens
tggaaatgtgccaataagaacagaataaggccaggcacaggggctcacacctgtaatcccagcactttgggaagccaaggcgggtagatcacctgaagttagttcaagaccagcctgggcaacatgttgaaaccccatctctactaaaaataaaaaaaatagctgggcatggtggcacatgcctgtaatctcagctactcgggaggctgaggcatgaaaattgcttggacccaggaggtggaggttgcaatgagttgagattgaaccattgcactccagcctgggtgacagtgtgagactctgcctcaaaaacaaacaaacaaacaaaaaaacaggataagaaggaacctgtgcatgtcttactgaaaatcagcagaaattcttggaaaatatcccctggaccatgatcacacaagatctctgacacactctcccagccttttgtgcccagccatagagggttctgggacaggtgcctatcccactagatacaagcatagggagccctccaaggtacaataaagacaacagatccctgctgtacaaaaaattcatggagccagccttgtccaggaaatcaacatgggacatgcctcaaacatgcagacatgggtttgcatgtctatttgcgaatgagtcttaagagttacatccaccattacgaaggagttacacatgattgcaaatataaccctggtcactaatcaaaccagaaggtgctgtgcccagctgctcttgactctgaagagcagattccaactgtattctgcctgtgtgagagcatattcaatggattaactgtgaaggcaaaaagtacagggagttttcttttcatctggccaagtgacccaagtccaaagtatcctgagcctaggacctagatgatgtgaatcttctcactcctgccctagtctcaactcagatggtactgttttctctgctctttgctttccagttaacataatcctatgaagcaactttgcataactgaatagaaaacaagctatgcctaaaggaaatcaggatgtgaatgaagaacttacctcaaagacatgatgcccctaggatatggttggtctcctggctgttggacctcagttctagacacagcactggtgaaggagccagaagcctcatggttcaagcccccaacatcagcctttagaatagagaaacctcagtggaaaatagaggagcacccaaaaggccagggcccatcaactgactggctcattctggaacttgctcaacaataatgaatcatttattgagtatttactatgtgaaaggcaccctaccaaagttggagggacagccttaaacaaggccataatagtttatagccacatagaagagaaatactatggacaagtaactacagctgtattaagtgtcatcaagaaggtcaggatgctgtgaggagaacaggggagcccagcttgatccctgaggaattgacattgcagctgccttctacgtagtaggtagccatttaagtaatagcagggaggagctaggtagcaccccatgaaggacacgtgcccacagtgtgytcatcttcaaggatgaggccagcatgactggcacagaggaatggaggggaaaacagcatgaagagaggctgccgaagttggcagggccagaccaccagggccttgcagatcatatagggttttgtctta

SEQ ID NO: 710097 - DNA, 563 bp, Homo sapiens
cccagtctctactaaaaacacaaaaattagcctggcatggtgatgggcacctgtagccccagctactcaagaggctgaggcaggagaatctcttgaacctgggaggcagaggttgcagtgagtggagatcacgcgactacactccagcctgggtgacagagcaagactccatggaaagcaaaaaggaaagaaaaaaggaaaggaaagggagaaaagagaagagaagagaaaagaaaygaaacttctcacgtccaacctttaggctgactccaagcagcacagtgaacagggtaagaacttgggctcttagaatcagcctgaggtccaaggtggactctgcctcttgcccactgggtaaccctgggtaaattactcaacctcctcatgcttgtttcctcatatttaaaatggaactatgggtaaaagtagcatttaccttataaggccatgtgaggatgaaatgagacatacactgcttagagcacagcctggcatttgtaaggctcaaaagatgtcagttgatgttactgaaggagcagtcacttgagcaacctagggaggtt

SEQ ID NO: 710098 - DNA, 563 bp, Homo sapiens
cccagtctctactaaaaacacaaaaattagcctggcatggtgatgggcacctgtagccccagctactcaagaggctgaggcaggagaatctcttgaacctgggaggcagaggttgcagtgagtggagatcacgcgactacactccagcctgggtgacagagcaagactccatggaaagcaaaaaggaaagaaaaaaggaaaggaaagggagaaaagagaagagaagagaaaagaaacgaaacttctcacgtccaacctttaggctgactccaagcagcacagtgaacagggtaagaacttgggctcttagaatcagcctgaggyccaaggtggactctgcctcttgcccactgggtaaccctgggtaaattactcaacctcctcatgcttgtttcctcatatttaaaatggaactatgggtaaaagtagcatttaccttataaggccatgtgaggatgaaatgagacatacactgcttagagcacagcctggcatttgtaaggctcaaaagatgtcagttgatgttactgaaggagcagtcacttgagcaacctagggaggtt

SEQ ID NO: 710099 - DNA, 2684 bp, Homo sapiens
ttgttattatagctcacaatttcagggatccagaatttgggcagggctctattgggcaatttttctgtttcacatggcaatgactaggttgatttagtggtagtcagcttgcacctggtctggtctggaggcgtcaagagacatcactcacataactgatgtctcagtgaacagcctgaatgctgagctcaaatttgcccccatcccaggtagtttcagggccctctataaggtatctccagtagggtggctggatttcttacatggcttcttgagactcccaaagacttaggaggaagttgttagccttttctcaggaactaggcctagaagtgccctagcattagtttggctgcacagtgtttgtcaaagaagttacaggctggcctgattcagggagtgtggttaaacaggctttgccatttgtttagaagaatgccaaataatttgtgaccatctttaatccatgacaactttcccgcataaactgctcctattttctaaattccaatgtttttatagttacaatttgaaggaaataactaagacacaaactggggtaatttttagttctagcaacatacatttaattgtaaaaatttaagactcagttggagagataagttgagaccactgatctctttagtgtaactggtatgagtcttgcttcatcaacctgagtttaaataacatgtattcacaatctaaaatatgatgtcttttttttttttttttttttttgagacaccccgcctagagtacagcctcggctcactgccgtctccaccttccaggttcaagcaattctcctgccttagcctcccaagtagctgggattacaggctcccatcaccatgcccagataatttttgtgttcttagtagagatggggtttcatcatgttggccaggcaggtctcgaactcctggcttcaagtgatctacctgccttggcctcccaaagtgtaaaatatgatgttcttaatcctcccaaacrtctacttaaccttgtgtattagtttgttttcatgtggctgataaagacatacccaagactgggtaatttagaaagaaaaaaggtttaattgactcacagttccactcggctggggaggcctcacaatcatggcagaaggcaagaaggagcaaagtcacatcttacatggatggcagcaggcaaaaagaaagaacttgtgctgggaaactcctctttagaaaaccatcagatctcataagacttattgactatcacgagaatagcatgggaaagacctgcccccatgattcaatttcttcccactgggtccctctcatgacatgtgggaattgtgggagttacaattcaagatgagatttgggtggggacacagccaaaccatattaccttgcagttatttacagattccccattccacgtctggcagatcagctcaatatctttgccaagggcttctccaacttctatgccatcaagaagaaggacaagctggagcaagtggcaaagtccaactgctgatttctcccactgctgcctcccaaaaggggggcccctccccccaaaaaagagtcctaggcatgcttattatatccgttgttcacctctctctgtcaggagcttggggttgtccctctaaacaagattctacaagaagcttctgctgctgtcacgtctctagtcttgatgctttcaccaagatccaccatttccagtgatatctttgtgcacattattaaggacattcattgctgctatttcaatccccatggtgctgtaaagaatagctctccctttctaagtgaaaaggacaaagcttcctccttattttttattctcacagagttattccatcatgaagctgctcaagtgccaaatgttgccatgcttttcattcttctacacagagccatgaaccccaggatccctaaaacagccagaggagctggcactggatgcatttcagcacctgccaggctgcctgttatgtccagatttccactcacaggctttgctttgaaagagctgcttcacagtttccaatgcaaggccattgttgtctgctcgcagaatattcctaatgggcaccgaatgaagcttaccaatgttgcttttaactttttggaaacaaaaccattaaattaattcttctttgttatcaatacaatacatattcatgataaaaactgtggagtttccagataagctgtttgctttccagacaagctgttgctcaaactctctgtttgagagtaaagataatgttaacaagagataaattctgttaacattttgccaaatgttttctcatatttttaattgtgtataaatgaatatgaatatatatggacatattatacattgttttataaacagccttttcacttgataaactatcttgaacattttcagtattgataataatcttgaagatcataattttaaatggctgcataatatttcattttgtggattccaatagactatttcaccacttatttattgatgaaagtgtaggttgctttactttttcactcttataaataatactatgtcgaaaatgcttataaatgtattttaaaatacacatccatttttcccttaaaatcggacccaaatcccttcatttgtaattgttgggtaaaagagtttgccaatttttggaacttttgatacaaccattgtaaaag

SEQ ID NO: 710100 - DNA, 2474 bp, Homo sapiens
ttttagaagtcttcctctgacactagagaggtggagaaagaggtctgtctccctttgttcctgccaggtgtggtgaaagttcaggttctcctttgggcctccattaccaccccaggagtgggggaagttcctggttactttccactggtgatgggatttctggtaccatgtatttcctcagctgtcaaggtccccatgtgttctgccattttccctctacttatcagtcttcttatatttgctttacatataatgtccagggatttttactgtaattagtgagaagaataggttgaactgcatctactccatattgtacctgatcaagatgtgctcatttatttttacaaaacatttttgtgtgtctatctatctacatatacacatacatatgcacatattgcatatataaaataaatgtttagtgtcttgtttgtgtgtatgtatatacccacactatatatataatattttggcatattgtatgttataggcttgaactagtattttaaacctatgtccttttttccccctactgcctaatgctatgtaaggatttaatctgtttctaaatcagatatcattttatggtacaggaatttttgcacatgcagtgaccccaggcttttcaaatttgtgaatgacttataaaattaatttcatattaactttccatattcctcacactccatcaaattaaaaaaaaagcaaggtgctattatttaaattgcagaaagatactaacttatgactgatggtccagatgaatccattaacctgctattagcaagagcaaagagagaatgagagagagagagagagagagagtaagaagcaagcatctttccactgtatgatccaagtagacagtcagatttagatgatttcagaacaaatccataatgactcacaatactaggatcttttcctgttgtgggattatttccttagcgttccattttaactgattattcattatccatattctttagcaaatatttattatctactatatgttggatattgagctagccaggtgctggtgatataggaagaaaacaaacctttttgaggtcattatggtctagagcagttgttctcatcctttagcctgtcagaatcatctggaagcttgataaaacacagaatgctgggccatatcccttgagttactgattcagtagttctgggtggggctgaagagtttgaatttctagcaagtttccaggtgatgctcttgctgctggtttgtggaccacatttcagaaacacttgtctaaagcagtaataatcagattttagtgtgcctaagaatcacctatggcattgcttaaataataatctcctgaatccagttcctgaagattctgattcagtaaatctgtagtgggacccaaggattggcattttaaagagcacccagatgagttatttgtacctagcttgaggatcacactttgaccagtattgagaagtgttggtctaatgtagaagcaggcataaaataaatattcatataaaagttatttaatttgaaattttataagagctaaagaagtatagatgctttaagatttgagaggtgacctcagaggaaagactatttaagttatttttgagaaagcagcagacccaagcatgatggataatccccttttcttcaaactggccaagaaaagaagtatgaagggaaattaatcctcycatttttaaaagttttgcactgatattatggcagcttgttacatggttataagtatggactctgcagtaggatatcacttctgcttctaccaacttactagctatatgaacttgggcaagctgcttatcatttctgtgcctcattttaaaaaatctgtgaagtgggataataatagtttataacataggcagttctatgaatattaaataggtttaaaaatgtaaaacacttaggaggatgcctggaggatagaaaaagctcagctcagtgaaagtgagctattatcaccatgggcagcagattggaatccatttgttaaagcagcattgtgttacatactcatgcaaaagctgctcaagggagttctctggcagtcatttaaagctctacttttatacacctttcatattgaaaaggaagaaatctgatagcatcttccttcgtgaacaatagttcagagtacaagtccagggggcttcccaatagtcagcttcaatgttaagtgaagagctatggaccaggatcaagcttgtagacatttttaaggctcccagaactttgtctgcacatggctgcttctgtgatgtcttctgtgatttttagtgattagtagagatcctctaaaatggaaaggccttataatatcatcattgatgtatctaaggaaggaggacctaagcagacagacaattatacctactccacaggtataattggctaagaggaacactgagggatggggaataatagtagcaattatgaatgagaa

SEQ ID NO: 710101 - DNA, 907 bp, Homo sapiens
ggcctaacatggtgaccacctggtcagtgccctcggatgatgtcgtgtggaactgggtgaagacctgcagggtggcatgctggtactgcagggtgcagccacggcttgcactctgccgccgctcctcctcctcctcatcctcatcctcgctttcccggactgacctggggtggggacatgccatgctgaaggcttctcacctggactctgacctgcacagtacacacccckcacccttgccctgttgggtcctcccagcttcccagaagctctgcaaaagcaagcttcctctatggctcatgccttccatctctaagttgggaaccaggagtcccagccttttctctcctagaaaagtacattcttgaccctacctcctgtccctctctgcctcttcttggcttaagccaagcctaggaatagctggcgtcaaatcctaacagcaactgctgcctcttcttcagtactaagtttgtgcctggcactgttctaagctctaacctggagcaaatgtgatccttcttacagaatgccagaaatcttagctgaattgtgtcctgcagttgtgtggaaactaagcaggacctgtaggtgatgaactcggacatttaactgaggagatttccaagcaaggtgtggaaatcgtggcctggtttcctcttgctgcttttagtcaaatgtgagaggagagagacacataaataaactgttaagcaaaagggaacctggacttgatgatttgggaaattctcagcctgtgcacgttgcaaaaaatgctaaaattgagaggtttactgccaggaaggtgtgctttggtgagaaagccaagtgtttttctctgtagctagtgctttgttagtgtactggaggatcaagcaaccagaatattcattcacacagagcattc

SEQ ID NO: 710102 - DNA, 356 bp, Homo sapiens
ggaagacagctcctgccttccagaagcctggccagcagcaggcctgtcacctcccttccccagcagagctcccagtccctgcatacccagcggggtggcgactcgggaagagctgagctggagacggctstagaccaagtccggccaaccaggcggttctgtaatcctctcccagggcccatggaagttaggcttccatcaggcgcacttttcccaccaggggctctgggaggacgtgtcttctaaagtgttccgtgctcacctgcaaggacctatcggcagggtcagggtgggggtagaaggaccagcccctagcctgggcctctcctggggaggaagaaggcttggcgggaagg

SEQ ID NO: 710103 - DNA, 619 bp, Homo sapiens
ccacttgtcaattttagcttttgatgcagttgcttttggcattttcatcaagaaatctttgcccatgcctgaatggtattgcctaggttttcttctaggatttttatggttttgggttttacatgtaagtctttaatccatcttgacttattttttgtataaggtgtaaggaaggggtccagtttcagttttctgcatatggctaaccagttttttgagcaccatttattaattaaggaatcctttccccattgcttgtttttgtcaggtttgttgaagatcagatgtttgtagatatgtggtgttatttctgaggtctctgttctgttcccttggtctgtgtgtctgttttggtaccagtagcatgctgttttggttactgtagccttgtagtatagtttgaagtcaggtagtacgtgtgatgcctccagcttygttctttttgcttaggattgtcctggctattagtgtatctctttaaatgggtctagtaagaaaacatctcagttcatcagcctttgacttaaccttgttttttcttcatatgagcaatgaaattaaaatggttacggaactcttagaactttttcattcttagaatgctagagtatacagtttg

SEQ ID NO: 710104 - DNA, 1259 bp, Homo sapiens
acaggtgtgagccactgctcccggccacatgtttagttcttggttctaggctcacccggaactttccttgctccagccctggaatcagccatttctccaataagccctggttccttttagtagaaagtggtttttagaaaccaggatctaagtattaggtgtgttcacgctactgggctattacggctacaaggacttctcaagcagcgtagttaggaattttttttttttttttttttttttgagacggagtttcactcttgttgccaagactggcatgcagtggcaggaacttggctcaccgcaacctctgcctcccggttcaagcagttctcctgcctcagcctccctagtagctgggattacaggcatgcgccaccacgtccggctaattttgtatttttagtagagacggggtttcaccatgttggtcaggctgggtctcaaactcctgacctcaggtgacccatccatcttggcttcccagagtgctgggattacaggcatgagccaccgcgcctggcatagctaggaaattaaacatatgcatgtacttccctacacgtacacatatgtttgtacatacacacacgggcacacatgcgtttgtagttctttgtatccatctgtcccrctcgtatctatgtatccattcatctcatataaaaatcatgataccatccaagtcaaatggtttgtttcagctttctcccctttccttggctgtgcccctcttttctaacaataacagtaacagctcttatcatattaactgtttttatttattgacccttgtatgtcaccagtcttctgacatgcaggccatccagtccatgttcctggcccaggaacatggcagccaagggtccccacccccacttcggcccccaacagtggactctcgggatagttctttttttttttttgagacacagtctcactctgtcacccaggctggagtatagtggtgtgatctcggctcactgcagccactaactcctgggttcaagcagtcctcccaccctagcttcctgagtagcagggactacaggtgtacaccatcatgcccgtctacttttgtattttttgtagaaacagggtcggtcttaccttgttgcccaggctggtggatagttctttatagcagtagcctaaacagaaaaacatatacaacataagctaagaaaaaggcctcccttatcgatatttctgggttaatctgaaagattttgaagtctggaagaatcagctggttgttg

SEQ ID NO: 710105 - DNA, 1727 bp, Homo sapiens
gctgggagtgctaattcaatggcatactcattctgcacctgctcacttcagcctggccgtcttcctcctgagattgggaaaagaaaggaaacttaaaaggcctcctgtctttcctcactatatatctctttgtgacacaaagttgaatctactttcccaactttaattattttcccaacttatttattacaaacattccacagaacatggaaggaaaatataacaatgagtaatatgacatacgctatatacttaccatccagggtcagtgacagtgaacattttgtcacctctgctttacctacatttgtgtatattaaaagaggtatctgcatgtttacatgtgtgtggtgtgtatataagccacagtaagttgtatgtatccactgtagaaaccttagcctgcatctcctcaggataagaacaaaattaataactccttcatattacctagtctccagtagatatccagattttcccagttgtctcacaaatgtctttatctattaagtttttaagatttaaaaatacttaattgacaaaacttgtatatgtttaaggtatacggtgtaatgatttgatgtacatacacattgtgtaaatgagtatgacaatcaaattaacacgttggtcctcacccgtagttagttactattgtgtatggtgaagacacttaaagtctgctgtcttatcaaattttaaggaaacacaacagcatttttaactgtagtcagcatgcactacattggattcccaaaacttagcctttttttattttttttgagatggagtctcactctgttgcccaggctggggtgcaatggtgagatctcggctcactgcaacctccacctcctggggtcaagcgattctcctgctgcagctgcccgagtcgctgggactacaggcacgtgccaccaagcacagctaattttttgtatttttttagtagagatggggtttcaccatgttagcagggtggtctccatctcctgacgtcgtaatccactcacctcggcctcccaaagtgctgggattacaggcrtgagctaccgcgcccggccaaaacttagacatcttgttaactgaaagtttggaccctttgacaaacatctttccattttcccctttaaattcccctcagaaaactgggattcgtatcaaagttgatatggtctgtttgactatttatacctttgagtgtcttctaatgtaaaacagtagttctgaaccattttaatttcaggactcctttatgctcttagaacatattgaagagcttttgtttgtgtgaacgctctctctccatgtttgttgtactagaaattaaaatgagaactttctaaaatgcagggttacctgaccacataatctattatgtgtgaaagtgccaatatcatcactttcagacacgttctggaaaactcccccatacactcataagaaaatgagagtaaaacatgcccatagcatcagagtattaccatgaagttgttttgacttggtagatctccctgaaagagttctggggacctggaccacactttgagaattactgacctggagttaccccctaccatttttattttatgacaattttttctttctttaaaaatgtgttagtgaaaacttaaaacacatgaaatatggagaattgtgtggaattttttgaatgtttctaataagtcactgataacacagcagtagggggtggaggtttgaagttc

SEQ ID NO: 710106 - DNA, 726 bp, Homo sapiens
ctcttgcccaggctggagtacagtggcacagtcttgactcactgcgtcctctgcctcctggattgaagcaattctcatgcctcagcctcccgagtagstgggactacaggtgcaaatatttctagataagttagaattttgtactatgtgaaggggtagttttttctcatataattttggattgtttatttctggatataatattaatttttgcatgttgattattatccagcaatcttgctaaactctaataatcctaatactttggttgtagatcttcttagatgttctattaatggtgttcacgtcatttgtcaagactgttttcgctctctctttccaacctaaataaataaagcatatacatctctatataggaaaagtatataatttatagatacataaaactcatataatatgaataatatgtagcatatatgctatctataatacatagtgttatatataataatatatgtttatatattatgtagatgccatatttattgcctattgcacgagctagaggaccaagagaacaatgatgaataaaggtagtagttgtgggcttttcttttcttttctattcttttttttttttttttgagatagagtctcgctctgtcacccaggctggagtgcattggcatgacctcagctcactgcaacctctgcttcccaggttcaagcgattcttctgcctcagccctccaagtagctaggact

SEQ ID NO: 710107 - DNA, 726 bp, Homo sapiens
ctcttgcccaggctggagtacagtggcacagtcttgactcactgcgtcctctgcctcctggattgaagcaattctcatgcctcagcctcccgagtaggtgggactacaggtgcaaatatttctagataagttagaattttgtactatgtgaaggggtagttttttctcatataattttggattgtttatttctggatataatattaatttttgcatgttgattattatccagcaatcttgctaaactctaataatcctaatactttggttgtagatcttcttagatgttctattaatggtgttcacgtcatttgtcaagactgttttsgctctctctttccaacctaaataaataaagcatatacatctctatataggaaaagtatataatttatagatacataaaactcatataatatgaataatatgtagcatatatgctatctataatacatagtgttatatataataatatatgtttatatattatgtagatgccatatttattgcctattgcacgagctagaggaccaagagaacaatgatgaataaaggtagtagttgtgggcttttcttttcttttctattcttttttttttttttttgagatagagtctcgctctgtcacccaggctggagtgcattggcatgacctcagctcactgcaacctctgcttcccaggttcaagcgattcttctgcctcagccctccaagtagctaggact

SEQ ID NO: 710108 - DNA, 1121 bp, Homo sapiens
cagataagccactcattctgatatagtggtcagtgcagttgttgagtccctggacccttggggaaataagtggtgcggagacagcattataaatggggtgatataaactaagttttagggttgggtaagagttgggagcataaatgataggaagcagggaaggttatgtcccagcagaggaaacagcttgggcaaaggcctgcaagcatgatatgggtagkgggagggagcacgtggaggtcataaagacagatgaggctgaaggtacagaggaaataaacaggctggaattttatcctgtaggatttttattctgtacccctggaaataggtaaacgaatagtgagtgtgtcagacttgtattttaaaatccactggtggccttctggaggacagaccagaatgggtgagacctgaagcagggagatgagaggggaaactggtgcagggaccctgcagccatgggtagaaatcgtggattgcaggattccactgggcatgacccagggacactcccagtctcatctggaagaagaatctaaggtttcttccctgatgatctgccccagttactgccagtggagggagtccttgggggaccaccttactattcaaaagtggaaaacaaaggaggcagggatttggtccaatgactttgcacctgctttcttctactggagaggaggacacctatttcagaagagaagtccacaaccccctattttctcctttatcccatttgaaatgctactgaagcctttacaatgaccctgtacttactcccagcatttaattttatgcctggctcatcgtacacttgggataaagacgatggttacatgattcattttcttctggagaccagggcctaagacccaccaatctttacctcctccataaaacatagcacagggtctagctcttttagcagaacccagtaagtagatgacattggcaaacaaattcaagcactgctttcaaaccttttctgcagagaaggtgtgcgccacatttacacatacatgtacacacatgtgcctgcctccccgccccaccctaccccaggctattttccagaataggatttaacagatcagtctccaccccattccctcccgacc

SEQ ID NO: 710109 - DNA, 2102 bp, Homo sapiens
ttactcatgtgcttttgataggtacttgtcatttgttatttccaatcaacagtggtaaggacgacaagaaaaagaggaactatttataaaacttttctttccctcaccattctggagccagtagtgttctttgcttaccccttctgtttattttcactttgatttattgggctgagctcagaatttcaaccgcagccttaaaggctaatataaaacctaaatgtaacaccacagaattgacagcagaaacggcaaaaaataaaaagaagaatgaaaaatagagaagtcaatttattagaatgtcttatatttacccactttacttcctaaaataactaccttacttttctggaaagaaattgtgcctatttattttggtttggtagactatctgcatgtgtgactttcactatatttttccttcaggaatgacaagtgatgccatattgaagaggaattgttctgtgtgcccaattaattatttcagtaaaatttcttcacgaacagcatcacttacactgactgcttatgaagccattaagtcctggctcggagacactgttggatgtcatagagaagtagcatatcaatctttcttttcattggccttgaaacagtccttagggaaccatatgaactccagtatatttttcaaggattttcttggatttgattaacaaaagagcataaaactgagatatattatttggcagtgaagaaacatttcttttaaaatgcaaaattcaaagttgaagtgtcacagaatgggcaccaggaagttgtttgttgatagaacacttcaaaattttttttctcacttatgccgagttgaaaaattgaaatctgcaaagggaatagttaggagaatggagatttgagttcttgagctggttcactgtgttcactagtgattagtggaaaagtagtagcttcaaagcagcagcctaatattgctgctttacctgcatacacagttcttggagatttctttttgttattaactaagccaagaaaataatgttgtttttatttcctctagtaaaagtcccaagttttattctctaactatgccataggtaagacatcttttcacaatgaaatggacacaaaaaagaagcctgactgatgaggacaaactttttgtcatttcaatagattgtcaattcctggtatatataggacctataaacagcacctccacaatccagatgacataatggcttgggatgaaattattgcaatcatacaattaattgctatacttcataacctgccatggaaatacaataaactcattactgtgttttacacattcttttgtggtgttgtttttggggggttttctttgagacaaggcctggctttgtcgcccaggctggagtgcagtcacgcgataccggctcactgcaatctctgcctctagggctcaagtgactcttttgcctctcaataccaagttttaaaagttaatgaatacttaatgtgtgttagtttttagaaaaagttgtttactcagaggttgcaatactacatttcattttgcttccaaaatgtagctacagtctcaacaaattattttgctaattgtttagattcaggtctaaaaatgcctccagttaagaaactttcaaactcacatgctttccagacatgtccaggggatataattccccatgagctgttttcccatttgttccacagtatgagacagaaggcttacccagaaaaggtagaagtgctacaaaccatggtgaatttagtaatagaaaatgacatggaaatataaaatggcataagactgtaataagtgataagtgaaacttaattaaatgtaaaatttagtagcaatgaagtatgctgcttctagcaacaaatcacattgaaatggagcagatgtcacccattctgctcaagtacatggaaatacagacaaaacatattttaaaataagtagaaattgagaccccagaccttaatgacctgcattcattaagtatgcagttatgtaggttcaggtatcatgaagagaagtgtccataaagtttcccagggccataaaagcagaagtagtttcaccctgctccayagtgatgttttcaaat

SEQ ID NO: 710110 - DNA, 2959 bp, Homo sapiens
gagatggagtcttgctctgtcacccaggctggagtgcaatgaggcaatcttggctcactgcaacctccacctcccaggttcaagtgattctcctgcctcagcctcctgagtagctgggattacaggcacgtgccaccaagcctggctaatttttgtatttttagtagagacagggtttcaccatgttggccaggctggtctcaaactcctgacctcaagtgatctgcccgccttggcctcccaaagtgctgggattacaggtgtgagccaccacgcctggccagaaaggataaagttctgctgctgccttttctgtgtaaccttgggcaagacttttcctctctgggcaaaatgacatgacacattcatgcccccaaatctagctttccccaaacaaagttgtcagtaacattaagacaaacaaacaaaaaatggatacagcacccctgtggatgaatgaaatgaagccccagtacaaagtacaaaggattgtgactgcggggaagccaggcttggcatgaacacagtgcaccttccaaactagaaagcctgttatgtgaaaactggcaaggctgctgccagcgtagctgggctagaggtgggcataggtgggtaaggtttctagaaagacccacagagaacaggaagaaagcttgaagctctccgtgggaggacgctgacaaagaccaggggaaagaagcctaagagaatgcaggctgtctgttccgatatttaatatccaagaactaaaggcagaagaggtgcaaaaagcttaatagtatttgtagttcaaattaaagtgttcaaagccccgttatagagcagggtaatgtatgcaatgacatctgggactgtaatcagcaaagtgctttcaagagctgccaaagcaaacagccaaataacaaatccactttacagatcatcaatccggtcctggacttgccaaggtaaatagtaaaaggctgaagtttgctttgcaaaccagggagctgggagtttagcgaggccttgatccagagcagcaccactgggccagggcctctggagctggaggcgcgaaaggaaagccgacacgccctgtatctgaaaagtatggaaagggggctgggagcgagggctccccgaggtggggggctggcagccccttggggtgaggtctaaagacagctgtcaatctggcaggcagccacagctgctaggctgggcggtaccctctcaggtgcccactctccagctcagactctggtgctttgcgtttttggccagattggagtttatagatttctgagaagaaaatacaaccagaagctgctttttctcccttgcttccagtttctatgaaaggcaattaactctcaaagccagaaaggcaattctttttttctgattttttctagagatggggtcttgctttgttgcccaggctggtcttgaacttctggcctctagcgatcctcctgcctcagcctcccatagtgctaggatgagccattgcacctggcccagaagagcatttctcagagaagtcagtcagcacccagaggagaaggcacagtcctagggagtggatgctctcctgcaaaacctgactcacagggaccctgactccccggagctctgagctgaggcagctgtagaagagcagtggccaaagggcatcttggcgtcattgctgagagtcttacaactggaaaaaaggcccagaccctttgatgagacccaacaggcagaaaatagtagttctgagtcagaggggaagaagtgctcctgcaacattagggaccttgactatagacacattgcgagtgtgccctggaaaggacgattcagcatgttaggccagaggggaaagtccccctcctagccctgggaaggaatcgctgctgtgaacgtacagagcacacacaaggcctgcggactttagtggaagcagacttgcctaaagggcaagggaacctaagggaagtttgctgagtcaacttggtgagaaaaagaaatgggctgaaaatgacaccaggctgaaagctggggcagtgatgtgcctgaggaagaactccggtctgttctgggtgcccctgggatgaccacagtggccaggtaactgaggtcctgtgctcaggttcaggacctcagtcaggttcagtcctcaggcaggttcaggctctccccatccacagaccaacttctgcgaaggccaggtgcagtaaaggtctctcagccttagctactgggccaaggcccatcagtgggtcaagcatttactgggcactaataaataccggttgctgttacagtgagctgttcctgtgacacttaggtttcccaaaaatacaattcaacatttgtcgtggctcctttgccctcttaggatctattatgtgtaagacattggctcaatgactggatacatcgttttcttggtgtttttttttttttttttttttttttgagatggagttttgctgttgttgcataggctggagtgcaatggtgcgatctcagctcaccgcaacctccacctcccaggttcaagcgattatcctgcctcagcctcctgagtagctgggaatacgggcagggccaccacgcccagctaattttgtattttcagtagagaccaggtttctccaygttggtcaggctggtcttgaactcctgactcaggtgattcgtctgtcttggccccccaaagtgctgggattacaggcgtgagccaccgcgcccggcccattattcttacaacataactctgcaacataggttttatcatcctatcttatagatgagagaattgaaactcagagaagttacataacttgcccaaggtcatccagctcacccttgtctcctacgtgctttttccatgacttctaaggaagtaactattgatccccatatcctccctctctcatctgtgttcaagggagatggctttgacatgagctcagaagctctttgt

SEQ ID NO: 710111 - DNA, 597 bp, Homo sapiens
tttgttctttttgatgctactgtaaatgaaatagctttcctaattttatttgcggtttgctcattgctactgtatagaaacacaagtgatttttktttgtttgtttgtttgtttttgagatggagtctcgtcctgtagcccaggctggagtgcaatggcatgatcttggctcactgcaacctctgcctcccaggttcaagcgattctcctgcctcactctcccaagtagctgggattacaggtgctcaccaccatgcctggctaattttttaatgtatctttagtagaaatggggtttcaccatgttggtcagcctggtcttgaactcctgacctcatgatccgcccacctcagcctcccaaagtgctgagattacacgcgtgagccaccgcacccggccaacacaagtgatttttatatactgatagtatatcctacaaccttgcaaaataggttgccgtttataaggttttatacctaaggctatcaaaaaactattaagtattataatgactttgtactgtatcaatttagctaatctggaactacgattcagataattctcttccatgtatgattatgagttggggttaatca

SEQ ID NO: 710112 - DNA, 1326 bp, Homo sapiens
cggagtcttgcttcatcacccaggctggagtgcagtgggcgatctcggctcactgcgacctccgcctcccgggttcaagtgattctcctgcctcagcctcccgagtagctgggattacaggcgcccgccaccatgcccagctaatttgtgtatttttagtggagacggggtttcactatgttgaccaggctggtctcaaactcctgacctcaagtgatccgccagcctcagcctcccaaagtgctgggattaccggcatgagccaccgtgctgtacttatagtagaaactttttaaatgcaagaacatatgacttataattctgtatcttcaacaccaaaccttccatgagattcaaattatcaaaagggtttcaagagatgccaaaaagaagtgaaacctttgaaaaatgacctccccgcaaaaggcactgcacccagatggtttgatgggcaaattcattcacacactccagaaagacacatccatgcatagaaacatgtggcaggcttccaggtctattttacaaagtcaacatgaccctggtcttaaaatcaaacaatacacaagggaaccatgtttagtctgctttcgaaaatgaaatgcacaagtttttatctgagtaggtaataaatctctatctttgataatgctgagtccccatgaaccaaggttgtcccagctcctgaggagaccctgactccctccctccccagaccctccaaatgcatgcccaggtcctgcctctcctctgccccagtctttccccacacttgcagccgccaggaactgtctaaagaggagacattttgcccctaatccaatcccttgttcycacttcagttctggtctgtcagctgatggctaattactgctcatgtcaaaacaattacgaggaaagaaaacacagttttccattcgaccctttctccccacgtagcagctctcctcggacaccctgtctggctgcgttatcacttgaagtctcccgggcacattcagaatacgtctcagtggagatctagacagttatagcccacaagatcctggcaaccctcacccacggcattcctcattgctattccctgtcctgggggctcccggctcacccagggtcagccacaaaacaaatgaggcgagaagtgggtgcttctggggcctccagcctctgggggaagaaaaatgaaattggtcaaggatcgctcataaagggaacataattcagtctggagatacaaggaaaaaaaaaaagcaaatgtcacactcatctgtttttaagatttttaaaaagggaactaaaagctctatctagttagtaaccttagca

SEQ ID NO: 710113 - DNA, 1668 bp, Homo sapiens
actcactttaagcgttgtcggtaatcatcacagcccaaatgttgttactgatgggtagccattgttccctgcagttgacaactaccttgaaaagtactagtttccttaactacaattaaatataaacatttctgaaattaaagctgtaaaataatgttattcttgattctgtaattcagaatccaccagtaagttatctaatttcataacacagtcaatgtaagcttagactgagaactttaaaatgatccacggttttgctggtaacaagtaccctcaggttatcagatcagtcctgagttctcacaaatggggtgaaatcatgatgggactggtgtaatatgagtgacaaataatctgaaaagcacggccatcattttcttacaagaacattgtgtatgtgtgtgtgtgcaggtgatgtcacttttcctgtaataattacaggaaaaaaagtcctcagactgggcacggtggctcacacatgtaatcccagcactttgggaggccaaggcgggcagatcacctgaggtcaggagtttgagaccagcctggccaacgtggcgaaaccctgtctctactaaaaatacaaaaattagctggggatggtggcaggcacctgtaatcccagctacttgggaggctgagacaggagaatcgcttgaacccaggaggtggaggttgcagtgagctgagatcgcgccactacactccagcctgggcgacagaacgagactccgtctcaaaaaaaaaaaaaaaaaaatcctcattcatatttcctattacctagcccttgatttctaattctacagtttaataaacaacacattaactgctgtttaatcaagtgtgtttttctgtaattattaaaattaaatgggaaattgaagaaaatcttatttaaaacgattgaactgtatgcatctaagaaaaaataaagtgagatcaactcttttagagtctaagtaaattaatatgaagtgtaaaacactgaaaaatacctccagcagcttatctgattaacattgtggggaaccacacaagacagtactacaaaaataccaggaacaaaatacaaaaagctcttcagtataatgttttccccctattatatgaacagaaagggtgagcggctaatcctgtggggatacattgggtcttgttcactcaagataataaactccaccatacacagaagcctgtgtaaaattytaacttatgcccacagggtgatttatacatcaggaagatatgatttaaaatacattggatataatgtgagaaataagcattttgactatggcttcttttaagattttctaatttagtatattaaacactaggaatttaccactcaaaaatttcttgtacaaaaaaagaaatggaaaaagaatcaagaacacttagcttccactcccaaacattgctagtgagagtacccagtgatattaccacattgtaaactttggggtaatttctaataaaattaaataaaaatctaccatatcaatagcagttccactcctaggtatttgtccaagagaaatataagcagatatctgcaagaagagttgtatgagaatgctcagaatagtcttatttattcacagcagccacaaatagagacaacttaaatgtccattaacaggaaatgatgaacaaactattgta

SEQ ID NO: 710114 - DNA, 3014 bp, Homo sapiens
ctggagcaggagaagggagctggtgacattaagcagtagccacgacaggtgggagtgagctggagggcttctgagacaggctggtggctcccagagacacactgtgcgcaggtggggggcatgcggtaggtgggagccctgcattcccaggagtgtatatgtggccactggacatgaccttaccaaaacagggagatgggggaaactgggcttcaaggggacaagctaggccagtctttaaggagctcatggggctgtgtaggaggggtgctgacaagatctgacagcagctgttcccagtcaaggtagacactgctatgtgccacacagggcatgcagacagggcactgcaagggttgaagggagtagggagggtgaaatgtgctctcttggtctgtggcaggtgccgtgcaaacttcctgctgtgtgttcccttgtcctgtgtcacctacatccttgatgtctgcggtgaatggccagtgacagtgttaatggatttcctaacatgatcccctgaccaacgcggctgtagggcagacacacctctcaggcacagagcgaagcccccattgcagggtggtctggggcactctgtaggggcaagcgggatcctggtcgtttattgctttggctgttacaaggctctttctggaaggccacatctgttctcggatgttcacccagcagcccaaacagacaggtcagatcccagccctgcaatgtgacttattcaggaacctttaaagtggctttgaaagtcatttggtgccagatgtaccaaatgtcttggatgggctagagggctggggctgtgaggtgagaacttacctggcattgggactgccaggtacatccccaaagccacgcccctccagaaggcatctgttgagtttcatatgccccaggaggactctatatttaaggccaggcaggaggacaccctgagaaaccacgctgtcacgactcagtctctcagaatgccatggcagtttaaaaaaagtacacatacactttttgccacatcttagatgtccctccgcctacagaagccatcaaataaaaattaattttgcttcaaaaaaaaaacatgctgaatatttttgacactcaatgtctgttcatttgcatgggacacgttcttccataatgaatcatcgtaacgcttaaattaaacacagtaaaagaatggttaatgccataacacgctgacaatttaacctggccaatatttttattgccttgtacaagaaacctaacagagcaccacttgcttttgactggtggaaaatcggttatgaaccgccagggagcggccaatttttcaaatgcagtcattcagtcatacgatagccactatgactttttttttcccatacactattgctattataatcttttgagggtatttttatcacggcaataacctcctcaaaatcagtctttacagcagttaatgattggacagctggagctataactggccttggcattgcccccagctattagctaacaaaccagttgttatctgcaggtaacagccaatttcttgtggaatttttttgataaagtgcctcctggatcgaaggtattttttccctctttgtcccagcttcaagcatcttggggagcttggtgaagagatggaaagctggtggctctgtaacccccaggcatggagcgggatctctgagggttgctgtattgccacaggagagtggggactggcttttgtcgctgcctggctttgtgaagtgcrgggtgagagtctggagaaagaggctgctctgctgaactggctggacagagaagggagctgactgccttggaggcgcagagaatggaccaggcagggccaggccttgagcgaccctgggagttggggtgaaagccaaacaatggggtcaattccattgttgagactcatttggtgccagatgtaccaaagatcttgggcaggctagatggctggggctgtgaggtgagaacttacctggcactgagacagccaggtgcatccccaaagccacgcccctccagaaggcatctgttgagtttcacatgccccaggaggactctatatttaaggctcggcaggaggacactctgagaaaccacaagagaaatctactgagtggacaggcaccttgcgtttgataaatctctgtgtttagatttcgatatcctggtttcatgtgtgtttcatttttgatcacccttctaaaatgtgagcttttaaattcgtgacttaaagttaggaaatgttcatctattttaaagtgaacacctttttttataaggaccagattagtaaatttggaccttggcactgatggctaagctacgttcaagcacaggatccttgttgggatgaaattctccaggttaacccaagtaaaattcagagcgggaatgttgagatagaatgctggaccaagagaagctaactggtaaagggacagcctgccttctgcgcccgcaaggccttctgcttttcatgctgcctggagagaggagccgcttcccttttcagccgtgactgtgttttaatatccctggtactaagtgtcagaagtggattgggtgctgcagcactagagcgaagagttaacatgacagcgatcacctgtttgtggcagcagtttgagattctgcagattgatcagtgtttactgtgtgagacccagagattcgattcctgaaatcacagggctgattgcagtaactttacatatgcgtccttaacaagcagggcaaaataaaaaaattaatattcttaaaagtgaaataagatatttccagcctggagagaagaccaattaaaatcacttcacatttttaaatgagttttcatttgagagagtggaattctttgaagaatatgagttttgctaaatatttgaaatcatcatatatcgtgcttatttgaagcccaggttgcttataaattcaatgacaaattgagaagtaagcacagaatttatgtttgaattatctgttgggtgactcccctgctg

SEQ ID NO: 710115 - DNA, 727 bp, Homo sapiens
ttttttgagacatgatcttgctctgtcacccagctgctggagtgtaatggtgccatcgcagttcactgcagcctggacctccagggctcagcctcctgagtagctgacaaccgcaggcacacaccaccatgcccaactaatttttgtcctggctacttttactcctaaaccttctccttctccataaacatcatatttttcataacttctccccttccactctttataccagcaagacgaatsttgccccagtggccaaatatgtgttatttcacattgccctgctctaattaaggaggtgtgaagaaggaaatgctagcaacagcaatgataactcaggtggctttgtgtgtgtgttctgggagtggagtgtctttaagtgagcatattggagcacaggatagacaggaagagctccagtgttagtaaaattatgaatcattactatgttggggacttctagaatttaggtccaaaacaattctcctgtggttgcaatccattataagtcattcaattaataaagaatgaaccaattaatggaaataatataaaccatagacttctgaaaaagtggtaaggatttttgaaatatatcctaatgtgcaccaggagtcaagtaacatggacagagtatttactcagcacataagttgttaggcacagattattaagactaaagaaagacacttcaaatgaaaacactaaaaagaagagactttaaaaa

SEQ ID NO: 710116 - DNA, 1127 bp, Homo sapiens
ggtgaaaaaagcacttgtagagttgagcaacacgaggtatagattcctccacctttctctactcacatgaaaaatgtattttaagaatatttgggaaaggaggagctttctgaagaatgacactaagaattaaaatgtatcaaattgtttctgtttaaaatcagtcttacatttatgttaaatgaagtaataattgataaaacaatattaagttgagcagctctatcagagaacttaagtattactcttagtggaatgaaaacagtgaaatatataatgttttggatcattaaatctaatactaaataattatttttaaagactcagaagcccctgattaaagaatataaatatgctgaattatgttcaatagatgtttgtcatatccacttaaggtttaatgaagtccataaaatttgcatgtatacatcttaagatacattacaaaatgtttccaaagtaccaattttggtttactttaaaatgtttttaaatttcagtcattctgggtattgaatttctagcatatattacagagcaatttcagcaatggttatacacaaaatagaacttctgagtttatttggtctcatttgtgtgtaaaarctgtgatgttatatacaactacctaaacggtgttagaattatgtttttctgcctggtagcctattgtcaggtcaagaagggagtaaaatttaagtttttcaaattagatatgaaaagaaaaattgaatcttcacagtttaagttacatatggcataactttggtgcagacttcagttgcttttataatcacaagcattcttggaaaataacatctatgcaccaattatggacttttacataaatttctctaggtctcagaatagatatcttgcaaagcaaatatctgcatgtgaaggagactcctgtactttaattttcatgaaacaatgtctttaccctgttgcttacatctcaggtaataaattgctgtttctttattgagtcatatttaaaatcaagctaaaatcaatttaaattttttttcaatgagtcttttaaaatttgtaatgtgtgacttctttctcattctaagtatacattaacattcacatctacttttgcatttgtagtttttaaaaca

SEQ ID NO: 710117 - DNA, 681 bp, Homo sapiens
ttcttaccagacagcagactatttcaagaaaaaaataataacatcgtaaagtttgtaacatatgtagttgtaaaaatgtggcaaaaggtggtgagtaggtaagtagaattatactgtgctagagtactgtatttgtgaagtagaaaataagaagtagaaagtgttaagtttgaatgagaggtgggaagtgggaaaggaaactgcaaagtttcagatgtgaagtgaaaattagaagtatgaagggtcactatgaaatgtgaaatagtgccatattgactrtaaaaagactgatactttaattataccaatttttagatctaaaaaaaaactacattttttgaaggcatatttaagaagacaatgcaaaaactaaaatagaagagtaaaaaaaattttaaataaccccaaagaagacaagaaaaaagcaacagaataccaaaatcaggaaggataagtggggagaaaagcaaaatagcatacttaacagctaatagcaatgttactgtaataagttaaagatatatattgcaaaccttattgtaaacaccaaaaaaagaagtatagctaataaaccaacagtaaaaaaaatactcaatccaaaagaaagcagaaaaaaataattaaaaaaagaaaataccaataagcaaaataatagaaaacaaagagtgaggagataatttt

SEQ ID NO: 710118 - DNA, 670 bp, Homo sapiens
ggttgcttagagcagaaatcaccatcctcagccgggtgcagtggctcatgcctgtaatcccagcactttgggaggccaaggcgggcggatcacgaggtcaggagatcgagactatcctggctaacacagtgaaaccccgtctctactaaaaatacaaaaaaatttgccgggcgtggtggcgggtgcctgtggtcccagctactcgggaggctgaggcaggagaatggcgtgaacctgggaggcggagcttgcagtgagccgagatcgcgccactgcactccagcctgagcgacagagcgagagactccgtctcaaaaaaaaaaaaaaaaaaaacaagaaatcaccatcctcaagratttatagttgaggtagataataacaaagcaaaaggaaaacaaagtcacagcaacacagaagataaagggcaaaactcagaaggcaggtgtaaatttttcttcctttgagtttccagagttttacttcttttgaaacccttcttttacttttactacaatgttttgcccttactggaacttgaagttatcccttggaagcccattttggtgctttgcatgcggtagtcctctataaatgcttgttgaattaaacagaagatttgtaatgtggtagattagcacacatgtgtgcacacacgtgtggttaaattttt

SEQ ID NO: 710119 - DNA, 619 bp, Homo sapiens
tattctagcgaacacatgggtccaggaaccaagcagtagacttaggagagcctcctatgactttcattccaacaggccctcttaaggaacttgtgcttcctgcccctgagtgtgagtctcaagttctggttctcagaaggcctgtgcttccatcaaaggacccagtaaacatcatgctgaactttaaattgcatttaccacatggtcactttgggtttctcatgccaatagaccagcaattaaagaaagtagttaccatgtgtcttgtgaggggctatagcctaatcatcatgaagaggtagaattctgattaaacaaggcaggcagggaagtgatccactggggtacctctgggcactctcatgcccaattataactacaaacaggtatagagaaggaaaacgataaaatcaagtaaagccttgagttgagatcaagtacagcagcaggggtatgatttatgctgttcttatcagtttccccagaatttacgaccaagcaggatcatggagaagctgtatccagatgggggagaacttagcgccagaagcacccatagggctgagagctaaaggagtggactgtagtagytgctattggtacttatgccacattcccc

SEQ ID NO: 710120 - DNA, 1215 bp, Homo sapiens
ctatgcatatatattatctgcttattcatatacgtgctttgggatctgttctcccataccatgaaggtcttttgatgagaccttctcctgactcatttaatgctatgtccccagggcttagaacagttcctgacacccacaaaggactagagatattaatcgactaaaatgaatttctagtcactgattaagtaacttgcttttcaacctccattctcataccagacccttcttctgcaactactacaatcactagcccaccctggaaaattcctaatgaatcacagacggagacctcccgtctaagaagggaaaatcatttactcccttttcaccatctattgaagaatccaactcatcaaaggttcttgatgttactgaatgaggacctactcagttgtccaagctggatgcattaggaggtgtcctgccctgttataaaagcctagtcccaagtgatacccaacagagcacacattctttgggaaaaaccaaaacaaaacaacacaactaatagcattgttgaaactcctaggtaagaaaatagatatccttgtaaattagtctcacagaccacaaatgttaatgaaaaatgcctattccatgtggctagaaaaagcagaccagatgtgttggcactctcgacacaagacccacgtaaaaggcattgcttttctttgggaaacgtgaagaacaaatcctgaaatgctgctgttctactgcttaatgattttcatctcactatctccacccgaagcccctgatggctgcctatgcttagcccatccaccatgggcatcaatgtgacaatagcacctctttataagaatttcagttataacatccatcaarccccacactgagattttaagcatgttgatttttttttctccatttaaaaatagagaacttgtcttttgtcaaactctgatatccagtagatagcaggattcaatacacctgctctaataaatgtttttataaggaggtgagagctcattacagtagtgctgtttagaatgtgggtagtgggcacagcaggatttttttttttttttttttttttgatggaggcttgctctgtcgtccaggccggagtgcagtggcgcagtctctgctcactgcaacctccgcctccccagttcaagcaattctctgcctcagtctcctgagtagttgggattacaggcatgtgccaccacacccggctaattt

SEQ ID NO: 710121 - DNA, 1215 bp, Homo sapiens
ctatgcatatatattatctgcttattcatatacgtgctttgggatctgttctcccataccatgaaggtcttttgatgagaccttctcctgactcatttaatgctatgtccccagggcttagaacagttcctgacacccacaaaggactagagatattaatcgactaaaatgaatttctagtcactgattaagtaacttgcttttcaacctccattctcataccagacccttcttctgcaactactacaatcactagcccaccctggaaaattcctaatgaatcacagacggagacctcccgtctaagaagggaaaatcatttactcccttttcaccatctattgaagaatccaactcatcaaaggttcttgatgttactgaatgaggacctactcagttgtccaagctggatgcattaggaggtgtcctgccctgttataaaagcctagtcccaagtgatacccaacagagcacacattctttgggaaaaaccaaaacaaaacaacacaactaatagcattgttgaaactcctaggtaagaaaatagatatccttgtaaattagtctcacagaccacaaatgttaatgaaaaatgcctattccatgtggctagaaaaagcagaccagatgtgttggcactctcgacacaagacccacgtaaaaggcattgcttttctttgggaaacgtgaagaacaaatcctgaaatgctgctgttctactgcttaatgattttcatctcactatctccacccgaagcccctgatggctgcctatgcttagcccatccaccatgggcatcaatgtgacaatagcacctctttataagaatttcagttataacatccatcaaaccccacactgagattttaagcatgttgatttttttttctccatttaaaaatagagaacttgycttttgtcaaactctgatatccagtagatagcaggattcaatacacctgctctaataaatgtttttataaggaggtgagagctcattacagtagtgctgtttagaatgtgggtagtgggcacagcaggatttttttttttttttttttttttgatggaggcttgctctgtcgtccaggccggagtgcagtggcgcagtctctgctcactgcaacctccgcctccccagttcaagcaattctctgcctcagtctcctgagtagttgggattacaggcatgtgccaccacacccggctaattt

SEQ ID NO: 710122 - DNA, 1215 bp, Homo sapiens
ctatgcatatatattatctgcttattcatatacgtgctttgggatctgttctcccataccatgaaggtcttttgatgagaccttctcctgactcatttaatgctatgtccccagggcttagaacagttcctgacacccacaaaggactagagatattaatcgactaaaatgaatttctagtcactgattaagtaacttgcttttcaacctccattctcataccagacccttcttctgcaactactacaatcactagcccaccctggaaaattcctaatgaatcacagacggagacctcccgtctaagaagggaaaatcatttactcccttttcaccatctattgaagaatccaactcatcaaaggttcttgatgttactgaatgaggacctactcagttgtccaagctggatgcattaggaggtgtcctgccctgttataaaagcctagtcccaagtgatacccaacagagcacacattctttgggaaaaaccaaaacaaaacaacacaactaatagcattgttgaaactcctaggtaagaaaatagatatccttgtaaattagtctcacagaccacaaatgttaatgaaaaatgcctattccatgtggctagaaaaagcagaccagatgtgttggcactctcgacacaagacccacgtaaaaggcattgcttttctttgggaaacgtgaagaacaaatcctgaaatgctgctgttctactgcttaatgattttcatctcactatctccacccgaagcccctgatggctgcctatgcttagcccatccaccatgggcatcaatgtgacaatagcacctctttataagaatttcagttataacatccatcaaaccccacactgagattttaagcatgttgatttttttttctccatttaaaaatagagaacttgtcttttgtcaaactctgatatccagtagatagcaggattcaatacacctgctctaataaatgtttttataaggaggtgagagctcattacagtagtgctgtttagaatgtgggtagtgggcacagcaggatttttttttttttttttttttttgatggaggcttgctctgtcgtccaggccggagtgcagtggcgcagtctctgctcactgcaacctccrcctccccagttcaagcaattctctgcctcagtctcctgagtagttgggattacaggcatgtgccaccacacccggctaattt

SEQ ID NO: 710123 - DNA, 650 bp, Homo sapiens
aatgaccaggcccacaccccggtcatttaacttgagcatctttgagagtggttcccatgtacagatatgcctgaaaaacccctggggttgattctcatctgtcagccagcacggagaactcatctcactgtatgaatacctctctgaacatatgtatcttgcctcttcaggaaacagttgtgtcttttgggtttaaattgcactagtgttgatttttaacattttatacttaatattttaattgctaattatactaattayagtagttataattagtaattgtcttataatcatgcttaccaggttgcttccttttttacatgtaaaattaaggtggaaagtcacaataatcagtttattcttgttgttaaaattgctagacgtgccatatggaactcagccatgagtgttttctgaatattaaacataatatgcagataggatgtacctattaaaattcatattgctgatcttaccaaagagttgactcacatcattcagccctcagattgtaaatgaggggcttgctacatatcaggcactgagctaagtctaaggggtctgatgctatgctcatatcctttaaatcactggagtatcttggacttgcctgtctggaagctcataatctaatttatatttcagtttta

SEQ ID NO: 710124 - DNA, 653 bp, Homo sapiens
ctcagctgttgatagttcttactctctcattgaagaagggagagtagagaggcaatggtaataaaagtcaataatttataaagatagatcctcttatctcttgcaaggtttgtggcaggacaaccctttgtcaacattatggcatatcggggtagaacagaagcttgttctctaaagtggggcttctcaaacttcactagtcattctggagtctggraagtgcagcttctggttcagcacggctgggactggggtttgggattctacattctcacaggctcctggtgagcccaatggtgttggtctggaaactacactttacaaggcaaggctctgcaggctttttagatgatccactcaaatcttgaaatttcaaaacagaacaagttaatcctccttttcccccatttgttcattttctaagtttgggagacagaaatggaagaaaacaaaaatagtggggaaacgatcattctgaaaaaacagggaagctggtattgtccaggaagaattattaaagtgcctccactcccactacctgggctcatattctgtttggtagtagtcatccacaaacactctaacaaagcagaaatggtggaaaaaacaagttcttcatctcttaatacattctaaaattttaaattacaaaa

SEQ ID NO: 710125 - DNA, 653 bp, Homo sapiens
ctcagctgttgatagttcttactctctcattgaagaagggagagtagagaggcaatggtaataaaagtcaataatttataaagatagatcctcttatctcttgcaaggtttgtggcaggacaaccctttgtcaacattatggcatatcggggtagaacagaagcttgttctctaaagtggggcttctcaaacttcactagtcattctggagtctgggaagtgcagcttctggttcagcacggctgggactggggtttgggattctacattctcacaggctcctggtgagcccaatggtgttggtctggaaackacactttacaaggcaaggctctgcaggctttttagatgatccactcaaatcttgaaatttcaaaacagaacaagttaatcctccttttcccccatttgttcattttctaagtttgggagacagaaatggaagaaaacaaaaatagtggggaaacgatcattctgaaaaaacagggaagctggtattgtccaggaagaattattaaagtgcctccactcccactacctgggctcatattctgtttggtagtagtcatccacaaacactctaacaaagcagaaatggtggaaaaaacaagttcttcatctcttaatacattctaaaattttaaattacaaaa

SEQ ID NO: 710126 - DNA, 653 bp, Homo sapiens
ctcagctgttgatagttcttactctctcattgaagaagggagagtagagaggcaatggtaataaaagtcaataatttataaagatagatcctcttatctcttgcaaggtttgtggcaggacaaccctttgtcaacattatggcatatcggggtagaacagaagcttgttctctaaagtggggcttctcaaacttcactagtcattctggagtctgggaagtgcagcttctggttcagcacggctgggactggggtttgggattctacattctcacaggctcctggtgagcccaatggtgttggtctggaaactacactttacaaggcaaggctctgcaggctttttagatgatccactcaaatcttgaaatttcaaaacagaacaagttaatccyccttttcccccatttgttcattttctaagtttgggagacagaaatggaagaaaacaaaaatagtggggaaacgatcattctgaaaaaacagggaagctggtattgtccaggaagaattattaaagtgcctccactcccactacctgggctcatattctgtttggtagtagtcatccacaaacactctaacaaagcagaaatggtggaaaaaacaagttcttcatctcttaatacattctaaaattttaaattacaaaa

SEQ ID NO: 710127 - DNA, 936 bp, Homo sapiens
gtactacacacaaaagtggaaataaattagaggccacattgaaatagaaatcagttcttctggaaaagaatttcaacttgtggtaagtacagagtcagaacttgctttgataacttaaaatgaaatattagacacttttactgaaaaatttcatcttatcttgaaagatagtatactaccatccatagtatactacctagtgacataaaacccaaacaaagaacaacgtaacaaagtggagcggtttaatttttattgccacatccacaaatgctgcatgagctaagatattctatcttctgctttactggattactgtcttctagaatgcaggtttttttttagcaatagaaatggctcattcatagggctttgcacgtatattctcaacagagctacacctagaaagcattaggctttcccaacctgcctctaaacccttcacagctgaagggttctgatgctgctactgaaaagacaggctttatttccttttttgtggcctatcaagtcaatgatctgcgacctaaaaagtgtgtaattaggccatgacatgaccaaaggagttgttacaccttgccttgtcactggcaaaagtgtctacccacgtggctgtgacagctacggtctgttgggcttggaaattcctttaatctctccccaactccttggtggtccagtctgttgactrttacaggattggttctttttttaaactgattcaattacatattcatccaatagtgcataacagttgttatgaagccattatagattatggaccaaaggcaattagttcttgagagagaaagttgaacacattttcttttaacgtgtgtgtgtctgtctgtctgtctctgtgtgtgtgtgatttctataaactaagagaaactcaggaaatatatctatcagttacagccatattacttctcagta

SEQ ID NO: 710128 - DNA, 1522 bp, Homo sapiens
tgcatctgtaattggaatattttgtctcatttattcttgataatgtgccatattccactccatcagccagaggtgattgctcacagaatgtcttacacctggtattggtgcttatgaaaaccagatgtggttcactgtttaaagctgtttcaaagaaagggggaggacatctccctctaatgctccccactccctttctcactctctattttttcctacaattttttttccctccctggggctctagttacacttttcgagtccagggatgctggcccattttttgccaagtctcagggtaacgtatttgaagatccctgcaggtagtgttgaggagggggtargatggggagaaggcagggaagcccagagtgagagcaggcactaatctctctgtggtcaaggggttgcaaatcaaggaagctgctctgttctttctaatttacaaaactacagtttttgtctaagcacctttgcttgtctgggcccatgcaggtttaaaaggaagcaaaggagagcatggggtggcttccctagagagcgctgtcaaaatgaaatactccaatttagacatttatttgaaccaactgaacaacctgttaaaaacacacattcctagtccccaaccagatactctcgcgtcagaatttccaggggaagtgtttgggtatctgcctttttaacaaggctccttgatgttcctgatagggtgaaattaagaaacattcccagggagcagtgcagctcaatctttaatgtgcatcacctggggacctttaaaggcaaattctgatcctataggtttgggtctgacctgagacgctgcttttgagaaaatttcccaggtgatggtggtgcagctgtccatgcaccacacttagagtagcatgggtgaagagcaggggtcaataaacttcacccactgcttgtttttgtactgacttaagaatggttaaaaaaataaattcaggctggacgcggtggctcaacgcctgtaatcccagcactttgggaggccggggtgggtggatcacctaaggtcaggggttcaagaccaacctggccaacgtggcaaaaccctgactctactaaaaacacaaaaattagctgggagtggtggcaggtgcttgtaattccagctacttgggaggttgaggcaggagaatcgcttgaacctgggaggcagatgttgccgtgagccaagatcgcgccactgcactccagtctggggaacaaagcgagactccatctaaaaaaaaaaaaaaatcaaaagaagaaaaatatttcattatgcataaacattttattaaatttaagtgccagcgtctgtataggaagtttaattggcatccatttgtctgcatattgcctgtgccactacgtggtagagttgtgtcgttgtgatagagaatcatgaccccaaaagcctaatatatttgctttctggctcttgatagaaaatgtttgccaatccctgctctagatccggaagtaaaaaaaacagaggtgttttttttaagga

SEQ ID NO: 710129 - DNA, 1391 bp, Homo sapiens
cgtggtcgtgagaaactgatttgtatttcctaagcatgaaaacgagtttaacgagaatcatatgtagccttcacaggtttttgtaaggatcacaaggcatcttgcatatgaagctgtttctaaatgcctatttttaaaaggatcatagttatttacaatcttccccgataccttcccatgatgtttctagatgacttatgattcyggcaaaggaccaatgagccccaccattgaatgaagctgaggttctaatagaaacacaactttaataccaaaggattccagcaggtttctgtagcagaatgaacccacatgtaagcaaagcatattgagccaagggaaggcattttacaacacacacacacacacacacacacacacgctgtactgacacacacacgcagctgtgacactggtttgctggagaacactctagtgtgctgcttagagtatttcagagttgattgactaaactccaagtaccattgtccttaaaaatgtggcagggatttcacacactaaggaggttggtaggaatagctttcagctgttgttcatatttgatccgggagggctacagttcacaagagcgcttgtgaagtggcataaagccctaatccaagatgctgaggtgtgcatcgtcctgagctatgctttgaattctttttcaacttttccaacatagagaatgtcggttggggggtcagaaggcagagccaccctctgccaaggtctgatgaaagagagggagcaacagatatttagtttgggtcccaaaccacaggactgatcacttagccatatcaaaaccgctccatcccattctttcatgctgccatgcccttgcacgtgcaatgccttgtgctggcaatgccctttattctagtatcctcatccaaaagcagtgacatgaccattcaagagccaagttagatgggaagcacatgggcatttgaatcagactgcagcatcctcaatcaacagtgcagtgcctttgcacatattacttgagacatctgaacctcacttactcatctgttaaaaagggaaaataggtaagtgcctacctcaagaaagggtttcgtaagataatgcttgcaaagggatgggtggcatcatgcttaacactgtagctctaacgaggtcaccatgtttgagacccggtgcccacctgcagctgggtgacttttcccattatgaacaccagcatcatttttcagactcttatcagagccactcgtcaatttctgcctcacattaaaggtctgtgtgcatgtgactcgttgcaccttaaaagctacaccctgtggcttaactaacattctattctcagttcctgacacactgcttgttacctagaagatggacaataactgggtgaatagggttca

SEQ ID NO: 710130 - DNA, 989 bp, Homo sapiens
gctgattcgtcataccaagaagcagtgggaggatagaggcactccagccttaaaagccaagagacaaggagcacccaggacgaagagaagcgtgactaccaaaacgcttgctggtgcaatgagaatctgtgtccttcaccagagctgtctcgaattatcttgaaattgcatccatcatccaggccatcttcctgcaggcaaaggggatagaagctttctgtagccctcaccctctccagcctcccagactcctgtcttcctcagggggaattaagctcgccagacacagcagaactagggagacttcagagaagtgaggtctctcaaccaaagaaagccctctgaaaaatgcctcttactctgacttaaatgaagagcgagtcgcataaaaccaaagctgaaatcagggatttcatctctgaaagaagtgctcaggactattttgacccacatttctattaagcccagtctcctttttgtttaaatttacacagcaaaacaaatccattaattttgctagtgatgaccaacagatcctcaaaacagaaagtgtttactgcagaagttttagagagaatttgtataacatgtttaaaacagtagggattaaatctaagttatytagaactccagacatttggaaagctcattcctacgtctgactcagggttaaagtgtggttccttcatgccaagctcggtgtctgctacaaatagtaagtcccatgagctatgaaagcttgggggtgagaaatgcgggtgatggcaataggaaatatcttggatcctattgttctttctggctacataggtcagagtcccagcaggaaatcatttatcccaaattttcctaataaataaatcactacttacagagatgtggagacagtggagagaacaaataaggaacattgaggtacccagagactagaaacagctgggagctgttgccagcccaaggacttcagaggccaaggggaggaattggtg

SEQ ID NO: 710131 - DNA, 989 bp, Homo sapiens
gctgattcgtcataccaagaagcagtgggaggatagaggcactccagccttaaaagccaagagacaaggagcacccaggacgaagagaagcgtgactaccaaaacgcttgctggtgcaatgagaatctgtgtccttcaccagagctgtctcgaattatcttgaaattgcatccatcatccaggccatcttcctgcaggcaaaggggatagaagctttctgtagccctcaccctctccagcctcccagactcctgtcttcctcagggggaattaagctcgccagacacagcagaactagggagacttcagagaagtgaggtctctcaaccaaagaaagccctctgaaaaatgcctcttactctgacttaaatgaagagcgagtcgcataaaaccaaagctgaaatcagggatttcatctctgaaagaagtgctcaggactattttgacccacatttctattaagcccagtctcctttttgtttaaatttacacagcaaaacaaatccattaattttgctagtgatgaccaacagatcctcaaaacagaaagtgtttactgcagaagttttagagagaatttgtataacatgtttaaaacagtagggattaaatctaagttatctagaactccagacatttggaaagctcattcctacgtctgactcagggttaaagtgtggttccttcatgccaagctcggtgtctgctacaaatagtaagtcccatgagctatgaaagcttgggggtgagaaatgcgggtgatggcaataggaaatatcttggatcctattgttctttctggctacataggtcagagtcccagcaggaaatcatttatcccaaattttcctaataaataaatcactacttacagagatgtggagacagtggagagaacaaataaggaacattgaggtacccaragactagaaacagctgggagctgttgccagcccaaggacttcagaggccaaggggaggaattggtg

SEQ ID NO: 710132 - DNA, 873 bp, Homo sapiens
tgtcaagcgcacagcacagttgataataaatggcagctactttctatcataagcacacgcatgactgtgcacttctcagtgcacacagacatggaaccatcttttacacttttcgctcagtatgtgggcacctgagtgcacgtcttctggtcagttgtgtgtcctgaggtgcakccatgtgtgcgcgggtgacgatctgcctgtgtgcacaccatgtgcctttgtgcattgagagtgaatggcaggcacgcacaggcatgtgtctgggtgagcgtgtgagggtgcaggggcaggtgtgtccgtgtgaggatgggtcttcccgagtgcctcagctcagtgctgccctgccggtccagcccgccccgctcacccacaatggacaggatgacgaccacgaagtcaaagatgttccagccaacggtgaagtagtactggcgcagggcgagcatcttgagcacgcactcccctgtgaagatgatgatgaagatcatgttgatgttgtacaggatgtccaccttgagctggctctggttgtctgtctccaccatcatggtgaccatgttgaggcagatgaggatcatgatggtgatgtcgaaggcctgcttcgtcacgaggtcatacaccatgccctggatcttgttctgcagcatgggtgggagtggatgtggaggagttggggtggccaggcccagacaggacatggacaggcaggaggcacaggatggcaccacagcatgacagagatgacagagatgacagagagagagagagagagagaaaggaggtgttgggggttgtggtggagtcagccaggggaggaggggtgacccatcagatcatgacaggtctgggaccaggtcattttatggggtt

SEQ ID NO: 710133 - DNA, 873 bp, Homo sapiens
tgtcaagcgcacagcacagttgataataaatggcagctactttctatcataagcacacgcatgactgtgcacttctcagtgcacacagacatggaaccatcttttacacttttcgctcagtatgtgggcacctgagtgcacgtcttctggtcagttgtgtgtcctgaggtgcatccatgtgtgcgcgggtgacgatctgcctgtgtgcacaccatgtgcctttgtgcattgagagtgaatggcaggcacgcacaggcatgtgtctgggtgagcgtgtgagggtgcaggggcaggtgtgtccgtgtgaggatgggtcttcccgagtgcctcagctcagtgctgccctgccggtccagcccgccccgctcacccacaatggacaggatgacgaccacgaagtcaaagatgttccagccaacggtgaagtagtactggcgcagggcgagcatcttgagcacgcactcccctgtgaagatgatgatgaagatcatgttgatgttgtacaggatgtccaccttgagctggctctggtygtctgtctccaccatcatggtgaccatgttgaggcagatgaggatcatgatggtgatgtcgaaggcctgcttcgtcacgaggtcatacaccatgccctggatcttgttctgcagcatgggtgggagtggatgtggaggagttggggtggccaggcccagacaggacatggacaggcaggaggcacaggatggcaccacagcatgacagagatgacagagatgacagagagagagagagagagagaaaggaggtgttgggggttgtggtggagtcagccaggggaggaggggtgacccatcagatcatgacaggtctgggaccaggtcattttatggggtt

SEQ ID NO: 710134 - DNA, 610 bp, Homo sapiens
ttaaagatatttgaaatatatttatgtatgtatttctarctaaagaaatatatagtataacattctcattctatgaagaaataggctatttccttttgtgctacatataattagttttctttttttttttttttttttttgagatggagtcttgctctgtcacccaggctgcagtgcagtggtgcgatgtcggctcactgcaagctccgcctcccaggttcacgccattctcctgcctcagcctcccgagtagctgggactacaggtgctcaccacctcgcctggctaattttttgtatttttagtagagacggggtttcaccgtgttagccaggatggtcttgatctcctgacctcgtgatccgcccgcctcggcctcccaaagtcctgggattacaggcgtgagccaccgtgcccggccatataattagttttcgaagaagaataataactctatatgtttactatttttatttttttaatttaatttttttttatttgagacggagtcttgctcagttgcccagactggagtgcagtggcacaatctcggctcaccacaacctccacctcctgggttctagcgattctcctgcttcagcctcctgag

SEQ ID NO: 710135 - DNA, 610 bp, Homo sapiens
ttaaagatatttgaaatatatttatgtatgtatttctagctaaagaaatatatagtataacattctcattctatgaagaaataggctatttccttttgtgctacatataattagttttctttttttttttttttttttttgagatggagtcttgctctgtcacccaggctgcagtgcagtggtgcgatgtcggctcactgcaagctccgcctcccaggttcacgccattctcctgcctcagcctcccgagtagctgggactacaggtgctcaccacctcgcctggctaattttttgtatttttagtagmgacggggtttcaccgtgttagccaggatggtcttgatctcctgacctcgtgatccgcccgcctcggcctcccaaagtcctgggattacaggcgtgagccaccgtgcccggccatataattagttttcgaagaagaataataactctatatgtttactatttttatttttttaatttaatttttttttatttgagacggagtcttgctcagttgcccagactggagtgcagtggcacaatctcggctcaccacaacctccacctcctgggttctagcgattctcctgcttcagcctcctgag

SEQ ID NO: 710136 - DNA, 738 bp, Homo sapiens
ttcttttgagaaatgtctgttcatgtcctttgcccatttttaagtttttttttttcttgctattgagttgtttgagttacttatacattttggatactaaccccttatcagatgtatcgtttgcaaatactttctcccactcggtgggttgtctcttcactctgttaattttttcctttgctgtgccgagctttttagtttgatgtaatccaatttgtctgtttttgcttttgttgtctgtactttctgggtcatagccaaaaaaaaatcattgccaggccaatgtcatggaacttttcttctatgttttcttctrgtagctttacagctttaggtcttacatttaagtctttaatccactttgagttgatttttgattatggtataagataaggagacccccattttctaaactgtaaatgaagagagaaatattgtccatgctgcctaatctcacaggtgtcttaggaagatcaaatgggattctgaaatcaagcagttatgtttcagagagtaacagagttgtaaaaccattgttttgccaccattacagtaaagacagaccaggcaataatcatctatggatgggaaacattagtgaggtaggaggaaattttgttgcagagcagaatgttttcatgggcttaaagtgtttctccacagacagcttattagttacagggagggaaacagtgattaaataacctagaaatcagagaaaaccttggttggttgatc

SEQ ID NO: 710137 - DNA, 1464 bp, Homo sapiens
taaaataattatgtctcatctggctgtttacaaacaggaatctcctgtttttagtcaataaataaaatatttagaagcggcactgaaatcccatgggttttatatacaccccaggaagggatagactggtggagcaaagcttgggtttgaaaagctccagtggaggaagtccccaggcccagactcaggccatgccagaagaaaggagaagttttgtctgaagctgtgcttggtaacactccccaccctyccacccacctgatattctcacgcctctgccttgtcaagacatgaatgaggcccagtttgtgcccaggtcattttgcgctttgccatatgctgtgtggaagctgcagagtggccattgtggtgctggtcaagaagggagtgccagaagattgacctttgtccctaaagagaacacctggctgagtccagggcctggttcgaatccagttccagggagcagggaaggtactgagccagtctcttccactgagtgcattccaagggtgttaatggagagtcttaagggatcagacacatgcaccctggggatcctctgttgcttttgtaccagctcatagagtcctagtagcctctgtgagctgaaaaagcctatttatcgccttggaatcagcactcctgccaacaagggttaatcgagatgggaagggaaagaatgtgcagcattatgtgactgtagtttgttatggtattggtggagtgaaattgtgagaaggcatgggaaatgtatttggagtcttataaaatctttataactctgagtcaggttggatctgggtcattaccgaattcctgtgatgtagggaaaatcatgtcaccagttacatctgctgagattctgccagtcaagtggtctctgcctcccaatattaaatgtccttgtcatcttgttatgctatattagcagggagaggctactgaggctgtcttgggaatgactgagcctctttgctgtttccagtcttgtagcttcaacagaacatgccatccatgctgaccttattgaacaagtcaatctcatccagaggtgtagtaggtggtggcccaggaaggaaatctgagaggtttcgagagtatctctccagttctccaagactttctcacaccccaaatccccgtgtctgaaatcctgctaggattagattcctttggcccatgaaggagtttttcttctctgcaaggctcctatggatgtgaaagtggtgatctcactgtcaccattcatcgtagaggagtttaagaaccatgagaattccaagatatcctgcagaatttccaggagcaagctcttgggaaattggacagagctagccccaggcagggcattttctcaccacttttctctgtgctactccggttttactggtcacatatctgcagtggacacagagttcccagagagtgtggaaggcatcaaggaccacaagtctgtgggct

SEQ ID NO: 710138 - DNA, 841 bp, Homo sapiens
gggtgagctcagccaagaggtggctgcagattgtaggtggagatgctggggagtgtgtggggttttgcgattttccaagctctagatgtacagccaggggagcccctatgcaagactcagcctactcaccacgtggggcgctgtgcagtcatgatatttaccagcagtcaatccggtagggagcctcagaatggtgagttggacttggcaagggcatgcttggctttcagggagtttgtttgcacagtcagattgatttctgctctcctgtgaccagaggacaccggtgcttatcttggtcccctctccaccctttgtttgcctgaccccttggctccctttttaatactttaaaattttaaggttttcctttactaaatatcacagaattttttttattttttcttctttttttaaatctgggagcttaccacccaagctggcccagcctgatgtttttttttgctttgtattttcacaaggatgagataagtccccatgatctctcctgggttttttgctggtgctgcttgttaactcgagtaactctcggcattttctttgcttcctttctctggcatttctgccaaagtgtttctgaacgttcaaggcctgagtgaggttgagctagattktctcttagatgtgcctcatccaaggcttcccttcacacccatgctgggcttagtaccaaggggtggtccatcctttgccctatctgagatctcttccccactttaattaactttttagtttgaattttcaggaaagttgtaaagatagtgcagaattcccaaatgtccttcatccagcttgctttgctgttcaccttttttggtac

SEQ ID NO: 710139 - DNA, 841 bp, Homo sapiens
gggtgagctcagccaagaggtggctgcagattgtaggtggagatgctggggagtgtgtggggttttgcgattttccaagctctagatgtacagccaggggagcccctatgcaagactcagcctactcaccacgtggggcgctgtgcagtcatgatatttaccagcagtcaatccggtagggagcctcagaatggtgagttggacttggcaagggcatgcttggctttcagggagtttgtttgcacagtcagattgatttctgctctcctgtgaccagaggacaccggtgcttatcttggtcccctctccaccctttgtttgcctgaccccttggctccctttttaatactttaaaattttaaggttttcctttactaaatatcacagaattttttttattttttcttctttttttaaatctgggagcttaccacccaagctggcccagcctgatgtttttttttgctttgtattttcacaaggatgagataagtccccatgatctctcctgggttttttgctggtgctgcttgttaactcgagtaactctcggcattttctttgcttcctttctctggcatttctgccaaagtgtttctgaacgttcaaggcctgagtgaggttgagctagattgtctcttaratgtgcctcatccaaggcttcccttcacacccatgctgggcttagtaccaaggggtggtccatcctttgccctatctgagatctcttccccactttaattaactttttagtttgaattttcaggaaagttgtaaagatagtgcagaattcccaaatgtccttcatccagcttgctttgctgttcaccttttttggtac

SEQ ID NO: 710140 - DNA, 841 bp, Homo sapiens
gggtgagctcagccaagaggtggctgcagattgtaggtggagatgctggggagtgtgtggggttttgcgattttccaagctctagatgtacagccaggggagcccctatgcaagactcagcctactcaccacgtggggcgctgtgcagtcatgatatttaccagcagtcaatccggtagggagcctcagaatggtgagttggacttggcaagggcatgcttggctttcagggagtttgtttgcacagtcagattgatttctgctctcctgtgaccagaggacaccggtgcttatcttggtcccctctccaccctttgtttgcctgaccccttggctccctttttaatactttaaaattttaaggttttcctttactaaatatcacagaattttttttattttttcttctttttttaaatctgggagcttaccacccaagctggcccagcctgatgtttttttttgctttgtattttcacaaggatgagataagtccccatgatctctcctgggttttttgctggtgctgcttgttaactcgagtaactctcggcattttctttgcttcctttctctggcatttctgccaaagtgtttctgaacgttcaaggcctgagtgaggttgagctagattgtctcttagatgtgcctcatccaaggcttcccttcacacccatgctgggcttagtaccaaggggtggtccatcctttgccctatctgagatctcttccccactttaattaacwttttagtttgaattttcaggaaagttgtaaagatagtgcagaattcccaaatgtccttcatccagcttgctttgctgttcaccttttttggtac

SEQ ID NO: 710141 - DNA, 841 bp, Homo sapiens
gggtgagctcagccaagaggtggctgcagattgtaggtggagatgctggggagtgtgtggggttttgcgattttccaagctctagatgtacagccaggggagcccctatgcaagactcagcctactcaccacgtggggcgctgtgcagtcatgatatttaccagcagtcaatccggtagggagcctcagaatggtgagttggacttggcaagggcatgcttggctttcagggagtttgtttgcacagtcagattgatttctgctctcctgtgaccagaggacaccggtgcttatcttggtcccctctccaccctttgtttgcctgaccccttggctccctttttaatactttaaaattttaaggttttcctttactaaatatcacagaattttttttattttttcttctttttttaaatctgggagcttaccacccaagctggcccagcctgatgtttttttttgctttgtattttcacaaggatgagataagtccccatgatctctcctgggttttttgctggtgctgcttgttaactcgagtaactctcggcattttctttgcttcctttctctggcatttctgccaaagtgtttctgaacgttcaaggcctgagtgaggttgagctagattgtctcttagatgtgcctcatccaaggcttcccttcacacccatgctgggcttagtaccaaggggtggtccatcctttgccctatctgagatctcttccccactttaattaactttttagtttgaattttcaggaaagttgtaaagatagtgcagaattcccaaatgyccttcatccagcttgctttgctgttcaccttttttggtac

SEQ ID NO: 710142 - DNA, 597 bp, Homo sapiens
tctcttatcttaactgatgtatcacccaaaacatttggtatgtcccaccccgagatagtcccaatgacaaagaagatgaacttctcatacagaagattaggacacggaaggtcactcagccagaactcttaagtattctatcaccaggttcttagctcttttctctggcatcatggtgccttcctctgtgcctttgctcacggtattttcttagctttcctaatatgatctctctcttcctttcctgcataagtaaattcactcaagctctactcacaaacctaggtttgcctttttcccttctctgaaatcccagagcattattatttacatagctaatcctgggaagttattacacagacttttgttgttgttcttgtttataatttcrgataccttatgtttctaaacagattctaagtaatctaaggataagaacatgctcttatactacatctatatttgtcagaatgccgtggacaatgtgtacatagcaggcattataaatactcaatttttttattgaattggcaaaaggaagtgtgaagtgagtgggggatgatacagctgccagatggctaaaagataaaataatag

SEQ ID NO: 710143 - DNA, 1420 bp, Homo sapiens
tctcaaaaaaaaaagaaggaaggaaagtaaggaaagcaagaaagcaataaagcaagaaagaaaaggagtgggacaagcagggtggttccacctccagctctaggaggctccctcatgcaaggaggtggggctgccaccgcctcgtattttcctgcctccatcaaatttcaccgggagaaatccaggcacctagaggaggtggcaaagctttttttttttttttttcattagctattaaaccaaaggggcagaatctaggcgccctagatgtaacttcatttacggagtcagaaaatccacaaaggctgccaaggtggaatgaatgagaggaggacgaccagaaaggagaagtctgggaaggggaccccagatccacacggatgatcctcgctccgtgatacagtcggggacagggcagggagggagggagggagggtggccctgccatctcccaggtgtcaaggtggcggsagctccgccctcagcgcagttggcaccggcctgacccaccacagggccaccgaggccaccgaagccatggggctttcccactcgggaaactcccaccctcgcgctcagaagctgggggcgtcgggagacacaggcggggacctgcggctccacgttgcagcccgggccctgctcggggcaagaggcggtggctccggtttcagatttcaagagggcagccgtggcaaaggctggttggtccatttgcaccctaccttgctctagaacgcggcgcaggagcaaagatccaaactcggggtcaccagcaagcgggggtctcggttctaacttcagcagagacccggcacccgggcaggccagggcaggggccgcctggaccgggagaggctcggctccgagagggcgggcgagccctgcagccctcgggcccagggtgcgggtcggcgccgcagtccagtgcgcggccgcaaggggcaggtgcgaggccggctgctactcgggagccccgcgctgtccctccctgcgcagtcagggctcacctgggccgcccccgccccgcacccctgcgcgctccgctcccacccccagcccggcctcctaccttgcctacccgagcgtcccttcagcctccccgcgccgcgcccgggtcgcttggccggttctgcgggccgtggcgcgacggcgtcgccatggcaaccgggcggcgggctgggcggtgtctccgggaccggaagtggcgtacgcggcccccggggctgccccgcacgtgccaggtccccgcggttgcggccacgctcgggaccgggccctgccagctccgggcccgcacgtgggcgaaccgcggccaccgtgagcccggcctcgcgacctccctccggggcccccatgatcgggggtgcgtgggatctgcggcctgcgggggtggagggccgggagctcccccgggcct

SEQ ID NO: 710144 - DNA, 574 bp, Homo sapiens
ggaccaagatggggctagcctgtgtcagtcaggaagcctccctctcctgctgggatagggccttgcrgcagctcctcctccccgctgaggtcctaggcctgccacaggctagcatgccagtgaggtcagtggcaggagccacccagaagccctgcagatgacagagctgagaacagggacttcacttccatgtgttgccatttcctcactggaaagtccttgggaggtggctgggctcagcctgagctcagggctcttcggtgggtgttgggacaggggcagggcgggcacttgcaggtggcacaggcttcatcaaggcaggacatgggcttcatcaaggcaggagccagagcacccgagccctggcaggggaggtatggcccaggatggggcagggccgtgtgctcctggaacggacatccttctctgccagagacctgctccccaagccctgtccctcccaatccccaggcagcccactctgccctccatagatgaatctaatcccatatattacaataaactgcatttgcctctccccattgccccaccctcccctaccctgagccagcgg

SEQ ID NO: 710145 - DNA, 1357 bp, Homo sapiens
ggtaagaatcaatacatataacacaggggattttaggatagagaaactattccatgtgatattcgaatatttgccaaggtcacagagttagctgggccaagacttaaactcaagtctctgactcccaagttcatgctctttccattaatctaagttgcttcttttgatatggaatataacaaagactacattgactatgaaaatataaacttaggggaggaaaaggcaactgggaaagaaaaaatatatccttagtctgtcaatcagagaaaactgttagcttgagcagcttcaacttggttaatcagtatccctctcttctaccattaagaaagaatacgtacttgcaaaagaattaaggaatctatcctctcttccaaagatgtccgacggctttacgataatggcttccggaaatgcatctctcactactttctctccaacagcctaaacaataaccaaacaaacctgttttgagtttagagacaagtgaataaagcatccattctttccactattaagacatgacttgtatttcaaaggcgatattttcctccagataaaggtaatcatgtaattcataaaactcagttacacagaacttttaaaaaatataatccacaaaaatgtcctgcaccttacagattgggttgggtctcttccaatttttttattttaagggaagcttacattgaagaaggagaaaaatcaaagtagaatttcttcagcctccatttttccttctatttacagattctctggtttgtgtcaaccatctagcagcctgttagaaaaaggacagtatggtggcagcaggctgcaataatggaagtgtcaccagtacctacatatccaaaggaggttggggatagagtcactaatcctcctaatctcaattgctgtaccatccttacttgttatcatctactagcctcctaggcaagtcttcttgttcgatgaagatatcagcacctaattcagtcttcctttctacttccaccaccactggaggtgacatgatgtccaagtgggcttggacttctcaggttcttgagctgctcaactccaacgacctcctcttccttccacctctaccactcttaacttggttacaccacctactgtatcaacatctggaattgctcttcttctgaggtattaaatgaagacatcctgctcttggatgtccatttcctacaatttccagcctgcttgttctttgttcatctgctcctgggatacctgtttctcaaccttctcaagaactctagtgcactgattctgcttccmctgtatcaactcttccgactgttcctgtccttccctctgaattccagattaggttccatagaccatc

SEQ ID NO: 710146 - DNA, 1442 bp, Homo sapiens
catcgaagaaaaactgagaggctgtagctcgacctagtttctgtgaagaattttktcaagtgatccctctcggaccctgagcctctttatttggattttgtgccttgagcaccaagagaatatgcactctgggttgcctggacagctggggtggtgattcacaggaagggtccaagccatcactacacctgactcaagccggaaagagctcccagaggacttcctggagctgccagcctcagcctgagatgcgggatattcgtccccaaggagcgaggagggacagctcgccttctttgcaggtgaggtaggttctactggaggggaattttggttttggctcagtcctgcaggcaaaattagaacggggtggggagagagagaaagtggggaagcgtgtgcatctggagagaggcaaggttttcattccccttccctcaggggctacctcgctttttctgtgtatttttctttgactccattaacttcagtttcctttttctctgtttctgtccccttgatgctgctggcccctgtaaaaaattatctctttttctgtgcatttttctctttccttcttttcattcttactgtctctgccttttttcccctttctccagttttctttcttctggttttccccctctgttcttttaccatcttcttccttctatgtgtgtcttcctgcttatctttctccctctctccaccttttcagtggctgggagcacctagagtgttgacgtcgaggtcgcacattgaactgtaggacagctgtgcttgctaaggtctgtctgcagcaggagtattccactttttcctgacttctcactctgccattctttcctaccatgctcacctctgtggaggcaagtcctgaacctgccaagcaagatgagactgccatgggctcagaaaaatgtctcccagaaatttcctgaacctgcaagcataaatgagagaaggcaggctgggagggagagaatgaccctgagaagtctcagacaaatcctctgctgagtagccctggaccacctcaggttctccaagcttaggaggctggcagagaggtcaaagacagaggaacagtagaaatgtcaaataaacagagaaaagagggcttaggaggcaggcataaggttggagttagcctggaaaaagccttaaataggggatggctttagaactgcccttaattcacttgaaggttttgctagtatctggctgtctctctcgggtactgaaggcagaacaaaaggaaaggacataaatctctgtggtgcaaggtgcagggaacactccttgacaaggaggattaagattcaccaggcagtccgcaaggagaattgatggtctccttgctagaagtcttagagcatgggctaagtcccacctgcagcaggacactaggacaacctgaggggcccccatggggttgaagg

SEQ ID NO: 710147 - DNA, 1442 bp, Homo sapiens
catcgaagaaaaactgagaggctgtagctcgacctagtttctgtgaagaattttgtcaagtgatccctctcggaccctgagcctctttatttggattttgtgccttgagcaccaagagaatatgsactctgggttgcctggacagctggggtggtgattcacaggaagggtccaagccatcactacacctgactcaagccggaaagagctcccagaggacttcctggagctgccagcctcagcctgagatgcgggatattcgtccccaaggagcgaggagggacagctcgccttctttgcaggtgaggtaggttctactggaggggaattttggttttggctcagtcctgcaggcaaaattagaacggggtggggagagagagaaagtggggaagcgtgtgcatctggagagaggcaaggttttcattccccttccctcaggggctacctcgctttttctgtgtatttttctttgactccattaacttcagtttcctttttctctgtttctgtccccttgatgctgctggcccctgtaaaaaattatctctttttctgtgcatttttctctttccttcttttcattcttactgtctctgccttttttcccctttctccagttttctttcttctggttttccccctctgttcttttaccatcttcttccttctatgtgtgtcttcctgcttatctttctccctctctccaccttttcagtggctgggagcacctagagtgttgacgtcgaggtcgcacattgaactgtaggacagctgtgcttgctaaggtctgtctgcagcaggagtattccactttttcctgacttctcactctgccattctttcctaccatgctcacctctgtggaggcaagtcctgaacctgccaagcaagatgagactgccatgggctcagaaaaatgtctcccagaaatttcctgaacctgcaagcataaatgagagaaggcaggctgggagggagagaatgaccctgagaagtctcagacaaatcctctgctgagtagccctggaccacctcaggttctccaagcttaggaggctggcagagaggtcaaagacagaggaacagtagaaatgtcaaataaacagagaaaagagggcttaggaggcaggcataaggttggagttagcctggaaaaagccttaaataggggatggctttagaactgcccttaattcacttgaaggttttgctagtatctggctgtctctctcgggtactgaaggcagaacaaaaggaaaggacataaatctctgtggtgcaaggtgcagggaacactccttgacaaggaggattaagattcaccaggcagtccgcaaggagaattgatggtctccttgctagaagtcttagagcatgggctaagtcccacctgcagcaggacactaggacaacctgaggggcccccatggggttgaagg

SEQ ID NO: 710148 - DNA, 616 bp, Homo sapiens
gcaacaatattgactacaccattggttcttcctctttatactttacatgcagctgcattatgtattatcatgctgtccaattctgcggtatgattatttttcctctgttggtatggttggagagatttgtcaaagcctcttgatttttgtggaaaagaccatgtttaaattgagttatgcctgaaagcttttttactcaggaaacttacttatgatttcttcctgggtcatattatctctttttcccctcctggatgagcagttggggtcaaaacacttacatctgtgtcatatatagagcagcacaatgataaatatatagacaaccaacccaggtgatcaggaaggacactaggaagtggatttatatgaaaaaggaaaacgacatrcaggctgtctgtactaagccccaagaaatatgacctaaaacactaaaaagataaggatgcaatctgatctagagtgaatattattgaaccttcttgtcctcagtttccttacctatggaatgaaataataattcctgcatcacagggcgatcatgaagatcaaatgaaatcacatgtgcgatatacctaacactggatggcccttacaagatgcttacaaaatattt

SEQ ID NO: 710149 - DNA, 661 bp, Homo sapiens
aacatcttattcccaaataagaatagaatgtgcagaaattttagtgatgaaatatgaaggaggagtttctcccacaaaaggtcagaataatgatcaacaaaaataatcctttctgaaacgtctcctgtctgactagaggcttttgcggcaagggagagaaaagaaaggcattattaatggtcgaatcaccattttttccctaataggatttaagacaacataaacataaaattttccattgttattgaatgttccattgttatgtttaattccagtacacttctactctcacaactatattcatttcctctgaggaaattttctaccctgtccttgatgtctttccagtgcttgagactcaaatttccatttgcttacaggacacatctgatcttcagaggccttccgatgaaacatgtgcctagttgacctaggtgtttcctctcgtctctcttcttccccttygttctctccctctgttatgggcactaccaagcacacaggtgcaaaagctggaccttcggttcctccttcatcacttctttcccctctgtctgttttcaaatggctaccacgaatagtgattctactttaaaatatcactaatttataaatggtttccgttataaagctgataggaccatgtcagaataataaaaaa

SEQ ID NO: 710150 - DNA, 661 bp, Homo sapiens
aacatcttattcccaaataagaatagaatgtgcagaaattttagtgatgaaatatgaaggaggagtttctcccacaaaaggtcagaataatgatcaacaaaaataatcctttctgaaacgtctcctgtctgactagaggcttttgcggcaagggagagaaaagaaaggcattattaatggtcgaatcaccattttttccctaataggatttaagacaacataaacataaaattttccattgttattgaatgttccattgttatgtttaattccagtacacttctactctcacaactatattcatttcctctgaggaaattttctaccctgtccttgatgtctttccagtgcttgagactcaaatttccatttgcttacaggacacatctgatcttcagaggccttccgatgaaacatgtgcctagttgacctaggtgtttcctctcgtctctcttcttcccctttgttctctccctctgttaygggcactaccaagcacacaggtgcaaaagctggaccttcggttcctccttcatcacttctttcccctctgtctgttttcaaatggctaccacgaatagtgattctactttaaaatatcactaatttataaatggtttccgttataaagctgataggaccatgtcagaataataaaaaa

SEQ ID NO: 710151 - DNA, 1218 bp, Homo sapiens
tgtaatctcagctactccagaggctgaggcaggagaatcgctggaactcaggaggtagaggttgcagtgagccaagatcacaccattgcactccagcctgggcattggagtgagacgctgtctcaaaaaagraaaaaaaaaaaaaacaagagatggagttttgccatgtttcccaggcttgtcttgaactcctgtgctcaagcgatctgccttccttggcctctcaaagtgctgggattccaggcatgagccatggtgcccagcccattttctattttctaatcactgcttccactctatgccaactcccttcagtcccttagcaatatcttgggcagattcatcactttagcctggtaaagctcaggccagccctgtttcaagccccactcgcatatctggttcacagtgcttcacctcctcttcccagcacaagctgggcactcacactgcttgctgggagaatgaggagattggggagtgggcctggtctagttctgtgatacctgctgcctcctctctttacaaggcctcgcttcctagctgccctcgtgtggagagcaggaaatggaagtggtcaggacacggaagaagacagcagaggtgtcttaatgtagctgactataggtccaaggtgaggaggccccagatccagctggacttggttccatctattgctgctgacctctgaggatagggtagactctgcatagatggtgtcccctctttaacgaagccctgctcagaaaacccagcctagtcttccctggccccaccaggaaatccactttccaatctccagagggagggccctattatttgcttcagaggccacctggacagcgtgtgagccctgcccttcctctcaactttgtgcttcctcctatggagacatcgaggcttttctgcaccttccaaaggtcatgggagatggcctgggggtgccctcttcttgttcctcaactcagacaaggttttcgaaccctgccagcatatgggcagtgctggtggagaggtagaccgccttcagcaatcacagcactgtcaatacttgattccatttctaaatctgtttcccaggctggtctggaactcttaaatctgggccacaagcataaaagaagctgcatgtaattagtttgcttctttccatagacctgtttgttgaaatggagtattctactggcaaatcgtctcatagaaaaagaggtgggtaca

SEQ ID NO: 710152 - DNA, 1218 bp, Homo sapiens
tgtaatctcagctactccagaggctgaggcaggagaatcgctggaactcaggaggtagaggttgcagtgagccaagatcacaccattgcactccagcctgggcattggagtgagacgctgtctcaaaaaagaaaaaaaaaaaaaaacaagagatggagttttgcyatgtttcccaggcttgtcttgaactcctgtgctcaagcgatctgccttccttggcctctcaaagtgctgggattccaggcatgagccatggtgcccagcccattttctattttctaatcactgcttccactctatgccaactcccttcagtcccttagcaatatcttgggcagattcatcactttagcctggtaaagctcaggccagccctgtttcaagccccactcgcatatctggttcacagtgcttcacctcctcttcccagcacaagctgggcactcacactgcttgctgggagaatgaggagattggggagtgggcctggtctagttctgtgatacctgctgcctcctctctttacaaggcctcgcttcctagctgccctcgtgtggagagcaggaaatggaagtggtcaggacacggaagaagacagcagaggtgtcttaatgtagctgactataggtccaaggtgaggaggccccagatccagctggacttggttccatctattgctgctgacctctgaggatagggtagactctgcatagatggtgtcccctctttaacgaagccctgctcagaaaacccagcctagtcttccctggccccaccaggaaatccactttccaatctccagagggagggccctattatttgcttcagaggccacctggacagcgtgtgagccctgcccttcctctcaactttgtgcttcctcctatggagacatcgaggcttttctgcaccttccaaaggtcatgggagatggcctgggggtgccctcttcttgttcctcaactcagacaaggttttcgaaccctgccagcatatgggcagtgctggtggagaggtagaccgccttcagcaatcacagcactgtcaatacttgattccatttctaaatctgtttcccaggctggtctggaactcttaaatctgggccacaagcataaaagaagctgcatgtaattagtttgcttctttccatagacctgtttgttgaaatggagtattctactggcaaatcgtctcatagaaaaagaggtgggtaca

SEQ ID NO: 710153 - DNA, 1218 bp, Homo sapiens
tgtaatctcagctactccagaggctgaggcaggagaatcgctggaactcaggaggtagaggttgcagtgagccaagatcacaccattgcactccagcctgggcattggagtgagacgctgtctcaaaaaagaaaaaaaaaaaaaaacaagagatggagttttgccwtgtttcccaggcttgtcttgaactcctgtgctcaagcgatctgccttccttggcctctcaaagtgctgggattccaggcatgagccatggtgcccagcccattttctattttctaatcactgcttccactctatgccaactcccttcagtcccttagcaatatcttgggcagattcatcactttagcctggtaaagctcaggccagccctgtttcaagccccactcgcatatctggttcacagtgcttcacctcctcttcccagcacaagctgggcactcacactgcttgctgggagaatgaggagattggggagtgggcctggtctagttctgtgatacctgctgcctcctctctttacaaggcctcgcttcctagctgccctcgtgtggagagcaggaaatggaagtggtcaggacacggaagaagacagcagaggtgtcttaatgtagctgactataggtccaaggtgaggaggccccagatccagctggacttggttccatctattgctgctgacctctgaggatagggtagactctgcatagatggtgtcccctctttaacgaagccctgctcagaaaacccagcctagtcttccctggccccaccaggaaatccactttccaatctccagagggagggccctattatttgcttcagaggccacctggacagcgtgtgagccctgcccttcctctcaactttgtgcttcctcctatggagacatcgaggcttttctgcaccttccaaaggtcatgggagatggcctgggggtgccctcttcttgttcctcaactcagacaaggttttcgaaccctgccagcatatgggcagtgctggtggagaggtagaccgccttcagcaatcacagcactgtcaatacttgattccatttctaaatctgtttcccaggctggtctggaactcttaaatctgggccacaagcataaaagaagctgcatgtaattagtttgcttctttccatagacctgtttgttgaaatggagtattctactggcaaatcgtctcatagaaaaagaggtgggtaca

SEQ ID NO: 710154 - DNA, 1218 bp, Homo sapiens
tgtaatctcagctactccagaggctgaggcaggagaatcgctggaactcaggaggtagaggttgcagtgagccaagatcacaccattgcactccagcctgggcattggagtgagacgctgtctcaaaaaagaaaaaaaaaaaaaaacaagagatggagttttgccatktttcccaggcttgtcttgaactcctgtgctcaagcgatctgccttccttggcctctcaaagtgctgggattccaggcatgagccatggtgcccagcccattttctattttctaatcactgcttccactctatgccaactcccttcagtcccttagcaatatcttgggcagattcatcactttagcctggtaaagctcaggccagccctgtttcaagccccactcgcatatctggttcacagtgcttcacctcctcttcccagcacaagctgggcactcacactgcttgctgggagaatgaggagattggggagtgggcctggtctagttctgtgatacctgctgcctcctctctttacaaggcctcgcttcctagctgccctcgtgtggagagcaggaaatggaagtggtcaggacacggaagaagacagcagaggtgtcttaatgtagctgactataggtccaaggtgaggaggccccagatccagctggacttggttccatctattgctgctgacctctgaggatagggtagactctgcatagatggtgtcccctctttaacgaagccctgctcagaaaacccagcctagtcttccctggccccaccaggaaatccactttccaatctccagagggagggccctattatttgcttcagaggccacctggacagcgtgtgagccctgcccttcctctcaactttgtgcttcctcctatggagacatcgaggcttttctgcaccttccaaaggtcatgggagatggcctgggggtgccctcttcttgttcctcaactcagacaaggttttcgaaccctgccagcatatgggcagtgctggtggagaggtagaccgccttcagcaatcacagcactgtcaatacttgattccatttctaaatctgtttcccaggctggtctggaactcttaaatctgggccacaagcataaaagaagctgcatgtaattagtttgcttctttccatagacctgtttgttgaaatggagtattctactggcaaatcgtctcatagaaaaagaggtgggtaca

SEQ ID NO: 710155 - DNA, 1218 bp, Homo sapiens
tgtaatctcagctactccagaggctgaggcaggagaatcgctggaactcaggaggtagaggttgcagtgagccaagatcacaccattgcactccagcctgggcattggagtgagacgctgtctcaaaaaagaaaaaaaaaaaaaaacaagagatggagttttgccatgtttcccaggcttgtcttgaactcctgtgctcaagcgatctgccttccttggcctctcaaagtgctgggattccaggcatgagccatggtgcccagcccattttctattttctaatcactgcttccactctatgccaactcccttcagtcccttagcaatatcttgggcagattcatcactttagcctggtaaagctcaggccagccctgtttcaagccccactcgcatatctggttcacagtgcttcacctcctcttcccagcacaagctgggcactcacactgcttgctgggagaatgaggagattggggagtgggcctggtctagttctgtgatacctgctgcctcctctctttacaaggcctcgcttcctagctgccctcgtgtggagagcaggaaatggaagtggtcaggacacggaagaagacagcagaggtgtcttaatgtagctgactataggtccaaggtgaggaggccccagatccagctggacttggttccatctattgctgctgacctctgaggatagggtagactctgcatagatggtgtcccctctttaacgaagccctgctcagaaaacccagcctagtcttccctggccccaccaggaaatccactttccaatctccagagggagggccctattatttgcttcagaggccacctggacagcgtgtgagccctgcccttcctctcaactttgtgcttcctcctatggagacatcgaggcttttctgcaccttccaaaggtcatgggagatggcctgggggtgccctcttcttgttcctcaactcagacaaggttttcgaaccctgccagcatatgggcagtgctggtggagaggtagaccgccttcagcaatcacagcactgtcaatacttgattccatttctaaatctgtttcccaggctggtctggaactmttaaatctgggccacaagcataaaagaagctgcatgtaattagtttgcttctttccatagacctgtttgttgaaatggagtattctactggcaaatcgtctcatagaaaaagaggtgggtaca

SEQ ID NO: 710156 - DNA, 714 bp, Homo sapiens
ttgctcaggctggagtacaatggtgcaatcttggctcactgcaacccccgcctcccgggttcaagcaattctgcctcagcctcccaagtagctgggattacaggcgtgcaccaccaagcccagctaattttgtatttctttagtagagacagggtttctccctgttggtcaggctggtcttgaactcccgacaggtgatccacctgtctcggcctcccaaagtgctaggattacaggcatgagccaccgtgcccagccactcggctagtattttgtattttttagtagggactgggtttcaccatgttggccaggctggtcttgaactcctgacctcaagtgatccaccagcctcagtctcccaaagtgctgggattacaggcatgagccacagcactcagcctaattttcacttctgttagcatgttctatagttgattgcttttctgtagctaaaacctaacaggtctgcaacatgrctttctagtaaagattttccagttgggccttcaaagcggcaagatgctttgcagacactaagaaataataccagggaatgccttcataagtattagcataaacacaagcttcccattttccagttcaaggaaggacacagagatagaattattgtgagtgcccagcaattacaactaggaccagaggtgtgtgccaaatcctacccctaatttcatttacttggtgtagtaaaag

SEQ ID NO: 710157 - DNA, 899 bp, Homo sapiens
taagtaattctacttaataggacaatttaaatcggctaattttaaagcatctatgtctataaatgaagtggtttgtttgcaaaattcctaaatggaaaaattttatcactgccatcactggaggtttccccatccagatgaggaaacaagacacatcccggtgtgttttaattagctaaacaaaactgagttaagtgaacatgtgacagtttctccagtgggccattccttaaaaacattttgaaatctctgttgctatattgacttaaagtcatgattcatggaatatgtaagacttggctcatagaaacctagtgagatggttagaggtattggcagtctargacctgctgccataaatgtgtgaacaacctttggtaatctcaactattgacctgtatgtttcttctttaccccaatgtagagattcagtcaggctggtgggaaaaatattagggattgttatagagatagacagaaatcttcttggaaggccgagaagtttgcataattttggtaatagatctggctaaaggcagcctggtccctttacctttagttaaatagattaaagtagtaacaaaagaatgtggggaagttatctagctagcttgtttactcatatggtcttaagattaacctttgatgtacggtgggtgcttaagtgctttctacttgggaagtccacaatgtcaattaccctctagtggtattgactcaagtcttttgtcaataaatctttaccaataaatgtgagtctcactagctggtcagggctgagtcgcaactgtttacaggactctgctggagtctgtaagcggctcggagacactcagctggactggcaaagcagaatatctgagtgtcagtgtacttcattcatctgtcactgggtcaga

SEQ ID NO: 710158 - DNA, 899 bp, Homo sapiens
taagtaattctacttaataggacaatttaaatcggctaattttaaagcatctatgtctataaatgaagtggtttgtttgcaaaattcctaaatggaaaaattttatcactgccatcactggaggtttccccatccagatgaggaaacaagacacatcccggtgtgttttaattagctaaacaaaactgagttaagtgaacatgtgacagtttctccagtgggccattccttaaaaacattttgaaatctctgttgctatattgacttaaagtcatgattcatggaatatgtaagacttggctcatagaaacctagtgagatggttagaggtattggcagtctaagacctgctgccataaatgtgtgaacaacctttggtaatctcaactattgacctgtatgtttcttctttaccccaatgtagagattcagtcaggctggtgggaaaaatattagggattgttatagagatagacagaaatcttcttggaaggccgagaagtttgcataattttggtaatagatctggctaaaggcagccwggtccctttacctttagttaaatagattaaagtagtaacaaaagaatgtggggaagttatctagctagcttgtttactcatatggtcttaagattaacctttgatgtacggtgggtgcttaagtgctttctacttgggaagtccacaatgtcaattaccctctagtggtattgactcaagtcttttgtcaataaatctttaccaataaatgtgagtctcactagctggtcagggctgagtcgcaactgtttacaggactctgctggagtctgtaagcggctcggagacactcagctggactggcaaagcagaatatctgagtgtcagtgtacttcattcatctgtcactgggtcaga

SEQ ID NO: 710159 - DNA, 1188 bp, Homo sapiens
tataagtgagaacatgcaatatttggttttctgtttctgtgttaacttgcttcggataatggcctccagccgtatccttgttgcagcaagggacattaatttcatcctcttttatcgccgcatagcattccatgatctatatgtaccacatcacattttctttatccaatccactgttgatgggcaccttgggttgacgccttatctttggtatygtgaatagtgctgccatgaacatgtgtacacatgtgtctttttggtagaatgatttgttttcctttgggtatatacccagtaatgagattactgggttgaatgggagtgccactcttagttctttgagaaatctccgttgtttgatgatttgaaagggatcctaggcatcttcatctcctacatggtctttttcttttactggggggaatacaagctcccctttgatctctgcttcaccccccaaaaccctaacagaaagacatctcattatgtagatgaacatctgaggcacagggacaaaaattcatgtactgctcatcggaccctgagaacatgagggcaagacaggacagggaccactatcatatagtccaggcttccacatggcttgtgtgagtagtccagaccaaaccggagggaggcagccatggggcgggcatggctccatgccccagttctgaaccacagcagactgcacagacccattagggtgtgcttccccaccacatctgaatgctcctcagaagatgtttcatttgagtatttcaggcagttaaccacctcataacctgatttgtcccatgacgtgacacccctttgacacccctggagcagccattggctgtttgaagggggaccagaaggatcttcttcagttctcaccttgatctagaaccaatgtcctgtctccaaggagaactggatattttctcactgtaaggttgttgagctaactattgtttcttccctgtgaccagaacaggaagagcaaaaatctgagcaatactcccacattaatttgaataaccttttattatttgccagatcctatgttaaaaagtcttacctatcccaaaagctgctgcttagggttgtgcagggtgtatttagactacaatgtgaatggcaccccatagggttgggcagtacacaaccggcacaactgtccctcaaggccttcattatcactgc

SEQ ID NO: 710160 - DNA, 1188 bp, Homo sapiens
tataagtgagaacatgcaatatttggttttctgtttctgtgttaacttgcttcggataatggcctccagccgtatccttgttgcagcaagggacattaatttcatcctcttttatcgccgcatagcattccatgatctatatgtaccacatcacattttctttatccaatccactgttgatgggcaccttgggttgacgccttatctttggtatcgtgaatagtgctgccatgaacatgtgtacacatgtgtctttttggtagaatgatttgttttcctttgggyatatacccagtaatgagattactgggttgaatgggagtgccactcttagttctttgagaaatctccgttgtttgatgatttgaaagggatcctaggcatcttcatctcctacatggtctttttcttttactggggggaatacaagctcccctttgatctctgcttcaccccccaaaaccctaacagaaagacatctcattatgtagatgaacatctgaggcacagggacaaaaattcatgtactgctcatcggaccctgagaacatgagggcaagacaggacagggaccactatcatatagtccaggcttccacatggcttgtgtgagtagtccagaccaaaccggagggaggcagccatggggcgggcatggctccatgccccagttctgaaccacagcagactgcacagacccattagggtgtgcttccccaccacatctgaatgctcctcagaagatgtttcatttgagtatttcaggcagttaaccacctcataacctgatttgtcccatgacgtgacacccctttgacacccctggagcagccattggctgtttgaagggggaccagaaggatcttcttcagttctcaccttgatctagaaccaatgtcctgtctccaaggagaactggatattttctcactgtaaggttgttgagctaactattgtttcttccctgtgaccagaacaggaagagcaaaaatctgagcaatactcccacattaatttgaataaccttttattatttgccagatcctatgttaaaaagtcttacctatcccaaaagctgctgcttagggttgtgcagggtgtatttagactacaatgtgaatggcaccccatagggttgggcagtacacaaccggcacaactgtccctcaaggccttcattatcactgc

SEQ ID NO: 710161 - DNA, 628 bp, Homo sapiens
taagaaatactgcatcaatcagagcacataactaaaaattatgtgttaaatgtggttaaattaaataaagctttgagcttgaattaggaatgtgggggaaaatggagatttggagaagaatttcaggcttttgtttgctgaatcactagggagaagcaacgtcacatacgttacatttcaggttttcagaaaactgtgacgactattggaatcagagagcaaagttggaagttaaacacagtgataacttcatattcattttctagttctcttacccacattttccacatataacttttatccaacacattccctgtgtgggagagagtgagccccatcacgttgatccctggaccaggtgggactgggctagtggggaaggagatgggggaaggggtctggggaggagtgggtgtagacaggcgccargagaagactgtggttttagggtatttgtttgtttgtttaattagttgttagactggatttagtttctctccccagaaaagatacagatttgagatgaattttagatgtttttagaacagaaattctactcagttgaatttctgtttttgccatagccatgcaatcgagctggaggaaatgaaagcacaagtaactccca

SEQ ID NO: 710162 - DNA, 584 bp, Homo sapiens
tcaaccaaaacccctcactcttcaccacagcccacaaggcccctcgtgatctatttcctgccaacctctctcactccaccctgggtcatgctcatttctttcatggtgcttcagccagaacatcttttatttctgcttctcaaacatatcaagctccttcctgcctcagaacctttgcagatgctattccctctgtccagaatgcccttcttccagatgcttacatggcgacttcctgtcattcaggcrtcctttgacataccatttcctgaccacccaatctaaaattgcccacagatattctccattacattgcctcaaattgcctcattttactttcatagtgtttaccactctctgaaatcatcttttttttttaaaatgtgcttctttcttgtgattgtcctctcataaaatggtaaaccctatgagaaaagaatcttcccaatcttaattattaaataaatgaatcaaagtaagggtcagaccttccagcaaggattaaaagcaaagagataggaagtttagggggaggcgtagcagtgacctggaagtcatagacaggtgtccaggtcatctctggg

SEQ ID NO: 710163 - DNA, 582 bp, Homo sapiens
aggcaactgtggcctgtcgcgtccatcatgaccatggtcctgggtataggcaggggccaccctctttgtgcatgtttgtaggttttcagaaaaaaataaaatcctaagcccccctaccgactaaacggactcccccttggccaaagggaccccagagaaatattaaaactgagttcctggccatgataggatgggaggttgaacacccctccttataccctctccctcgctaaccaccattagactttctttcctaagagttaaacagaactggcccagcagggwctcccttccctttttgcgggtttttttttttcttttgagacagggtctcacattttcacccaggctggagtgtagtgatgcaatctcaactcactgcagcttctgcctcccaggttcaagccatcttcccacctcagccctcccattagctgggattactggtgcaccaccatgcccagctagtatgtgtttgtctgtgtgtgtgtgtgtgcacgcgcgtgtgccaccatgcccagctagtgtgtgtgcgtgcgtgcatgccaccatgcccagctagttagtgagtgagtgagagtg

SEQ ID NO: 710164 - DNA, 582 bp, Homo sapiens
aggcaactgtggcctgtcgcgtccatcatgaccatggtcctgggtataggcaggggccaccctctttgtgcatgtttgtaggttttcagaaaaaaataaaatcctaagcccccctaccgactaaacggactcccccttggccaaagggaccccagagaaatattaaaactgagttcctggccatgataggatgggaggttgaacacccctccttataccctctccctcgctaaccaccattagactttctttcctaagagttaaacagaactggcccagcagggactcccttccctttttgcgggtttttttttttcttttgagacagggtctcacattttcacccaggctggagtgtagtgatgcaatctcaactcactgcagcttctgcctcccaggttcaagccatcttcccacctcagccctcccattagctgggattactggtgcaccaccatgcccagctagtatgtgtttgtctgtgtgtgtgtgtgtgcacgcgcgygtgccaccatgcccagctagtgtgtgtgcgtgcgtgcatgccaccatgcccagctagttagtgagtgagtgagagtg

SEQ ID NO: 710165 - DNA, 582 bp, Homo sapiens
aggcaactgtggcctgtcgcgtccatcatgaccatggtcctgggtataggcaggggccaccctctttgtgcatgtttgtaggttttcagaaaaaaataaaatcctaagcccccctaccgactaaacggactcccccttggccaaagggaccccagagaaatattaaaactgagttcctggccatgataggatgggaggttgaacacccctccttataccctctccctcgctaaccaccattagactttctttcctaagagttaaacagaactggcccagcagggactcccttccctttttgcgggtttttttttttcttttgagacagggtctcacattttcacccaggctggagtgtagtgatgcaatctcaactcactgcagcttctgcctcccaggttcaagccatcttcccacctcagccctcccattagctgggattactggtgcaccaccatgcccagctagtatgtgtttgtctgtgtgtgtgtgtgtgcacgcgcgtgtgccaccatgcccagctagtgtgtgtgcgtgcgtgcatgccaccatgcccagctagtkagtgagtgagtgagagtg

SEQ ID NO: 710166 - DNA, 654 bp, Homo sapiens
cagtttctaccagaggctacacttcccagcctgcaggatggccagcctgcaggccacaactctgaataagaaaagctctcctctctaagtttatgaaccttgtgattcttcagttgacatttttgacagtgtggttgctctctggataagggcaggaaggtggtgctgtcaagcagagcagctttgtagagggtgtcggggcacagcgtaggtgtcggggcacagcgtaggtgcccattcagagcccgaggactcatccaccagctgtccagtgttggctgccaagggctcaccactgagtcattcctcaggaatggccctcagcccaagggagttccacctccttacccagggcagcccacatccagtgaccaacaggggccactccaccttccagagctccttgaaggatcagctgaggccccgctgaagctctatcartgctatcacaagcagttcaacttctcccactgcccaactctgcttctctcacttcctaaccaaggctgctcgagagctccccagtaaacctcctgcatacaaacgtcccgcccagggaggctgactcacagcaccaccaaggaaccttgctcctcagatgatgagtctctgagcacaatcccaaaagggcaacaacccctgttccccacagga

SEQ ID NO: 710167 - DNA, 644 bp, Homo sapiens
gccccagtttttagcattttgaacaaaaataatgctcccattatttagaaattgctcatatttgctatatgcacatactatctttggtaggtatatgcattgtattctaatcaagaaattcattatgtggctggcatgtggcttatggaagcaacatggtcagatggaatgagtacaggctttgaaactagacagaagccgagtcatgtatcccttgatatatgcttgctagttacctcgattttaagcaatttgctgaatctttttgkgtctgcatttccaaaaagttaagaagagataaacaaatcaacttcccaggtttgaagtcagcattaaataagatatatatatttggcatcaatgagtacagtatatgacaaaatcagttgcactggtggccactgaggaaaacaaatggaaaccacctcataataatgccactaataataactaatagtaaaccaatactttttttaaaaaagttttattgaaatgtaattcataattcttacatttgatgtatacaattcaatgtgaatcaactatctgaataattcaacattttctcagcacccaccagggtctggttactgctggtttccagggtagtggttcttaaatggggacaattggctgagcacagt

SEQ ID NO: 710168 - DNA, 1428 bp, Homo sapiens
ttcacagtggatcatctgacccccagtcaagctgctccagcttatgctgcatgtagactggactagcagtcttcacatagtccttcccaaattgcagtgtcgtgagcaaaataaataattgttgtcttagcctgaagatctgcgatggtttgctactcagcaatacaaaactgatggaccacatgactgagtgtaaagtatatatttgagcaatgaaaataagatgggtgagtggtattgggcccaattatggataacccttatgagggaatcagatgtgttctacttggcaatattaattataagagatataccagatggaggaggttagaaatgacattaagaggccaggcgcggtggctcacgcctgtaatcccagcactttgggaggccgaggcgggcggatcacgaggtcaggagatcgagaccatcccggctaaaacggtgaaaccccgtctctactaaaaatacaaaaaattagccgggcgtggtggcggatgcctgtagtcccagctacttgggaggctgaggcaggagaatggcgtgaacccgggaggcggagcttgcagtgagccgagatcccgccactgcactccagcctgggcgacagagcgagactccgtctcaaaaaaaaaaaaaaaaaaaaaaagaaatgacattaagagaccagaattatggttaagaggccacctcattaactccagcatgagttgataaagtctagcattaggtctatcatggtagaaaaaagcagataaggcagttgagacattaaaaattaccaatagtacacattttctgaataaaaatgagctatgaggttgggattaacactgctgagtctttcagcttttttttttgagatggagtctcattctgttgccaggctggagtgcagtggcacgatctcggcttactgcaacctccacctcctgggttcaagcgattctcgtgcctcagcctcccaagtaattgggactacaggtgcatgccaccacgcccagctagcttttttgtatttttagtagagataaagtttcaccatgttggccaggatggtcttgaactcctgacctcgtgatctgcctgcctcggcctcccaaagtgctgggatcactggcatgagccaccgtgcctggccaagcttgtcttattgagaatcctggtactcttgacaataatgggaaaacttggaaactggcataggaaaatccttccattactagcaagttgagtcaagttcaagtcaacttgaatttactgagagtttccataatgacasacatctgacccatagcaaacataaggcatctgtagacacgcaaaggagaaaatgttgggtgaggttggagcattgtcaggggcatgcaggaatgtcagtcatccacaaggccttgtcaggtggagtttttgggtgaatttactctg

SEQ ID NO: 710169 - DNA, 942 bp, Homo sapiens
taccactaatttcgtatcttaaagcaacacacatttattttcttacagttctgaaagtcagaatcgtaaaataggttagcaggtctgcattccttctgaaggctctagggagaaggcgtttccttgcctttcccagcttccggaggcttcctgcattccttggctcacagctgcatcacacaaccattgcttctgttaccacatcaccttctctgactctgaccttcctgcctccctcttataaggctccttacaattacatccggctcaccagataatycagaatagtctccccccttcaagatccttaactttgtcacatttgatgtatcccttttatcatgtaaagagacatattcataggattggggtcttaggacatgtacatctttagggggccactgccctgctgaccagaggaacttatatgggcaggagatgaatcaggacacctagcgttctgaaattcagtgttatcagagtctcactcatggattgagacggtcccaaataagtcccctgccaggaaacgatgctaaggtccccacagtgcattgccctgtggaggaaggggtgtctatgtgggttgcctagcaatgcacgttaggcagaggaagaatgagagacctgcagaccccgccactctgacacacggccatgctttgggaacaacgtcctggaacaaaagagcaacttagttgagcccaactcagggagttcattggcgatctgcaccagcaagtgcatcgctgtagcagacgacctgcatctgcgtggtagatgtacctgacagcaaccacttaagaacacccggggctgggcacggtggctcacgcctgtaatcccagcactttgggaggcggaggtgggcggatcacgaggtcaggagattgagaccatcttggctaacacagtgaaaccccgcctctactaaaaatacaa

SEQ ID NO: 710170 - DNA, 942 bp, Homo sapiens
taccactaatttcgtatcttaaagcaacacacatttattttcttacagttctgaaagtcagaatcgtaaaataggttagcaggtctgcattccttctgaaggctctagggagaaggcgtttccttgcctttcccagcttccggaggcttcctgcattccttggctcacagctgcatcacacaaccattgcttctgttaccacatcaccttctctgactctgaccttcctgcctccctcttataaggctccttacaattacatccggctcaccagataatccagaatagtctccccccttcaagatccttaactttgtcacatttgatgtatcccttttatcatgtaaagagacatattcataggattggggtcttaggacatgtacatctttagggggccactgccctgctgaccagaggaacttatatgggcaggagatgaatcaggacacctagygttctgaaattcagtgttatcagagtctcactcatggattgagacggtcccaaataagtcccctgccaggaaacgatgctaaggtccccacagtgcattgccctgtggaggaaggggtgtctatgtgggttgcctagcaatgcacgttaggcagaggaagaatgagagacctgcagaccccgccactctgacacacggccatgctttgggaacaacgtcctggaacaaaagagcaacttagttgagcccaactcagggagttcattggcgatctgcaccagcaagtgcatcgctgtagcagacgacctgcatctgcgtggtagatgtacctgacagcaaccacttaagaacacccggggctgggcacggtggctcacgcctgtaatcccagcactttgggaggcggaggtgggcggatcacgaggtcaggagattgagaccatcttggctaacacagtgaaaccccgcctctactaaaaatacaa

SEQ ID NO: 710171 - DNA, 942 bp, Homo sapiens
taccactaatttcgtatcttaaagcaacacacatttattttcttacagttctgaaagtcagaatcgtaaaataggttagcaggtctgcattccttctgaaggctctagggagaaggcgtttccttgcctttcccagcttccggaggcttcctgcattccttggctcacagctgcatcacacaaccattgcttctgttaccacatcaccttctctgactctgaccttcctgcctccctcttataaggctccttacaattacatccggctcaccagataatccagaatagtctccccccttcaagatccttaactttgtcacatttgatgtatcccttttatcatgtaaagagacatattcataggattggggtcttaggacatgtacatctttagggggccactgccctgctgaccagaggaacttatatgggcaggagatgaatcaggacacctagcgttctgaaattcagtgttatcagagtctcactcatggattgagacggtcccaaataagtcccctgccaggaaacgatgctaaggtccccacagtgcattgccctgtggaggaaggggtgtctatgtgggttgcctagcaatgcacgttaggcagaggaagaatgagagacctgcagacyccgccactctgacacacggccatgctttgggaacaacgtcctggaacaaaagagcaacttagttgagcccaactcagggagttcattggcgatctgcaccagcaagtgcatcgctgtagcagacgacctgcatctgcgtggtagatgtacctgacagcaaccacttaagaacacccggggctgggcacggtggctcacgcctgtaatcccagcactttgggaggcggaggtgggcggatcacgaggtcaggagattgagaccatcttggctaacacagtgaaaccccgcctctactaaaaatacaa

SEQ ID NO: 710172 - DNA, 942 bp, Homo sapiens
taccactaatttcgtatcttaaagcaacacacatttattttcttacagttctgaaagtcagaatcgtaaaataggttagcaggtctgcattccttctgaaggctctagggagaaggcgtttccttgcctttcccagcttccggaggcttcctgcattccttggctcacagctgcatcacacaaccattgcttctgttaccacatcaccttctctgactctgaccttcctgcctccctcttataaggctccttacaattacatccggctcaccagataatccagaatagtctccccccttcaagatccttaactttgtcacatttgatgtatcccttttatcatgtaaagagacatattcataggattggggtcttaggacatgtacatctttagggggccactgccctgctgaccagaggaacttatatgggcaggagatgaatcaggacacctagcgttctgaaattcagtgttatcagagtctcactcatggattgagacggtcccaaataagtcccctgccaggaaacgatgctaaggtccccacagtgcattgccctgtggaggaaggggtgtctatgtgggttgcctagcaatgcacgttaggcagaggaagaatgagagacctgcagaccccgccactctgacacasggccatgctttgggaacaacgtcctggaacaaaagagcaacttagttgagcccaactcagggagttcattggcgatctgcaccagcaagtgcatcgctgtagcagacgacctgcatctgcgtggtagatgtacctgacagcaaccacttaagaacacccggggctgggcacggtggctcacgcctgtaatcccagcactttgggaggcggaggtgggcggatcacgaggtcaggagattgagaccatcttggctaacacagtgaaaccccgcctctactaaaaatacaa

SEQ ID NO: 710173 - DNA, 942 bp, Homo sapiens
taccactaatttcgtatcttaaagcaacacacatttattttcttacagttctgaaagtcagaatcgtaaaataggttagcaggtctgcattccttctgaaggctctagggagaaggcgtttccttgcctttcccagcttccggaggcttcctgcattccttggctcacagctgcatcacacaaccattgcttctgttaccacatcaccttctctgactctgaccttcctgcctccctcttataaggctccttacaattacatccggctcaccagataatccagaatagtctccccccttcaagatccttaactttgtcacatttgatgtatcccttttatcatgtaaagagacatattcataggattggggtcttaggacatgtacatctttagggggccactgccctgctgaccagaggaacttatatgggcaggagatgaatcaggacacctagcgttctgaaattcagtgttatcagagtctcactcatggattgagacggtcccaaataagtcccctgccaggaaacgatgctaaggtccccacagtgcattgccctgtggaggaaggggtgtctatgtgggttgcctagcaatgcacgttaggcagaggaagaatgagagacctgcagaccccgccactctgacacacggccatgctttgggaacaacgtcctggaacaaaagagcaacttagttgagcccaactcagggagttcattggcgatctgcaccagcaagtgcatcgctgtagcagacgacctgcatctgcgtggtagatgtacctgacagcaaccacttaagaacacccggggctgggcacggtggctcacgcctgtaatcccagcactttgggaggcggaggtgggcrgatcacgaggtcaggagattgagaccatcttggctaacacagtgaaaccccgcctctactaaaaatacaa

SEQ ID NO: 710174 - DNA, 989 bp, Homo sapiens
atttttaaaaatttaaagcagtacgtgcaggaatgatgttttatgagaagactgaatgattgtgtgtgacattttttctgtaatagagaagggataaaaataaccaactacacctctttgtcccttctgaatattctaatgcgattacaaatatactcaaagccagtggtcctccaacttgagcatgtatcagactcacagggcaggcttattaacactcagatttgcggggtcccaacccccagaatttctgatgagcagatctgagttggagcctaagaatctaaatttctgacaagttcccaggtggtgctgatgctgatgctgctggtctagggaccgcatttggagaagcactgttctaaaatgtaggggccaattttcttcttggtgcagatgggccttcccaggtattgaatccctgcacttggcctttttgagcaataagcttacatgactgagctaattagtccatatgcaggacacagcgcagctgcacttartttcaaagcaggcagtgtgcttctgttagacaagggctgtggctgtgagtgaattttagagagcaattcacagcccagctttggcctgaggacaggcagcatgatccgtcagggtcacattcatgggtcagagaagagctttcatctgtgaggagtccatggcaagagcaactatatttattgcacatcatttagtttctacttaaagaagtgtccctcaaggaggagaaagctggctctgaacttgccaggaaatgcgtgctacttaaaaatacagcatggaagaatataaatcagtgctacttaaatcataggtaacacagtggaaaatttgtggttttcagaataaaaaatctagagtttatacatgagttccaacacttaccagcctgtagctcaaaggagttatgttatccctttaagtttcattgtgtaaaaaggtgaaacccatactcaatcaagagttgatgggaaggttaacaatta

SEQ ID NO: 710175 - DNA, 590 bp, Homo sapiens
ccaacttagccagtaaaccttcaaagtgcatacatttcactctcatgaaagaaaaagtgaaatgcaggctgcatacaaattaggaaagtttgcaaagtacagtctcacactgttcaggttttacccgtatttccagttctttctttgtcttctgtcttccagacacttaatgaagccagctccttcgctaaactccatgttcactgttgcgggctgaggtgaatactgtatttccaataccctcctctttgmggctcttacctggattgcattctccttttctgggcacacagctccctttgaaactggaggaagtgacattagataaatgctgaggtctcttctaggtctgagattctgtgaatctggaattgttcaatggccatgtttaatctcccagtgtgtatttctgatactatctgcaattcttgctctaccccagaaacagtagcggaatccttctcacctagcagaacttgagatatgccttttgagctccaaaactgaaaatatttgtcctatgccttctcttgtatttttttccctctcctttctggaagacttgttgcttagacactactggtctaatc

SEQ ID NO: 710176 - DNA, 819 bp, Homo sapiens
tgacgtgggtgggaagttctgcttccaagggagctcactcccaaggcagacaggtgggttgctgcagcctatggctgtagttggaggcctcagtacctctccactctgtaagtggcctcatgacatgacagctggtttcctccagggcaggtgattcaggagagcaagacaaagctgcaacatcttttgtgaccaaacctcagacatgacacaccattatttctgcagtatcctgttggctacacagatccaccttatttcatgtggaaagactctatgaagggcatggatccagggggtaaggattgagggccatttgaaggctgccagccataggtctgtttgcttctctgtgctttaagatactcaatctggataatttctgaggtcttttctgaccccagtattttatggggataatttccatggatattcatgttctaacagggattctggtttttgtcattactgttgtgcattaagggcatgagaagatgggaagargagtagaatgtatccctggcaccccttaagacaaaccacaaaaaatgctactaggcttccactgaaggtgaaaatcctgactatagggatgagggggctggggcgagctctaggcttttatgacttccctaattatgatgaactttgcaagattgagcttgctgaatattctgacataccaacgttgccttctctattgctcctgggacttctccaagccacatgcataccagtgttatcagcagggaagtgttctgagggggcatcctgacaatatggcattgtcctgtgggacttataatcaggttccaacaa

SEQ ID NO: 710177 - DNA, 600 bp, Homo sapiens
tacttaagatgtctgcagaaacctgaaaaagatgcaacagaaaagtagatacatattttaaaaattgtaaaaatcctcaaaagtataattaaatatctcagagtatttcaaaagtatagcacatcaagcccaagataggctttttctagtaatgcaaagatggttcaatatctggaaaacttttaatataattaatcattcaaataggttaaaaagttgaggacttcataaaaattttaaaggcttttttttggtaaaataagacatttataaataaacattgggatacatctttaatataataaagatgttttccccaagacctgctcctatttcagtactcttaacaagtccaaaccaaactcttatttttctcttataaaaagctaagttgttcatatccttcggatcaacgattctactcttaagaccttactgtttgatatattcatatacattcgtgataaaatatatatgtttggaatagcaaggaattgtacacaaacatgtctttcagtgggatacatgctggttaagcacatgctacatagaaaaaaatttacagccacttaaagtaatgtctacgaactgaygtgaaag

SEQ ID NO: 710178 - DNA, 783 bp, Homo sapiens
ctcaccctcccgagtagctgggattacaggcatgtgccaccacacccggctaattttttgtatttttagtagagatggggtttcatcatgttggccargctggtctcaagctcctgatctcaagtgatcctcctgcctcggcctcccaaagtgctgggattacagatgtgagccaccgcacttggcaacatcattatattcttatgaaaatagttttgactttacagatctgaagggctccaaagaacttccgcacatttccagaatacatttggaggagctaaggaggaaaggctgatgcactgcagagagaacagcccaagagaccccgccatgcccgcctgacctgtgtacagtgtcctctgcagcttagtgctggccccaaagctgcccacactccaccactccctggggccatggctccaggacctccccagggacctggacagcagggaggccctctgggttattcccaaacttgaagcaggcagaagcagttttttgaaagcggctttgctgtgtctgccaagccaggaaagtcaaagccctgccctgcaatgttgctgcagatcctccgtgagtggcagccagtttttaataaggcttatttaaaaacaaaaacaaatcagcttatttacagtgtgaaatgagttgtgttcggccctaatcccctgtggtcagtcagcactcagcacttatgccagccatcctggtccctgcagaccgccttagtgaaggttatgtcccctttctaatgacgagaggcagaaatccagtaatgca

SEQ ID NO: 710179 - DNA, 1553 bp, Homo sapiens
cctcagcttcctcatctgtagaataggagtaacgacacctgtctctccaggttgagaaaataggacacctagttcaggacctggcacattttaggtgctcaataaatactgatagattgaataattggactaatggtggcgtgggcaacccacagtcagtgaataaatgttaactgagcacctactatgtgtcaggctctttgtgctagatgttttctatgctccrtcttcctgaattgctcacactcctgtaagagaggagagattcttatcccctaaggtcgcacagcaaagacgacgcaggggggtgggctgttagtgttccttgcccaactgtggaaagggagtcccagagagggcaggtcgcttgcccaaggtcacgcagaaagccgagggtttccgtcgcgaacccccctccccactcgctcagggctctccaatccgcagctctgcgtgcgggggcgcgcgcatccccccgccgtccgtccgtcagctgtctgtctgggtgtctatgcgggcgcagcagtgcacccttccccagcctcgggcgctgcgcagggacagacaaggcattcgcagcgccctgcccgcgctccacgcccgcagccgccagacggcagcgcctgcgtccgtgcccgccccagccggtgcgcgggagccgcgggggcaaaggcgcagtggccagcggaccatctctcgtgccctcgctctctgcgctccggggcagctgagccccggccacccgctctccaagatgaagaagctccagggagctcacctccgcaaggtagggcacgagggcgggggcgctgggggtgcacctggaggagggttggagagacccgcccccaacgaggcccctggggaaggtctgaggatgcacccagaccagcttcgggctctggggaaggcccgactcagctggataacagggagggtcagggtcacggtctgcgcccccacctctgcccctgccatctggggttcgggatgtagtatgaggggagtcctggttcactgggccaggcctatgaacaggtgtctgcagtccccggaggcgcggggtaggggcggccggggccaggcacccacctcttccccaattccaccctgctgctccccgccaggagctgattgccgggtgtggggggtattggaatacctgagcgttgagctggactcatctgaggggtggggagtgggaggcggtcatccatactgaagccggctccctgagcctgcgggaagactctcctctttcctgcctgctccctccccgcccccttagcttgcctgctgagaccccaggctgcccctcagcagggctgaagggaggcaaagacagggagggggctatcggaggcaggaggatatgatcaatgaagatggaagctggtatgggagagtggctgtgggcccagacctcaggctctccctaccttgccttgtgggattggacctctcagccaagctgtcaggatatggggagggggaatactgggggacgttttctggcttgtaccagtcctaactaaggagtcagatctcctgaa

SEQ ID NO: 710180 - DNA, 1459 bp, Homo sapiens
tcttgggtggctctrgggatatccagcaaagagttaagacagttgcaggcccctcagaatcccacgtgacccttagttgctgagccccagggtctgcggtagacaggctcctccagactcattttttgctggtggctcatggaaagtttggttctttgagctccagcccactccctctggggcctgagtcctcgctgaagctggtcctgccctggaagggcatccagggctggctgcccgtctgcggatccttggccaacagtcccccctgctctgtctccgcctgacttcctgctgccttggccttctcccccaggacagagcagcagcccgccccctctggccacagggaggccttttctcagcacccccattcagaatcactttttgttttgggaaagaaagccttttcctgctcaagtccataggctctgtgagcagcaaccctagaaaattgcagccagggagccaggttcagtggctggtgcctgtaatcccagctgctcaggaggcagaggccataggaccgcttgaggccaagagttcgagactagcttgggcgatgtaccaagacctcatctctacattttttagaagccaggcttagtggtttgtgcctgtagtctcagctactcaggaggctgaggtgggaggattgcttttgttgttgttgttttgtggagtttttttgagacaggttctccttctatcagccaggccggagtgcaatggcacaatcacagctcactgcagccttgacctcccaggctcaagcgatcctcccacctcagcctccctactagctaggatcacaggtgtacaccaccacgccagcaattttttttttttttttctgtagagacagggtctcactttgttgtccaggctggtctggaactcctgggctcaagcaatcttcctgtctcagcctccaaagtgttaggattacaggtttaagccaccttacccagctgggaggatctcttgagtgacaggctaagaaccttctctaaaaagaaaagaaaactgtgggcagtaggagccaaggaggctttaggcatctgctggtcagagtggaaccctggctccatggcccctctgaatctgctgcttcacctctctgaaccccggtgttctcagatgtgaaaggggagaatagctttcccttggcaggggattaaatgagataaattagatgctcaatacatatttttaaaatgtgatcaaagtgcttagcacaaaatgtggcatgcaggaaccctctagatgggatgcatctcattagccagctctcccttgtacagataaggaaactgaggctcagctcccacctccaaccagcctggggagaaagaggctgggagttggtgtgcctggagccagggacaggctaaactggaggcccaggcttgccagcaccatctgtgtgccctgaggacccagcctcagtgtccccatc

SEQ ID NO: 710181 - DNA, 621 bp, Homo sapiens
ccccacccctcagtactaactttctgtattagtctgattgtgcattgctataaaggaatacctgaggctagataatttataaataaaagagccaataaaaattggctcacagttctacagagtgtacagaaagcctggtgccagcatctgttcctggtgagggcctcaggaaacctacaatcatggcagaaggcaaagggggagcaagtgtgtcacatggtgagagtaggagtgaggatggtggtgtgccacactcttttaaacaaccagatctcacatgaattaatagagtgagagtgagaacttactcattattgaaagtacaacaccaagccattcaagagggatccaccgctatggcctaaaaagtccccactaagcccatctccaacatcagaggtcacatttcaacatgagatttagaagggacgaacatcgaaatcatatcacaattcaacttataacaccaaataaaaygaaagatagaaggaagaataaatccaacagaaaaaggaataagaacaacacgtacttcttccatgcatttcttggtgcatggatgttttcaactctgtacagggttaaggcaaaatgtagaaagaaaagaaaatgctatggtgg

SEQ ID NO: 710182 - DNA, 621 bp, Homo sapiens
ccccacccctcagtactaactttctgtattagtctgattgtgcattgctataaaggaatacctgaggctagataatttataaataaaagagccaataaaaattggctcacagttctacagagtgtacagaaagcctggtgccagcatctgttcctggtgagggcctcaggaaacctacaatcatggcagaaggcaaagggggagcaagtgtgtcacatggtgagagtaggagtgaggatggtggtgtgccacactcttttaaacaaccagatctcacatgaattaatagagtgagagtgagaacttactcattattgaaagtacaacaccaagccattcaagagggatccaccgctatggcctaaaaagtccccactaagcccatctccaacatcagaggtcacatttcaacatgagatttagaagggacgaacatcgaaatcatatcacaattcaacttataacaccaaataaaatgaaagatagaaggaagaataaatccaacagaaaaaggaataagaacaacaygtacttcttccatgcatttcttggtgcatggatgttttcaactctgtacagggttaaggcaaaatgtagaaagaaaagaaaatgctatggtgg

SEQ ID NO: 710183 - DNA, 666 bp, Homo sapiens
gttataatttgtgtgatattaattttgggtcatctgacttgtctcagtttgcatttgcctgatgtatctgtactcattttttgtcctttattgtttctgtgttgctttgtttaatcttgaatcctgcactctctatacagttggattgcatttcttttgacaaatgaaaagaggttagtctgtacctatttattgtaacaacctatgtttgattttattctttcttattttttctttccctattttgattttttatatatattttgctaaactgttatatgacatcctgattctataggatactttatgtttgaaagattctttttaaatttatatttctctaatgatgtgcatcataaatggcagaatttactgtttccctctatgaaaaattgactttttttcttttctttttttttttttttttggtagagatagggtctcactatgttgtccgggcyagtcttgaatgcctggcctcaggtgatccttccattttagtctccagagaagctgggaacataggcatgcatgtcactgtgcccagccaggacaaatagactttttgaatgtttccacttcaattcatcttgcctgaaaatctttcatgatttttcaatttataatctctgattttcaacacagataattattataaaaccattg

SEQ ID NO: 710184 - DNA, 953 bp, Homo sapiens
caagtagctgggattaccggtgcacgccaccacacctggctaatttttgtatttttagtagagacggggtttcaccatgttgaccaggctagtctcaaactcctgacctcaagtgatccacccgccttggcttcccaaagtgctgagattacaggcgtgagccactgcacccagccaagatctgtaattttctgtccccatatccccactctccccatgagagagaagccagcttttccgggagacaggttgaaagcagagaagrgagagaaagaaatggaaactaggatgtaggtgctagcattgagttaccggatcaagccttacctgaactctgcctcctcaggttgcatgggccatatatttattatatctatttcataaactttctagccagtacagttcagtacccatagaaggaacaaaggtatacatgttgaatctctaaaattttccagagttaaacatttaggccatttagcttagcattggataagaattagataagacagtcaggagatgagggcttatgcaagctgatgctctgaaccttttacctctgtgtgttccctggcaaaacttcatctagcaagaccatttatctggcaccaatgctggttctaacaccccctccatgttcaagcaaacctatgggtttcagcctagactacgagagagaaacattgatactcaaacacaaatgcagtttaacaacctggaggctattggatgattgtcaaatttagaccctgctcaaatttcttctttggtgaagaatgcatggagcctgaagagtttttaaagtttggcttctgtttcacgctaaccaaatgcatctctttagcagagaggcaacttcctttgaatcccacaaggtattttggacactgaacaggctcacgaacccatctcatgagcaaagtgtaaatgaacccagaaacaccaagcttatg

SEQ ID NO: 710185 - DNA, 583 bp, Homo sapiens
gaggtgggtatgtagcaaaatgtgactaaaggtagagatgtatgctaaatagccttaagttttctaaccaaccagttatgtgtttcttacagatgaatttttttgaaaaaattgtgtggcaccagttcacatgtctttgccaccttaggagtggggaagaggggagatttgaggtaattgcagatcagtggagaaagtggcctttgcatgggcctgtgtaattctagatattaattatagggaacccacttaccctcttatataagctatagtttatgttacatttattggtaagaaaataatatttttatctcccattcgctttgtgctccctccgccccctgagaggctaggtttcattatgttgyccacgctggcctcaaactcctagtagctgagatccaaggcatgtgccaccatgcttagtttagtcctttttttaaatggatgttttattttgagataattgtagaatcacatgcagtggtaagataattcagtgaaatcacacataccttttaattttttttttttttttttttttgagatggagtctcgctctgtcgcccaggctggagtgcag

SEQ ID NO: 710186 - DNA, 1470 bp, Homo sapiens
atcctgacatacttctgggaaatccaaaaatgccacaggaaacaaatactctttacctctctagagatatcattttttttttttttttttgagatggggtctcactgtcaccaaggctggagtgcactggcgcaatctcaacttgctgcaacctccgcctcccaggctcaagccagccatcctcccacctcagtctcccaggtagctggaactacagtcatgtgccaccacgccggctaatttttttttttttttttttttttttttttagtaragacaggggttttgccatgttgcccaggctggtcttgaactcctggactcaagcaatctgctcacttctggactcgcaatctgctcacctcagcctcccaaagtgctggaattacaggcgtgagccactgtgcccggcctctggagagatcttgagtttcataaaaccttcatcttcgaagagctttcataactcaacgaaaaaaaggcaatgaataacattattcccttactaattttgatgggtttattttttttaagccagtcagctttaattcacattggttctctcaactcatctaatattataaaatctttttcacccagggatccaactttcagatagcccaccttaagacttcagaattccctttccatttttcctttttgtaggtccccactgaaatctaaagtcaagggccccaatgttgttctccatagaaacacaatagtctcttccctccctctttcttccattcttcattttcaatttcccaatacctaagtaataggtattcttccttttcaatttcccaatacctaaatgataaaccagcacatctgagaaatactaacactgttcaggaagactaaatataagttgtatttttttttctttatgttggtccagttttggtctccaggtacaagtggataccatctcactgccataagattttcacaagtgaagcagaacagagcaatagagaaatagatgggtctgatcctaacaattccttctgataaggagaacatccctcactcctccagggggcaggacactctgtcatgcctgtctgtaaaaacaaatgacccttgacccttgctctcccactgcggatggggccttgacagagctgcccggggtggaaaggatttctatagcctgctccctgaattagaaggaaactgtcattaaaaaaagagaaaaaaaaatcatatattgcttaagggtctatctattttacaaactgtcccatttgtaaacaggcttctccctgaattggcagccacgtcccctaattcctgtacacatgtgtctggcaactggaaaagggagacagcagcgtgatccaggaattcactctgcatgcaaaaattgctatgtacacattaccgtgcacaaagagaaacagcatcaggcctcccacctactccacacaaaagtagtgaccccacaaagaggtctctgcttac

SEQ ID NO: 710187 - DNA, 1696 bp, Homo sapiens
tgctgcagctgtagccactcgctcggagtgggaagtccaggccacccgagggcagcagcttgtcctcctctgccctcagaggctgtggtcattgaatgagtctggatcttctccctgggttgggggaaggaatccaggtgacccctcaaagtgtctttcaatgtgtgaattggagagctaagttccaggtggcttctgctggggctaccagtaggaggaaaaaggagaaatctagacacagataaaaagcattctgcttcctctgtgccctggacctccagatcaccaccaggactctgtcccaggacagcaaggtggaccctgaaattccctgagcatcgttaccagagaggtgaggggggcacagagcagaaccatggagcctccagacagaatgcacgccagtggtgccccttgaggcagtgtacacagcaagctgtgtagatcccttcaccaatactgccacctaggagctgtgttccagagaagcaggttccagagggaagcacattttgcctagccacagatctaccaggatgcataaaggttgggagaaggttactagctcttcactctccccatccccaagtcagagaggacgagggcctgctgagtaaacctggytgatccacagggtaaagactggcccagcttcacggagagcaggaagtaattgtcctctgtagggctgggccacaagttagccatgcgacctgagcaaaccacttctcagaaacctcattgatggcatcaggaaatgcttatgtgccagtctgctctggtaattccataacatttagtgcggcatgcgacccatccacaaagaccccacctatgacaggcagccgctttggaggtttgaaactcattggcactagacaaatacattttgaatgagccaaaagaagaatgacttattattttagttattaaaaataaagtgatgctcatcctcagggactttttagattgttcattcatggtaagcatcacccaagggctggttctctctcctccatgcctcaattgtgtaacctcataattttagaatgttttggctaaaggaaacctcattcaagccctcctgttcagtgcatgcccagagagggcaggcgctgggtctaaagtcacacagtggcccagcagagaccagagcttagtcctgtggagtctagaggcacaatgcttatttgtcacatttcttcttcgtctttttctatctccctgtattactactcataccttctaacctccactgaaatggtctttcctctgcctttcaaaaagcctgagaatggaaaaacataaagagaaagaaaaatgaaaagatggagagggaatcaagttcacatttcacatgagaagatgtgccatccgatttcagatcacagtcctcgaaaggtgagaactgcgttttctctttgttccaggctgcagtgactgcaccatggatatgagagtgaatgcttgtcaggccatcagttggtgttttccccacatcgcatgtgtgcacaggtacatacctgtgaggcacatggccagggaggccacctgtgcttcttccccagagagagaccttcagaccaccctccatgtaagcaaagggtatgtggtgattacagaaagggatgggctaggcctccaagagcatttagtaagactccattacaaacagattttaggaggatgaagccca

SEQ ID NO: 710188 - DNA, 1346 bp, Homo sapiens
cctccctccccaagaatcagcagccgaggccccccatcccaaccctccccctccacaccccacggtactggaagggaggccctgctcaggccctttcaggacaaggaatggggagctatctgcagaggccttgcaatctgcctccacttctgttacagaccaaaagtggcgaataccccagtgatgtctaacaactcaggaggtggtagcgttctctagacataaggacgctgcggacagagggctggtgagccagcctgacccggatcccgaggcagaaaaagtccccagagctccctctaactaaaaacaggcaggctcacttgtgatctgctggaaagtaatgttctgagactctctgtcctgcctgaaaactgatttaaaaacaaaacctaaaaccagtttggtggtaaaagtcagtccttatctgacagtccctggggcaaatgtccacgattctatcagctagccagaataagaaatcgtgcatttcctgtgggacttttttctgcccttcccctcccaaacttcctctgcctcctgcccacaatgtccccctctccttcatgactgccaccactccaggacctccaagccaacccaagatgttccacggccactgggtttggtttgcactaggcgaagtgagggcccagccgcctcctgttagacttcccttcttttagtggccaggcagtcagccatgagatctatgatgagagtcacctgtctgctaattctacaggtcaccatgctgctaggagcctgccctcagggagcctcacagtgtgagggtgggctggatgacagccaccgtgcctgagaagagcagaacaataaccaagaaacaatgagagcaagggcatttaaatgccatctggatttgaattccatgtttgtttgtccatccagcaaatgttcactgacagcctaatatgtcaggtcccatgctaggtgctggggatatgaagataaataagacatgattcctacccttgaggagattccgtgcaaggggaagagcacatgagagggaaggcaattgcaagatgagaaagtgaaggccttatgggggcawgcagactgctttggaacctttaggagaagcagctcatcttgctgcttaggagaagcttccagcaggtcattcctgaagggaatcttcagtgactgtgaggggttagtcaagcaaagaggaggaaggccaggggagagcatggagtctgcacagtgtcagctggtggagatgaggcacagcttctctggggaggacaagcccctcaggatgactggagcagagagcatcgggtgaaaagccaacaggaagagacaggtgggggatgggc

SEQ ID NO: 710189 - DNA, 1256 bp, Homo sapiens
ttgcatgtgtccagcaggtgctgtctcccccttggactgctagctctcccctggcataggctctggaccaatgtgttctctcttcccacccttctccctgccctggaccctctagtctgatctaatcagcaagctcctattcatccttcaaaacccaggtgtcacttgctctactctgttatctctatatcttgtctctaatacgcagtattagttactccattaaggagctctattaagcagctaccactcagaactgtaatgatctgcttatgtgtctgacttctccatgcaactctgagcagctcaaagtcccggcttacggcaggtgctcaactagccacagagcatctgccagccttttcagtggaagaaacagaaaggccacaggattcgctgattctttttttcaaactaaggaaaaaaaaaaacaaaacaaaacaaaaggaaggctgtttttcttgcctctcttactgacaggaataaacatttcagagcaggagagtcagaaagtggctgtgtgggtgtagaggggaggaaaggacaagtcaggccaccagggctctgggtgcaggcctgctgctgcctcaccctagaatgctctcacctctcccttgacagccctgtgttcaaatgctcagcgcaggacgagccagatgacctcccgattccacgacttcctggcacgagaaaactgatccgccctctgcgagcccagtcagcccattctcaccaactggaggatcctgtgcacagagygggcattcagtaaatagctgtggcatgagtgaatggacccaactgggaccccagcaccctgataagccacaggaggcctctggccacagagtctgccaccaagttcagccaagggcagccaggcacatggagataggagcaggccggagggtgttttctgtgctcttcacaggccagggtggagggcccagcggccccttcctcaggctagagcgagctgcttaccctttttcaactgggactttctcttctctacccgcctcctccccaccccctcctgattgacaccaatgcttgctctgacaagatttaaaaatagacattaagacaaggaagtttaatttttaatgctgtggagaggaagtgaacacagacctggcattccctcacggccacattccaggagtcttggggtatctgccaggccccgcacctgtcccccttcccccagcagaggccagcctgacccacccttaagatctacttgttgcagcccc

SEQ ID NO: 710190 - DNA, 608 bp, Homo sapiens
tagaaatagaggggggcaaagagaaagtaagtcagctccccaccgccccccagctctggcacctcccagcttgtgacactctcttcttaccccttgcagcctcttcttagactctgtcctgaattcattctgtcctgtgtgcttgacgctgagcagctgcagacaggcccagttcttgttcacccagcacccctacagcacccrgaacatattgcgaaggcacagattttggctcccctctgggtcttgaattgaaggaagcaaaaagacgagcgctagaggggagattttatgaagaccttagcaactaaaaaggtttgaagcatctggaaagagctggcacagtgtagagggatgaagatttttcccatgatagagaaaagagcgaatgattctctgccaaggatgaccggtgctactcctgccttgcagggcactgagctaaacggtggaacggtggtgtggtctcccccggcctgggcttctgtggcacagaatgagtgacatgggagggtatctcctgctgctgcttgtccgctggaccccaggacatgcttttatccacaaaggcctgcaaaccaaactgaccccaatcctcccaggaggac

SEQ ID NO: 710191 - DNA, 2390 bp, Homo sapiens
aaaatgtttttaaaaaattgcgaggactttgggaaggacacaatacctggtaacaaacacctgagggcctatccgacgagggtccaaggacaggacctgtcctgcaagttcccagagtatggaacctcccggaagccaagctccagcatcacagcacacatcacagccagcattccctgcacacctgccacggtcaggccagaagctttcatcagcattagaggattttctcacttcatacccacaacagccctaggaggtagatgggactgcccccagtttcgggtgaagaaaatgaggctggagaaggtaggtaactggcccacaggcatccagtaagtgcaggggctgagatcctaatgggagcacctgtgcaactggctgctgctgtacgccaccatcagcgcagagaacgtgggccgcagcttcggcaygtccaggctcaaccaagtcccactgtcgcttgcttgcatgtgacctctggctatttactcaaccacgcggtgcctgggtaaaaactgcaattaacaccaccaacctcgaaggccggctgggacaatgaaatgagatgactgtgcccagcagctcctggcacgtaaagggctccataaacatccggtttctttttttttttccccaaaagtggagaaaatgacaaagatggaggagactgtctcagcaggtagagcgtgtgtaccccgtcaaaggaggcgaggagatgcagcacagcaaagagccgctcagcaaaaacaaataccacacgggcactggccccaacgaccttgaaggttctgcccttgaaatccgatgcggctacaacgtaagaccccttcccgagagtgggctttgctagaagcaagaagggagtgatccaagagcactgggatcctaaaggaatcaaggtcgccacaaaaaaagaaaatgtgcaaagaaacagaaggctggaaaacagcaaaaataaagtttgccggtaaaaatagaagtaactcacatttttagagcacggccgtgtgtgccagacactctgctaagcgttttgtgtaggttatctcactgactctgcacatctctgtgggccggtactattattatccccatctcactggtgaggcagcagaagccgaaagaggttcaggagcttgcccgaggtcacgcagttaggaagggcccactctgccaccctgccccaggccagtcccgagaagccctatcacctggatgcagtcacctgactttggggtgttgcctccagacaccatctgcccagctcccaccctctgctgtccgtcacacctggagatgcctttccagagcagaaaatcagccccaagcagcagcaaacctctccctgccttgctgtggccagcaagcggaaagctagtagctgacgcgaacaagaaaacatgagaggatcaagtaaacatttggggaaatgttgttaaatagagggggaaaaatggggaacttccgttttcaccagctcgatcagctttagggcgaaaccgcaggctgcttcaagcggctgccaaatgcccagccagatcctgccagtgcgctggcactgagggcaggaggaatcaggtttcccaggctggtggggcagggctggccaccgggggaagcggaagtagaagggaagcgaccctctggccaccccaacagcactatcctggagagggccaaagaggcggtacagccgcccagagaccttcccaagttgccaagtttgtcccacacatcggtgatccacgcaagaaagaggatgcagggagggatcaaagaagacccaggggcctgggcacctccaagtacacctgatatctgaatgcacagagggcatggaggggttggtcagggatgaacaataaacagggttctacctctgccaggctcccgtcactgcttccccgagggacagctggccccagggacgccactccacacggcaggaaccgttcatcctacccttgagctgcccagcaagggaattatgaagatgaaaaaggcaaatgctgaaaggaagctgagctcttaatttttgcttaagctaacattcaagggcttacaatgtatcagacactaggccaagtcctatacatggattatctcatttaatgttcttaacagccctacaaggtagttaccaccaacatcaccatttcataagtggacaaattgagtgccaaagagttaagggatacatgtgatgacgagcttgtgtgtggtggaattaggatgcaaacccatgtggtctgacctcacaacccacactcctaaccaacatcctttaccacttcctgaaacagactctcaggaggtagtagaaggaactattaatcttagctcctaacctttgagcatttacagcttcataaaggggatggatagac

SEQ ID NO: 710192 - DNA, 2390 bp, Homo sapiens
aaaatgtttttaaaaaattgcgaggactttgggaaggacacaatacctggtaacaaacacctgagggcctatccgacgagggtccaaggacaggacctgtcctgcaagttcccagagtatggaacctcccggaagccaagctccagcatcacagcacacatcacagccagcattccctgcacacctgccacggtcaggccagaagctttcatcagcattagaggattttctcacttcatacccacaacagccctaggaggtagatgggactgcccccagtttcgggtgaagaaaatgaggctggagaaggtaggtaactggcccacaggcatccagtaagtgcaggggctgagatcctaatgggagcacctgtgcaactggctgctgctgtacgccaccatcagcgcagagaacgtgggccgcagcttcggcatgtccaggctcaaccaagtcccactgtcgcttgcttgcatgtgacctctggctatttactcaaccacgcggtgcctgggtaaaaactgcaattaacaccaccaacctcgaaggccggctgggacaatgaaatgagatgactgtgcccagcagctcctggcacgtaaagggctccataaacatccggtttctttttttttttycccaaaagtggagaaaatgacaaagatggaggagactgtctcagcaggtagagcgtgtgtaccccgtcaaaggaggcgaggagatgcagcacagcaaagagccgctcagcaaaaacaaataccacacgggcactggccccaacgaccttgaaggttctgcccttgaaatccgatgcggctacaacgtaagaccccttcccgagagtgggctttgctagaagcaagaagggagtgatccaagagcactgggatcctaaaggaatcaaggtcgccacaaaaaaagaaaatgtgcaaagaaacagaaggctggaaaacagcaaaaataaagtttgccggtaaaaatagaagtaactcacatttttagagcacggccgtgtgtgccagacactctgctaagcgttttgtgtaggttatctcactgactctgcacatctctgtgggccggtactattattatccccatctcactggtgaggcagcagaagccgaaagaggttcaggagcttgcccgaggtcacgcagttaggaagggcccactctgccaccctgccccaggccagtcccgagaagccctatcacctggatgcagtcacctgactttggggtgttgcctccagacaccatctgcccagctcccaccctctgctgtccgtcacacctggagatgcctttccagagcagaaaatcagccccaagcagcagcaaacctctccctgccttgctgtggccagcaagcggaaagctagtagctgacgcgaacaagaaaacatgagaggatcaagtaaacatttggggaaatgttgttaaatagagggggaaaaatggggaacttccgttttcaccagctcgatcagctttagggcgaaaccgcaggctgcttcaagcggctgccaaatgcccagccagatcctgccagtgcgctggcactgagggcaggaggaatcaggtttcccaggctggtggggcagggctggccaccgggggaagcggaagtagaagggaagcgaccctctggccaccccaacagcactatcctggagagggccaaagaggcggtacagccgcccagagaccttcccaagttgccaagtttgtcccacacatcggtgatccacgcaagaaagaggatgcagggagggatcaaagaagacccaggggcctgggcacctccaagtacacctgatatctgaatgcacagagggcatggaggggttggtcagggatgaacaataaacagggttctacctctgccaggctcccgtcactgcttccccgagggacagctggccccagggacgccactccacacggcaggaaccgttcatcctacccttgagctgcccagcaagggaattatgaagatgaaaaaggcaaatgctgaaaggaagctgagctcttaatttttgcttaagctaacattcaagggcttacaatgtatcagacactaggccaagtcctatacatggattatctcatttaatgttcttaacagccctacaaggtagttaccaccaacatcaccatttcataagtggacaaattgagtgccaaagagttaagggatacatgtgatgacgagcttgtgtgtggtggaattaggatgcaaacccatgtggtctgacctcacaacccacactcctaaccaacatcctttaccacttcctgaaacagactctcaggaggtagtagaaggaactattaatcttagctcctaacctttgagcatttacagcttcataaaggggatggatagac

SEQ ID NO: 710193 - DNA, 578 bp, Homo sapiens
tagccaggacagtcttgatctcctgacctcgtgatccgctggcctcggcctcccaaagtgctgggattacaggcgtgagccactgcgcccggccacatctctcaaatgttaaagtctggacacactagggtgtttgcacaaggctcaattaagaataattataaattgcaaagaaactaaatgtccctcaaaagctgtcaaagggggctgggcgcggtggttcacacctgtaatcccaacattttggtaggcctaggtgggtggatcacctgaggtcargagttcaagaccagcctgaccaacatggagaaaccccgcatctaccaagaatacaaaaattggctgggggggtggtgcatgcctgtattcccagctgctcaggaggctgaggcaggagaacctctcgaatccgggaggcggaggttgcagtgagctgaaatcacgccactgcactccagcctgggtgacagagtaagactcggtctcaaaaaatatacataaaacataaaaaaggctgggggcgggggctcacgcctgtaatcccaacactttgggaggccgaggtgggccggatcacc

SEQ ID NO: 710194 - DNA, 578 bp, Homo sapiens
tagccaggacagtcttgatctcctgacctcgtgatccgctggcctcggcctcccaaagtgctgggattacaggcgtgagccactgcgcccggccacatctctcaaatgttaaagtctggacacactagggtgtttgcacaaggctcaattaagaataattataaattgcaaagaaactaaatgtccctcaaaagctgtcaaagggggctgggcgcggtggttcacacctgtaatcccaacattttggtaggcctaggtgggtggatcacctgaggtcaggagttcaagaccagcctgaccaacatggagaaaccccgcatctaccaagaatacaaaaattggctgggggggtggtgcatgcctgtattcccagctgctcaggaggctgaggcaggagaacctctcgaatccgggaggcggaggttgcagtgagctgaaatcacgccactgcactccagcctgggtgacagagtaagactcggtctcaaaaaatatacataaaacataaaaaaggctgggggcgggggctcacgcctgtaatcccaacactttgggaggccraggtgggccggatcacc

SEQ ID NO: 710195 - DNA, 2432 bp, Homo sapiens
ataataacagcagctgtataatgaaaagaggctccgataaaattacaaaaaaatacaaatttaaaaaawaataataacagcagcggacatttcctgagctaagtgttttctacttattaactctaattgtcaaagggatttatcatcttccttttgtagatgagggcaatggggtctcccaggggggtgtgtggcttgccccaaaatgcacagctattgaacaatgtccaggctctgacaggggcaggtcagtgctaagtcagtctccaaactatgttccttgtcgcatcttgagtaagttaattcagtgcctcccggcatgggggagagaacaatgtagagatcactttcagagactaataataacaactagccttaattgagcacctgctgtgtgctccattccaaggctaagtgctttcactcagatcatctcatctgattttcatgataagcctaggagtaggtacttctattattttcactcgacagctgagggacctagggctcaggtaggttcagtaacttagctaaggttacacatccacgaagggccaaaaccagatatgaaaccctgtagtcagatctacctgtctacatgtttagccaatacactacagtgaggcaaatggaaaagaaatcacaagtagacggggtaggttagaagtttggatgcaactcagacatagtctcattgcatcccatgtatatttctcttcacagcaaattgaaaatggtgattaactgcaaccaaattaaaatttatataatgagttgaactctttcaggagttttctctgtttttctgttgatacctctctatattttaaggcaatgtcactttgctttgcttacaaatatattgaatatgtcaagattactattttgttattacctttgtgaatttccttgtctattttgctggcttgttcttccagatgaaatttattatttgattaatgttgccaaaaatggtaagaaaaatatcaattatagtaataaaatgttttgtggggaaagcatggtaattaaatgattagttgtgaaagtatttctttggtgtgtgcttccatttgattagattgtaagacttttatctgccttggtgtctcattcccggtgtctgtcacagagtttgcacatagccaatgctccactggtatcttttaacaggtttgggggacttggggcttgttttggttttggttttggttttggtttgagtaaatgaagcaatcattggaaaggtgtaggggaagtgcaaagagccataggaccagggaatccgaaatcatggttccaaactagaaagcaagcactttcacttttttctttcaaaatttctttcttccagaaacttaatcctagcacaattttgatcactaggccaaaatcattctacatgtctgtcttagtccctttgggctaccgtaacaaaataccatagactgggtagcttagagcaacagacattgatttctcccagttctagaagctggaagtcagagaacagaatgtcagcatctggtatcctgatctctgactcccactgacctctgggtactaccatcaggctctggtgacagccggcttccaggctgcagactgccaacgtggcagaaagggaaagttccctgggattgcctttataagggcactaatcccacgcatgagggctccactctcatgacctcaccacctcccaaagatccccaccttcaaataccaacacattagggattaagatttcaacagatgaatttggagggaaaacaaacattcagtccatcgctatgtccgccatcaaagaaagaaactcggaaacactcaaatggttacttcccacacactcagcttccaaccttcagcaccattgggtttattttattttatttatttatttattcatttatttttttgagatggagtctcacactctcgcctgggctggagtgcaatggcgcaatctcggctgactgcaacctccacctcccgggttcaagcaactctcctgcctcagcctcctgagtagctgggattacaggtgcccaccaccacgcccggctaatttgttgtatttttagtagagacgaggtttcactatgttggccaggctggtctcgaactcctgacctcgtgatctgcccgcctcagcctcccaaagtgctgggattacaggcatgagccacctcgcccagcatcattgggtttacttaggataaaaatataattgttaacttctcaaggagttacaccttggggggtgccgttccatttattagtaccttggatgttaatcttgttggttggcacgaggggggatcttatggtgcatcggggtcacacttagattcttaccgacctagcttccctctctgctccttgtgtcactcaagcatcttaagtcagactaaaagtgaccgtgtagaata

SEQ ID NO: 710196 - DNA, 2432 bp, Homo sapiens
ataataacagcagctgtataatgaaaagaggctccgataaaattacaaaaaaatacaaatttaaaaaaaaataataacagcagcggacatttcctgagctaagtgttttctacttattaactctaattgtcaaagggatttatcatcttcyttttgtagatgagggcaatggggtctcccaggggggtgtgtggcttgccccaaaatgcacagctattgaacaatgtccaggctctgacaggggcaggtcagtgctaagtcagtctccaaactatgttccttgtcgcatcttgagtaagttaattcagtgcctcccggcatgggggagagaacaatgtagagatcactttcagagactaataataacaactagccttaattgagcacctgctgtgtgctccattccaaggctaagtgctttcactcagatcatctcatctgattttcatgataagcctaggagtaggtacttctattattttcactcgacagctgagggacctagggctcaggtaggttcagtaacttagctaaggttacacatccacgaagggccaaaaccagatatgaaaccctgtagtcagatctacctgtctacatgtttagccaatacactacagtgaggcaaatggaaaagaaatcacaagtagacggggtaggttagaagtttggatgcaactcagacatagtctcattgcatcccatgtatatttctcttcacagcaaattgaaaatggtgattaactgcaaccaaattaaaatttatataatgagttgaactctttcaggagttttctctgtttttctgttgatacctctctatattttaaggcaatgtcactttgctttgcttacaaatatattgaatatgtcaagattactattttgttattacctttgtgaatttccttgtctattttgctggcttgttcttccagatgaaatttattatttgattaatgttgccaaaaatggtaagaaaaatatcaattatagtaataaaatgttttgtggggaaagcatggtaattaaatgattagttgtgaaagtatttctttggtgtgtgcttccatttgattagattgtaagacttttatctgccttggtgtctcattcccggtgtctgtcacagagtttgcacatagccaatgctccactggtatcttttaacaggtttgggggacttggggcttgttttggttttggttttggttttggtttgagtaaatgaagcaatcattggaaaggtgtaggggaagtgcaaagagccataggaccagggaatccgaaatcatggttccaaactagaaagcaagcactttcacttttttctttcaaaatttctttcttccagaaacttaatcctagcacaattttgatcactaggccaaaatcattctacatgtctgtcttagtccctttgggctaccgtaacaaaataccatagactgggtagcttagagcaacagacattgatttctcccagttctagaagctggaagtcagagaacagaatgtcagcatctggtatcctgatctctgactcccactgacctctgggtactaccatcaggctctggtgacagccggcttccaggctgcagactgccaacgtggcagaaagggaaagttccctgggattgcctttataagggcactaatcccacgcatgagggctccactctcatgacctcaccacctcccaaagatccccaccttcaaataccaacacattagggattaagatttcaacagatgaatttggagggaaaacaaacattcagtccatcgctatgtccgccatcaaagaaagaaactcggaaacactcaaatggttacttcccacacactcagcttccaaccttcagcaccattgggtttattttattttatttatttatttattcatttatttttttgagatggagtctcacactctcgcctgggctggagtgcaatggcgcaatctcggctgactgcaacctccacctcccgggttcaagcaactctcctgcctcagcctcctgagtagctgggattacaggtgcccaccaccacgcccggctaatttgttgtatttttagtagagacgaggtttcactatgttggccaggctggtctcgaactcctgacctcgtgatctgcccgcctcagcctcccaaagtgctgggattacaggcatgagccacctcgcccagcatcattgggtttacttaggataaaaatataattgttaacttctcaaggagttacaccttggggggtgccgttccatttattagtaccttggatgttaatcttgttggttggcacgaggggggatcttatggtgcatcggggtcacacttagattcttaccgacctagcttccctctctgctccttgtgtcactcaagcatcttaagtcagactaaaagtgaccgtgtagaata

SEQ ID NO: 710197 - DNA, 2432 bp, Homo sapiens
ataataacagcagctgtataatgaaaagaggctccgataaaattacaaaaaaatacaaatttaaaaaaaaataataacagcagcggacatttcctgagctaagtgttttctacttattaactctaattgtcaaagggatttatcatcttccttttgtagatgagggcaatggggtctcccaggggggtgtgtggcttgccccaaaatgcacagctattgaacaatgtccaggctctgacaggggcaggtcagtgctaagtcagtctccaaactatgttccttgtcgcatcttgagtaagttaattcagtgcctcccggcatgggggagagaacaatgtagagatcactttcagagactaataataacaactagccttaattgagcacctgctgtgtgctccattccaaggctaagtgctttcactcagatcatctcatctgattttcatgataagcctaggagtaggtacttctattattttcactcgacagctgagggacctagggctcaggtaggttcagtaacttagctaaggttacacatccacgaagggccaaaaccagatatgaaaccctgtagtcagatctacctgtctacatgtttagccaatacactacagtgaggcaaatggaaaagaaatcacaagtagacggggtaggttagaagtttggatgcaactcagacatagtctcattgcatcccatgtatatttctcttcacagcaaattgaaaatggtrattaactgcaaccaaattaaaatttatataatgagttgaactctttcaggagttttctctgtttttctgttgatacctctctatattttaaggcaatgtcactttgctttgcttacaaatatattgaatatgtcaagattactattttgttattacctttgtgaatttccttgtctattttgctggcttgttcttccagatgaaatttattatttgattaatgttgccaaaaatggtaagaaaaatatcaattatagtaataaaatgttttgtggggaaagcatggtaattaaatgattagttgtgaaagtatttctttggtgtgtgcttccatttgattagattgtaagacttttatctgccttggtgtctcattcccggtgtctgtcacagagtttgcacatagccaatgctccactggtatcttttaacaggtttgggggacttggggcttgttttggttttggttttggttttggtttgagtaaatgaagcaatcattggaaaggtgtaggggaagtgcaaagagccataggaccagggaatccgaaatcatggttccaaactagaaagcaagcactttcacttttttctttcaaaatttctttcttccagaaacttaatcctagcacaattttgatcactaggccaaaatcattctacatgtctgtcttagtccctttgggctaccgtaacaaaataccatagactgggtagcttagagcaacagacattgatttctcccagttctagaagctggaagtcagagaacagaatgtcagcatctggtatcctgatctctgactcccactgacctctgggtactaccatcaggctctggtgacagccggcttccaggctgcagactgccaacgtggcagaaagggaaagttccctgggattgcctttataagggcactaatcccacgcatgagggctccactctcatgacctcaccacctcccaaagatccccaccttcaaataccaacacattagggattaagatttcaacagatgaatttggagggaaaacaaacattcagtccatcgctatgtccgccatcaaagaaagaaactcggaaacactcaaatggttacttcccacacactcagcttccaaccttcagcaccattgggtttattttattttatttatttatttattcatttatttttttgagatggagtctcacactctcgcctgggctggagtgcaatggcgcaatctcggctgactgcaacctccacctcccgggttcaagcaactctcctgcctcagcctcctgagtagctgggattacaggtgcccaccaccacgcccggctaatttgttgtatttttagtagagacgaggtttcactatgttggccaggctggtctcgaactcctgacctcgtgatctgcccgcctcagcctcccaaagtgctgggattacaggcatgagccacctcgcccagcatcattgggtttacttaggataaaaatataattgttaacttctcaaggagttacaccttggggggtgccgttccatttattagtaccttggatgttaatcttgttggttggcacgaggggggatcttatggtgcatcggggtcacacttagattcttaccgacctagcttccctctctgctccttgtgtcactcaagcatcttaagtcagactaaaagtgaccgtgtagaata

SEQ ID NO: 710198 - DNA, 2863 bp, Homo sapiens
caaatattaagaactatcataatgacccctcatccctttattcaccagaagtaaacttaaaaacaaattttatttagttaaaaaataagtaacttagttaacacaattgatggagtttaaggagttacaccaggtaaaaaaaatctatctatacctttggcttgatttccagaattcacaggcctgtatccttttgatttgtaacatgtggatttgctttttctgtgaagagaagagtaaattattgcatttttttttctttccttagtgagcttataaatacctctaaattggaaataagagttttggaattctagtttcaataagattcaaattccttatatatttaaaggacattaataagcttttcatgacttcaacatagtgaaagaagagattaaatggatgtttatgaatagaaattttctcatgaccagaaattacctctttcatctagcaatatttctcactctgacttttcaatcaactggccagtgaatgtgtttggagtgcctaccatgaaaaaggtgttgctgggctaggtgctgcagaagatatagaaccaagacacagtttttacagttggaaataaagtatacacatgcaaaaagttacctataacatgaaaagtgctgtaaattaagtgaaaagtgagtggtgtaatgagtgctttgttctgaggagggagcaatcactgttgggttcctgtgagaataggctgcagagggctgatgggccttggagggtgcaagacgttacctcctcactatgcggccatgggcaagcatttagtaataggcagtgattaccaaataccttttctgtgtatgccactgtcatgagctctttacctatgtagtgagacattatagttaagacttgttacaagtatggttttggctttatcacaatttcatcaacgaggaaactgcatttgaaaaggttaaacaatgtgctcataattcacccagtatttgattcacagccagggctgcaattccagggctgttgctattgactaagaaactatggtgcctctccaattaattcttcctatatcttcattgctcatctttaatacaaggtacatgtggggtaactagtgaagtgataagaaaagagaatgagttatttataagaaatgtgcttacacactaaatcacagaaagcaattttccccttgaattggagtactggaattgttaaatattctatatttaaatgtcctttatatattatacatacaaatattttgcatacttagaaatttgattttcaaatttctgcatgttttaatttcacttggctgcaataatatacattcctgaggataaatatgtatgatctccagagtaggaaattctaggatgcaatattggcatacctatactgtgggaaaacctagttaatgtgaggtttttttttttttttgcaagttaatctttacctttcttctccatctagtaagttgcaataaatgtcaatttctttttctaaaaatatttttacatcaagaagctgttcatactccagcttctggccttctgtttctgttcgaatctgttgcagttgttcctccatcacccctatctgatcctgaatttgctggagttgattgcagtaatttccttcagtctcagccaaggagcattcataggaatgtttctgaaagaaaagcaaagtgaagcttgaatgtgtaaaagagaaatggcatggtcatcttatattattttatttatttttttgagactgtgtcttgctctgtcacccaggctgagtgcagtggcatgatcttggctcactgcagcctctcttcctrtgttcaagtgattctcctgcctcagcctcctgagtatgtgggattacaggtacatgccaccacacccagctaatttttatatttttagtagagatggggtttcaccatgttggcctggctggtcttgaatttctgacctcaagttatccacctgccgtggcctcccaaagtgctgggattacaggtgtgagccactgtgcttggccggcatggtcatattttaaatattctcaaggtagaaataattatttgtataaggtctgaatattttcaattgaaaatcaacatttgcaagatttaaaaaaattcctctattgtaaaaaggcatttttcaagttttggaattggtgagtttagggacagaattcttgatatttaatatattttatacttttagtcatatgtaaatggttatacgtacttggtgttatatgtatttttatatctgtattgacttatacatattcacacatatattcaattcaatggcgattcctacgtaccacagccatgagggactgaagttctatttccagggtttgcagattgcgttttaattcggtcagctcatttctggctgctgtggctgctccctcatgatcggaaatctgttgttgcagcgttgcactctgaagtgtaattgtcgaaagggttagtgactggcctgattgtctcctgagcaagccctttgtaatttgccatagacctaccctctcgttgaaccaggcttcagcatctttgcggttctgctcagccaagtcctcatactcagccctcatgttgttcaacaggacagttaggtccactcctggggttgcattcatctccacgttcacgttccccccagctgtatattgcaagacttccatttcctagaaaagggatcggtattcatcctcagtggaggattttgattgatgttcatgccctgctacgaaatgaacagtggacttcaagaaggaaattagaaactgtatgaagccactctgcaggcttccttacctcctcatgactttttttgaggtaggtcaattcctcactgag

SEQ ID NO: 710199 - DNA, 1843 bp, Homo sapiens
aagaatggcatgtctgtgcatatttaaattgtgctttgaaaaaaaatagatgtaacacaaatggccaaaaagcatataaaatgatgatcaacaccactaatcactggagaaatgcaaatcaaaaccacaatgagatatcatcacctggcccccatcaggatgaccactatcaagaaaaagaggatgtgaatacattagacacttgtgcattgttggtaggattgtaaaatgatgcaaccactctggaaaacagtatgaaagttcctaaaaacattaaaaatagaactaccatatcatccagcaatctcacttctgggtatgtattcacaaaagcattattcgtaacagccataaggtgaaaccaacccaaatgtccattaacaaataaataaacaaaatatggtgtacacatacaatcaaataaatattactcagccttaaaaaggaagggaattctgtcacatgctataacatgaatgaaccttgaggacattatgctaaatgaaataagccagtctcaaaaagacaaacactacataattctatttatgtgcggtatttaatatgtgacatcaaattcatagaaacataaagtaaaatggtagtttccggggctacagtagttggaaaggaagttattatttaatgagtgcagagttttagatttgcaagatgaaaaagctctggtgctgttttacaataatatgaatatacataacactattgaactgtatacttacactattgaactatatacttaaaaatggttaaaatggtcatttttttcctccctgtggagaccacatcagaggtcataagatggtaatttttatgtgtttttaccacacacacaaaataaacgtcattactttcagtttcacttgagatactgcagtaaaagcaatctggtctttgtgccattttcttatgggttttaratatcaggctaaaagtctataagctcttcaaaatattttcagttgttccatttaccaaatgcaccatgtgcttagtgctatacagaatatatatgtcatggattatctggcattgcagcataactattttctaacagactataaactatgtttacaactagagaaaatgaattatcccattcagttcaacttacagacactacatgccaatgtagtgttttcctgagtagcctaacttctgaaataagtcatataaaggcaagcaactctgctacctaagtttgtctcttagatttgagggttttaagccaaatgaaaataaagacaaaactacaaacaagtaactagccccacataggatccctcactattaacacaaatatacttttatacctacatttctttctccccaagtaaaagtaagtctctaaagcattggttcttaaaactcttttgatttacagctatgtggcataaaagagttacaaaatggtgtgtacatacattcttctggagagtttcaaataatttgactcctaagagtctgtgacccaaaggaaacactaaaaaccttaactctagatactcacatttaggtaaaatccatctaagtgtaaacagaatggtagcttcaagagaattcaaattattaaaggaaaggtatgaatgtcctaactctgagtatatttcaaaggaagaggatactgtttcactgttgatgctagagggcttccatggacccaggtcaacccctgacctagcacgtaggagaaagtcacagatatcctgttatccccagtgcccagcatatcaagcctgacatgtagcaggctttttttttttttttttttgagatggagtctcgctgtgttgcccaggctggaaggcagtggcaccatcttagc

SEQ ID NO: 710200 - DNA, 1843 bp, Homo sapiens
aagaatggcatgtctgtgcatatttaaattgtgctttgaaaaaaaatagatgtaacacaaatggccaaaaagcatataaaatgatgatcaacaccactaatcactggagaaatgcaaatcaaaaccacaatgagatatcatcacctggcccccatcaggatgaccactatcaagaaaaagaggatgtgaatacattagacacttgtgcattgttggtaggattgtaaaatgatgcaaccactctggaaaacagtatgaaagttcctaaaaacattaaaaatagaactaccatatcatccagcaatctcacttctgggtatgtattcacaaaagcattattcgtaacagccataaggtgaaaccaacccaaatgtccattaacaaataaataaacaaaatatggtgtacacatacaatcaaataaatattactcagccttaaaaaggaagggaattctgtcacatgctataacatgaatgaaccttgaggacattatgctaaatgaaataagccagtctcaaaaagacaaacactacataattctatttatgtgcggtatttaatatgtgacatcaaattcatagaaacataaagtaaaatggtagtttccggggctacagtagttggaaaggaagttattatttaatgagtgcagagttttagatttgcaagatgaaaaagctctggtgctgttttacaataatatgaatatacataacactattgaactgtatacttacactattgaactatatacttaaaaatggttaaaatggtcatttttttcctccctgtggagaccacatcagaggtcataagatggtaatttttatgtgtttttaccacacacacaaaataaacgtcattactttcagtttcacttgagatactgcagtaaaagcaatctggtctttgtgccattttcttatgggttttaaatatcaggctaaaagtctataagctcttcaaaatattttcagttgttccatttaccaaatgcaccatgtgcttagtgctatayagaatatatatgtcatggattatctggcattgcagcataactattttctaacagactataaactatgtttacaactagagaaaatgaattatcccattcagttcaacttacagacactacatgccaatgtagtgttttcctgagtagcctaacttctgaaataagtcatataaaggcaagcaactctgctacctaagtttgtctcttagatttgagggttttaagccaaatgaaaataaagacaaaactacaaacaagtaactagccccacataggatccctcactattaacacaaatatacttttatacctacatttctttctccccaagtaaaagtaagtctctaaagcattggttcttaaaactcttttgatttacagctatgtggcataaaagagttacaaaatggtgtgtacatacattcttctggagagtttcaaataatttgactcctaagagtctgtgacccaaaggaaacactaaaaaccttaactctagatactcacatttaggtaaaatccatctaagtgtaaacagaatggtagcttcaagagaattcaaattattaaaggaaaggtatgaatgtcctaactctgagtatatttcaaaggaagaggatactgtttcactgttgatgctagagggcttccatggacccaggtcaacccctgacctagcacgtaggagaaagtcacagatatcctgttatccccagtgcccagcatatcaagcctgacatgtagcaggctttttttttttttttttttgagatggagtctcgctgtgttgcccaggctggaaggcagtggcaccatcttagc

SEQ ID NO: 710201 - DNA, 470 bp, Homo sapiens
caaacttagaagctataaagggggaaatgcccatgtctccgcaaaagccacccacttatctgaaacatccactttttaaactttacgtaagcaagaaataacatttgagtcattaatatataatttttgtggctagttcgttatagcaactacagttagcttaacatatatcagcttataaacatgtactaaaatcctcttaaaagttagcattccaaattatcaaaggtatgttaccccattaygctttttttttttcttgagacagggtcttgttctgtttcccaggctggagtgcaatggcacaatcacagctcactacagccttgacttcctgggctcaagcaatcctccaggctcaagtgatcctcccaagcagttggcactacaggcgtgtgccaccaggccaagataattttttgattttttgtagagacaaggtctcactatgttgcccaggctggtctcga

SEQ ID NO: 710202 - DNA, 3017 bp, Homo sapiens
tgtattttttatagaaatggagtttcgccatgttgcccaggctggtcttgaactcctgagcttcagtgatcygcccgcctcggccttccgaagtgccgatcacaggtgtgagtcactgcgcccggtctccactgctttctaattccaagggatgcgatctgtttagagcctcatctggtgactctaatccttatgaccagaatgtgcagggattctgactgcatccacactgtggaaatgtaacagctttagcctgggcacagaaggcttttctctttcctgttctttcctgaaccagcaaacttcaggaccctgactggactcccgctggaggaatgaagcccagctcctaggacttattaaaaaaaaaatgacattagatttatggaggctgagcgggaagatctctgaactaaaacaattactgaaaagagaggagcattctgatgtgctgttctttggaatttctataattaaaaaataaacacagaactatttcgtaagaaaatacatcttagtgtgcaatccaatgcacatggattggtagatgaaaggtaaaatgcaaaaaagtatgaaaatacagtcctttaaatgtggcaataaagtttaacatactgatataaaatcaatacagagaaaataaatgtacaagtgcaaaaaaattccatcatttgtaaagagaaataaaaagtgccagcctgcttgttcttaaaaatgcctcccgacataattgttcaaagacaaattagacagatgcaacattaaaaaaaaaaaacaaaaccttcttagcatgccatgtctaataaacacatatatacacaaaaactagaacaaaatcatgtgaaaccgagttatcagctggcattgatgaactggtctgtaagttgttgggttacatcataaaatgggatgtttcacatctcaggcacagacgacttggaggttgctctcagagggcagactttttgtagaggaagtccggcttgcttggtgacctccttcctctgcttattgaatcttccctttccaaatctgtatttctctgagctccatggcccagggactcactgtctgccagtcttctaccggatctctcttcgggagcttcagagctacatgcagaaagtgaaggtctgttaggagtcagcccaaaagtcaagtcagtttctactgcagttcgtcccctgacatgggctggaccggtactagcattttctggggctgccaaaggaaagtctgaccgctggggaggttgctcaacgacatccaggtgtatcggctcattcttttgtctgtgtagatgcccgtcaggggaaagtggatattctctcctagcttcttcctgttttttaggagacgtctgaccaggtaggtaggctgactttaagccacttggtgatgccttattgtggctgtacagatcgggaccaaaatatccaccttgcgaaggggaaggggtgcgtctgctgagagcaggagtagaaggtctgcaagcagcatttgagaagtcatagaaatccggatattcctgtggattttctctggtgtctgttttttgctctagtgtgtgttttttccgagaagtgtgtgtatgtctctgtggaatacacgacagatgctggggaggccctggtcctgcttcagaaactgactggcttaattctgtgtctacagcaagctctggaagcctcctgtccttgagtgacagtgtggacacacccaccgcgatgtctggcatcagatcattcagcacaggttgtgttcgctgcagacagagacaaaaatggtgggagggttaaaaaaaggacccatcctctgtagaaatgatgttcactgattttgtttcccaattataaaattaacacattctgtttttgtttttttttttgagacagagtctcgctctgtcgcccgggctggagtgcagtggtgcgatctcagcttactgtaacctctgcctcccgggttcaagtgattctcctgcctcagcctcctgactagctgggattacaggtgcccgccaccacgcccagctaattttttgtatttttagtggagacggggtttcaatgtgttagccaggatggtctcgatctcctgacctcgtgatccgctcacctcggcctcctaaagtgctgggattacaggcgtgagccaccgctcctggctgaatttgtaagaattataaaaatacagaaagctataaaggcaaaaaaatcactccaaccttttgaacagagataccactgttagcattttgaggtctttctttttatgcttttctcctttgcatatatactgatgaaatttagtacctatataatctgtcactaaatctttgagatcaccattttaaattattatgtgacgttctactgcatcaatgaaccattacttaatcattctgctactattggacatctaggttgtttaccatttttcattattatagtcaagactgcaatgaacagacaaataaattacctttaaagggagttttatttaaaatataaagtagtagaacttttgtaattgtagaactgagggcctggcccaacagaatgggaatctggtttatcaaacatgaccaaccttcgccattctggggtgggggaagcagggaggggaggtagagaggtctaagaaggcgagaaaggctttctgtgctaacagtgcccctgcaaacatggtgaaccttcctaaaacccatcggactttctgtcacagtgtggcacacaccaatcccacaaagtgacacagtagaggaagggcaaggattctctgtatgcccagggaaagcagcatgacaggaagcagagtgactatggtgggcagactaggctgattttcccgaaaaagggtaaaactacaaagactgtgctgaaggttgagtgcgctgagctcaactgcagatctaagaggatgctggctattaagagatgcaagcatgctgaacccagagaagataagaagagaaagggacaattgatccagttgtaagcatcatcttttgtttc

SEQ ID NO: 710203 - DNA, 601 bp, Homo sapiens
tggagttacctcccaggtatattattaaacaaaaagcaaggtggaggaaagtgatttttgtatggtttcatttatctaagaaaggaagcaatacacacacacacacacacacacacacacacacagttacttatatttttaaaattaaaaaccaaaccaatactttaaaaaataattgtctgtagattcagaaggaacagaatggagaacaaagggatagaagtgaacatctctgaacattattagtgttattgatttgactttgaaccyatgaaatattttacataattttaaacaaaattaggttttttaatcctttccagaaagatgaaacaggcaatactttttcctattcctcccactaaatacaatcaaaaatcctgaacattgtatataaaacaaacataataattctctgaatataaaacagacataagaattttctgaaaaatggaaaaactatggcagagtggttggggacctcaagacccaaggaataacataggagtcagctccttgggttttctttttgcttcatatatgctgaacctacaactgaagaaattagaaatctggaaacaacaatagacacagatgacaa

SEQ ID NO: 710204 - DNA, 572 bp, Homo sapiens
gtcccctgcggagcgattctcgcgaaggagtcgcaggacagcagacacctaaggggaggtgccgacgatggtgttgccaccgccccagccagagtgctccccgtccctctgtcccttgacgccattcacttattgagccatgtgttcactcccttgctcatttattcgacaaattgtccttcacccctaccctggctgaggctggaccctggggacacccaacgctgacgtatcggtgatccctgcccgcaggtgtgcctgctctggtgaccacactaaggggcaggggggaatttcagtgaacatgttcccaagccccaggccctgggagtggaggcctggccacaggtggcggtaatggtggtgggtgcacccagcctggcctggcytggccgcgggtggcagtaacggcggtggatgcacccagcctcattgttccctcagcaactcattcattcagtcaacatttgttgaacatttacagtgtgagttgaggtccttctcatgtaatgggagcccagacctgccccctacccctgcccccaccaagggaggggggttgatcccctggc

SEQ ID NO: 710205 - DNA, 611 bp, Homo sapiens
tcaatttatgtcagtagagccattcactcacccataaagagccaaatgtttttgtgcaaacgtttttttcaagattatgattctgaaaagtgaactacaattcatttcctggctaacaagatgaaggcctcaattgaacaatgaaccaaaattccctcaaaatagcattggcacaccctgcattggactatgaaaaaaaaaaagaatgcattcggtactggttttaaaataccaaaatgagaaaggaaaagagctgtctggaaagcactctacactgagagacctgagttctggtccttgtggcataaccctggccaaattcattttagcattatttccacaacaggtaaagagatgtggctgaactgaattctctctaagatccctttcatgattcaataaaggacattgagctggaatcaccaccttacactttactgacagattgtcagatctgagtttgaatgacttcaagcacatgcaggcttacacacacacacacttaccaacactttccctatagtaattcagcycacacactcttagaaatcacagcaagtcttaaatgacaacaaacctagccaagggagcaaacaaattagctctgcaat

SEQ ID NO: 710206 - DNA, 620 bp, Homo sapiens
attcttactacaagtaagttggtactatatagcaacatttctcaataatggtcctctccatattctgggatcctgacatgcaacggaagcttaataaatatttgttgaaagaatccagatataggttagcactatagktttattcttacaaataaacattctttagttgattctactgtctcagttcaggtccaaagctagaatcacaaaccaggttgcccacaagaggaagagagaatccaaggcagacgatatctcaagtccaaacaggtaagtagaattagaatattccatataagaagagtaggcctgtagccattgggtgaaagctcagaggaagggctctgatttctaggaggacactaaggttaaagattagtacctagccctggtttacagtaatttttggcctcaggtcagactttttctggtattggagtaggcttgaatctacaaaaggtaattaagtattaaataagtaaagaggagagggatacagaagatggttaaaatggacaagttattacgcttgctccattaacatggaatacattgattagttgggaattgtgagtatcctgataatcaattttccccttaattttgtgagcacatatgtg

SEQ ID NO: 710207 - DNA, 993 bp, Homo sapiens
ggtagggaaagtttggagaaagttataaatctttagaagttgacattgtggtatgttaccgtttgaacttataattatagcttgtgaaaggaacagtggcaaggactcagcaattcatctttctttcaagatcaaatcttcgaactcttcatctttgaaagaatgtagacatgtctctatataatacaacaagagagggaatataatttattaaacacaagaaaaattttctgaaaatccttggttgctgatgttctaagaacagttttgataattgtagatttgaaatgtatttttaaacaattggctactgcacatggaaatattatagctgtcacatccacatgtatctcctgttttttttttttaatgatagtatatttttgcagttacttgggttgggttttcttgccttttcttgaagtaaaaggactctgaacagtttctagcttggagaagaagccatttcttaaagagtttggttctggcactgtgtagccacttacaggtcttagagtttacagattttggaaagccccatgtcttatgtattgattttcagatatattattggatgagagtgaatattataaaatttattctctagtttcctggagamaaggaaatctctgtcaatttaaacagcaaagggaaaataaaaaagtctttttgaaagataaacatgatcatttgttagcaggaaaaatactcaataagagatacaaaattatttaattttattcatctaattgttttaagacccctgggtcaaagggtttcagagagaggccataaagtattagcctggtaatttgattgggggatattctgacctcctgacactgctggcatcaggatccttcctctagttttcttagagcattgaaagttgctgattttggtacaggtaattatcttttgttataagtgactttttgaagcctttgttatattactacaatcagtttttctgtcttcaaatatgattgtacc

SEQ ID NO: 710208 - DNA, 639 bp, Homo sapiens
aatcagagactatatatattctgcagctactaaaaacagtgcagaaaatatttatgctattaagtaaaataaaactaggccccactatggatggtatgtgcagtatggtccctttttaaaattttttttggcaggatcttgctctgtcgcccaggctggaatgcagtggtgtgatcatagcataacctygaactcctgggctcaggtgatcttctcgcttcagtctcccaaagcactgggattagagcactccaccacaccttaccttccattttattttatttttaaattttattttattttaagttccagtatacatgtgcaaggtttgtaggtttgttaacctaggtaaatgtgtgtcatggtggtttgccacacctatcaacccataacctaggtattaagccctgcatgctttagctatttgtcctgatgttctccctccctctgcccactgcctcctgcactgacaggccctggtgtgtgtttttcccctccctgtgtccatgtgttctcattgttcagctcccacttatgagtgaagacgtgcagtatttggttttctgttcctgtgttagtttgctgaggatgatggcttccagcttcatccatgtccctgcaaaggacatgatctcattc

SEQ ID NO: 710209 - DNA, 632 bp, Homo sapiens
ttttgagacagagtctcactytgtcacccaggctggcgcaatcttggctcactgcaacctctgcctccctggttcaagcgattctcctgcctcagcctcccgagtacctgggactaaaggtatgagcaaccatgcctggctaatttttgtatttttagtggagatagggttttgccatgttggccaggctggtcttgaactcccgacctcaagtgatccacctgccttggcctcccgaagtgctgggattacaggcatgagccaccacgccctgccaagtccacgctttttaaccactgtggacagtcctgcccacggcacttcacaggcccagaagatgaaaaagcccacatcccttcattcctcctgaccagcctcttctgctctgacttgcaaggaactcaagctgttctgcattccagggccaggagaggaccaggacaaggcgagagcattcctgggcattgctttctttgcatttcatgagatgctgtgagctcttcagagggagtgataggctggtttccggatggcacacctgtggccacacattcgtggtcctgctttgatgagtggctgcctctgaaagtgcagggcagggagagagatgcagacagcaggtgcaggttctg

SEQ ID NO: 710210 - DNA, 2415 bp, Homo sapiens
tgtaacatacattcaatgttcacttcagggtggggttttagcattaaaatgaagtgaaatctggctctttatgtaaaaaagtgaactgtaggccaggcgcggtggctcacgcctgtaatcccagcactttgggaggccgagacaggtggatcatgaggtcagggtatcgaaaccatcctggctaacacagtgaaaccccctctctactaaaaacatacaaaaaattagccgggtgtggtggtgggcacctgtagtcccagctacccgggaggctgaggcaggagaatggcatgaacccgggagtcagagcttgcagtgagccgagatcatgcctctgcactccagcctgggtgacagagcaagactccagtctcaaaaaataaaaaaaaaataaaaaagtgaactgtagaaccagagacagtttgtgtgcagtctctataagctgacccaaagtggcttgggatctgcagctatttatcaggaaagaatgtttagaagactggtcctctgtccagttggagtggtgggaccacaaggctgagaaaggggtgagagtgttggtcaactggtaccaggtggtctatctgggtcatttgggaaatttcccggttgtagttgtttcagcaatacttttcagtagacctgagctccatcatatatactcagccatcagccatcctccccagctcccttcctccttcttcagttttggggttttccttccatcttgactctccccaccctagtgacactataacactcttcatttgtaagtaataagattctacagcaaattgtgaacacgatggtcaccaaaaatagatcctttagtgtgagaaataaaaataaaatcctaagcccaaccaattgaacaggccccctcttggtcaaaaggacccctgacaaaccttaaaaattgagttcccagccaggacaggacaggacattggatatgccccattatatacttcgcccttgctaatcacgattagactctttcctcagagttcagcaaaaaccagcccttttgaaagtcttgccagacttccttctctcgttgccactttgacataacacctaccagcatttctttctaataagagactaacataagagaccactggtcatggactggttctggcaggtttacagaggctgcttacgggatgctttgtgtcttccatttcatcttttgatggatagaacctaattttaatgcgtttagatgttaagtctccaccccaaagtgaatatgggacgtaagcaacatgcatggttgccttctacacatgcatgcccccttcatgaatattcatagctcctcctataatctgttgaatatatatgcttagccgacctgttcagcattaattcctgtctcacccttctcttcctccagtgcctgctttcggtttccaccagaggccatgcttcccagcctgtgggatggccagccagcaggctgcattcctttataagaaataaagctcttcactccaaatttatgaacctcatgattcttcagttgacaagtagagtctttggtctggatggtaatgctgctgagtggatgttaaacactagcacagattaatcagtaccccaggctcacctttccctcagttctaatggcaattaatctcaaagacctgcatctgaattcactggtgttaggatttgcctaagcctacggtaggataattagtctaccctgttcacgcaaggatgaggtgcctgtgtaatatttctgacatatttctccgtatttcaaaccctgctcattttccctatgaaaaacagaatacttgtgtgacccagtgggaatcccaattttgactaaaaatggatgtcttgcccatcctggcaaatgggaatgaagaagtaatttaataaggtttagaaaaaataaagaagtgtgatggttcttgaatcgaggtgttgagtagcaaactgttaccctctagtcccgtaggaattaagccattgtggtcagaagacaggcagtgatattggccattttgcagcgagatctccacctgawgctgtcacaatgcaaataaggcacatactctgcctattaataagttaaatgtactgttgactttgctttttacaccttcacttccctgtaaacataaatatttacatttgtgaggacatttacaaagcactttcacagatctctatgagatcagaaatcaagccaagaaaggcaataatataccttatggaaaaaaggacaagactcagagagggaagtcaaataaaatcataccaacagagctgggaaaaaaactcaggtgtcattgatccacaccctgtcactgtccacgcagacctcaaggaatttagttccaaagggatctcatgttttcccaaattgcatccttcctcttgagtttccactctgagaat

SEQ ID NO: 710211 - DNA, 2415 bp, Homo sapiens
tgtaacatacattcaatgttcacttcagggtggggttttagcattaaaatgaagtgaaatctggctctttatgtaaaaaagtgaactgtaggccaggcgcggtggctcacgcctgtaatcccagcactttgggaggccgagacaggtggatcatgaggtcagggtatcgaaaccatcctggctaacacagtgaaaccccctctctactaaaaacatacaaaaaattagccgggtgtggtggtgggcacctgtagtcccagctacccgggaggctgaggcaggagaatggcatgaacccgggagtcagagcttgcagtgagccgagatcatgcctctgcactccagcctgggtgacagagcaagactccagtctcaaaaaataaaaaaaaaataaaaaagtgaactgtagaaccagagacagtttgtgtgcagtctctataagctgacccaaagtggcttgggatctgcagctatttatcaggaaagaatgtttagaagactggtcctctgtccagttggagtggtgggaccacaaggctgagaaaggggtgagagtgttggtcaactggtaccaggtggtctatctgggtcatttgggaaatttcccggttgtagttgtttcagcaatacttttcagtagacctgagctccatcatatatactcagccatcagccatcctccccagctcccttcctccttcttcagttttggggttttccttccatcttgactctccccaccctagtgacactataacactcttcatttgtaagtaataagattctacagcaaattgtgaacacgatggtcaccaaaaatagatcctttagtgtgagaaataaaaataaaatcctaagcccaaccaattgaacaggccccctcttggtcaaaaggacccctgacaaaccttaaaaattgagttcccagccaggacaggacaggacattggatatgccccattatatacttcgcccttgctaatcacgattagactctttcctcagagttcagcaaaaaccagcccttttgaaagtcttgccagacttccttctctcgttgccactttgacataacacctaccagcatttctttctaataagagactaacataagagaccactggtcatggactggttctggcaggtttacagaggctgcttacgggatgctttgtgtcttccatttcatcttttgatggatagaacctaattttaatgcgtttagatgttaagtctccaccccaaagtgaatatgggacgtaagcaacatgcatggttgccttctacacatgcatgcccccttcatgaatattcatagctcctcctataatctgttgaatatatatgcttagccgacctgttcagcattaattcctgtctcacccttctcttcctccagtgcctgctttcggtttccaccagaggccatgcttcccagcctgtgggatggccagccagcaggctgcattcctttataagaaataaagctcttcactccaaatttatgaacctcatgattcttcagttgacaagtagagtctttggtctggatggtaatgctgctgagtggatgttaaacactagcacagattaatcagtaccccaggctcacctttccctcagttctaatggcaattaatctcaaagacctgcatctgaattcactggtgttaggatttgcctaagcctacggtaggataattagtctaccctgttcacgcaaggatgaggtgcctgtgtaatatttctgacatatttctccgtatttcaaaccctgctcattttccctatgaaaaacagaatacttgtgtgacccagtgggaatcccaattttgactaaaaatggatgtcttgcccatcctggcaaatgggaatgaagaagtaatttaataaggtttagaaaaaataaagaagtgtgatggttcttgaatcgaggtgttgagtagcaaactgttaccctctagtcccgtaggaattaagccattgtggtcagaagacaggcagtgatattggccattttgcagcgagatctccacctgatgctgtcacaatgcaaataaggcacatactctgcctattaataagttaaatgtactgttgactttgctttttacaccttcacttccctgtaaacataaatatttacatttgtgaggacatttacaaagcactttcacagatctctatgagatcagaaatcaagccaagaaaggcaataatataccttatggaaaaaaggacaagactcagagagggaagtcaaataaaatcataccaacagagctgggaaaaaaactcaggtgtcattgatccacacccygtcactgtccacgcagacctcaaggaatttagttccaaagggatctcatgttttcccaaattgcatccttcctcttgagtttccactctgagaat

SEQ ID NO: 710212 - DNA, 3133 bp, Homo sapiens
aaacaggaagaaaaaaaaaaaamcaggagaaaaaagggcacaaatacaaagaaaaattagtacagaagaaatgaattcaatcatatcagtgaccagaatgctggccaaaattcttcagttaaaagacataaatcataagaacacagaaaacttgaaagtcaaaggatggaaaaacatcatggtatatgttgtacactgtacatataaacaaaattttttggcaattatacctcaataatgttggagaaattaatgaaacattttaaaaagatatcagacaaatactgttttgtttttacttaggcaatgctattaatatagcaatatatatgactggagaagctataaactacagtaccaccagagaaaatacaagaagggaagcattttaaaaataaaaataatgattataggttagtagtttgcttccctaagaagaaatagcaattttaaaggtatccacctaattctgtaactcaaaatatagaacacataaatatgtacagatataatgtttcacaagggatcaatggcaaatctaccgttagacggagacctgaatggttggtgaagtatagatgaagggaagagccaaatgtgcaggtgcagcagctgtgcacgtttcccacaatgcataaaacatctcgggagagatgaaatatggggaaagtaacagcagtaaagaaaaaagaagcagctgggatttccagtctaagaaaagaagaatagagaacttgaggtgcagacacaaaagcctcgttcctgtcattttagggtttcttctctgagaatggtcatcctgtgtctaggcacagcaggccttgggaaggtagcctctatatctccaaagtttctgacctatactgttgtactccttatccgacttttaagagcaacatgcccagttaatttcagttacccctaaggatggttgtgtatcaagacattctcagacatccacagactggcatgaatgagcatacttgctgaggggaatcacacagagggtgtgcagctttcagcctcaggagagaggaaaggagcaggagaaaactcacgcacgcactgctctcgacatcagggagccatacatagccaccggggttacctcatatgcgataagctgtttatagatgtgttttccccattggattctgtcttgaaggagtcaagtatttttccaatctttgactacttgaggtatattacactcctggatcagaaaactgaagtcaagagtcagctccatctcctatgtggtggccctacattctcccctggctgtgaactgtgcttattcctgcctctgtggcttgctcacagaagccccagtgcctcaaatcttcacatttggttccaccttttcaaatgttatgtgattttcaaagccaacgttaaattccaccccttccatgcagccctccagctcagattccttccttttctgaaactggatgccatttacatgcaggtactgtgttatggtctccctccttggtttcctaagcttgagccttgggtacaagttgcagggcagggttcatgcttattaatttgcttgtatcatacacagggaaaatgctgctcaaatgatccactgttggattgatggagacacctacatgaatgacatcacttgtcttggattcttttagcttagaaatgcaatgattttatgacaaagtttctaaatttcacaaaggtgaattttgaaattgattttgaaataatttaattctagctatttcttaaactccaatatacctgctaagttatatggtaatatggtctttgtgaaaatagatagtctatttatgcatttctaccaggtcacagccattacaaacttcatgagaatatatttttttgtttttttttgttttgttttgagacaggctcttactctgttgcccaggctggagtgcagaggcaccatcagggctcactgcagcctctacctccatgggctcaggtgatcttcccatgtcagcctctccaggtagttgagactacaggtgcacgccaccatacccagctaatttttgtatttttggtagcaatggggttttgacattttgcccaggctggtcttgaactcctgggctcaaatgatcctgaccacctcagtgtcccaaagtgctgggaatataggcataagccaccatgcatggccaagagtagatttgtccctgttcttccaaacttcttatttagttttgtaattcatcatcatcatcaactttgaagtcccttctgtcaagtgatccaggcttattgaaatgaatacacaattggaaagagtggggaaaccgtttctcttctcataaaaagagtcatatttttctttttctcacaagaaataccttggggtagctgcatgagaaatgtggacatttttccataaagcaccaaaagataatacagaacaaaacacaatatgtcagttcagtgaatggaggaaagaaacaggaagaaaaatgtcttttagctgcagcctaatagggcttcacagatatctctatggtaaaatataaatgaacccgtcaagagttgttgacatgtggaacaataataacatcccaactaccttgaaatcttgtttaaaatgaagactcctggaggaacagaattgagagcatacttcagcaaaggagctctccataaatatgataaagtcatttcaatatccactgccttctcttagctgttcccaggtgcttatgtcctcatgtgtcccttgtgtccacagatacccaagcacttgttagcttacacatagctctagtcatgacctttgggttagcagcaaacagctggtccagaacccttcaccccagaaccagctgaatccacaccaacatctgtctgtctatctctatctatctatctctcaactatctatctatctatctaatctatgtattatctattataaatctgtctgtcatctatctagccatcacctatcagtctgtctacctatttttctatcaacctattagctatctattcattatttatcacctatttatcatctatctatccatctattatctgtttatctgtctatcatctgtctatctacctaatctatgtattattatctattatcaaactacctatcatctatcca

SEQ ID NO: 710213 - DNA, 839 bp, Homo sapiens
tttttaattcttccttctatgtttatataaaaattggtattgtaccaaactctkaactcttatacaggaagggaatatttaaattaaaacttttgacaatttctcattctgcaaatgctgatgatggcttgctaaattaggtcccaaaataactgattttggctgatccacaaattaaaggctatcccaatatcgaataccattttttctgccacattttattttttgatgggtatttctaactgaagtcagtggaaggatttattgctcagctctgttcaattaaataaacactgagttcttactatgtgaggatacacaaagattaaagaacatgaatggctcacatctctcaagagctcagttcctcttcaatagggcttagtttatgtcttttattaatagcactcttagctctgataatatcacttcttcctattgctcttctttccctagagtatgcaatggtttcctgatttagttaatttctgggtatattcacaatcatctgcttggcttctccctatcatatgtatatctaattccctatgttatgttccctccactggaaagacgtgggaatgtttgtttttctggacagactgactgataaaggtgtgaacattggcacgtgtaacaaggggaggtccacagatacgaaatcttctgtttctaagagaagtgcattggtaaataaatgctgaacttaaacttcaaaatggtctgtaaaatagttttcaggctcccaaattgcacaagcaaaaaagtggtcatactcctttatccaatttcgccatgaatgaatagataaggaagcagctcccaaggtgcagagccca

SEQ ID NO: 710214 - DNA, 987 bp, Homo sapiens
tggcatgttatgtttatgatgtataattaattcaattcttgtctctaatcacctttcacctccccttatccacacacacacacacacacacacaaacaaggaaaaagataccccgaagaggagcaaaagtacccaatgggcatttcaaaataggtgtagtggttcggaaggaaacatgtcaatatttccctctactcaatttctccttgaacgcctgaagtacactgtggcgatgaagcagatttttattcctacttattgggtaagtgtgagaaaatatttttgaaaatattttgcaaattatttaatgtcgagtttaattcttccatgctgctccaaaccaaatgcccccaacccatttttctatctagtttcatatgattagtgcttccctatttattacaaaggtgtgggtgtgtgtttattttccctagaacaaatttacaaaacaaatataagtcattgggattaggcagatgctgcaaaatatgttggatagtcatttttaaaatgacaatgaaggcaaatttttggtctacctgcaagctaagcattgtaggaataacaaaagtacatccattgagttyagcagcctaagcatgatttttattagctaagaggttttcttatttctgagagaattatatcctgtagttgacttcccttttctctgggtgctgagggaggacagaaccatatttaagactgttttttcttttccaaatactaatatttgaagaaatgaaatggctaagttagcatactctgaaggaaggtcttccctaaaacagtgggcatcactgtcttttacatattatcagcttgaactcataaacggggagaaattttaaaaaatctgggtagcttgagaaaacacaatgctaaatgcataaatagaaggcatattctccactctgaaaatctgtttctcactctctatctctcaaagcatgtttggtttcttgtttccgtttttgttttttgcaa

SEQ ID NO: 710215 - DNA, 1865 bp, Homo sapiens
catgtcccttctctggatcaatatctgtaggctatacgtagaatatatattattttctctaaaacttccttgctgccctctgaatatttatcaaatcttgccttgtgctaccaacattgcctcagaaattatccaaataatcacctctcaccctggaggaggcacgaactcctgtcatttcctattttctggtgacacaatgatcgtttccacagtgcttcccaaggctcttaggtttttggagcatggggtatagaagactctcttctctttctgtttgtccctggtgatcatttgaccataaccatgttgttctccaaaacgtcttagttcatagatcaaactgtattagattaaacgagatatgacttctgctccaaagtgcccctagagcgccttgcccttttcaaaccacacacttcttagggtcaggtgaattaagttaaatatgattcccttcaatgttaaagtgataggaatgagtctctgcacttcagtgctttaattttgtaaccaggagaggtgatggttgcattcagaaagaagagaaagcttgtgtctgttctctctgctgaccactggcatgccttgtgaaggaccaagtcctgcttgcggtatggtcagccttagaactgactgtgagccacagggaacaagggcttacactgtcttctggggacattggcatcagcccagaggcattctcaggctttgacttcaaagcaacagcaaaaccaaaatggataaagatagggtcagtcaaatgcaacgtcttttcctgacagcaaaacaaacagagccagtgtcaactcaataaatcctgccacgtaaattggtactctcctgcaggctaatagaaacagttacagagagtggaaaacttgacttcactaaaaattactgcagttacaaataaaggaagggggtatagtgtatttctaaaatgtgcatctggactaagatttagggagggttgagtgtgagcacaacttaattcacccccgaaagagaaggcttgtcggccagaaataacaaaataagaaaagcccagcaagttggcccccaggtccaagtactgcagattccagtgtatctttccatctcttcttccaacaacacaatgactgtgaaacataaggagggaagaggaaagagtcttcctttacgtgacaaacccccttttcagatgttcagtgggacagtctgagtagcagcatcttctttcaagagcataatatagcggagcatgtgattgcatttccaacctataaatatccagctcctgaacactcatctttgagttctaaatggaataagccattattgccatattgtaaactgtaacagactggaatgttgttcagcaaatactactctccaccccatgccccctgcagggaagcatcttaacctgtcccctgacacctactgccaccctgactttgagactggtcatgtgacttacttggactaatgggatgtgcgtggacatgatgcaggcagaggccttgcagctgcttgcataccctagctggcttctgcactctgatgatccaccatacaaaaacatgtccctattaacagccgatgctttagcctggccccagaacaaacacacttggagaagacctcaatacaacccacagcctggggctaagccagataattggggagcacaaagcagagtctcttagccgagcccagtgtagaccagctgaatcacagttaaccagcagaaatgtgggtcttgraataaatacttgttgggtaagtcactgaggataattggttaaacagcatgcttgtgtcattaaagccaaatcaatgcatgaaaaaatggcatggtcaagtccatgcttcttgta

SEQ ID NO: 710216 - DNA, 1811 bp, Homo sapiens
tgcacaagtctgagaaccactgcactagagcaatgtactagagcaattttcttcacggcaccaaggtgacctggaagatttctcaaatgtttgctcaggtctcagataacagcttatacatttaaaggattggacaaggattctcctaagggtaaggatttttcaagaataaaaaaaagaaaccatttaaatgagggagggagtgttttttttttttttatcttttctaagactttattcagaatcaaaaaagaatgcagtccatttagtctttgcaggacattttcagatgctgtttcgcccttgaactgatgtttaagtttcatgtcaggaagaaggtagaaatcaaaagggaattgtcaaagcaaaggcaaagatatggtcaaactatcataccacaactgttgtggcttatctgagatactctgattttgtaccttagcagagagccttttcccatcttgccagaacatatgcaatttggcagaagaactctgcagaactgcaaagaaaaaaaagccttactttcaaacactgatttcataaaaaaaatcttccgtgcctctagtttggactcattgctttttcaatgcaataaaaaaatcctgtccttaattaaaaatcaataaagttaataaacatttaaagttcaaacctgactttcatgaacttaattctcctgaatccactcctttcaagcatgttaaagggttcattataaaatccattttatttttcaccgtcacttaagattccctctaaatttccatgtacaaatggaaatatctacaaatttaaaaaacgagttgatgctactttaggtagatcggtagcttttcttgaattttaacatattctctgaaccacaggtgcatctttaatatttataggcaaatatcaatatacacacaatagatcttaaatatggagaatgaaacctaacctggaaaaagaaataccccacacaggaggtatcagtgcaaaaccctgattcatgcatacatgtgggttctcattaatgaaaacaaattgcattaggagcaataaaactgaaatgaaaccatgtatctgcttcttgtgggtaatttaattcactgtggactgtaactttatcagcaccactatacccatttccgaacaatttccttctcataaaggggaaaaataggtttgtctatactactaattgcatttcaaatcatartaatttggtaatcaaaaaagtaattctctcaacaattacttatattttgcttgagaggtacaccgaaattgcccattggctaaataaatccaccagtcacatgagcctgcaatttgatcagccttttccctcactcacagcagcaacaacagtgactctcagctgcagcgggatgaggtgggtcctgtttgtgccccgaatttgtgctctgagtccctgatgggattccattaactcagtcctctgcagcgcacccataatcatcaccattgtgctcctgtataacccagcaatacccaaattacatcattgatgcagacccatttcagtctttgtgggaaaagttggataaattaatgctttcaaaggactttgaaggctttcttagccatcttggggtaaaagaagaagcagtgtaaggcgatatttacatctgcctttcaggattcctttttaaatttctctctctcagggctctgatatcatccacaacttcaagtccaactcaaaatgagatgtaaatggttgattgtggtctcaatgaatgctgagtttcccaattgagatattcaaatccctaggataactatcttccttgagtaggcaa

SEQ ID NO: 710217 - DNA, 1811 bp, Homo sapiens
tgcacaagtctgagaaccactgcactagagcaatgtactagagcaattttcttcacggcaccaaggtgacctggaagatttctcaaatgtttgctcaggtctcagataacagcttatacatttaaaggattggacaaggattctcctaagggtaaggatttttcaagaataaaaaaaagaaaccatttaaatgagggagggagtgttttttttttttttatcttttctaagactttattcagaatcaaaaaagaatgcagtccatttagtctttgcaggacattttcagatgctgtttcgcccttgaactgatgtttaagtttcatgtcaggaagaaggtagaaatcaaaagggaattgtcaaagcaaaggcaaagatatggtcaaactatcataccacaactgttgtggcttatctgagatactctgattttgtaccttagcagagagccttttcccatcttgccagaacatatgcaatttggcagaagaactctgcagaactgcaaagaaaaaaaagccttactttcaaacactgatttcataaaaaaaatcttccgtgcctctagtttggactcattgctttttcaatgcaataaaaaaatcctgtccttaattaaaaatcaataaagttaataaacatttaaagttcaaacctgactttcatgaacttaattctcctgaatccactcctttcaagcatgttaaagggttcattataaaatccattttatttttcaccgtcacttaagattccctctaaatttccatgtacaaatggaaatatctacaaatttaaaaaacgagttgatgctactttaggtagatcggtagcttttcttgaattttaacatattctctgaaccacaggtgcatctttaatatttataggcaaatatcaatatacacacaatagatcttaaatatggagaatgaaacctaacctggaaaaagaaataccccacacaggaggtatcagtgcaaaaccctgattcatgcatacatgtgggttctcattaatgaaaacaaattgcattaggagcaataaaactgaaatgaaaccatgtatctgcttcttgtgggtaatttaattcactgtggactgtaactttatcagcaccactatacccatttccgaacaatttccttctcataaaggggaaaaataggtttgtctatactactaattgcatttcaaatcatagtaatttggtaatcaaaaaagtaattctctcaacaattacttatattttgcttgagaggtacaccgaaattgcccattggctaaataaatccacsagtcacatgagcctgcaatttgatcagccttttccctcactcacagcagcaacaacagtgactctcagctgcagcgggatgaggtgggtcctgtttgtgccccgaatttgtgctctgagtccctgatgggattccattaactcagtcctctgcagcgcacccataatcatcaccattgtgctcctgtataacccagcaatacccaaattacatcattgatgcagacccatttcagtctttgtgggaaaagttggataaattaatgctttcaaaggactttgaaggctttcttagccatcttggggtaaaagaagaagcagtgtaaggcgatatttacatctgcctttcaggattcctttttaaatttctctctctcagggctctgatatcatccacaacttcaagtccaactcaaaatgagatgtaaatggttgattgtggtctcaatgaatgctgagtttcccaattgagatattcaaatccctaggataactatcttccttgagtaggcaa

SEQ ID NO: 710218 - DNA, 1467 bp, Homo sapiens
tgaaactgcaatcgaggaaattgccacccttttagagtgtatagtatatcttcaaaaattgacagtgatgattaaaagcaaaagacatcttgataggtgagtttgtaaatgggtgtgcacgtgtatccgtattgtcaaagggtgattctgagacagacactctgcgaacaggtatatctggtgtgaagttttctccctgggacttgagtgctgcattcaatcctgctggtmtcacttttcccctagagctttggaactttgctggtaacattttcacatgaggaagtggaggtaaagtttgcttgaggaggcatttcagcacccctcttaaaaattgactttgctcttgtttcttctctcaaaccatcacctcatctctcttagactttgtcggtgctagttgttgttctttctacagtgttgccaccatctggggaagaaatctttgatttgtcagagaatcatctaagcaatgaagttccaacttgggggttgttcccaagtcattccaggaatcctccatgccactgatggacaggccacttagcatattttagaaaggtaacagatcatttctaagatgaccttctgtagattactagtgaaacctaaagccttatgtaactgcttttttatgtatttagtacagaaataacattttctaattaaaggaaattagaaaataaaggcaagcaaaacactccacatacacacagttagtctctctctctctctctctctgtctctgtccagaaatgaccactgttacatctcttaggtctttttgtatgcatagatgtgtgcacatttttttaaccaaaatgatgtattactgttttattatctgatttttttggatgacagtctccaactttgtatttcaataaagttcatctcgtttaataccttgtttctattccgatttccataactggccctcaaatacccttcaaggctggtttgtcgaaatcaccatctaatcgagtatcgtgccctatgtctggttgtaacttccttttagtctcttaatccagcacagtctcttattgaagcagcagaccagttgctggtcttgcctccagaacctctgacctgctagagtgtgaggttgcttctttatggttaggcttatttctccatcctctgatttcctgtatggaaaagcttgcaggattcaagttgtttttgactagatctcaccagagctaattcagtgtgcttcactcactgttactaaaaaggcccactactggggatgctgagattgacccctggtctagggctgtgacagcctgaacccaccatcgtccagttacactttccccctagagaccagcaagtgacttgtgtggtataactttgcatacaaatcgtttacttaatggttttgtacccagtggtcattcttgcctgaaccataccttccttgggttttgggaaatgtttctgtaattctttcatttcttc

SEQ ID NO: 710219 - DNA, 1029 bp, Homo sapiens
ttcagggaggcaagagaagacgaagggttttaaaggaaaaaataaagaggaacacgcaattgttttgaaataattatctgaggctacagagattaataataagagtgacatcagtctgaggtcggccaggcagttactgggcagatatccttgccgaaatatccttttgggtaaggctgtgatggccttcgtgcaaggtggtaggttttgcagtcttttgtgatggtttttgttaccaggcatacagaatgtgatccctctcttcatggccttccctggctctatttgtcaaggttttcttaacattagtgacttcattttgattctgacaaattttgcaaatttaactcttaaaactcaacatgccatccactcttttggtgtagaagaacttctgtcttcaagaccttcatttttaataacaggacactctcatgtggaatcagtttagggttctgaccgaaataaactgtcaaattcataaactttttccccaggagacaccccaaacaggttttgctctaagtcagactttcacaaatcttcttcatatataaattacagtctgactctgaggaaggtggtggggcccagacatccgaccagattgaggactagataaaacagctttccaacagacacaaccaccagtgtgcccggtcagtttaccgttgctgtgacaatactcacaagttactacccctttctatggcaatgacctaatgcctcaagagttcccactctttccctagaaatttctacagaaaccacttcctaatctgcaygttattaaaagtgggtataaatgtgactgcgcaaaatttccctaaactgctactctcctgcctacagggtagccctgctctgcaggagcagtcacagagctgtgacactgctggagctgcaaaactgccacttcaataaagctgttttcttctacatctgccttgcccttgaattctttcctggacaaagccaggaaccctagtaggcaaagccccacattggggatcacctatcctgcatcaa

SEQ ID NO: 710220 - DNA, 1029 bp, Homo sapiens
ttcagggaggcaagagaagacgaagggttttaaaggaaaaaataaagaggaacacgcaattgttttgaaataattatctgaggctacagagattaataataagagtgacatcagtctgaggtcggccaggcagttactgggcagatatccttgccgaaatatccttttgggtaaggctgtgatggccttcgtgcaaggtggtaggttttgcagtcttttgtgatggtttttgttaccaggcatacagaatgtgatccctctcttcatggccttccctggctctatttgtcaaggttttcttaacattagtgacttcattttgattctgacaaattttgcaaatttaactcttaaaactcaacatgccatccactcttttggtgtagaagaacttctgtcttcaagaccttcatttttaataacaggacactctcatgtggaatcagtttagggttctgaccgaaataaactgtcaaattcataaactttttccccaggagacaccccaaacaggttttgctctaagtcagactttcacaaatcttcttcatatataaattacagtctgactctgaggaaggtggtggggcccagacatccgaccagattgaggactagataaaacagctttccaacagacacaaccaccagtgtgcccggtcagtttaccgttgctgtgacaatactcacaagttactacccctttctatggcaatgacctaatgcctcaagagttcccactctttccctagaaatttctacagaaaccacttcctaatctgcacgttattaaaagtgggtataaatgtgactgcgcaaaayttccctaaactgctactctcctgcctacagggtagccctgctctgcaggagcagtcacagagctgtgacactgctggagctgcaaaactgccacttcaataaagctgttttcttctacatctgccttgcccttgaattctttcctggacaaagccaggaaccctagtaggcaaagccccacattggggatcacctatcctgcatcaa

SEQ ID NO: 710221 - DNA, 659 bp, Homo sapiens
ccaaagtaagcgaggacagagatgaattacagcccctggaaaatgacrgcgtctgtgagtccatgtggacagcgatgagataaacaggagcagggctcttgttgacagtggaatgtcactcacagaccagcaagcatggagtggcactgactggaaaatcatctcgaaactgtcatgttaaacactggagacatcgcaaaaaccccaagggccgtgggaggcagccctcttcttcaaaaatctcagtgtaggctgggcgtggtggctcacacctgtaatcccagcactttgggaggctgaggcgggcagatcacttaagttcaagaccagcctggccaaaatggggcaaaaccctgtctgtagtaaaaatacaaaaattagccaggtatggtggtgcacctctgtaatcccagctactcgggtggctgaggcaggagaatctcttgaacctgggaggcggaggctgcagtgagctgagatcgccccactgcactctagcctgggcaacagggtgagactccatctcaaaaaaataaaaaaataaaaaaattcaagtgtttcagattaaatgaaactaaagaggcatgataactacatgtaagtaatatactaaattctgtgctagaggagggaaatggtcttataatgctgtatctgta

SEQ ID NO: 710222 - DNA, 1430 bp, Homo sapiens
tcggtgcgtcagagctctggtcagatacttcgtgaactttgaagactaggtgcccagcttagctcactgggagcgtctgtgttcaagtgcatttggctgtctcagggcctgccctgtaacttctctgttaaagatcctgattttattgttgctgcttgcccagacctcagaaccaggcaggcataaaagtatagcagtttgactgtctctagtttcttccaactcagtagatggagaaagtatttggaaacatagaatctgaaatctaaatccstgtatgaagtgcgtgttagaaaactcaacctcctggcaggagaatggggtgaacccgggaggcggagcttgcagtgagccgagatcgcaccactgcactttagcctgggcaactcagcgagactccgtctcaaaaaaaagaaaaagaaaaaaagaaaactcaacctcctgatgcatagaaacactaacttccactgactttcttatcagcagaaacaaaatgtgttaactggtatcctagttcttctttccagctttgttttttactaattatagttccatattaaactcacttcatgtgtcgtgaccatttcaataacaagttagaaattcatctttcaatttaaaaccaaaaatcgtttcctcctcttcagcccccacccccgcatttttattcgaacagatcactttgagaagagactattttatttttttatttttattttttgagacagagtctcattctgtcacccaggctggagtgcagtggcaggattatggctcactgtggccttgcgtcgcctcgtgggctcaagcaatcctcccacctcagcctcccaagtagctgggactgtaggtgtgtaccaccacacccagctcatttttgtagagatggggtctcactatgttgcccaggctggtcttgagctcttgaactcaagcgaaccacctgcctcagcctcccaaagtgctgggattacatgtgtgaaatactaaacttggccagggaagggactttaaataaattgctctgcagtgcctttagtactggacatttgaatgataccatttagaataatacttgtggctatatagagggttagtgttgacaggctccttctagagcacggactgtgtgctgtacacatcgtgcctgatcctttcaaatatggtgttgaattttcataatgcttcagatggtattacctcatttagtgaatgaggaaattgaggatagagacattaaaatctgttcaaagtcagctacctaattagcagatggcagagctaggaactaaacatgccttttttaaaaattaaacttttgattttgagataattctggagtcctatgcagttgtaagaaatagtagagatcccacataccctctgccagctttccctcagtgattatgttctgtagaactagatagcac

SEQ ID NO: 710223 - DNA, 966 bp, Homo sapiens
ttatttttcgtatttttagtagagatatggtttcgccatgttggccaggctggtcttgaactcctgaactcaggtgatccacccacctcagtctcccaaagtgctgggattacaggcatgagccattgtacctttttatttctgagtagtattccctagtatggaggtaccacagcttgtttatctgaaaaatgtgtgtgtgtatgcacatacacaatacacttacacatgaagaaaaatgtgtgtgtatatgcacatgtacaatacacttacacatgaagaccgcatcacttttcagctcataggataagtcacaatgtcagaaataagtgaataatttctagagaaaatagagttatttcagatattaaaccatcagaatttactttcttagttttggtttggtactgtatatatgtgtgaccgtttttaacctttcacgctaaattaacttccatagtgtgattcagagctttcttaactgttacagtcagaaggacctgagaaattcccctaccaaatcctatttgatattgacaccgtttgaggtctgagacttgaagaaatttgcctgacgtgacaaagctaatgaatgacccagacaggcttgagaagaatttagagtagcctgggtagtctcatgcttacttgggtgctgatcccagctctggagcgggtgggacacttgcttttcctctggggtggctcttgcctgaggatacagaagcaggaagctgaggtatttgctattcttggatcctgcactggtgagaaacttaatgtgtttctgcctgtgatgttggcctttccccttcatttcattaatcaygaagagtattatatacttataaacctctaaaaatctactcctctaggggaaaaaaatgaagtgttaagtattttaacatagatccttaagccagtacatagtggcccagggtaaaaatgtgtgatgtaatagagtta

SEQ ID NO: 710224 - DNA, 603 bp, Homo sapiens
ggatacttatatatgtacatccatatttaactaaataaaaattggagtgttttcgaaccatgtaagtgttcaaatgtatttatctcacaataggatttatgctatgaatattatttttcaactccatatctatttattttccagtttttaacccatttcctttttgccccaagaatactcatttctaatcctaatgcaacagaaatgtacatgatgttacattaggattagagagaagttctgtttagaaataactccaagaacagtttttgttttgttttgtttttaagagagagagagtctcactgtgtcgcccaggctggagtgcagtggcgtgatctcagctcactgcaacctccgttcygcctccgggttcaagtgatggtcctgactcagcctcctgagtagctgggactacaggtgcacgctgccactcccggctaattttttgtattttaatagagacggggtttcaccgtgttgcccaggctggtctcgaactcctgagctcaggcagtccacccgcctcagcctcccaaaatgctagtattacaggcgtgagccactgcacccagcccaggaacagatttgacattttatatt

SEQ ID NO: 710225 - DNA, 627 bp, Homo sapiens
ccttatatttaagaaagcaatttctctaaaattagttaactatgggactttttcataaaattcttactaaacacttgtgaaattaacattttacataaattacttctaaggtaaatttgcttcaataaacaagtcttcatttacattagtgatacactcttgctctcagtctcctgtagtttaaaaaatataaatattgagataataatttcaccatattttaagtttctgctcatataagcttgggaagaaatcaaataaatacttaagyataaataccataaatataaaagggattaaatgtcaattttatctgtgtgtctgtgtgtgtgtacatataggtatgtatacacacactcaggcatatatataaaagtctttacaaatcaaagagacagcactgcttttgctgaagcgggacaaaaatacctcaaggcacaactcctccgtgcgcttatcccctgcagtgtaaacagggccaattcaatgggtattgtttcctttacttaggcaggatgatttccctcaactcttaaggaatccaggactttccagaccatttcatcagcaaccttcttcaaccaaatagctgtgactctcattttttatacattttggctgatatca

SEQ ID NO: 710226 - DNA, 610 bp, Homo sapiens
atgcaaaaacatctatgttggacacagattattttcagaaggtaaatcaacataaagtattctcaaaaaggactcttgagtaggagaagtccccaaatttagaaaagatcttaggaaagttattaactcatatttagaaatgaaagtattttctgcctggcatcaattccaataaataagcaaagaaaagatgaaatgcagctgttggggtctatgttaccctccccacaaatcacctcagtgtccttcctctacccaastcacaggctaatgcaaagtgtatgcacagcttagaaaaaagcctcaaactttactccatgggcacaaacacaggagcaaattctagtatatctccttgaagacaaacaaaaaagtattctaagctggccctttcattattgtcattaaatagccatatggcgttaccacaaaaataatcccaagtgacaaagtgaaagaatatggctatgaagaaaaaattcagaaatatttgagttaaatctttgtcaactgcatgatgattatcacctgaatcagtggtttgcaactggtttaaaattacctggggagttaaaaaacaaccaagcaaccaagcaaccaaggtctcaat

SEQ ID NO: 710227 - DNA, 593 bp, Homo sapiens
ttttttgtatttttagtagagatggggcttcacgatgttggccggggtggtcttgaactcctgacatctaatgatctacccactttggtctcccaaagtgctgagattacaggtgtgagtgactacccctggccagattaagttaatttcaattgttttgcagtcgcttgtactagaaagtgctataatgcagatatttgggacacggtgtttagagaacttcctgactacctggatgtgagaagtgaggtaaaaagagccatgaatgatgtccaagtttctagcttaggtagctaggtgaaatgyggagtcaatcactaagggatgaaactggtggttgggggctaggaaagatgattatgtacagatttgaacatggtgattttcatttgtggtagaggacattcaaataaagatgtctaggatgcaactagaaatatgagttaaacctgttagagatctgggctggagataactgatacgggactcagcagatagaaaatgaggccatgggagcagcatatagtatcagtggagcatgtggaataaaactctgaagaacaccaacatttaaagtcctggaaaggagatcg

SEQ ID NO: 710228 - DNA, 593 bp, Homo sapiens
ttttttgtatttttagtagagatggggcttcacgatgttggccggggtggtcttgaactcctgacatctaatgatctacccactttggtctcccaaagtgctgagattacaggtgtgagtgactacccctggccagattaagttaatttcaattgttttgcagtcgcttgtactagaaagtgctataatgcagatatttgggacacggtgtttagagaacttcctgactacctggatgtgagaagtgaggtaaaaagagccatgaatgatgtccaagtttctagcttaggtagctaggtgaaatgcggagtcaatcactaagggatgaaactggtggttgggggctaggaaagatgattatgtacagatttgaacatggtgattttcatttstggtagaggacattcaaataaagatgtctaggatgcaactagaaatatgagttaaacctgttagagatctgggctggagataactgatacgggactcagcagatagaaaatgaggccatgggagcagcatatagtatcagtggagcatgtggaataaaactctgaagaacaccaacatttaaagtcctggaaaggagatcg

SEQ ID NO: 710229 - DNA, 1017 bp, Homo sapiens
aggcctttcaaayaaacctggaacaacatgtcttaagatttcagtggaaatctcaaagcagagttgaaataaactaacagagaggaagaggtggtaaccttccacagaaagcctaaggttagaatgtatcttcctaggcaacaagacaattattccaaacacaaaaggaaacaactttctatttagctcatttctaaggtaaccattgtatcgccggtgaaacagttcaggcataaattggacagagtctgaaaggtctctgattccattttgttttgtatttgaatgagaagtagcaaatatatatatgcactccagcctgggcgacagatatatctatatctatatctatatatgtccctggctgggaaagaggagaatggaatctagattgtgtgtgtgtgtgagtgtgtgtgtgtgtgtgtgtgtgtgtgtgtgtgtatccgtatgagatatatctcaaaatccgtatgagatacaagaaaagacagagtcttgctctgtcgcccaggctggagtgtagtggcaccatctcagctcacctccacctctcaggttcaagtgattcttgtgcttcagcctcccgagtagctgggactacagatgtgcgccaccactcctggctaaattttttatttttatttttatttatttatttatttttttgttttatttatttatttatttatttttattgatcattcttgggtgtttctcacagagggggatttggcagggtcataggacaatagtggagggaaggtcagcagataaacaagtgaacaaaggtctctggttttcctaggcagaggaccctgcggccttccgcagtgtttgtgtccctgggtacttgagattagggagtggtgatgactcttaaggagcatgctgccttcaagcatctgtttaacaaagcacatcttgcaccgcccttaatccatttaaccctgagtggacacagcacatgtttcagagagcacagggttgggggtaaggtcacagatcaacaggatccca

SEQ ID NO: 710230 - DNA, 1017 bp, Homo sapiens
aggcctttcaaacaaacctggaacaacatgtcttaagatttcagtggaaatctcaaagcagagttgaaataaactaacagagaggaagaggtggtaaccttccacagaaagcctaaggttagaatgtatcttcctaggcaacaagacaattattccaaacacaaaaggaaacaactttctatttagctcatttctaaggtaaccattgtatcgccggtgaaacagttcaggcataaattggacagagtctgaaaggtctctgattccattttgttttgtatttgaatgagaagtagcaaatatatatatgcactccagcctgggcgacagatatatctatatctatatctatatatgtccctggctgggaaagaggagaatggaatctagattgtgtgtgtgtgtgwgtgtgtgtgtgtgtgtgtgtgtgtgtgtgtgtgtatccgtatgagatatatctcaaaatccgtatgagatacaagaaaagacagagtcttgctctgtcgcccaggctggagtgtagtggcaccatctcagctcacctccacctctcaggttcaagtgattcttgtgcttcagcctcccgagtagctgggactacagatgtgcgccaccactcctggctaaattttttatttttatttttatttatttatttatttttttgttttatttatttatttatttatttttattgatcattcttgggtgtttctcacagagggggatttggcagggtcataggacaatagtggagggaaggtcagcagataaacaagtgaacaaaggtctctggttttcctaggcagaggaccctgcggccttccgcagtgtttgtgtccctgggtacttgagattagggagtggtgatgactcttaaggagcatgctgccttcaagcatctgtttaacaaagcacatcttgcaccgcccttaatccatttaaccctgagtggacacagcacatgtttcagagagcacagggttgggggtaaggtcacagatcaacaggatccca

SEQ ID NO: 710231 - DNA, 1017 bp, Homo sapiens
aggcctttcaaacaaacctggaacaacatgtcttaagatttcagtggaaatctcaaagcagagttgaaataaactaacagagaggaagaggtggtaaccttccacagaaagcctaaggttagaatgtatcttcctaggcaacaagacaattattccaaacacaaaaggaaacaactttctatttagctcatttctaaggtaaccattgtatcgccggtgaaacagttcaggcataaattggacagagtctgaaaggtctctgattccattttgttttgtatttgaatgagaagtagcaaatatatatatgcactccagcctgggcgacagatatatctatatctatatctatatatgtccctggctgggaaagaggagaatggaatctagattgtgtgtgtgtgtgagtgtgtgtgtgtgtgtgtgtgtgtgtgtgtgtgtatccgtatgagatatatctcaaaatccgtatgagatacaagaaaagacagagtcttgctctgtcgcccaggctggagtgtagtggcrccatctcagctcacctccacctctcaggttcaagtgattcttgtgcttcagcctcccgagtagctgggactacagatgtgcgccaccactcctggctaaattttttatttttatttttatttatttatttatttttttgttttatttatttatttatttatttttattgatcattcttgggtgtttctcacagagggggatttggcagggtcataggacaatagtggagggaaggtcagcagataaacaagtgaacaaaggtctctggttttcctaggcagaggaccctgcggccttccgcagtgtttgtgtccctgggtacttgagattagggagtggtgatgactcttaaggagcatgctgccttcaagcatctgtttaacaaagcacatcttgcaccgcccttaatccatttaaccctgagtggacacagcacatgtttcagagagcacagggttgggggtaaggtcacagatcaacaggatccca

SEQ ID NO: 710232 - DNA, 629 bp, Homo sapiens
ggcattttcttccagagagaactgtcccgttatttttctgcatatttaacatggcctggaatgccgtggttcctcagtcaaacttgtggtagtacagatgccatttatgtttcttctcttcattgtagctaacatgcttgaatcaaagtcctttgaagtagaactcaaagatgctgaacctgatattattgaacaactggtggaatttgcttatactgctaggtgagttaagtattatttttattttagagaagtaatgttggtatctaccatggcaaagcattgtcgtaacaaatagttgcactacaaattcttcaaaatgaaaaaccgcaaggatggaagagtttsagtatcctatgccatactaattcaaggactgaaagtttaattttgtgtttaatttcaggggctattaggatacattccacagtaacatttaaataataaaaaatcatgggtaactaatattccctctaacttatttgcagaatttccgtgaatagcaacaatgttcagtctttgctggatgcagcaaaccaatatcagattgaacctgtgaagaaaatgtgtgttgattttttgaaagaacaagttgatgcttcaaattgtcttggtaagaaatatcagat

SEQ ID NO: 710233 - DNA, 1356 bp, Homo sapiens
ttttcccttttctattttgattcctgaaaatttcaaactatttatgaatagtcctatggaaatatggttatttgcctaagtctaataaaaatgtgctctctctttgtagcagaatacgactgaaaacatgggttatacatttgagtacaattccatataaaagtatacataaaatgtgtgactttgagggtcttgcaatacgtaaataaaaactgtcacttcttgtcaggttcatgatccctaaagctgtaagcaaaacctaaagtctgccttggtttgggtttctagcctcaataagtttttaatctgatattcctatatgaaaatgtaaaaagaagaaaaaaagctatgatacagctgttactagattgtagctgtgtatattgtctagagccctccaatccacattggttccataaaacacggaaacagaaattgcggtgttcctgaagtcttataagctgattatatacatatatatacatatatacgtatatatgtatatatgtatatatatatttttttgatatggagttttgctcttcttgcccaatctggtgtgcaatggtgcaatcttggctcaccacaacctcggcctcccaggttcaagagattctcctgcctcagactcccaagtaactggcattacagggatgtgccaccgcgcccaggtaattttgtatttttagtagaggtggggtttctccatgttggtcaggctggtctcgaactctggacctcaggtgatctgcccgccttggcctcccaaagtgctgggattacaggcatgaaccactgtgcctggcccagacacatgtttttaaaaacaagtcttctgcatgatacatgaggcagcaaatcacaaaataaatagatttgcattagctgcaccaagagtttaccaaaccacccaatgccatcaccagagacattcaagacaagacaaaaagttgacattttcccacactgtacagaacttttcctaagacatcagaacaagactttaaatcagaatgagactatcaccccgctaatgctaccttcttcttcatttggcaggataaaattttccagtcagtaactgctatcggtaattcaacaaaacctggcataaggaatccttttagtccacctagtggccaactgaaaataccagtatcrcaactttttgttcaaatcatactagtgggtccctttttataaagctggtgttctttgctttaagtcaatctagtcataagatctactaaacaactaacacagatttcatccaatttaccccacaggctttttatttgtctggctttttgctcttagtcttaggatcttagtttaaaaccgttaaacaaactaaat

SEQ ID NO: 710234 - DNA, 1483 bp, Homo sapiens
gtaaggaggtagcaggaggaggctaaaaatggtgacatcaaggaatagaaactggtgagtgagggaagtagagtgttgaggtgagctttcataatattcatacaccttttgaaatatttgatttttttttcttaaaatgagcatgtattctttttgtaatgtttggtaacattacaatgtaaaagacaaggaaacaacatgaccattctgcagaactgtgaacggccctgttccctctgctggttccaacttctacccatcaatttatcatcaaatttgcagcagaaaggggatacaacttagctgactgctttatatatgactaatatgaaagaaaggtgaaattcaaaggaagtgattaacatgaaaataaatgtttaacctcactagtaatcaaagcaacgcaaattaaaacaacaatttggcagggcgyggtggctcatgcctgtaatcccaacactttgggaggccaaggtgggcaaaccacttgaggtcaggagttcgagatcagtctggccaacatggtgaaaccccttctctactaagaataccaaaattagctggatgtggtggctcacgcctgtagtcccagctactcgggaggccaaggcagaagaactgcttgaacccgggaggtggaggttgcagtgagccgagattatgccattgcactccagcctgagcaaaagagtgagactccctctcaagaaaacaaacaaaaaccaacaatttattgcttttaaattggcaaagaacaaaaaaggaaggataatagtgctaaaggaggctggagatatactcttacatctgctattagaaggatacgctggcacatgctttctgaacaagtggggcagcatttatgccaagtgacaaaacagcaggtcacaaaccagtgtgatccgtttgttttataaaaatacatatatgtgtggggaaaaaaaggatgaatgtaaacaaaaatagtagtgttagtagtggttacgggccaagtgcagtagctcactccaggagttctagctacttgggaggcggaggcaggaggaccgcttgagctgaatttaaggctacactccagcttgggtaacagagtgagaccgtgtctcaaaaaaaaaaaaaaaaaagtgcttatcctgggtagataattttttaacatttgcttttctggttttctaagtattctctagcagcacccgttaaccttgtaatttgagagaacatgcatgttaatctctaaatatcaaaggacagaaaaagtagggagggaaaaaaaggaaatggcagcaagacaattttgttttaatgaaaatgactgacatctcttaaaatccaggtggcttaagagaaggcttggtagagtgaactttggctcggtgggagaatcctaacatggcatagtttcaagctttatctcccttcccagaaagaaaacggtcccaacatcctcacactgtaaggtaagcaggattaaattatgtaagcc

SEQ ID NO: 710235 - DNA, 1483 bp, Homo sapiens
gtaaggaggtagcaggaggaggctaaaaatggtgacatcaaggaatagaaactggtgagtgagggaagtagagtgttgaggtgagctttcataatattcatacaccttttgaaatatttgatttttttttcttaaaatgagcatgtattctttttgtaatgtttggtaacattacaatgtaaaagacaaggaaacaacatgaccattctgcagaactgtgaacggccctgttccctctgctggttccaacttctacccatcaatttatcatcaaatttgcagcagaaaggggatacaacttagctgactgctttatatatgactaatatgaaagaaaggtgaaattcaaaggaagtgattaacatgaaaataaatgtttaacctcactagtaatcaaagcaacgcaaattaaaacaacaatttggcagggcgcggtggctcatgcctgtaatcccaacactttgggaggccaaggtgggcaaaccacttgaggtcaggagttcgagatcagtctggccaacatggtgaaaccccttctctactaagaataccaaaattagctggatgtggtggctcacgcctgtagtcccagctactcgggaggccaaggcagaagaactgcttgaacccgggaggtggaggttgcagtgagccgagattatgccattgcactccagcctgagcaaaagagtgagactccctctcaagaaaacaaacaaaaaccaacaatttattgcttttaaattggcaaagaacaaaaaaggaaggataatagtgctaaaggaggctggagatatactcttacatctgctattagaaggatacgctggcacatgctttctgaacaagtggggcagcatttatgccaagtgacaaaacagcaggtcacaaaccagtgtgatccgtttgttttataaaaatacatatatgtgtggggaaaaaaaggatgaatgtaaacaaaaatagtagtgttagtagtggttacgggccaagtgcagtagctcactccaggagttctagctacttgggaggcggaggcaggaggaccgcttgagctgaatttaaggctacactccagcttgggtaacagagtgagaccgtgtctcaaaaaaaaaaaaaaaaaagtgcttatcctgggtagataattttttaacatttgcttttctggttttctaagtattctctagcagcacccgttaaccttgtaatttgagagaacatgcatgttaatctctaaatatcaaaggacagaaaaagtagggagggaaaaaaaggaaatggcagcaagacaattttgttttaatgaaaatgastgacatctcttaaaatccaggtggcttaagagaaggcttggtagagtgaactttggctcggtgggagaatcctaacatggcatagtttcaagctttatctcccttcccagaaagaaaacggtcccaacatcctcacactgtaaggtaagcaggattaaattatgtaagcc

SEQ ID NO: 710236 - DNA, 1163 bp, Homo sapiens
agaacttggtctgtttacacagacagcagataaaatttaaaaagatgttgagtagggcccattgttttctaaaatagctgtgtgttgcctctactaatccaaatgagggccaacatttctatgttaaggtccaaacaataaggattccctttctttcacatcttgctctcggtggccatgttgtccagggctactccaaagtggtgggtaatggagctggtggctcagaatgcctgggtcagcagcctgtctcatgaggctctgcatgcagcatgacctcacattgttgggcattctgctgtagaacggtacgacagggaggccagggaggagatgttcttgaggaatccctcattcttctccagggatgggtcccaaagccttgttcagaccattatgggttataaatgcgaaatttatagcaggcattttgggtaagagtttggagtctgggctctgcagtcaaactgcctgggtccaaatttcagcccctcatctcaataatgtgtggttctggataagttacttaacttctttagccagggtttcctcatctgtaaacttaagacaatttagctcattatcactatagagagaattataaatgtgatagaaactgttaagcactgagcccagttaatggcacatactaagcactcaataaaggttaacaatttccatgacatgattatgacctttctggttcttgaatatattaaacctacaatcttaaaattgaatttgcaggggatagaacagtggcatagtagggtaaagwcagttatagtggtcaaagcctgctcaatccaggtttctcattttctagctgtttaaattctcttctgctattgattgttgcaattgctatttgcttgtctgtggctgagaggaaaatgtgtgtttatgcaactgtgctagagacattacactgatttcaatctgatgtcacagagcccaacctgtaacttctgttcccagttgttggtctatctgaagagaggtgctaactgctaaattggacctcttgtgtccatgcacgtaagctttttttgctactgggttggaaggtggaatctttttcatatcttgtaaagagtacctccaattgtatgaatgggtgtgtaattaaacataagaatgatagctgtacagagaatccactg

SEQ ID NO: 710237 - DNA, 1409 bp, Homo sapiens
ggataaaggaaatacttgacatcatcaacttgacagattttaaaaaaatgtgtgcataaaaaatatttccctatcatcctttaccaacagaaattgaagatagatgacatttcagataaattattaaatgtaaaaacaccctcaaaatataaaaggaacagaaataagtgtagatgaatatttatattggaatatagagaatggtttttaaagctcagcataaaatagcaattaagctgattagtttttactatctaaaattgaaaacatatatttaaaaaacttaaaattttaacagttaatgataaaatacagtagaagtacataaagatttcttaaaattaccatctaacaagaaccatgttttttcataaatttgaggatggatcaacatcagtaaaattatttaataaagcatattacattaacagttctgaaaagaaaacataatattaaaagatgcagaaaagaaatataacaaaatgtaattgattcataatttaaaaacaaaacaaaagaacaaacaaaaactctctgcaagtaggaataaaagaaagatatcttaacctaattagaggcatctatcaaatcttgatagcaatttcaatctcaacagtaaaatctcagaaaaaattccattaaaccaggaatacaacctgcccacattacttttattcaacattgaactaaagataaaagcagaaaaacaactcaataaggtaagaatttataaaccagataaatgttcacttttgcagacaagataactgtctacatacaaaacttgagaagtgacaggtgtattagtagaataataaggtttaacaagtttgttggatatgagagcaaaatgcagaaatcagtctccatgcatcagcaataaccaactggaagcacattaaagcagaaaaaaaaaaamcccacaacaacagattcttttcacaacttcaacaagaaccataaacctattaagagcaccttatatttatatgaatacttttagaatatttgttgggaagattataaatattactatgtcttataaaggataactaaataaaagcagaggtatgctatgttcataaatgggaaaactccatatcaaaaagaaataaatcttcaccaaattaatctgaaatgcaacataatttctataacaatgctaataagtttattttttgtaggacttgcaagcttgtcctaaaattcatgtgtacaagtaaagggccaaggaaagctaagactattataaagatcatggagaaggaattttccctgctagaaatcaacacttattatatagaaattgtaattaagacaggtgccatagtttaaaaaatggataataaaccaatgaaataaacagctcagaagtagactccctgatataaagcaataagttagacaga

SEQ ID NO: 710238 - DNA, 1382 bp, Homo sapiens
tgattgtcattagataaactgtttatgctgtcagagcgtttccrgtagttgtggcatccatgggatcctaaagaagccaagagatgacagaagcctatcaggttcacagacttttagggaaccttaaagccctcttggtgcccatcattgtgataggagcaaggactatgactaagtcacccagatcaaaggtgtgaccatttccccaaacttaagatcagccttttcacttcatgtatgtctgtcttccccagccaccacccaatttctgccccctcacttctccctaaacaatacaaccaataccccataaaaagtaattaggactgttcatgagaaaatccaaagggggcaaattcacattgttctttgggaggttcctcccctgtcctttcctgctaacacacaccactactaattaggctattgaagaagaggcatctggctgttgccaactcttggcacccaagtttcatgaatcttttggtcaagaagggaaatatttctttcctgatccaaagcctaatcccaagaaaaaatgcctccaggggccccttcttctcagaaaaggtagagatgatgttaggaaaggctttgaaaccaaaagggagtccagaaaggccaaaaagcaaatttcataaactcccctccattaatggggtcacaatgtagaaacccataattatagttgagtattagggcttaccaataattatttttagcttatgagtgaggaaaccaaggctcttaaaagctaagcaacttgctcaagttcacccagctggcaagtgttggcatcaggatgaaacccaggttcctctgactccaaatggcatgccatgcccaaattatatgccgcaaatataagttgtgattatcactttattataaaatatgctttgttgtgcacattgcatgttataagaagccaaagtggataaaatggtttatcatatgtgtcgagagagtaggtgactcaaagcattctaggattcactgtggaagacctgattcttcatccccttacattgtgtctgagagaggaaatccctctctgctctcttccctgattccatactgacctttgtcttctttcaatttgtaaagcatggtgacattacctttaatctgtgtatattagtcacaacatttcattagtctttcaaaagcagttttagctgctcttgcttttctttgtaagtacaggcaaggtgtcctttctatgtctattttcaggtgatcacatttttgtcatagtaaaatggaaggcataatgactagatttctgggtaaactctcataatttacatatgagaaaagaaaggtccataaagttagtgatttattctaggtgccaacaatgattggtgacaaatccagac

SEQ ID NO: 710239 - DNA, 1655 bp, Homo sapiens
cactgcaagctctgcttcccgggttcacgccattctcctgcctcagcctccccagcagctgggactacaggcgcccgccaccacgccccgctaatttttgtatttttagtagagacagggtttcaccgtgttagccaggatggtctcaatctcctgaccttgtgatccgcccgcctcggcctccgaaagtgctgggattacaggcktgagccaccgcgcccggcctgagcgtgattcttgatggaaactttagttcttcagcttggtaactacgaaatgtgaggaaatgggctgccttgtaaaagcactatttcttcttactgtctgaacatttgatgtaatccctgccaatcaaccagtggactcaacaaggacaatgtttcctcccagctagcttcacaagaggaaaaaacaaaaacaaaaaaacatttggactggttatcactagaactgtggtacttgaatcagtagaaaaattaaagtctccaaaaaaattggcgttacaaaatttgaaacctatctattgtctcaggtggtcatgggacattgttcacttagccctggaaacttctatccttctatttctgtaaaatatgagtaagcactggatctaaattaaaatttgtcattgcactcttccaggacattgcatgcacatttgctattcaaaatcggatctgccctcctttttgtctcaggaatatctactaagtatctatgtagacaaagaagatatgtgtgtttaaacaacacaatctttatatagattcatataaatgttctgtttcagaaatatttaattggattaagattctaacttgcttcattccaagtccctgcattaccaaacccctgattactccatgccacgaagctccaggcacaatggcctgttttccttcccctggacagaaacacagcttgtagggagggggaatagaaacagttatcattaggttgtgccctctgaacatattactctaaaggatatttttcaacaatttttaaggtagtattttgatatgacagtttttaagaaaatgatatgaaaagatgctagaggaagcagtgcgaattttatctttcaaaatacaatggtcagaccatgggtccatagagaatgttttccttgctcactcacctctcaaaaagcatcctcatattagatgccagaagatagtggaggtgcatagttgtattttaaagtagaaattttgcaactcacgaattgtgtgcctttcaagttgtcatatgaagcaacacttcagataagaaaggcctcaggaaatagagcatccatatattcttcctgaaaaagaaatgtcaaagatgtacaccagcgtactgaattaggaagtcttgcttaaaaggacaggtaaggcaaagtctaaagaattgtaaaatatacaaacatgatataaatataataaatatcatgaatatttttaaaagagaagaaacacacacacacaaaattgctagatctaaaatcctagattatatcatagaaagctgaatgacagaagaaaatgaaattgtcaacaaatactgattaattggggagttaataggtacttgtttaattcttggtgtttgaaatatgtttgaatttttgatgttactactaattaaatttaaaaacatagtatttgtta

SEQ ID NO: 710240 - DNA, 1655 bp, Homo sapiens
cactgcaagctctgcttcccgggttcacgccattctcctgcctcagcctccccagcagctgggactacaggcgcccgccaccacgccccgctaatttttgtatttttagtagagacagggtttcaccgtgttagccaggatggtctcaatctcctgaccttgtgatccgcccgcctcggcctccgaaagtgctgggattacaggcttgagccaccgcgcccggcctgagcgtgattcttgatggaaactttagttcttcagcttggtaactacgaaatgtgaggaamtgggctgccttgtaaaagcactatttcttcttactgtctgaacatttgatgtaatccctgccaatcaaccagtggactcaacaaggacaatgtttcctcccagctagcttcacaagaggaaaaaacaaaaacaaaaaaacatttggactggttatcactagaactgtggtacttgaatcagtagaaaaattaaagtctccaaaaaaattggcgttacaaaatttgaaacctatctattgtctcaggtggtcatgggacattgttcacttagccctggaaacttctatccttctatttctgtaaaatatgagtaagcactggatctaaattaaaatttgtcattgcactcttccaggacattgcatgcacatttgctattcaaaatcggatctgccctcctttttgtctcaggaatatctactaagtatctatgtagacaaagaagatatgtgtgtttaaacaacacaatctttatatagattcatataaatgttctgtttcagaaatatttaattggattaagattctaacttgcttcattccaagtccctgcattaccaaacccctgattactccatgccacgaagctccaggcacaatggcctgttttccttcccctggacagaaacacagcttgtagggagggggaatagaaacagttatcattaggttgtgccctctgaacatattactctaaaggatatttttcaacaatttttaaggtagtattttgatatgacagtttttaagaaaatgatatgaaaagatgctagaggaagcagtgcgaattttatctttcaaaatacaatggtcagaccatgggtccatagagaatgttttccttgctcactcacctctcaaaaagcatcctcatattagatgccagaagatagtggaggtgcatagttgtattttaaagtagaaattttgcaactcacgaattgtgtgcctttcaagttgtcatatgaagcaacacttcagataagaaaggcctcaggaaatagagcatccatatattcttcctgaaaaagaaatgtcaaagatgtacaccagcgtactgaattaggaagtcttgcttaaaaggacaggtaaggcaaagtctaaagaattgtaaaatatacaaacatgatataaatataataaatatcatgaatatttttaaaagagaagaaacacacacacacaaaattgctagatctaaaatcctagattatatcatagaaagctgaatgacagaagaaaatgaaattgtcaacaaatactgattaattggggagttaataggtacttgtttaattcttggtgtttgaaatatgtttgaatttttgatgttactactaattaaatttaaaaacatagtatttgtta

SEQ ID NO: 710241 - DNA, 1655 bp, Homo sapiens
cactgcaagctctgcttcccgggttcacgccattctcctgcctcagcctccccagcagctgggactacaggcgcccgccaccacgccccgctaatttttgtatttttagtagagacagggtttcaccgtgttagccaggatggtctcaatctcctgaccttgtgatccgcccgcctcggcctccgaaagtgctgggattacaggcttgagccaccgcgcccggcctgagcgtgattcttgatggaaactttagttcttcagcttggtaactacgaaatgtgaggaaatgggctgccttgtaaaagcactatttcttcttactgtctgaacatttgatgtaatccctgccaatcaaccagtggactcaacaaggacaatgtttcctcccagctagcttcacaagaggaaaaaacaaaaacaaaaaaacatttggactggttatcactagaactgtggtacttgaatcagtagaaaaattaaagtctccaaaaaaattggcrttacaaaatttgaaacctatctattgtctcaggtggtcatgggacattgttcacttagccctggaaacttctatccttctatttctgtaaaatatgagtaagcactggatctaaattaaaatttgtcattgcactcttccaggacattgcatgcacatttgctattcaaaatcggatctgccctcctttttgtctcaggaatatctactaagtatctatgtagacaaagaagatatgtgtgtttaaacaacacaatctttatatagattcatataaatgttctgtttcagaaatatttaattggattaagattctaacttgcttcattccaagtccctgcattaccaaacccctgattactccatgccacgaagctccaggcacaatggcctgttttccttcccctggacagaaacacagcttgtagggagggggaatagaaacagttatcattaggttgtgccctctgaacatattactctaaaggatatttttcaacaatttttaaggtagtattttgatatgacagtttttaagaaaatgatatgaaaagatgctagaggaagcagtgcgaattttatctttcaaaatacaatggtcagaccatgggtccatagagaatgttttccttgctcactcacctctcaaaaagcatcctcatattagatgccagaagatagtggaggtgcatagttgtattttaaagtagaaattttgcaactcacgaattgtgtgcctttcaagttgtcatatgaagcaacacttcagataagaaaggcctcaggaaatagagcatccatatattcttcctgaaaaagaaatgtcaaagatgtacaccagcgtactgaattaggaagtcttgcttaaaaggacaggtaaggcaaagtctaaagaattgtaaaatatacaaacatgatataaatataataaatatcatgaatatttttaaaagagaagaaacacacacacacaaaattgctagatctaaaatcctagattatatcatagaaagctgaatgacagaagaaaatgaaattgtcaacaaatactgattaattggggagttaataggtacttgtttaattcttggtgtttgaaatatgtttgaatttttgatgttactactaattaaatttaaaaacatagtatttgtta

SEQ ID NO: 710242 - DNA, 1069 bp, Homo sapiens
taaaaacactgttgacccagagagatgctttatgagataactcatcatccctaatcaagaaaggggcattatcagagttcacctacttattcagtgctttttaggtacctgttttatgccaggcaatgttcaaaccactggaraaaaacaaagaaccagagacacaataggagtgcaagtaaagcggaaaagcagcactgaaagaatgaatactttaagcagcttaatgtcaaaggaacattagattggaagagaacaaagtgacaataggtattgctgaagagataaagagggaccatgttatgaagctttgcgtaaaagcaagggatacagagaaggttgtgagtagagagaagtagggttaacgtcattgaggatattaatgatttttaaattaaaatccaaatttaattcaaatgcctcaatgctagtacccaaaataaaaataaatgacacaaagaagaagtcaaaatacttatctctcttttcataagaaaatatgaagtacctgggtggcagggctctgtaagaaaactgctgtggacagtgaaaagaaaaataaaacatggacatttagaagaattaccagggtcagactgagatgagagatcatagacttattatgacaccagttttcatagttttgtgattttcaatagcattcaataccccaattgaaaatgcaaagccattgagaaagggtaaggattttgccagacagaaaaaggaaggaaaagagtaatacaggaaaataaagatttgtgcaatagagctatttatattgtatactaggtcttctttggacagtaagagaagggagaatgagaaaaaagtcatggaagaaaatgaggtgggtcaagctactggatattggtgggaggaagagagagcaatgttatcacttagtgtatctcatgatttcaaagtggagaagttccaggtaataccaagatccagaatggaggcaatgcccagtggataacgtggaaagaagtagaatgtcagcgaaggtaaggcgattaagggatttctgccaaggataattgacttaccttacctatgtactcta

SEQ ID NO: 710243 - DNA, 1106 bp, Homo sapiens
tattctccttttccttttctgtattgtagttcaaaccatcattatttcctcmttgaaacattgtattcatcccttttgatatctggcattcattcttgcatttctccaatccattctccatggagcaaccatcaaaatctttttaaactcctctatataaaagctttgtcctggccgggcacggtggcacatgcctgtgatcccagcacttttggcggccaaggcgggcgaatcacctgaggtcaggagtttgagacaagcctggccaacatgaggaaaccctgtttctactaaaaatacaaaaattagccgggtgtggtggtgcatgcctgtaatcccagctacttgggaggctgaggcaggagaatctcttgaacccgggaggcggaggttgcagtgagcaactgcactccaacctgggcaacacagtgaagctccatctcaaaaaaaaaaaaaaaaaaaaagctttgtcctattctcacaataaagtttctgaatatgacctgaaggcagaaggcaggtctgtcttgattactaactacctgtaactgagctctaatgacactctcctcattctaactgtttagtttcttggttttgtggatttctatttttgttatagaattgtatttatttttctatagttcttaaaaatatttttgctgggtatgcagttctaaacaggtattttctctgggcagtttgaagcttttattccactgtcctacgcgttctaatattgctattgattcagctgtcagtcaaattgtgatttcctagaaggcaaattctattttctttggtattttctaatttcactatgaaattggtttctctttttagtttatggagttcctgaatctttccaaagttataaaaagttctcaggtgttatatcttcagagatttcctctgtggtacttttgttcttctctccttttgcagttttaatcagatatatccattagactctttctcactctacaatcctgaaactcatatttttcctctccgagctgcattcttgatgacttggtcagatctatcttaatagttcactagtgccctcttcagataggtttaatctaataaaaattcatccatca

SEQ ID NO: 710244 - DNA, 1142 bp, Homo sapiens
tcaaagcaaagggtgtgagggccttatccctggccaaatgagcactgaatttgagagagaccaggaaaccttctaattattgggacactttactcctgaatcctgaatcctggaagttggtttctggccagggaagcaggtgtctttatatcttgtctgtctctgtgaggcctcttgtccctctgcccttcccatctttctacccccgttaatcccagaacagatagaaacattctgccttctttgatgcctcttgctataaacttcaatggcttttgattgaattaataagtgaaatcaactttaataaaacatgaggtttaaagaatggcatttgacatgggtttagaatgaataaatggatcaagtaatgaattttgagaaaatgcatgtaaaatttatctttaattcccaatggcattttattaacttgactgtggaattaataaatgattctaaatcaataccaaaacgtgcaatcacaaatgtgtgaatgcacagaagtgtgaatgaagggcagtgcacacaagaaaaaaagatgtgcacatgaagaacttcttcattccaggtttttactgatccctctrgtcaagatgggataagagtccaaaaatatgctttcctcacatggtcaaatgattcagcataaaatacaactgattgaacacaattatctatgctttaaatatattagaaaaaatccataaggaaaaatgatcctacaatcactaagattttaatttataataaaataaagcctagaaatgtatcttttgttcccaattccaatgattataggatttcagtgtttggctttgataagaccatttaaaacaactcagggaagttttcttaacaaactctatagcaggaccacagctaaacctatgagcattagtagaagtaaacaatgacactgcctttaaaatttcactttgaaaaacatgtctgaaagtggctgactggctcctaatttaactatcattcgaggtcatatgttagattggcaaagttgttgtaatttgtatgtattttatttttgtaatgcaagtgcttcactctactatcagataaaataaaatgttaagctggacatggtggtgcacatctgtagtcccagctactcaggaggctgagtggga

SEQ ID NO: 710245 - DNA, 1142 bp, Homo sapiens
tcaaagcaaagggtgtgagggccttatccctggccaaatgagcactgaatttgagagagaccaggaaaccttctaattattgggacactttactcctgaatcctgaatcctggaagttggtttctggccagggaagcaggtgtctttatatcttgtctgtctctgtgaggcctcttgtccctctgcccttcccatctttctacccccgttaatcccagaacagatagaaacattctgccttctttgatgcctcttgctataaacttcaatggcttttgattgaattaataagtgaaatcaactttaataaaacatgaggtttaaagaatggcatttgacatgggtttagaatgaataaatggatcaagtaatgaattttgagaaaatgcatgtaaaatttatctttaattcccaatggcattttattaacttgactgtggaattaataaatgattctaaatcaataccaaaacgtgcaatcacaaatgtgtgaatgcacagaagtgtgaatgaagggcagtgcacacaagaaaaaaagatgtgcacatgaagaacttcttcattccaggtttttactgatccctctggtcaagatgggataagagtccaaaaatatgctttcctcacatggtcaaatgattcagcataaaatacaactgattgaacacaattatctatgctttaaatatattagaaaaaatccataaggaaaaatgatcctacmatcactaagattttaatttataataaaataaagcctagaaatgtatcttttgttcccaattccaatgattataggatttcagtgtttggctttgataagaccatttaaaacaactcagggaagttttcttaacaaactctatagcaggaccacagctaaacctatgagcattagtagaagtaaacaatgacactgcctttaaaatttcactttgaaaaacatgtctgaaagtggctgactggctcctaatttaactatcattcgaggtcatatgttagattggcaaagttgttgtaatttgtatgtattttatttttgtaatgcaagtgcttcactctactatcagataaaataaaatgttaagctggacatggtggtgcacatctgtagtcccagctactcaggaggctgagtggga

SEQ ID NO: 710246 - DNA, 1287 bp, Homo sapiens
gcacaggagggaatcttctggtctgctggttgctaagaccatgggaaaagcacagtatttgggcaaaagagtactgtttttccaggtacagtctgtcatggcttcccttggctaggaaagggaaatctccccaccccttgcacttcccagttgaggtgaygccctgccctgcttcgacttgccctccgtgggctgcacccactgtccaaccagtcccaatgagatgaaccaggtatctcagttggaaatgcagaaatctacccctcttctgtgtcaatcttgtcgatcttgctgggagctgcagaccggagctgttcctattcggccatcttggaagtgactgaaattgttatttttatgtgttctctgttttgcttcctcaccaagactctaaactctggatggaagtatatctgttgtttataattcccaatagtcttagtataatcccttacacacaacgaccattgtattgtgaccaatgtagtagtaaaaattggaaaagattttcaataaatattatgacaatgaatgcacgtgtgtttacgtgtatatgtacaagttaaagttaccaaagatgattataggtcagcaatgactaaaggtgactaatatcataatgactaaatatggcttggtagggataggaaaatcagcatcttacccatttcctgccagactcaaggtgaataagagaaagctaaaagattgccttgccctaggagacaaggttaagaccgagttactaggcttatggtggtcataaacctgcaaatattctgagaagtcaaagtctgtttgacatccccatatggatattcaatgggcatttcaaacttaatgctttaagaacaaacatcttaatttcccattgctccaacctccttttattcatttaacatatatttattgaagggctactatgtggcaggtactgttttagtcttggaatgtccatcaatgggcataacaaagatctctgcccttgtgttgtttataatctggcagggagaaacaggcagtagatagtaaacacagtaggtgaattgttaagtgttgtagaaaaagcaacaaggtagaaaaagggtaagaggaactgggagtgctggtgggatgggcttggggatagtgatggagagatgtaagtagcaacttcaattggggaggtcaggatgacctgactccattgtcaggttgaaattggagcagagagctggggttgagggagttagtcaagtagtaaggttatccgggggaagagcattccagcaaagggaacaagtagag

SEQ ID NO: 710247 - DNA, 1902 bp, Homo sapiens
tgggttcaagggatgcttgtgcctcagcctcccaagtagttgatattactggtgtgtgccaccacacccractaatttttgtatttttagtagagacagggtttctcttgtagttttcttttttatcttttgataagtatagatgttaccacaggatattttcccttcctcctgctagctaacttatttctgaagagttagtttgaatacccattgaagtaagggtaaaatatgaaagcattttagtcgttgcctttgttttttaatggttttcagatatctagtggtccgtaaatgaatgggttagaacctcacactaatgagtaatgaggtcttttctgtgattcttccatttttggcagagtgttaactaaagcagcaggggatccgagaaacagggtgagaaggatgtgtttggcagagaatgtcataacctagcacctctgcaactttcccacccgtataccctgatagaagacaagtgaatttaagttccaggagacatgggagtatccactacaagcactaaatttcttttgaagccatatatttaatcttaaaaacctaggccaggtgcggtggctcaggtctgtaatcccagcactttgggaggcagaggcaggtggatcacttgaggtcagaagtttgagaccagcctggccaacatggtgaaatcctgtctctactaaaaatacaaaaattatccaggcatggtggtgggcacctgcaatcccagctactcaggaggctgaggcaggagaatcacttgaacccaggaggcggaggttgcagtgaactgagatggtgccactgcactccagcctgggtgacagagcaagactccatcttaaaaaaaatcatgaaaaaaaatccattcatattttgtaatatacccatgtctattctttattaatgtattaaaaataataaattactcaacgttaaaattttgtctctttaggaaactgcaccacatttatcccaaggattcttacgttctctgcacacctgccttcccagggtttgggtactccagctgcaggagtgtggttctgatctgtctcctttatcataggtataatccagttaccaagaatgtgactgtcaagagtgaaggcgctattcaggtcaacttcacacttgttcgatcctcaacagattcaaacaatgaatcaaagaaaggaaaaggggctagcagcagcaccaatgatgccagtgatccaactactaaagagtttgaaactttaattaaagacctttcagcggagaatggtttggaaagcctcatgttacgctcctcctcaaatctggctctggctctttatcgataccattcctacaaagacttatcagagtttctgagaggacttgtaatgaactatccacatattacaaatcttaccaagtaagtgtcactttctattgtctttttttttttttcaagacagtaaaatcagcattagccatgttgaatagttgtaatttatatagaaatatttgggaacagaatgtacagagagttggagtttacttattttgcaacatgtatttgcttggagatcttttttttttaattatgctttaagttttagggtacatgtgcacaacgtgcaggtttgttacatatgtatacatgtgccatgttggtgtgctgcacccattaactcgtcatttacattaggtatatctcctaatgctatccctcccccctacccctaccccacaacagaccccagggtgtgatgttccccttcctgtgtccaagtgttctcattgttcagttcccacctatgagtgagaacatgcagtgtttggttttttgtccttgcgatagtttgctgagaatgatggtttccagcttcatccatgtccctacaaaggacatgaactcataatttttta

SEQ ID NO: 710248 - DNA, 582 bp, Homo sapiens
actgaatctcttgactgggcagaagaatgaattgtttcccagcatctagctttgacataaaagttgctcaataaatacttgacgaatgaatgaactctattaaagtagggttcagtcatagttcagggaaggggccctgaaatagctggctctgaaagaaggtaatgccggttattgcgattatgttgttagatgggtagaatttcgcattcgattaagggatagttttgggtttcttcaagctaaagaaactaaagcctataaaaggtgatttaaaagacctcttctctagacttgaygaaacgctgtaattgccatctttggctgacactgaggagttcaggaatgccaagcaagtgtttccagaaatgtcaaacctgctgttttaaaatatgtcattccagggcacagttaaatatacaacttgctccgatgaggtgggagaagtgggccggtgagctgtgaaatgaaatctgcctaatgagggtcgaggccagcacacacagggacctatttgcagtaaaacaacgtggggtgacgcctaagaaatagacaacattaacacaaagggagcctactacg

SEQ ID NO: 710249 - DNA, 1664 bp, Homo sapiens
attataatttataaaataaaaaaaccctacaaattatcttcacctcttttcctcaaaataaacaaagtatcacacactgcaacatatgatcattggggtttttctctctgcttgctgacaggtgaataacaatatggaacatctgtcttatttagtaccaacagaagtatacgttgatacaataacccaagttgcaaaaatcatgtaactttttaggatctgaatgccaccggtgttttaggcatgtttttaaagattctgtaggaactgtttttaataaaaagaattcagattctggtttgatgcatgaaaacagaactcaattttatttcatgtttgaaagtaaacatgacaaaaataagaatcaatttttaactttccaaaatgctccatgaggtttgcatggctgagacagtcccctctgctctgaatggtttctgttgtcttgaggggaaaataatgctatgggagaaaagtaaagtagggttaaacaacttgaaaaggctggtattcacatatcgcactttgtcataaaagaagtccctgcaacaaaattatcaaattctatatagtgaatgttatgattaacttatgtattttcagtttgccagtacatcatcttctgttactgtgaggcatacatataaaacagattagagcaaatatcattacagagataatttctgaataacaaagttaacttccatgtctcagtgaatggtccacagaaaccaagttttgttagtctagttataatgttacatatgtatatatgtgtgtgtacatgtgtacatatgcacacatgtattgcattaaactaatacaaggtaatatatttatatgaataataatacacaggcattatagtaatacatatttatgtgttaccttaagtaaatatgtatcaaatatatatatatgataccttatataaagattttcttttttttcttctgagataaatcacttytcctattcatcaaatcaaccttctcattctgaagattggtgaaatgaagcccaagaaagttaaaggacttgctcaagcaaacactgtaaataatggcagaactgggactaaagccagagtctcctgacacggaattcaatggcctgtcattccattcctttgcttctctgtaacttaataccataattttgggtactgcattgcaattttcaaaacattttcacatacattatattgtttaagttacacaaaaaatctatgatggtatcaaggaactgaaaggttaatttcactgcccatggaaacactactagttaatgacctgggtctccttactcccagtccctgagatacagctttgtttctcaccaaccattttattcttacttgtcccttcacagttattttgggaggaggagacccaagtcaaggctagggatctataaccctgtacaagtataacctgtacaaagtagtccctagtgtatgattctgggatccctctctcaacctcttctaacactacatcgtgcaggtttgaagaacaggtagctgagactaacaggtaagatccaggattcaatctcatctctgtcagactcctaaggccattctccttcccctggatatgtgatgtggtcacatatgaggactgtggccttcattatttaccaagggtgtctatcagggagcc

SEQ ID NO: 710250 - DNA, 589 bp, Homo sapiens
accttatcaggtaatttgttggagatctgcgtgcatgctgtaaacggaattttactacttttaatggaccctgagcagagctgagtgggcatttgattggaatctcgaccagcctgtttattatcttgctttctatttatgtacagtcactttcttctgraacaatacccaatcatgtcattaacttgctcattttttagtcttctggctctgcctgtcacatacaggaatatttgcgcttaatttgattatttaatagggttctatttccccaaatgtcctggcttacttacaaataaaaacaaattatttctgaaagccatagtctccaggtcatggagtgctcaggcacattttagaaccaccagtggtggagtctgtctattctcctcattccagtccagtggagaggaattttatctatcagaatgggctacagcgtgcttcagttacaaatacataagtcccctgcacccccgccaccccgcactgcaccaatctcagtgtctgaacccaataaggggttaattcttgctcaaggccaggaatagggcaaggcaaatgaagtgcctaggattcaaaatttcag

SEQ ID NO: 710251 - DNA, 589 bp, Homo sapiens
accttatcaggtaatttgttggagatctgcgtgcatgctgtaaacggaattttactacttttaatggaccctgagcagagctgagtgggcatttgattggaatctcgaccagcctgtttattatcttgctttctatttatgtacagtcactttcttctggaacaatacccaatcatgtcattaayttgctcattttttagtcttctggctctgcctgtcacatacaggaatatttgcgcttaatttgattatttaatagggttctatttccccaaatgtcctggcttacttacaaataaaaacaaattatttctgaaagccatagtctccaggtcatggagtgctcaggcacattttagaaccaccagtggtggagtctgtctattctcctcattccagtccagtggagaggaattttatctatcagaatgggctacagcgtgcttcagttacaaatacataagtcccctgcacccccgccaccccgcactgcaccaatctcagtgtctgaacccaataaggggttaattcttgctcaaggccaggaatagggcaaggcaaatgaagtgcctaggattcaaaatttcag

SEQ ID NO: 710252 - DNA, 913 bp, Homo sapiens
aacacaagctctggattttcgcccatacctgttcctctcctgggctcgcctatctcagtaaatggcaccaacattcacccttttgctcaagccaaacatgcagaagtcattcttcatttttctctgttttttctctccagaaattyaattcttcagaaagtccttttgtctctaattttaaattccatatggaatctgtccagttctttcgcttgttcacgctattgtcttttctttcctataaattgaaatagtctcctaattagtattatgtttctgctctttcttaaatatctattctttgtaaagagcagtcaaagttttctttagaaaatatcagcgtagttacagatctctctctttttggagttccactctcaagacagctacctagttatcttcaattctctctttccccaaaacttcatccttcactatattcttctatattccttaccaacccccttctcaggccaaaatcctttaaacttcagcttcatgcaagagctgtctttctctactggtggtggagatttcatctattgtataaaataagcatgtcttttagtctcctggttcttccaataaacaacattctttccccattagaaactggtatgggattgcaaattcccataatttaatatctgttaatttccagaaccaaaagcaaggagaaaaaaagtccgacttcaacttgtccttgttgaggttacattatctagagccttgtcatggtccagcccacagacaaaacttttatggaaccctggatctctgtagcatatccacagcttcttcacccttcctggggcatccccacacaaccctgtaactcagggagatattctttaattagcttcttctgctaccctctcaagtatgattataaacctttttctctcctttgagc

SEQ ID NO: 710253 - DNA, 2236 bp, Homo sapiens
ctgccagggcccttatcacttgcctctctcctccgtgatcacatccacccctaaggctttgcgtgtcacctacttgctgaggatttccaaatctgtatgtccagtgtgcaccattctcactttctatccacttttgtaactgctagtcacccatctctcatgggtacaccacaacttccaaaagccagccttacttctcatcagatgtgttcattctcttgtgtgctacctgtcagaattcagcactatttccttgcagccacccaagccaggagcctgggagctatccgtgatatttcccactcccctgcccccgaccttattcaatccatcaccaactcctgtttatttcacctcctaatagactccagatccatccacttctcttcatgcccctgccacaaggctagccaaaacctccgtcactcttacctgactacacaacaatgtccttccggtctccacctgacaatccatccaccacactgcagcagaatgaaggatctttccaaaatataaactttatcatggtattatctggtagcctcttgttgcccttagaataaacccctctagagctcttcatgatgtggttcccaccttcctctccagcttccatgcacgccacatgcccacccctcaagccccttgctctttttacccaggccataccagctgctcagcatatgttagggtggagaaggtgtagtgcttgccttggccccagaacctccacacttgcagctgcttcagcctgaaatgctctcccacattgcctcgcctggctgtctctagtaggccatcagattccagcttagatgccctttcccctggagagatgcctttgtgctcctagaagaagttaggtacacctattgtgtgctcctactgtattctcctatataccacacgatgtccttatctatatttgtttcatgtcggtttttcccattatactgcaagttcagaaaaaccaagaactccatccctcttgctcatcactgtatctcagtgactggcacaaaaaaaggctcttagtaaaggtctgctgaatgaatgaaaaggggaaggtagtaccccagtagactagcaagagaagtaacatagaatctgagctacctacaatgtcttgctcagtcttatcctcatctaggaaatctrgttacttcagtgttaccaaatagagtaggtccatcctaactttgcaaaataaagtcaaatgctactccttgactcatagttttccattggtttcctgtcttaaagtaaaagccaaagtccttaaaatgaccttcagatccaacataatgtatccccctcctattagactgttgttggaacaagcgaggcccatggccatctcaggtcccttgcacttgctgtgccctctgcctggaatgtgcacctccatatatctgtagggcttgctgccttactattgttggccttcatctaaatatcaccatcttagtgttgcttttcctggagtctatttaaaattagaatcccctgatattcctttttgtccttctctgccttattgtgcttcacagcacttagcactgactaaaaccctagatgttttacttatttactgttcattgtctgcctcctcccacaagaatataagctccctaacagcagagactgcttgcctgtgtcattcgctgcagtatccccgacatttagaacagccagagtgagaaaatattgggggagtgaatgaacgaatgccctctcgtgtccatgcctgaccactgcacgtcacgtttgactgttttgccttttgcttccacagcctcctgtgcatccttcctaggagtccctttcgaacattccaccatctgcggtgtctgcaacagattacgcgagtgattgagagtttgagctgaatataatctatcagtcttatttcccacccccacacctgctctaactgctcccgatttagcaagtgctattatatagagaggctaattataggggagtgtaacaaaagcagcttcatgttgaaatagcattcacgtgcgccctcctgagaggcagtcaaacgtatatggcagactggggatgtcacaggatatgcacgagacagctgggtttcaactgagcatcactaaatggaactgaggagtcaatcaaaccgcgtcagtctagagaagggcatggagaatgtcttcctaaaatacagagacattttccagggatccgccaggaacctggccctccttagtca

SEQ ID NO: 710254 - DNA, 796 bp, Homo sapiens
agaatcacttttccatttccctctaaggtgcaaaggaggtaaagcaaagatagacacaaagtcatgggagccacaagactcttgtcctgccactgagctagctaagcaatctagctctcgacttaaggcagaaaattcaatgagtaggtagcagccagtgttggaagcagtccaggatggtggcaccaatgacaagattaaggtcagagacctcgtgatgccccgctagccaccacgatttttctgttgccttctgttcatcccacgtagatactatctggaagccccctccccaaaatgaaaacaactggaattctacggcttgcccaaaatgcatagaacactcatatctggttaaaaccatagaaatcaaaaagaaaaagtgaaatggctatgaagtatttgcaaggccaatttcacttactacttgttgggagttggaaacactcaacagtaaaatatctagggataattacaacccttatgtaacacaagtaaatctttcccttttttgtcacttagagaagcaacataaatacatctaggaccaggccagggtagtaatcagaaagaaaaatctgtatyagacatattgaggtcttgacagagaagtacttcgtttgtttagccgtagttttccctcaagatcatgcgaagggggtgatgttgaagactgctggagactaaactgtgtgtgttggaggaaagggggaaagctcagctctccctatttctcctccaactatttggtaagactcggtgatagaaaaacatctcctatacgaatggccttggt

SEQ ID NO: 710255 - DNA, 1522 bp, Homo sapiens
aaagaaaaaagcaaattaggctgtctctctccagcatgccttggagcatgctgacccttgtcttgcaagttcttccatctcccattcaaacggttggccgcccctaccctctcagagctcagctcatgcctcatgtcctctgcgaaggcttcgttcatctcccctgctggatgaarcccacctatcagaggctctcaaggacctgtgcctgtttctcctttgtcctgccttggttgttgattagctgcctcctgtttctgctcctgaactgtgaaggccatcaggtggtgccactctgtgtttttgcccagctctttatttacggtgctcagcgcagtacatgtcacttaggatgttctgaatagatattacctgagtagaaggaaggaagcagaaaagggaggtgggcgggaggagtaagcacttgtggttacaaaaggaaggtggaagacgttaaaagccctgggagcattctgactcaatgtgagaagcataatcagatctaaaacaagataatggcaagaggcagaagctcttgagactatgggccttctcctgtaattttacacaaagtcgctagtccccagggagtggagtttgtgtttaaagatcgttttcatttctggatgctcatgtgttgttgcaggcgtgattttgtgaagaacgtacttgagaagtttcagcactcctttattagtcagtgctaacttaacctcctggagagtacttacagaaatgactgcaagtacagtaacagggaacaaaaagccagaaactaaataaatgtacttggatgtacatcagaaaactctagtgtagaaaccacacattgctcatgttggttatttatagtcttaactttgatttctgcaaagtggatatgatacatcttctccactacttcaagcacagtccagctcctgtgactttcttatccatccatggttttactctcacctcagtctattagcatttatttttattgtcatctgacaataaaaataacatttatttgaacaagacagaattctgaagtttgttgcatcaaagggcaaatcgacttccaattttgaattactatatgcctgtggaaaatgaagagctcaatgtaagaatatgatgtaattgttaaatatttattctctggtcatggtcaaattgcattataatttttggagcaacataaaatgaggagcaatgtaaataaactcactaacaaatgtcacacaaaaaaggaattgaggttgtaattatttttagcaacctcttggaaaccattaagctgtggttttgagatggagatccagacattgtgcagttccttcatccataagcctgttggacagatcccacctgaaatacactgaagtagaagggatattgatttccacgagttctgggaaggtggtaaagtctaagagatattggatgtagggctggattatgcaagctgtacagctctggattcagatcttcaccttaagtcttaccagctgggaggccctgggtaagctaacatcat

SEQ ID NO: 710256 - DNA, 627 bp, Homo sapiens
agagaattcaggccacttgttatcaaaagcagaaagtgtggcattttccaaccttcctgacccctcctcatagtcctctgggtggcctccttgaatgctttactttactacagttttctgaggccaactcagcttccttagggtttcagctatttttttttctgtcctcttaggtatacagagggttagtctggaaatactacaatccatggatgagctgagcctctaagcaagactgctcctggagaaaggtgttattgcccaatcatccctcccctcaattaagagcaggctcacttacaagtactagtgttgggggacaaaaaaatctattagcaaaataaagcagctaacaaacttctactagaccctgtggttaacttctttccatgtgttcaaaattgaaagctggttgcaatgacacttttaatcagtagaacacattacatggccacacaattacaaaaatggcrcaaatgctgatatcaagaaggtcatccttgtagtcatggtcagagcttagcaaaaactgcactttcttaaatgcactattcttaaaatagatgaaggcagaatctccaacactcagtgatgatggaaaagtacctgcaagccaaaagtgacaag

SEQ ID NO: 710257 - DNA, 647 bp, Homo sapiens
attttattaattatttttggacctatgcttatgagatacactgacctgtagaatcctttccttgtaatgttccactggctgtttggtttggtttgggtgtctcacaaaattaactgtcatgtgttgagcctttttaaattcttttctggatgaagttatctatatttgatattatttagtcatcaaatatttggttgaattctccagtgaagtcatctgatttggagttctgtttctgctaaggctctttactactaattcaatttcattaatagatataggatatttsggttgtctgttccttcttgagtgaactttaatagctttgatgtttcaagcaatttgtgcatttcgcatagctcatgaaatatattggcataaagttgttataatgttactttattatcttcccaatggctgcagggctgtagcaattgttctgctttcgttccttatattgatattatgcatcttcttcatcatcctgaggcaagatgggctaaatctgtgtattataaccatagaagcagggcgggtaggggggaagcttattgtttcccagaagcagatgagctttgcttccatccctctcccagaagaaatgacttttttcttgagccctagaggtgagaggagttgctgcctcc

SEQ ID NO: 710258 - DNA, 637 bp, Homo sapiens
caaaggcctgctgggataacaggtgtgagctaccgcacccagctggaatattaaaatatttgacagtaattgtgaatttgcctatttccctttgcagttttatatattataaaacggtgtttccttttattctacttttatagtcattttaaatatattattcacataacaaaattcactatgttaaagtgtgagtatactatatacatccatataatacaatactayttaaatttaaatatataattcacgtaacacaattcacccatgttaaagctgtgttgcacaaccatcaccatttaattccagagcatttatatcacccaccaaagaaacagtacacttattagctctcctctcccctccccttccctccccttctcttttttcttttttcttttctttttttttttttttttgagatggagtctcactctgttgcgcaggctggagtgcagtggcactatcttggctcactgcaacctctgcctcccgggttcatgccattctcctgcctcagcctcccgagcagctgggactacaggcacccaccaccacacccggctaattttttgtatttttagtagagatggggtttcaccgtgttagccaggatggtctcaatctcctgacctcg

SEQ ID NO: 710259 - DNA, 915 bp, Homo sapiens
gtgttaagatttcaccatatgaattaggggtgagaggacttaaacattcaaaccatagcagtcacctttgccatgtaaggtaacatatttatagattccagagattagggcatgggaatatttggggggccgttctgcctactacaatgatctcatcacaatgataaatgttagcagacattgctctgataacgacaacagctgctattttttaaatgtcactctataccagccactgagatagatacttcaaattgattggatcatttaatccccatcacagaagagcaaagtagagactattattcatctcattttacatgtatattttttaaaaagccaagacattgaatgctttggtgtcttgccctgggtgactcagaaggaaagtgtgaagctgagaccctagccaggaggtctgactccaaagccttggctgctaatctttttgcataacccatgtcttccttgtatctatgccatctttatgatctgcttacttgtacattgccactcccttctggtgctcaatggctctkatttccttaagatagggttacattattcacccattacagaccactccaagacatgtgttttgctcaatgattgtgtgtgcacctgtgcacctatgcacatgtatataatggtggacagtttagccattggagctccccagtaggagccagtgacattagtcacatccagaaacacagtaaaatgatcaccatcgcaggtgaacgctgactcttttccaaaggaatatcgcagaagctggtaaaacagtcgcatccaagatcaaacaagacatcggccactggaggatggtggtcacttctgcaaaatggatcaggaggatttagaaagtcattatggcagaatgggatttggggttgccaaggcctattggacctc

SEQ ID NO: 710260 - DNA, 2685 bp, Homo sapiens
tctgcatactggagcgttttcaagagcccttctctgacctcacacacagcgaatgtctgagctctgtaggctatttgtagagagtttatttcatctttgcagaaagctgcccagtataaatattagtcagttgatttcacacagagtwaaaacaagcttttaaaagcttttacctctcctgtccccaaataggtgctttagacagattctctgagccttgggagctttgttggatttggtaaagtgaaagttatgttctgttccgaagcagccttctgtgaaggctgtcttggggttgatgctgtaattgtgcagaaaggtaaaatgaagaataacaaaggtggcgtgtggggtgggatggagatcaagcttccctgttctggatatatctccataagtccatttcaaaaaatgttcacgtttggtgccaaggtggtcacttggtattgtaaaggagtggtggcttcaaatttaaatagtctaagttcaatcttagctctattaatgaactagctaatggtgtacatgggtctcactcagcctctatgacacctgaaccaatgagtatagctagcattgtccaacagaaatataaccatggtcacaaatatgaatcacatatgtagtgggtttttttttatactttctggtagccatattaaggcaaaacaaaatgcgtgattttaatttcaatattttattcaagcagatatatcccaatatataaccaagcataattttatttacccagtatatccaaagtgttaccattcaacatgtaatcaaactgacactactaaagagatatgttgcattctttctcttgtatgacgtctctgaaatctggcgtgcagttgccatgtacagtacgcctcatttcagaccagccacatttcaacacccaatgaccacacatggctagtggctaccatgttaggacagcaaggtgaaactacaatgcttaagctgatctagcaagctcttaaagctctctgactaggattacaatatctgcttcacagagagcaaatgagatcgcatgaaaattgtcatgtgccccaactttctcctctgaagtgttagtgtataagcaacagattaagagggtaaggtgtcacaacatccttagctgtttacctaattgttgcatttctatcactggacctcaaactccatgaagtagacaatgacatcactcaatactaggtcttccgtgactagcacgtaatagatgtattaatttcccagggctacgaaaacaaagaaccacaaactgggtgacttgaaatagaaatttactggctcacagttctggaggcctgaagtctgagacaaaggtgtggataggactggttccttctgagtgctgggaggacaatctgccccatgctgctctcctatcttctggaagtttactgacaatctttggcatcccttgagttgtagaagcatcacccattcatcttcagatggtatgcatatctgtgtccacactttcccattttataagacacagtcatatggattcagaagcccaccctgctcgctactcaggcatgacctcatcttaactaattacatctgcagtgaccccattcccagattaggttacattctgagatactgggagctgggactttagtattggaatttgaaaataagacaattcaaccaataacagtatgtgttcaataaattcaagtcagatatatgaaaaaataaaaattgagtataaagataatttttggctacattgactggattccaagaatcttccattctgtctaaagaagatagacacgttaaaaatcaaacgagaaaaaacagtaagtgaaggggatgaatgcagccagtgggtagttagactatgcaaaaacaagtgcgccagaatcacaactcaacgtatattaaggctttcatttggtggtgttttgaattagaaatatttaatgtcgatcagcctcagtttccttagcattatctacttcgcagttgttgagacaattaactacaatatcctaagttgcacacaattattgggccagacttctacactgtgagtatctgcaaaaaaaagaaaaaaaaaaaacattgttcactgctgtgcttcttccctctgatttaccaataagggaaacatcttccatatttccaaaaacccctggttttccttgagtacaccttgacatcatgcaaaacatcttcttcctcaagtcagccaggccctgctgtacgctaagctgcaacccactgggctcagcattcaatcaggcagacatccttaaaagatcacacatccttagctatggaagaataatatttatgcactgcttaatcatgtgaagaagcacagactctccagtctcaagtggagacattgggtgatgtataggcttagagatcctcatattgggaaagagtcagttactgatcttggctcttcacttgccaagatggaactgtttggtttcaattctatgaacatacttacaaagtagtaggaacttcaatactgtgtgcttctgcttagttgggttgtactgaatttgtaagtccagtgaggttgtattttccctttgttctgatgagaggtctagccactttgtgtttcaactgttataatgtccatattcagttttcttattcccccataaaagttcatgagatagaaatggaggaaacgta

SEQ ID NO: 710261 - DNA, 2685 bp, Homo sapiens
tctgcatactggagcgttttcaagagcccttctctgacctcacacacagcgaatgtctgagctctgtaggctatttgtagagagtttatttcatctttgcagaaagctgcccagtataaatattagtcagttgatttcacacagagtaaaaacaagcttttaaaagcttttacctctcctgtcccyaaataggtgctttagacagattctctgagccttgggagctttgttggatttggtaaagtgaaagttatgttctgttccgaagcagccttctgtgaaggctgtcttggggttgatgctgtaattgtgcagaaaggtaaaatgaagaataacaaaggtggcgtgtggggtgggatggagatcaagcttccctgttctggatatatctccataagtccatttcaaaaaatgttcacgtttggtgccaaggtggtcacttggtattgtaaaggagtggtggcttcaaatttaaatagtctaagttcaatcttagctctattaatgaactagctaatggtgtacatgggtctcactcagcctctatgacacctgaaccaatgagtatagctagcattgtccaacagaaatataaccatggtcacaaatatgaatcacatatgtagtgggtttttttttatactttctggtagccatattaaggcaaaacaaaatgcgtgattttaatttcaatattttattcaagcagatatatcccaatatataaccaagcataattttatttacccagtatatccaaagtgttaccattcaacatgtaatcaaactgacactactaaagagatatgttgcattctttctcttgtatgacgtctctgaaatctggcgtgcagttgccatgtacagtacgcctcatttcagaccagccacatttcaacacccaatgaccacacatggctagtggctaccatgttaggacagcaaggtgaaactacaatgcttaagctgatctagcaagctcttaaagctctctgactaggattacaatatctgcttcacagagagcaaatgagatcgcatgaaaattgtcatgtgccccaactttctcctctgaagtgttagtgtataagcaacagattaagagggtaaggtgtcacaacatccttagctgtttacctaattgttgcatttctatcactggacctcaaactccatgaagtagacaatgacatcactcaatactaggtcttccgtgactagcacgtaatagatgtattaatttcccagggctacgaaaacaaagaaccacaaactgggtgacttgaaatagaaatttactggctcacagttctggaggcctgaagtctgagacaaaggtgtggataggactggttccttctgagtgctgggaggacaatctgccccatgctgctctcctatcttctggaagtttactgacaatctttggcatcccttgagttgtagaagcatcacccattcatcttcagatggtatgcatatctgtgtccacactttcccattttataagacacagtcatatggattcagaagcccaccctgctcgctactcaggcatgacctcatcttaactaattacatctgcagtgaccccattcccagattaggttacattctgagatactgggagctgggactttagtattggaatttgaaaataagacaattcaaccaataacagtatgtgttcaataaattcaagtcagatatatgaaaaaataaaaattgagtataaagataatttttggctacattgactggattccaagaatcttccattctgtctaaagaagatagacacgttaaaaatcaaacgagaaaaaacagtaagtgaaggggatgaatgcagccagtgggtagttagactatgcaaaaacaagtgcgccagaatcacaactcaacgtatattaaggctttcatttggtggtgttttgaattagaaatatttaatgtcgatcagcctcagtttccttagcattatctacttcgcagttgttgagacaattaactacaatatcctaagttgcacacaattattgggccagacttctacactgtgagtatctgcaaaaaaaagaaaaaaaaaaaacattgttcactgctgtgcttcttccctctgatttaccaataagggaaacatcttccatatttccaaaaacccctggttttccttgagtacaccttgacatcatgcaaaacatcttcttcctcaagtcagccaggccctgctgtacgctaagctgcaacccactgggctcagcattcaatcaggcagacatccttaaaagatcacacatccttagctatggaagaataatatttatgcactgcttaatcatgtgaagaagcacagactctccagtctcaagtggagacattgggtgatgtataggcttagagatcctcatattgggaaagagtcagttactgatcttggctcttcacttgccaagatggaactgtttggtttcaattctatgaacatacttacaaagtagtaggaacttcaatactgtgtgcttctgcttagttgggttgtactgaatttgtaagtccagtgaggttgtattttccctttgttctgatgagaggtctagccactttgtgtttcaactgttataatgtccatattcagttttcttattcccccataaaagttcatgagatagaaatggaggaaacgta

SEQ ID NO: 710262 - DNA, 571 bp, Homo sapiens
agagccaaagagttcatctacgctatcttctcrttgcacatatttaaaaagatcacataagttatgggttggaaacggaaggccaggcacagtggctcacatctgtaatcccagcactttgggaggccaaagcagatggatcacttgaggccagtgattcaagaccagcctggtcaacatggtgaaaccctgtctcgacacaaaaagtacaaaaattagccaggcgtggtggcgggcacttgtcatccccactgctcgggaggctgaggcagaagaattgcttgaacctgggaggcggagcttacagtgagctgagatcatgccaccacactccaccctgagtgacagaatcagactctgtctcaaaaacaacaacaacaagaagaaaaagaaaactcaaatactttcacatccaggcaagtaacatccatgcttagagagattaacttatgttggagacattggcaaaataaatttttagttttctccattaaggtaggcattacaaaattacaagcgtgatggtatgcaaccctttggtggggaccctgtagtaatttagcaaacaaat

SEQ ID NO: 710263 - DNA, 643 bp, Homo sapiens
tctacatccatgaggcttttcagcaggacctgggtaaaggaccatcaggtggaaaatgcaagatgaactattgcaagccacattgaaggagaatttggctcactaccaggaacattgcctgcccccgaagctatttagctgtaggttttggccttcaggtgggcttagttgcagggctaaataattttctttaaagagcttcatcatccaggcaaacatcacagccacagtgccagatcctgtgtcaaagaaattaaaggctcattcctccatgcactaagttgtgtcataactgtaggagttggcctgctggggtatgtgtgtgtgtgttttcccatggaaatgaccaaagcaggcagcacttgttgaagtacgtcaacattactgcagcacgtcattccttttatgacatagcgacctcttttcttttctctgcgctrtgatcttcagttaatttttagggagggtggggcatgaaagctccctgaacatcgtgagaatttctttccacagatgcaaacaactctgttatggagagtgtaactcaagatagcctttttggaggacagattggaagtacatttccagttctcacattcctctcttttgaccgaggaatttatattttttcagtagaagtcat

SEQ ID NO: 710264 - DNA, 1502 bp, Homo sapiens
atttcgtcactttccatttattgaatacataccaggaacttggccaagttagcacacattaatcaatcacaaagcctcaaaaggtatgaactcattattctttatttaccagttaagaaaatgaccactgtactgcttcctattcaatccaacagtataggcaaaatgactaaatacattgtctaaatacatgacttgcacttaaaagctgaagtcaactggtaggtcttttgataccagagcatcttggaagaatggtttgccagctaacaagatgtctttatttcaaaatgcgattcagggtgtgttaggaaggaaaatgcaaatgaaaccttccagtacataccagggctgatgagaaacttgctaattatgcccatgttatctgagtgtttgttttgtatttcactttgtaagattgtcttctctcggtcgttattattttacacctggctgcctacattgatagttttgtcccaattatgtacttctagattgcttataaacaggtcaggatgattcctcactcataaatttgataggcttctgtgtaagctttctatcatagtttcaaagttggtatctgatgtggatggcatttactgccagctggaggcaatagttgctaattgcagagaagtatcaaatgctaaatgtctgaaatgttaaaactctagaaccgagagtatggcagtggctataatgatacctaatgtgactgtgacttttcccctcgttcctgccaaatatgtgggtgtcaatgtaacgtcatgttatacagccttatttggaagacaggggaggtgaaacaatcagttatgctgatgatgttacatggtctaggcaaacagagcacaacagcactttctgcagagatggaaacgttctgtatttgcattattcagtatggaagcaataactacatgtggttcttgagcrcttgaaatgcagctaatgcaaacaaagttaaatatcttgttttaattcagttaaatgtaaattgtcacatgtggtcaactgtagtggacagcaaaagtttgtacaattagaacctcaaaagaataagtcaatcagctggttatttgaactccagaatgccaactagtcttttcacattttttacatttaattatgttttatctgcacaattacctgaacaattatgtaggcatatcttcagattctgaacagcgtcggttaagaaatacacactgtcctgcctttaaagattattacccccttcttgatgaggttctcgctccccacctcccaaccccagcagctcccagtccccttcctttgctttttctagcctatagtgcttttctctgtctgccaacactctatctatggatttattgtctgtgttgccctcatgagaatgatgctccctgagggcagggatttttgtctgcttttcccactgcctaatcccagattcataatgagcacccagtggacgctcagaaaacacttgctgaatgaatgcatgcatgcatgcg

SEQ ID NO: 710265 - DNA, 695 bp, Homo sapiens
gtctcaaaaaatctcctgacaccagaaagccacagagcagaagcatcacagggctctctgatttgccataggatcgtttaatctgttttatgatactgtgctagtagaattttccaagttcacaatcacaaacaaacatactatcctcaactgtgctagaattaaattatctttgccccccscccctttctgttatattaaattagtatccttcttctccaaacaggcagctcccactttgagggtgggggaggagtacttgtccatcaaacatggggaaaatgactcctacttccatcgcacagtgaatcataggctctcccatgtcagattctgtggaaaggatgttaatagagacaaaaggacactgttggcgcgttattaatgttaaaaattgttgacgttccatgcagtgtgtttttctaattagagccaagctgcagagtaccatttccataatcaacatgggaacggaaactcagcaaaatttcatgtatttgcaatgaaactgctccccggcaacataaaaatggcttttataacataaaggctgtaattagaataagtcaaatcagttggaaacgattaaggccggagtaggcaaagctgccttctaaatatttgtctggagattagcctactcctgcagctctgagaagcatctttgatttacttatactgctcgacgtggcaaa

SEQ ID NO: 710266 - DNA, 695 bp, Homo sapiens
gtctcaaaaaatctcctgacaccagaaagccacagagcagaagcatcacagggctctctgatttgccataggatcgtttaatctgttttatgatactgtgctagtagaattttccaagttcacaatcacaaacaaacatactatcctcaactgtgctagaattaaattatctttgccccccccccctttctgttatattaaattagtatccttcttctccaaacaggcagctcccactttgagggtgggggaggagtacttgtccatcaaacatggggaaaatgactcctacttccatcgcwcagtgaatcataggctctcccatgtcagattctgtggaaaggatgttaatagagacaaaaggacactgttggcgcgttattaatgttaaaaattgttgacgttccatgcagtgtgtttttctaattagagccaagctgcagagtaccatttccataatcaacatgggaacggaaactcagcaaaatttcatgtatttgcaatgaaactgctccccggcaacataaaaatggcttttataacataaaggctgtaattagaataagtcaaatcagttggaaacgattaaggccggagtaggcaaagctgccttctaaatatttgtctggagattagcctactcctgcagctctgagaagcatctttgatttacttatactgctcgacgtggcaaa

SEQ ID NO: 710267 - DNA, 2888 bp, Homo sapiens
ggagagaagcccagtgaagatttttgaaagaatcaacttagcatccttggtagttataatagttaggacaattctaattgaagtttctgaaacccagctagcttagcaaaagaggggaacttgctggaaaaatactgggtgtattagtccgttttcacactgctgataaagacatatgtaagactgggtaatttataaagaaaaagrggttcaatggactcacaattccacggggctgaggaggcctcacaatcatgacaaaagatgaaaggcacgtcttacatggtggcaggcaagagaggataggaaccaagtgaaaggggtttccccttataaaaccattagatctcgtgagatttattcactaccatgagaatagtatgggggaaaccgccgccatgattgaattatctttcaccaggtccctctcacaacatgtgggtattatgggagatacagttcaagatacaatttgggtgagaacacagccaaaccatatcactggggcataatgtagaatccaaagaagagttgaactccaagtagcaagaaggtcaggaaagcactgagttcagggccacctggaatctagggaccaacacattgccaagatatcttatattagttcattttcttgctgctaataaagacatacctgagactgagtaatttattaaggaaagaggtttaatagacttacagttacacatggctggggaggcctcacaatcatggcagaacgcaaatgaggggcaaagtcacgtcttacatggcagcaggcaacagagcttgtgcaggggaacccccatttataaaaccatcagatcctgtgagccttattcactcccacgagaacagtatgggggaaaaccccccacaacacacacacaccatggttcaattatctctacctggccctgcccttggcacatggggattattacaattcaaggtgagatttgagtagggacacagccaaactgtatcgtgtctctcccctgaatctttctgctgtggctgccttctttctgctctcccctgattggctttatcggtaaggtggattccatgtgacctggctactgcagcttcgtagattgatattttacagcttcagctaccagaaggcctggctgtctttctcagtgccagtcccacatttctcaggaagagaccaggagcctgcctttgaccaatcaaatgtggccaggaaggcagcagggttttgttatataaaatggttgtttctatgatagtcacacggtggtgggggctagggggtggcaggatgggaaactggactgggcagacacatctactgtccaggtcccagatcttgggcctctctgctgggtgagggaccatgcttggcttttggctctcttgatggagactggtgggatatcttccttgctctggagtaagatggaagtgaaacaacgaggatgtatgtaggaacgtcactcatttgtctaggacgttgtgagtgatttctttgctgaattggataatggcttttgaagcatggaagtctttcctcaatcttttgtgtgtgccattcacaatgtaatggctatagaaatgacatgcttttaatattaacctgcatttttaacattttctccatcactttttaaagtctggaagtccagaggacagtaagtcaagccctggtctgtagcatctgccaatttccatggtgtaaacactctcaccgtggtcaatttcaagggaccactgggacgtcactgaacagggatctgggaaggagtgcacagcagcacagctttctgcactatttccaccccgcagatattccacaggtgaataaccccaagtgtgcagataacagtagaaagttgtaaaataatttggagtgatacattttgagctttcattacctgtgtttccaatacaatttatttaattatacatttatgtaatttaactttgaagaatggctttgtttcataactggtttgcaaaattcttgaaaatttgacagctggagattgcgagctggcactgaccagctctggcaccccctggggtttccccagagcttggcatgagacctgccacagaggagacactgaatgcatgcctgcctgatgaacgcgtattgtccacctggtctctaactctctgagggcctggccaagtcactcacctcctctttctgtccctctaatgtaagaggctattaatgcttacttcatagaggtgctgtgagagttaattaaggtttgctaaatgctttgaaatccgtggatgaaaggcccagttggggagaactttatgattattctcatgcatcatcttaagaagtgtatggtgatgatacccacctggtacttttcatcttcaaagtgttctccagacattagccaattaaacgtcacagttccctgcccagtcagtgggtgtcctccagggagggaaccacgcagcaagtgggtgactccttcccctcttggccaccagggagtggtggtcagagccaggattccagctcctccagctgcaatcttccgctgggctctgttttgaccctcccagccctccatcttttctgcttctaggtatggtgaggactgcttaggctccgggactctgaaatcacgttgcttcttatatagtgtgtgtgatgctactcactgaatgttttcagtggtgagatgcattttttccctacaattgaacatctctgaaatcagtatgcatcttataactgatgaagggttatagttcaattaaaagtgtttttcttcttactagtaaataatataatagtgcatcatacaattgttgtcgtatgtcaacaattgttgaaatatattaccacgatttctatttgtagtttattgtagatttgtagtttttttcct

SEQ ID NO: 710268 - DNA, 2888 bp, Homo sapiens
ggagagaagcccagtgaagatttttgaaagaatcaacttagcatccttggtagttataatagttaggacaattctaattgaagtttctgaaacccagctagcttagcaaaagaggggaacttgctggaaaaatactgggtgtattagtccgttttcacactgctgataaagacatatgtaagactgggtaatttataaagaaaaaggggttcaatggactcacaattccayggggctgaggaggcctcacaatcatgacaaaagatgaaaggcacgtcttacatggtggcaggcaagagaggataggaaccaagtgaaaggggtttccccttataaaaccattagatctcgtgagatttattcactaccatgagaatagtatgggggaaaccgccgccatgattgaattatctttcaccaggtccctctcacaacatgtgggtattatgggagatacagttcaagatacaatttgggtgagaacacagccaaaccatatcactggggcataatgtagaatccaaagaagagttgaactccaagtagcaagaaggtcaggaaagcactgagttcagggccacctggaatctagggaccaacacattgccaagatatcttatattagttcattttcttgctgctaataaagacatacctgagactgagtaatttattaaggaaagaggtttaatagacttacagttacacatggctggggaggcctcacaatcatggcagaacgcaaatgaggggcaaagtcacgtcttacatggcagcaggcaacagagcttgtgcaggggaacccccatttataaaaccatcagatcctgtgagccttattcactcccacgagaacagtatgggggaaaaccccccacaacacacacacaccatggttcaattatctctacctggccctgcccttggcacatggggattattacaattcaaggtgagatttgagtagggacacagccaaactgtatcgtgtctctcccctgaatctttctgctgtggctgccttctttctgctctcccctgattggctttatcggtaaggtggattccatgtgacctggctactgcagcttcgtagattgatattttacagcttcagctaccagaaggcctggctgtctttctcagtgccagtcccacatttctcaggaagagaccaggagcctgcctttgaccaatcaaatgtggccaggaaggcagcagggttttgttatataaaatggttgtttctatgatagtcacacggtggtgggggctagggggtggcaggatgggaaactggactgggcagacacatctactgtccaggtcccagatcttgggcctctctgctgggtgagggaccatgcttggcttttggctctcttgatggagactggtgggatatcttccttgctctggagtaagatggaagtgaaacaacgaggatgtatgtaggaacgtcactcatttgtctaggacgttgtgagtgatttctttgctgaattggataatggcttttgaagcatggaagtctttcctcaatcttttgtgtgtgccattcacaatgtaatggctatagaaatgacatgcttttaatattaacctgcatttttaacattttctccatcactttttaaagtctggaagtccagaggacagtaagtcaagccctggtctgtagcatctgccaatttccatggtgtaaacactctcaccgtggtcaatttcaagggaccactgggacgtcactgaacagggatctgggaaggagtgcacagcagcacagctttctgcactatttccaccccgcagatattccacaggtgaataaccccaagtgtgcagataacagtagaaagttgtaaaataatttggagtgatacattttgagctttcattacctgtgtttccaatacaatttatttaattatacatttatgtaatttaactttgaagaatggctttgtttcataactggtttgcaaaattcttgaaaatttgacagctggagattgcgagctggcactgaccagctctggcaccccctggggtttccccagagcttggcatgagacctgccacagaggagacactgaatgcatgcctgcctgatgaacgcgtattgtccacctggtctctaactctctgagggcctggccaagtcactcacctcctctttctgtccctctaatgtaagaggctattaatgcttacttcatagaggtgctgtgagagttaattaaggtttgctaaatgctttgaaatccgtggatgaaaggcccagttggggagaactttatgattattctcatgcatcatcttaagaagtgtatggtgatgatacccacctggtacttttcatcttcaaagtgttctccagacattagccaattaaacgtcacagttccctgcccagtcagtgggtgtcctccagggagggaaccacgcagcaagtgggtgactccttcccctcttggccaccagggagtggtggtcagagccaggattccagctcctccagctgcaatcttccgctgggctctgttttgaccctcccagccctccatcttttctgcttctaggtatggtgaggactgcttaggctccgggactctgaaatcacgttgcttcttatatagtgtgtgtgatgctactcactgaatgttttcagtggtgagatgcattttttccctacaattgaacatctctgaaatcagtatgcatcttataactgatgaagggttatagttcaattaaaagtgtttttcttcttactagtaaataatataatagtgcatcatacaattgttgtcgtatgtcaacaattgttgaaatatattaccacgatttctatttgtagtttattgtagatttgtagtttttttcct

SEQ ID NO: 710269 - DNA, 2888 bp, Homo sapiens
ggagagaagcccagtgaagatttttgaaagaatcaacttagcatccttggtagttataatagttaggacaattctaattgaagtttctgaaacccagctagcttagcaaaagaggggaacttgctggaaaaatactgggtgtattagtccgttttcacactgctgataaagacatatgtaagactgggtaatttataaagaaaaaggggttcaatggactcacaattccacggggctgaggaggcctcacaatcatgacaaaagrtgaaaggcacgtcttacatggtggcaggcaagagaggataggaaccaagtgaaaggggtttccccttataaaaccattagatctcgtgagatttattcactaccatgagaatagtatgggggaaaccgccgccatgattgaattatctttcaccaggtccctctcacaacatgtgggtattatgggagatacagttcaagatacaatttgggtgagaacacagccaaaccatatcactggggcataatgtagaatccaaagaagagttgaactccaagtagcaagaaggtcaggaaagcactgagttcagggccacctggaatctagggaccaacacattgccaagatatcttatattagttcattttcttgctgctaataaagacatacctgagactgagtaatttattaaggaaagaggtttaatagacttacagttacacatggctggggaggcctcacaatcatggcagaacgcaaatgaggggcaaagtcacgtcttacatggcagcaggcaacagagcttgtgcaggggaacccccatttataaaaccatcagatcctgtgagccttattcactcccacgagaacagtatgggggaaaaccccccacaacacacacacaccatggttcaattatctctacctggccctgcccttggcacatggggattattacaattcaaggtgagatttgagtagggacacagccaaactgtatcgtgtctctcccctgaatctttctgctgtggctgccttctttctgctctcccctgattggctttatcggtaaggtggattccatgtgacctggctactgcagcttcgtagattgatattttacagcttcagctaccagaaggcctggctgtctttctcagtgccagtcccacatttctcaggaagagaccaggagcctgcctttgaccaatcaaatgtggccaggaaggcagcagggttttgttatataaaatggttgtttctatgatagtcacacggtggtgggggctagggggtggcaggatgggaaactggactgggcagacacatctactgtccaggtcccagatcttgggcctctctgctgggtgagggaccatgcttggcttttggctctcttgatggagactggtgggatatcttccttgctctggagtaagatggaagtgaaacaacgaggatgtatgtaggaacgtcactcatttgtctaggacgttgtgagtgatttctttgctgaattggataatggcttttgaagcatggaagtctttcctcaatcttttgtgtgtgccattcacaatgtaatggctatagaaatgacatgcttttaatattaacctgcatttttaacattttctccatcactttttaaagtctggaagtccagaggacagtaagtcaagccctggtctgtagcatctgccaatttccatggtgtaaacactctcaccgtggtcaatttcaagggaccactgggacgtcactgaacagggatctgggaaggagtgcacagcagcacagctttctgcactatttccaccccgcagatattccacaggtgaataaccccaagtgtgcagataacagtagaaagttgtaaaataatttggagtgatacattttgagctttcattacctgtgtttccaatacaatttatttaattatacatttatgtaatttaactttgaagaatggctttgtttcataactggtttgcaaaattcttgaaaatttgacagctggagattgcgagctggcactgaccagctctggcaccccctggggtttccccagagcttggcatgagacctgccacagaggagacactgaatgcatgcctgcctgatgaacgcgtattgtccacctggtctctaactctctgagggcctggccaagtcactcacctcctctttctgtccctctaatgtaagaggctattaatgcttacttcatagaggtgctgtgagagttaattaaggtttgctaaatgctttgaaatccgtggatgaaaggcccagttggggagaactttatgattattctcatgcatcatcttaagaagtgtatggtgatgatacccacctggtacttttcatcttcaaagtgttctccagacattagccaattaaacgtcacagttccctgcccagtcagtgggtgtcctccagggagggaaccacgcagcaagtgggtgactccttcccctcttggccaccagggagtggtggtcagagccaggattccagctcctccagctgcaatcttccgctgggctctgttttgaccctcccagccctccatcttttctgcttctaggtatggtgaggactgcttaggctccgggactctgaaatcacgttgcttcttatatagtgtgtgtgatgctactcactgaatgttttcagtggtgagatgcattttttccctacaattgaacatctctgaaatcagtatgcatcttataactgatgaagggttatagttcaattaaaagtgtttttcttcttactagtaaataatataatagtgcatcatacaattgttgtcgtatgtcaacaattgttgaaatatattaccacgatttctatttgtagtttattgtagatttgtagtttttttcct

SEQ ID NO: 710270 - DNA, 2888 bp, Homo sapiens
ggagagaagcccagtgaagatttttgaaagaatcaacttagcatccttggtagttataatagttaggacaattctaattgaagtttctgaaacccagctagcttagcaaaagaggggaacttgctggaaaaatactgggtgtattagtccgttttcacactgctgataaagacatatgtaagactgggtaatttataaagaaaaaggggttcaatggactcacaattccacggggctgaggaggcctcacaatcatgacaaaagatgaaaggcaygtcttacatggtggcaggcaagagaggataggaaccaagtgaaaggggtttccccttataaaaccattagatctcgtgagatttattcactaccatgagaatagtatgggggaaaccgccgccatgattgaattatctttcaccaggtccctctcacaacatgtgggtattatgggagatacagttcaagatacaatttgggtgagaacacagccaaaccatatcactggggcataatgtagaatccaaagaagagttgaactccaagtagcaagaaggtcaggaaagcactgagttcagggccacctggaatctagggaccaacacattgccaagatatcttatattagttcattttcttgctgctaataaagacatacctgagactgagtaatttattaaggaaagaggtttaatagacttacagttacacatggctggggaggcctcacaatcatggcagaacgcaaatgaggggcaaagtcacgtcttacatggcagcaggcaacagagcttgtgcaggggaacccccatttataaaaccatcagatcctgtgagccttattcactcccacgagaacagtatgggggaaaaccccccacaacacacacacaccatggttcaattatctctacctggccctgcccttggcacatggggattattacaattcaaggtgagatttgagtagggacacagccaaactgtatcgtgtctctcccctgaatctttctgctgtggctgccttctttctgctctcccctgattggctttatcggtaaggtggattccatgtgacctggctactgcagcttcgtagattgatattttacagcttcagctaccagaaggcctggctgtctttctcagtgccagtcccacatttctcaggaagagaccaggagcctgcctttgaccaatcaaatgtggccaggaaggcagcagggttttgttatataaaatggttgtttctatgatagtcacacggtggtgggggctagggggtggcaggatgggaaactggactgggcagacacatctactgtccaggtcccagatcttgggcctctctgctgggtgagggaccatgcttggcttttggctctcttgatggagactggtgggatatcttccttgctctggagtaagatggaagtgaaacaacgaggatgtatgtaggaacgtcactcatttgtctaggacgttgtgagtgatttctttgctgaattggataatggcttttgaagcatggaagtctttcctcaatcttttgtgtgtgccattcacaatgtaatggctatagaaatgacatgcttttaatattaacctgcatttttaacattttctccatcactttttaaagtctggaagtccagaggacagtaagtcaagccctggtctgtagcatctgccaatttccatggtgtaaacactctcaccgtggtcaatttcaagggaccactgggacgtcactgaacagggatctgggaaggagtgcacagcagcacagctttctgcactatttccaccccgcagatattccacaggtgaataaccccaagtgtgcagataacagtagaaagttgtaaaataatttggagtgatacattttgagctttcattacctgtgtttccaatacaatttatttaattatacatttatgtaatttaactttgaagaatggctttgtttcataactggtttgcaaaattcttgaaaatttgacagctggagattgcgagctggcactgaccagctctggcaccccctggggtttccccagagcttggcatgagacctgccacagaggagacactgaatgcatgcctgcctgatgaacgcgtattgtccacctggtctctaactctctgagggcctggccaagtcactcacctcctctttctgtccctctaatgtaagaggctattaatgcttacttcatagaggtgctgtgagagttaattaaggtttgctaaatgctttgaaatccgtggatgaaaggcccagttggggagaactttatgattattctcatgcatcatcttaagaagtgtatggtgatgatacccacctggtacttttcatcttcaaagtgttctccagacattagccaattaaacgtcacagttccctgcccagtcagtgggtgtcctccagggagggaaccacgcagcaagtgggtgactccttcccctcttggccaccagggagtggtggtcagagccaggattccagctcctccagctgcaatcttccgctgggctctgttttgaccctcccagccctccatcttttctgcttctaggtatggtgaggactgcttaggctccgggactctgaaatcacgttgcttcttatatagtgtgtgtgatgctactcactgaatgttttcagtggtgagatgcattttttccctacaattgaacatctctgaaatcagtatgcatcttataactgatgaagggttatagttcaattaaaagtgtttttcttcttactagtaaataatataatagtgcatcatacaattgttgtcgtatgtcaacaattgttgaaatatattaccacgatttctatttgtagtttattgtagatttgtagtttttttcct

SEQ ID NO: 710271 - DNA, 2888 bp, Homo sapiens
ggagagaagcccagtgaagatttttgaaagaatcaacttagcatccttggtagttataatagttaggacaattctaattgaagtttctgaaacccagctagcttagcaaaagaggggaacttgctggaaaaatactgggtgtattagtccgttttcacactgctgataaagacatatgtaagactgggtaatttataaagaaaaaggggttcaatggactcacaattccacggggctgaggaggcctcacaatcatgacaaaagatgaaaggcacgtcttacatggtggcaggcaagagaggataggaaccaagtgaaaggggtttccccttataaaaccattagatctcgtgagatttattcactaccatgagaatagtatgggggaaaccrccgccatgattgaattatctttcaccaggtccctctcacaacatgtgggtattatgggagatacagttcaagatacaatttgggtgagaacacagccaaaccatatcactggggcataatgtagaatccaaagaagagttgaactccaagtagcaagaaggtcaggaaagcactgagttcagggccacctggaatctagggaccaacacattgccaagatatcttatattagttcattttcttgctgctaataaagacatacctgagactgagtaatttattaaggaaagaggtttaatagacttacagttacacatggctggggaggcctcacaatcatggcagaacgcaaatgaggggcaaagtcacgtcttacatggcagcaggcaacagagcttgtgcaggggaacccccatttataaaaccatcagatcctgtgagccttattcactcccacgagaacagtatgggggaaaaccccccacaacacacacacaccatggttcaattatctctacctggccctgcccttggcacatggggattattacaattcaaggtgagatttgagtagggacacagccaaactgtatcgtgtctctcccctgaatctttctgctgtggctgccttctttctgctctcccctgattggctttatcggtaaggtggattccatgtgacctggctactgcagcttcgtagattgatattttacagcttcagctaccagaaggcctggctgtctttctcagtgccagtcccacatttctcaggaagagaccaggagcctgcctttgaccaatcaaatgtggccaggaaggcagcagggttttgttatataaaatggttgtttctatgatagtcacacggtggtgggggctagggggtggcaggatgggaaactggactgggcagacacatctactgtccaggtcccagatcttgggcctctctgctgggtgagggaccatgcttggcttttggctctcttgatggagactggtgggatatcttccttgctctggagtaagatggaagtgaaacaacgaggatgtatgtaggaacgtcactcatttgtctaggacgttgtgagtgatttctttgctgaattggataatggcttttgaagcatggaagtctttcctcaatcttttgtgtgtgccattcacaatgtaatggctatagaaatgacatgcttttaatattaacctgcatttttaacattttctccatcactttttaaagtctggaagtccagaggacagtaagtcaagccctggtctgtagcatctgccaatttccatggtgtaaacactctcaccgtggtcaatttcaagggaccactgggacgtcactgaacagggatctgggaaggagtgcacagcagcacagctttctgcactatttccaccccgcagatattccacaggtgaataaccccaagtgtgcagataacagtagaaagttgtaaaataatttggagtgatacattttgagctttcattacctgtgtttccaatacaatttatttaattatacatttatgtaatttaactttgaagaatggctttgtttcataactggtttgcaaaattcttgaaaatttgacagctggagattgcgagctggcactgaccagctctggcaccccctggggtttccccagagcttggcatgagacctgccacagaggagacactgaatgcatgcctgcctgatgaacgcgtattgtccacctggtctctaactctctgagggcctggccaagtcactcacctcctctttctgtccctctaatgtaagaggctattaatgcttacttcatagaggtgctgtgagagttaattaaggtttgctaaatgctttgaaatccgtggatgaaaggcccagttggggagaactttatgattattctcatgcatcatcttaagaagtgtatggtgatgatacccacctggtacttttcatcttcaaagtgttctccagacattagccaattaaacgtcacagttccctgcccagtcagtgggtgtcctccagggagggaaccacgcagcaagtgggtgactccttcccctcttggccaccagggagtggtggtcagagccaggattccagctcctccagctgcaatcttccgctgggctctgttttgaccctcccagccctccatcttttctgcttctaggtatggtgaggactgcttaggctccgggactctgaaatcacgttgcttcttatatagtgtgtgtgatgctactcactgaatgttttcagtggtgagatgcattttttccctacaattgaacatctctgaaatcagtatgcatcttataactgatgaagggttatagttcaattaaaagtgtttttcttcttactagtaaataatataatagtgcatcatacaattgttgtcgtatgtcaacaattgttgaaatatattaccacgatttctatttgtagtttattgtagatttgtagtttttttcct

SEQ ID NO: 710272 - DNA, 959 bp, Homo sapiens
tgttgaaagtggcagggatattcctagctgggcctttggttgagcctattctcatccagtggctattccaaaggaacatgaatccccctccagattaagtgtcccataggacctgtgtgaacagaaggatagtggtgagaggtgggggaaagagcgagatcatgaactgtgaagcaataaaaacttacgaggttgggagagggagaggaaccatgaaattgtttcccctatcaccctgccttsgaattcccagctgctctcatttttataggctaggttgaaggataagaagcttgcacaaaattgggacccatgaatggtacataagtaggccaaaaatgaagagcactgtgaatgtcccagggatgggagtggggtccttgtccagaattcattcttttctttaactttggtgtttccaaacttactatactgtcgagaccttgttatagcacaaactgcccaaaccaactctccatgcaatcaaaacagtctcaagctcttgctaattgtctcctgatgcattattcaatgaagattgcagctgtggatgccagcagtctcttggcgtatatggaatcaacatttgaaatcagttcctggaaagatatttctggtctgtatcttttctttgtaacattcaaaagaactgtgtctaacagggaaaataattggagaataaggtcttttcttctgtctctgcccagaggattaagatgaccaaaagggtccttcctttaaatggaaagtgaaaaatagaaatatgtcttatataagccctggggaaatcataatgtggtccactccttcataactggggtgtggaaaatatgggaaattttgattcatgatagttcagacttctcttgaagggtcctggtggggcacttgaaagaagaaacctgttttatggaatggagttttccattttcaagggcaagttgtaggtgtggtcgtag

SEQ ID NO: 710273 - DNA, 1697 bp, Homo sapiens
atggtgtggaaacaatagagccagccacaaggtctgccagggccagagaggacmtgaggcagtgccactgggtgtcccatggtcctagaggagagcttgagggagagccaacctcacacgcctctgctgttgtgaataaaaggaccgctgcagtagctagaagggaggctcaggagacctgggaggtagggagagagcagtggagatccctccagtgaagcaggtgtggtgtgagcctctcctgggggccagactggagcatccatcaacagggaatctggcgtggacagacacagcccccagacgagacccttcttctagcagcaggacactgtctgagcactcttccttccaagatcagaggccacctgggggaataaaaagaggaaaaaatcttatggagtgagtttccttagaatcgactatgactctatttcctaccactaagttgtatttcaaagtagtcaattattttgaacacctggacatgagtttcaaaatttgtaatacttatatatatatataatttttattgctaaatcatcagattatcctatatatacataattgtatatcattctgtgacttcctttttgaacttggctatctacctatctacctatctatctgatttctatttcagttcatgtcttctgcctcattcttttttttttttttttttaatagagatgaggtctcactatgttacccaggctggtcccgagttcctgggctcaactgaccctcccacctcagtctcccaaagtgctgagattataggcatgagccaccatgccctgctcacctcattcttttttaacactgtcatcatctctttctctctttttctctcctcagactggatgcagtgtctcactcctgtaatctcagcatttcaggaggccaaggccggaggatttcttgaggccaggagtttgagaccagcctgggaaacaaagcaagatcccatctctacaaaaaattaggtgggtgcctggcacatgcctgtagtcccagctactcaggaggctgaggaaggaggatcacttgagcccagaagtttgaggctgcagtgagcttaagatcaacccactgcaatccagcctgggtgacagaaaaagaccatgtctaaaaaaatttttttcaatgactgtaatatatgcttatagtaagaaaccaccaggaaagtcagtctccccagcccgggttcctcattcccctctcctccttaggggtagccactgaagcaaatgatgatggttttgttgactggaagagtccgttttcttccgaggtctggagatgggccagggtttcaagccttgtttggtgaaaagagtcacttcctccttggagaggctgagagtggatccctcatggggcataagaatggactcatatattgcttcctgttccatagtatttgcacccatcgctcttccacagaggttcagcaggagctgctgaacataaacccaagattgacaacatccatacagaaaagtgtacaaagcaaaaatgtatggctcagtatattactacagatttattttgaatacccatgtagccagaacaaaaaaacacactctaatatcccctccccgtcactgatccctcatatcccctcatatcccctccctattactaatctttccctctccaccacgagtaaattttataacctcttccttatttta

SEQ ID NO: 710274 - DNA, 644 bp, Homo sapiens
tgatctcaccctgcctccatttaccttgtgatattttgttaccttgtaaaacatgtgatctctgtgacccataccctaattgtacactccctccccttttgaaaatcactaacaaaaacttgctggttttgcggcttggggggcatcacggaacctgccgacatgtgatgtctmccccagacacccagctttaaaatttctctcttttgtactctttcccttatttctcagactggccaacacttagggaaaatagaaaagaacttacgtgaaatatcgggggtgaatttcccccgatagatatggaaattataaatggaaagaaaaaaaggcattaaagacccatgtgttgcaaaaactatccagaatgagagagtaggggtaacagatgggagaagataatcaaagaaataatagaagaaaatttttctaggaagtgacttgaatattcatttagtcgataagatttactgagctcttactttttgccaggcattgttcttagcatttacagatcaggaaacaaaacaggaaaagaaatctctgcctcccacaaataattaacaaacatatacacttagatatatcccagtgacatttttgaacttcaggaataaagatgatatcctaaaaaagccagtaag

SEQ ID NO: 710275 - DNA, 644 bp, Homo sapiens
tgatctcaccctgcctccatttaccttgtgatattttgttaccttgtaaaacatgtgatctctgtgacccataccctaattgtacactccctccccttttgaaaatcactaacaaaaacttgctggttttgcggcttggggggcatcacggaacctgccgacatgtgatgtctcccccagacacccagctttaaaatttctctcttttgtactctttcccttatttctcagactggccaacacttagggaaaatagaaaagaacttacgtgaaatatcgggggtgaatttcccccgatagatatggaaattataaatggaaagaaaaaaaggcattaaagacccatgtgttgcaaaamctatccagaatgagagagtaggggtaacagatgggagaagataatcaaagaaataatagaagaaaatttttctaggaagtgacttgaatattcatttagtcgataagatttactgagctcttactttttgccaggcattgttcttagcatttacagatcaggaaacaaaacaggaaaagaaatctctgcctcccacaaataattaacaaacatatacacttagatatatcccagtgacatttttgaacttcaggaataaagatgatatcctaaaaaagccagtaag

SEQ ID NO: 710276 - DNA, 644 bp, Homo sapiens
tgatctcaccctgcctccatttaccttgtgatattttgttaccttgtaaaacatgtgatctctgtgacccataccctaattgtacactccctccccttttgaaaatcactaacaaaaacttgctggttttgcggcttggggggcatcacggaacctgccgacatgtgatgtctcccccagacacccagctttaaaatttctctcttttgtactctttcccttatttctcagactggccaacacttagggaaaatagaaaagaacttacgtgaaatatcgggggtgaatttcccccgatagatatggaaattataaatggaaagaaaaaaaggcattaaagacccatgtgttgcaaaaactatccagaatgagagagtaggggtaacagatgggagaagataatcaaagaaataatagaagaaaatttttctaggaagtgacttgaatattcatttagtcgataagatttastgagctcttactttttgccaggcattgttcttagcatttacagatcaggaaacaaaacaggaaaagaaatctctgcctcccacaaataattaacaaacatatacacttagatatatcccagtgacatttttgaacttcaggaataaagatgatatcctaaaaaagccagtaag

SEQ ID NO: 710277 - DNA, 1977 bp, Homo sapiens
ctgtctgggatctctcaatatttacaatctagcctgcaacttcattactgaagtgttttcagaatctcaaatcaccttcctaagaaagttatactttttggcagcatcttgaagactgatgcaaagggtaacaagaacccaaatcttactctgtgatttaaaacattctagaaagcttctattcaaagaggctatctattgagactacattagtcgaaatactcattgcctccagtatttctctaccattacagccagccaaagaggttaaaaaagcaccagctgcctaagagtgtactgagacacaccaaggataaattcaaagaggaagaaaaacatcctatacatatttgttgaatcaaatacagtatctctcagttagttatacacagttacaagatcatgaattaactcactgacaggtatactcagaatatcagtaaattcccaattgttccacaatcaactgaaagatttaaatgtctccaaaaaggctgtttttccctctgaatgttttccaagttataactactgtctgaacctgtacaaatccaaacatttatgggtatttaatatcctttatgcctaccattataacaagaaggctgtttaagattatctaaactatatatttataatggacattcatctaaaaaaatcacctcaaaaatctgtgaagagctccaattctcaaaatgattaattagcaacaagaaaaaatgcttacctctcaagacagccatcttcactatcaccacggtcactgcatggctctaacaatatacctacagactgacaaaaagaacactaccatgtattaatggagctcccaatactcagataagagaagttgccaatctaaattaggatattagaatacagattagtcaaacacccctaattagctatcatttataatagtctgtagtacttagcatctctttttacagagagtaatttatcttccctcaaaacctgggtcatatgaagtatagcaggtactctgcatttctctctattaggtaatatgtatcaccactaccatccttcttccttagaattatctcctccaaaatgatggtcttctgatcctgcttgccaactgctgcttgctttatttctcctcagctacaaagatacaagtttggtgacttcttgtaggtaagataggagtcatagaggagttcactagattcctttgtatatttgaagtaataactattttccacaaagaaagtccccacatgagaaaactctcccattttccaacgagcttagtgacaccatctcatccctattcccccccaaactaaaaacctaccaagtctaatacaaatacccagagaattactacaaaatacatgaacgttgtggygtttttgatgatcacctttcaaatcaacaaaaggttccatacttcctagactctctgattcttctttagaaagtaagtaccacttgtccagctttgtttagcgtgaaagaaggtccacaagaatctgcaaaaaaagctgttaaaatactagtcccttttcaaactacacatctgtgaggctgtctcatatgcttcaacaaaacaatgtaacagcaacagacttaaatgcagaagcatatacaagaatccagctgtcttctgtaagtcaaacaggtatcaacaatatttctagctatgtaaaacaatgccactcctcaaacttaaaaaattttatgaaaacagttatctattgtggaaaagagcaaccttacttatgttaccataaatgagtttgttaaattaatgttttttaaatttaccagttttaattcctaatatggtaaatcctaacagatatacctatgtaaacaaaagctctttgggatcttcaatatttttaagagtatgaatgagtccctgagacccaaagtgtgagaaccactgatacagaaatcagacttcggtaacttttatgatcaataacaggtgtccccaacccctgg

SEQ ID NO: 710278 - DNA, 624 bp, Homo sapiens
tggcacaaatatcaagacacttgggtttttttactgggatcttgagtgttagttgccatgactggttgtatagcaggaggtacctttgtgacccacctgctacaaagccctcagattctgagactcatatataccagatagctctaccagagagaaagtgctcctgtgtggctgtgaatgaggaaggaaatcagaggcctatgctgggcctcccaggaccctccctggactcctctgtttgcacattccytgctatttttgctcagtatgctttgctgcaatgaatcttaggaccctgtcactgagtctcgtgcatccatctggtgaaccaccaaaaaacaagacaaaatcttcggaaatagtccttacgctattttctgcatttttcgtgattagaatccatgtgggttttttttaatcacacacacacacacacaaatatgacaaaaacttggatctcagggaagaaaagtattcattaatgaactacaaaaataagccatggcaaagatgggcgctgtggctcacgcctgtaatcccagcactttgggaggccgaggctggcagatcaagagttctggagatcgagaccatcctggctaacacagtgaaaccccgtctgta

SEQ ID NO: 710279 - DNA, 591 bp, Homo sapiens
catcatttgggacttgtcctgggattctttttttctttcccccaagacggagtcttgctctgtcaccaaggctygagtgctgtggcgtgatctcagctcactgcaacctccacctcctgggttcaagcgattctcctgccttagcctcccaggtagctgggattacaggcacatgccaccacagccagctaatttttgtattttttagtagagacagggtttcaccatggtggccaagctagaggctggtgtcgaactcctgacctcgtgatccgcttgcttcagcctctcaaagtgttgggattacaggtgtgagccaccgcgcccagcttgtcctgggattctaacaaaagacattgagttgagaaagattctgtcctctaaacttctctacattacgccgcccttcccccttcctcacaacccctcagggatctcaacaaaggctgtgtgtcaaggacattgggacaaaggtctattcaccagtgtagtggaacagacagcaatctagacatttccatgagtaaaggaaataattgtttgtgtgaatttttaacatttcaagtctgtgttgccacacaatctcactgg

SEQ ID NO: 710280 - DNA, 591 bp, Homo sapiens
catcatttgggacttgtcctgggattctttttttctttcccccaagacggagtcttgctctgtcaccaaggctcgagtgctgtggcgtgatctcagctcactgcaacctccacctcctgggttcaagcgattctcctgccttagcctcccaggtagctgggattacaggcacatgccaccacagccagctaatttttgtattttttagtagagacagggtttcaccatggtggccaagctagaggctggtgtcraactcctgacctcgtgatccgcttgcttcagcctctcaaagtgttgggattacaggtgtgagccaccgcgcccagcttgtcctgggattctaacaaaagacattgagttgagaaagattctgtcctctaaacttctctacattacgccgcccttcccccttcctcacaacccctcagggatctcaacaaaggctgtgtgtcaaggacattgggacaaaggtctattcaccagtgtagtggaacagacagcaatctagacatttccatgagtaaaggaaataattgtttgtgtgaatttttaacatttcaagtctgtgttgccacacaatctcactgg

SEQ ID NO: 710281 - DNA, 591 bp, Homo sapiens
catcatttgggacttgtcctgggattctttttttctttcccccaagacggagtcttgctctgtcaccaaggctcgagtgctgtggcgtgatctcagctcactgcaacctccacctcctgggttcaagcgattctcctgccttagcctcccaggtagctgggattacaggcacatgccaccacagccagctaatttttgtattttttagtagagacagggtttcaccatggtggccaagctagaggctggtgtcgaactcctgacctcgtgatcygcttgcttcagcctctcaaagtgttgggattacaggtgtgagccaccgcgcccagcttgtcctgggattctaacaaaagacattgagttgagaaagattctgtcctctaaacttctctacattacgccgcccttcccccttcctcacaacccctcagggatctcaacaaaggctgtgtgtcaaggacattgggacaaaggtctattcaccagtgtagtggaacagacagcaatctagacatttccatgagtaaaggaaataattgtttgtgtgaatttttaacatttcaagtctgtgttgccacacaatctcactgg

SEQ ID NO: 710282 - DNA, 591 bp, Homo sapiens
catcatttgggacttgtcctgggattctttttttctttcccccaagacggagtcttgctctgtcaccaaggctcgagtgctgtggcgtgatctcagctcactgcaacctccacctcctgggttcaagcgattctcctgccttagcctcccaggtagctgggattacaggcacatgccaccacagccagctaatttttgtattttttagtagagacagggtttcaccatggtggccaagctagaggctggtgtcgaactcctgacctcgtgatccgcttgcttcagcctctcaaagtgttgggattacaggtgtgagccaccgcgcccagcttgtcctgggattctaacaaaagacattgagttgagaaagattctgtcctctaaacttctctacattacgccgcccttccccmttcctcacaacccctcagggatctcaacaaaggctgtgtgtcaaggacattgggacaaaggtctattcaccagtgtagtggaacagacagcaatctagacatttccatgagtaaaggaaataattgtttgtgtgaatttttaacatttcaagtctgtgttgccacacaatctcactgg

SEQ ID NO: 710283 - DNA, 2094 bp, Homo sapiens
cactgtgtgtgtctaactccctcctctataaggatgccagtcaaatgggagtagggccagtccaaaagcctcatttaatcccctcttaaaggccttgaccccagatagtcacatcctgaggttctggagtttagggaatcaccaaataagttttcaggagaaagcagtgagcccataacagtgtgtttgtgtgtggatgtgtggtcatgggagatgctgtgaaggttgccattgtgtccacatgactgtgcgtgaaacagtgattcatgcaattatgaaacccatgttgtgtgagttccacaagaccaaggcaccttttatccactaaatgtgcacatgtctgtgtgtgtgtgtgagtcccacaaaactcaggcatctttcatccactacctgtgcatgtgtgtgtgtgtgtgtgtgtgtgtgtcccacaagacccagacacctttcatccactacatgtgcatgtgtgtgtgtgtgagtcccacaagacccaggcacctttcatccactaaatgtgcatgtgtgtgtgtgtgtatgtgtgagtcccacaaaactcaggcacctttcatccactaaatgtgcgtgtgtgtgtgtgtgtgtgagtcccacaaaacccagacacctttcatccactaaatgtgtatgtgtgtgtgtttgtgtgtgtgtgtatgagttccacaagacccaggcacctttcatccactaaatgtgcatgtgtgtgtgtgtatgagttccacaagacccaggcacctttcatccactaaatgtgcatgtgtgtgtgtgtgtatgagttccacaagacccagacacctttcattgtgtgtgtgtgtgtgtgtgtgtgtgtgtgtgtgtgtgtgattgaaggagatactatttgtggataaataaattgaaacctcaggccactttcctgtcttatatcaaccttattagaatcctgcccaccccaaatgcgcaattccataggtagagcaagataggtcctaggatccatctgggaagtgcccaggatgcccttcctaggatgcttggagacaggattggagcaggtgatggaagcatgggctcagggccaggcagtctggagacctctcctctctgagcccagtgttgcctgtaaaatgcagacactcctaggacctcactcacagccaggggtgcgggagatggccgtgcatattgtactgtgcacttcggctcctgttcaaaaggatacgtgggatgtgaaacccagcctgcgctctctccacagctgtgtccatgccagggccagaattcccactggagtatgacattggtccatccaaagtcccagagcctaccatggccatgtgcaccgttgtcacttggggaaaaaatcttcttaaacagataaacaaacatgtgcaaatgcatatattttagagtatcatcttgtttttaagcctgggcaacatggtgagaccccttctctacaaaaaacaattagctcggcgtggtggtacaagcctgtattcccaactactcggggactgaggtgggaggatcgcttgagcctgggaggtcgaggctgcagtgagctgaggtcgtgccactgaacagagtgagaccctgtgtaaaaagaagaaacaggacaaaacaaaaaccaaaaaccaaatcttaacttttgtccgctaatttgaaggaacgcgtatgaaatcacgttgctgtcactagatggcacttttgcaccatgaaaaaaataggctctaattattattwttttttttacttttcaattttcaattgtggcaaaatacatattacacagaatttaccatcttaagcattttgtgactaatatgtgaaagatatattactaatatcataagcctgtgatatatgccttttttatttttttaaactatggtatttatcattttaaatatagtcatgaatcgacaacagggatacattctgagaattttgtggttaggcaattttgacattgtgtgaacatcttagagtgaacttacaaacacctagacggtgcagcctactacacacctaggctctgtggtatagtctgctgctcctaggacacaaacctgcgtggcacgttgctgtactaaatac

SEQ ID NO: 710284 - DNA, 648 bp, Homo sapiens
ttgcatattaaaaggctatggcgggagggcctggtttctcccaggctacatgaataacacacctggtcaagccaatcctttgggccctatgcaaaccagatactgcctcctccagcctccagatataagggactgtctttctgttgcgcacagggtctatctctgttcctttcccatgtctcagtacgggggagctgttctcttctttcttccttcttasttgctattaaacttttcactccttaaaactactccacatgtgtccatgtcgttaatcctatcagcaccagaccaaaaagcctggtaatcgtccagtcatcggagctgtatcaaaatgaacttgggctgctctgtcccaatgtctccatcctttgcatcttaacctgtcgcagaacaagaaaagtggtgccgctaagattgcacaggtgcagcgaatacgaacctgggaagactgtggtgtttctttagatggctggtggatctatctggattgaagggattccttttcccagcaataattttacagacctgagacgtttgcaagatgaaattgtgttgcgggatgaagatgtcattacactttcttacccaaagtcaggtagggaagtgggacccgaaactcaggaagggatgcggtgaagatactga

SEQ ID NO: 710285 - DNA, 648 bp, Homo sapiens
ttgcatattaaaaggctatggcgggagggcctggtttctcccaggctacatgaataacacacctggtcaagccaatcctttgggccctatgcaaaccagatactgcctcctccagcctccagatataagggactgtctttctgttgcgcacagggtctatctctgttcctttcccatgtctcagtacgggggagctgttctcttctttcttccttcttacttgctattaaacttttcactccttaaaactactccacatgtgtccatgtcgttaatcctatcagcaccagaccaaaaagcctggtaatcgtccagtcatcggagctgtatcaaaatgaacttgggctgctctgtcccaatgtctccatcctttgcatcttaacctgtcgcagaacaagaaaagtggtgccgctaagattgcacaggtgcagcgaatacgaacctgggaagactgtggtgtttctttagatggctggtggatctatctggattgaagggattccttttcccagcaataattttacagacctgagacgtttgcaagatgaarttgtgttgcgggatgaagatgtcattacactttcttacccaaagtcaggtagggaagtgggacccgaaactcaggaagggatgcggtgaagatactga

SEQ ID NO: 710286 - DNA, 1025 bp, Homo sapiens
agtgtttcctgagttccgtgagccactctagcaaaatatcgaaccgcaaagagggggtggtgaaaatcccaatttgaaggtggtggagtcagatgttccagaggctagactttagtgggaagtgggaagggggaggcaggcttggggactgagccctcagcgaatggtgtctgacccatctccaagtagacggcgtcggaattaaactggaggacacccagctggtgcccgctgcagaactcactgaactcattgcttgcttgagatgtgtgggaaactcccctatatttggtcagaaaagtcttctgttatgattagttgtcgttgagataatagaaaaaaatgcaccttgcgttttttccactgattcagagggcataactgaaagaatgaagaactgaaagaatgatcttaatactctgcttcgcttttcttgataatacgcattacttcccaatatgcatcagtgtcctttattattaattttttcctattgaattcctcccgcattagaatgctgctccatgaggtggggattttgtctgcttgttcactgctgtgtgcccagggcccacgacagtgcccgatacagcaggcgctcaataagtggcgaatgaaagacagggcaaggcggagagagaagaaacagaaagggaaagagaaagcccgggccgccagagcgcttaatcacacgtacatcctaccgggcccctctccagctggctcaggctccacactggtcctccagctyccttttctcagcgatggactcacagccccacccggagcgctggagcgcggacgcggtcactgcgcgtgcgcctcaccgcgctggcaccccggcctggcagcctttggggacctgaaccagctgcgcctgcgcaggtggaacgggtggaacgggtgggggagcggacagtcgaacggcctgagagggctcagctggtccgggtgggattctgaaggccagcggaggtgggcttactagggaaaggggcgcagcagtaactacccgcaactgagcg

SEQ ID NO: 710287 - DNA, 673 bp, Homo sapiens
caatgatatgcatttgcaccttctagtaaatctcctttgacatactgttccaaagaatcaagaagattttggtgatttctaatgtctacgtttagggtcgtaaaagattcttcacattcgtacctaaaaacgatttaaaaaaaggatttatcccttagttttgtaaacattttagttatggacttaatgtaaactacatttgcctttttyttttaaattatactttaagttctagggtacatgtccacaacgtgcaggtttgttacatatgtatacatgtgccatgttggtttgctgcacccatacatttgccatttttataatgcgaaacccgtaagtcatagaatgttagcaataaaaaagttaacttgatcaagattattaggtgaaatggtattttaaagttgaatctgtctgggctcacagcttaatctctttgtagtatacgatgctgcttctagtgttatctgtttagatagtaattcatgctgaagccaaagcatgaatttattaagttctgaaaatgataaactacgaataagctaaatttttatatattcttccttttctgtaatggaagccttagtaaagcaaaagtttgcacacacaaatgagtacaggattagcaacctgagaaggagctagaatcccagtttatggtcattttctacca

SEQ ID NO: 710288 - DNA, 1310 bp, Homo sapiens
gtcctgggcctctttgctctctgcccatacacagccccttcacccccacctgcaacacagcatgtcatccattcaatcaaaaaaacacctactctggcttccatgctaggcactggagcaacactggaaaatgagacagaatttgctcattctcttgccttatgttctccatgccgcacaacacacttccctactgctccctgctccctgacaatcttggcagcaccgctgtcctcccagttccccaagtcagaaaccagagtcaccccaggcttctgatcactcccacatgccagcccccggctcccttccttcaactgctcttctccccttcactcccaaggtggggtctcctcttgtctggagactgcaggagctcctccttggcccccaccaccccacccaggtgcaggcctgaagtctctagttcaacaccaactctaacctgttaatcccacacttgaaacttaactgcctacaggaacaagcccaggcctctcagtgcagctctcctgagcctcaagcccaaccccctcctccagcaacacttgcactgtatcatctccatttggtttctgaacctaatctggcgctggcccctatgaacatggaggtccccatatcccacagaatatatcaccttctcccaggcagagtccccatctctcacccctctctctgtagctgtgctgcctgcactgagctggaaatgtccatatccacctcctcctgcctccactgcagtccctcacgggctggcagaggttccaactgcacaacctccccagaggcctcactcaatctacccacaggacagagggagagcactgtggccactcaccctgcggttccggttgtgatccatggtcttcagatgcttctggatgatcccaaactgcatgggaatgaagaggtcgcaggctgcacaatgggctgcctccaccttcttcacaaaatgctccatggcaatttctgtagtggggaggagggagtcaccactgggcccaggtgcctaagatagacccaggtgttcgagaaaaaaaccacaccagctcctcctcaactcgccctgccacttccacctgggcctgagccaaggctggtctcctgaccttccctgggggaacagaagggtgtcctgaccctgcaccgaaaatcaggagtgcaggctgaggccttgcctggtgggagtgggctgaaaatctcctcaccctgggtcagatcctggtctctgtagatttgstggatgaggccatcaaggtcctccacggtttttcggagctcctctgtcttcttggtcttgttagtga

SEQ ID NO: 710289 - DNA, 632 bp, Homo sapiens
ggtctcgatctcctgacctcaagtgatccacccgcctcggcctcccaaagtgctgggattacaggcaggagccaccgcgcctggcctcctttggactttaattggccactgtgactcccagtccctcccccatggggatttgaagccaggccttttatcaaagagcctaacttgctcaggaacacagctacttttcccataattgccygaaagggaagcactagctattcaaatggccacaccatttcacacaagtttaggtttaaaaaagcatgacagggtgacagcaaagccaaaggcaactaagaagacaaggaactgctctgcagaacactttggttcccaccagaagtccacacttaccataatcacaggtgggctgagcgctggtatccgagtatgtcgactgcaaagtggtttcagatccctggacaaagcctaaacataaagacagtggggttaatttccacaagcaagtcacagggaaatgacctgagactacctaacctttggtataggattgccagcaggcccttctctcaacgaaaagccaccaaaacctctagattccacagtttaattagaccgtcagaaaatattacccaatggaaaggcaggctatgtttaacttg

SEQ ID NO: 710290 - DNA, 621 bp, Homo sapiens
tgaagtggagacttctatcttgttatcacagcagtgaggatgtggcctgtttctgcctaatcttgcctagaagtggctgcacctgctgttcctttgcttatgccttaactggttatcctaattccctattctcctgcctcaaaatgacaagttaatcacaagcagcagactcatggttaaccttacatatcccaaaatagtaatggaatgtctccatagtgaaagcctgatgtgtcttaccacctgtattgggcactgttcgaatttttatatttcaagacaagtcatcttcttcyggataaaaaataaaattacacagtttgccaagtatggcattaggtgttttgttgttgttgttgtttgtttgttttgagatggagttttgctcttgttgcccaggctggggtgcaatggcgtgatctcagctcactgcaacctccaactcccaggttcaagtgattctcctgcctcagcctcccaagtagctggggttacaggcgcatgccaccacacccagctaattttgtatttttagtacagacagggtttcaccatgtaggccaggctggtctcgaactcctgacctcaggtgatccacccacctcggcctccgaaaatgtt

SEQ ID NO: 710291 - DNA, 629 bp, Homo sapiens
ttttttttttttttttttttttgagcagttttagtttcccagcagaattgagatgaaggtacagaaacttcccatatgcttcccacatgcatagccttctacattatcgacatcctccgccagagtggtacatttgttacaactgatgaacytacattgatacatcataatcacccaaagtccatagtttacattagagttcacccttggtgttatatattctatgggtttggacaaatgtataatgagacgtatctactattaaatactttacagagtattttcactggcctaatccaatggacatttattgttacttcattatggttgggcacagtgctagatgctgatgattaagagagggcatgggatttggtcttgtcctcaagggtagaacctaggcccattgcatcttcaaagcccaggctccttcaaagcccagtgtagtagcaactgctgtaccttgcctgtgccctttgcgtatctcactcctctatctctctagaaagttggagagaaaagtgagcaaggcatgaggaacaaagttatttatttattcttcattcatctatttattctttcattaccgtttgtgttaaaacattccaaacccaaacaattatttgtat

SEQ ID NO: 710292 - DNA, 629 bp, Homo sapiens
ttttttttttttttttttttttgagcagttttagtttcccagcagaattgagatgaaggtacagaaacttcccatatgcttcccacatgcatagccttctacattatcgacatcctccgccagagtggtacatttgttacaactgatgaacctacattgatacatcataatcamccaaagtccatagtttacattagagttcacccttggtgttatatattctatgggtttggacaaatgtataatgagacgtatctactattaaatactttacagagtattttcactggcctaatccaatggacatttattgttacttcattatggttgggcacagtgctagatgctgatgattaagagagggcatgggatttggtcttgtcctcaagggtagaacctaggcccattgcatcttcaaagcccaggctccttcaaagcccagtgtagtagcaactgctgtaccttgcctgtgccctttgcgtatctcactcctctatctctctagaaagttggagagaaaagtgagcaaggcatgaggaacaaagttatttatttattcttcattcatctatttattctttcattaccgtttgtgttaaaacattccaaacccaaacaattatttgtat

SEQ ID NO: 710293 - DNA, 562 bp, Homo sapiens
atttaagttcatagaagtagagagtagaacggtggttaccaggggctggtgggggagagatggagagatgttggtcaaaagatacaaaatttcagttaggaagagtaaatccatgagatatattgtgtgacaggatggctatagttagtgtaatgtactgtattcttaaaaattgctaagaaactacattttaagaatttttaccacaaaataataagtatgtgaggtaacgtgtatattaataagctcaattttgctagtgcacaatgtgtgcatattttaaaacatgttgcacacaatatatacaatttttgtcaaataaataatgtttgcatgggcagaggcccaagactggagataaaaytggtttgtactttaaagaaaagagaaatgaggaaagcctgaacctgtaagcacatccaaaataactcaggctgtagcccatttaccccagatcagtaagattctctcccaagtgccaacataaaatgaaatttcctaaatgcaacctgggggtagtgggcatattagatctgccttatatttgagtaggtgaagtaaa

SEQ ID NO: 710294 - DNA, 1218 bp, Homo sapiens
tcattatactgtctatgtcttgaaaagttgttgtagttatttttgataggttcatcttttagtatttctactcaagatataagtagcttacacaccacaattcagcgttataatattctgtgtttgtgtacttattattaccagtgagttttgtacctttggatgatttcttattgcttgtgaatatccacatctttaacattgaagagctccctttagcatttcttaaaggacagtctggtattgatgaaatcccttagcttttgtttgtatgggaaaatttttatttctccttcatgtttgaaggatatttttatgatatatacacacacacacacacacacagtttattttcctatcactactatttcttactcattatcacagattctcacctatatattccagtcactcaaaaccacaacttacctggcatgtaagttgtaactcagatgatcgtgtctgccctatgtttcagtttccttggcactgatttgtttataccagggatctcagaaaaataattatgttgaccctttcctttgatgatcattagttatagatgataaattttgatatctaatttttatctcaccagcagattgcactactaagcagcacagttaaatggccctgtgatccattacaccatcacagacttaaatggtattatgtacatactgtagtatagttctaacctaatatcttatttctttacatttttacataaaaccaaaataaaacaattgggaatcataagattttaagtttatctttttatgtttttctcttcttttaaatctctggagttggcagaaagatggccgtctagatgcagccaggaggaatatgtaccacatagggaccaggacactggaaagactggcacactctgaggagatctttggagggaagacattgagagtaaatggagagaggacacaggtgctgagctgaaagggaaggaagctggggacactgcacggggctaccatgcactgggatttgttcctggcccctaatgattgctgaagaggggtgagttgagcacatgaggtgcaactcactctatctctgtgrtatggtttgactgtgtccccacccaaatctcatcttaaattgtagctaccataattcccatgtgttgtgggagggaccccatgggagatcatttaattgtggggtcagtttcccccatattgttctcatggtagtgaa

SEQ ID NO: 710295 - DNA, 1410 bp, Homo sapiens
tataatgtaaatattaaaagcttgctgaatggatatataaacaataataaacaataagaataaaatataggaagaatttcagccaggagtggtgtctcatgcctggagtcccaggattctgggaggccgaggaagaggacagcttgagcccaggagtttgagactagtctgggcaacatagtgagacactgtctttataagaaaaaaaaaytaactgagtgtagtggtgaatgtctgtggtcccagctgatcgggaggctggggcagggggatcacttgagccccaggaagtcaaggctgtgattacgtcactgcattccagcctgggcaacagaacaagacacccatctcagtaaataaataaataaataaataaatatataaataaagtaaaacattaaaagaaaaaaataggaacaatttaagtataagtttttaataaatcagccatggctcagttttattaaacttcaacacgtgctttccaatggctatattttaaaaaaaactataatcttaaattctcatatctcattatactattgttgttacaagtaatagactgacttaataaaatgatctccttatccatgataatggatttaaaatttatgtattcatatcttatgatccttgttaaacttcactgtcaagtaaaatactatacagtaacctaattcatgctttgaatacctattttatctagggacttgtttggcactggatcacatatataagcttttatctttggatcactacattttaaccatagtacagagatattcaagaaatgattttcctatttagttaccacaaagtgtgggaagggatggataagaagaaacagagtcaaatacatatttttacacatctgtgggaatttttatagacattaaccagcaagcaaattcatggcagtaggacgatgttgtactggaaataatcaacccacaacgtgctcctggaatgcactgatagcctgtacttctgggagcatctgaactgcttgttcttgaattagagccacttagataaaatttaaatactgtagtatttagaaaatattttgtataacatttacttcattattatatgtgcacattgaatgtttactttaaactaacttgggttctgggattccaccatatggaataatatggtgcaattacatgccatgagatgtacatgatttaacactaggtacaaagccaacctctggagaggtccacagataattctcctcactcagttgtattcctttccctttcccactacaagaggcgacctaattaaatttcggaatatttataataactgacacgatagcacttactatatgccaagtattattttagcccttctacgtttattaaccacttaatcaaagcaactctgtaatgttgagtactg

SEQ ID NO: 710296 - DNA, 1410 bp, Homo sapiens
tataatgtaaatattaaaagcttgctgaatggatatataaacaataataaacaataagaataaaatataggaagaatttcagccaggagtggtgtctcatgcctggagtcccaggattctgggaggccgaggaagaggacagcttgagcccaggagtttgagactagtctgggcaacatagtgagacactgtctttataagaaaaaaaaattaactgagtgtagtggtgaatgtctgtggtcccagctgatcgggaggctggggcagggggatcacttgagccccaggaagtcaaggctgtgattacgtcactgcattccagcctgggcaacagaacaagacacccatctcagtaaataaataaataaataaataaatatataaataaagtaaaacattaaaagaaaaaaataggaacaatttaagtataagtttttaataaatcagccatggctcagttttattaaacttcaacacgtgctttccaatggctatattwtaaaaaaaactataatcttaaattctcatatctcattatactattgttgttacaagtaatagactgacttaataaaatgatctccttatccatgataatggatttaaaatttatgtattcatatcttatgatccttgttaaacttcactgtcaagtaaaatactatacagtaacctaattcatgctttgaatacctattttatctagggacttgtttggcactggatcacatatataagcttttatctttggatcactacattttaaccatagtacagagatattcaagaaatgattttcctatttagttaccacaaagtgtgggaagggatggataagaagaaacagagtcaaatacatatttttacacatctgtgggaatttttatagacattaaccagcaagcaaattcatggcagtaggacgatgttgtactggaaataatcaacccacaacgtgctcctggaatgcactgatagcctgtacttctgggagcatctgaactgcttgttcttgaattagagccacttagataaaatttaaatactgtagtatttagaaaatattttgtataacatttacttcattattatatgtgcacattgaatgtttactttaaactaacttgggttctgggattccaccatatggaataatatggtgcaattacatgccatgagatgtacatgatttaacactaggtacaaagccaacctctggagaggtccacagataattctcctcactcagttgtattcctttccctttcccactacaagaggcgacctaattaaatttcggaatatttataataactgacacgatagcacttactatatgccaagtattattttagcccttctacgtttattaaccacttaatcaaagcaactctgtaatgttgagtactg

SEQ ID NO: 710297 - DNA, 1410 bp, Homo sapiens
tataatgtaaatattaaaagcttgctgaatggatatataaacaataataaacaataagaataaaatataggaagaatttcagccaggagtggtgtctcatgcctggagtcccaggattctgggaggccgaggaagaggacagcttgagcccaggagtttgagactagtctgggcaacatagtgagacactgtctttataagaaaaaaaaattaactgagtgtagtggtgaatgtctgtggtcccagctgatcgggaggctggggcagggggatcacttgagccccaggaagtcaaggctgtgattacgtcactgcattccagcctgggcaacagaacaagacacccatctcagtaaataaataaataaataaataaatatataaataaagtaaaacattaaaagaaaaaaataggaacaatttaagtataagtttttaataaatcagccatggctcagttttattaaacttcaacacgtgctttccaatggctatatttwaaaaaaaactataatcttaaattctcatatctcattatactattgttgttacaagtaatagactgacttaataaaatgatctccttatccatgataatggatttaaaatttatgtattcatatcttatgatccttgttaaacttcactgtcaagtaaaatactatacagtaacctaattcatgctttgaatacctattttatctagggacttgtttggcactggatcacatatataagcttttatctttggatcactacattttaaccatagtacagagatattcaagaaatgattttcctatttagttaccacaaagtgtgggaagggatggataagaagaaacagagtcaaatacatatttttacacatctgtgggaatttttatagacattaaccagcaagcaaattcatggcagtaggacgatgttgtactggaaataatcaacccacaacgtgctcctggaatgcactgatagcctgtacttctgggagcatctgaactgcttgttcttgaattagagccacttagataaaatttaaatactgtagtatttagaaaatattttgtataacatttacttcattattatatgtgcacattgaatgtttactttaaactaacttgggttctgggattccaccatatggaataatatggtgcaattacatgccatgagatgtacatgatttaacactaggtacaaagccaacctctggagaggtccacagataattctcctcactcagttgtattcctttccctttcccactacaagaggcgacctaattaaatttcggaatatttataataactgacacgatagcacttactatatgccaagtattattttagcccttctacgtttattaaccacttaatcaaagcaactctgtaatgttgagtactg

SEQ ID NO: 710298 - DNA, 1410 bp, Homo sapiens
tataatgtaaatattaaaagcttgctgaatggatatataaacaataataaacaataagaataaaatataggaagaatttcagccaggagtggtgtctcatgcctggagtcccaggattctgggaggccgaggaagaggacagcttgagcccaggagtttgagactagtctgggcaacatagtgagacactgtctttataagaaaaaaaaattaactgagtgtagtggtgaatgtctgtggtcccagctgatcgggaggctggggcagggggatcacttgagccccaggaagtcaaggctgtgattacgtcactgcattccagcctgggcaacagaacaagacacccatctcagtaaataaataaataaataaataaatatataaataaagtaaaacattaaaagaaaaaaataggaacaatttaagtataagtttttaataaatcagccatggctcagttttattaaacttcaacacgtgctttccaatggctatattttaaaaaaaactataatcttaaattctcatatctcattatactattgttgttacaagtaatagactgacttaataaaatgatctccttatccatgataatggatttaaaatttatgtattcatatcttatgatccttgttaaacttcactgtcaagtaaaatactatacagtaacctaattcatgctttgaatacctattttatctagggacwtgtttggcactggatcacatatataagcttttatctttggatcactacattttaaccatagtacagagatattcaagaaatgattttcctatttagttaccacaaagtgtgggaagggatggataagaagaaacagagtcaaatacatatttttacacatctgtgggaatttttatagacattaaccagcaagcaaattcatggcagtaggacgatgttgtactggaaataatcaacccacaacgtgctcctggaatgcactgatagcctgtacttctgggagcatctgaactgcttgttcttgaattagagccacttagataaaatttaaatactgtagtatttagaaaatattttgtataacatttacttcattattatatgtgcacattgaatgtttactttaaactaacttgggttctgggattccaccatatggaataatatggtgcaattacatgccatgagatgtacatgatttaacactaggtacaaagccaacctctggagaggtccacagataattctcctcactcagttgtattcctttccctttcccactacaagaggcgacctaattaaatttcggaatatttataataactgacacgatagcacttactatatgccaagtattattttagcccttctacgtttattaaccacttaatcaaagcaactctgtaatgttgagtactg

SEQ ID NO: 710299 - DNA, 1998 bp, Homo sapiens
tagatttttttccatttctgcctttgtcatcctatcctgcagcatcgagacaggtgtcggtttttcaagctttcttttgcttttagcaacattagcatgtgggaaacagtttacataggcagacattctctctctgccaaagatataattaagatttctggggctttatacaaaacttcacagagaacttggagtagttaagtttcttcggacttcaagtaagagaatcccaattcagattgctttaccaaactccttggaaaatagtatgtcttttagaatccaaggaagaggtgcttctaggtcttgggagacagggttgctctggggctgcagcagcagccagttgtggtcccttttctgcagttcacattattgagaccagcaatctctaggtcttttgatttaaaagtccaaattgttgacagaaagaatgtgattggctcagtttaacccaaacatccttaagaaggtaatgatagtagaaacacgactgctctgagaagacctctgtgggtgaggtgtggttcccgacaacaagacacatcacgtacagacaaccttctagggatggctcatgactactctgtggccaataactaatattctttgtgtgtacactttgatggagttaagacccctaatgcagcagtgtctatgcagctgccttgtctctctgctctctttctctatagagagttgatatcctaggcattttgagtgccctctccttgatagcagggggcagttttatcccattttgtattttctcccacaaaataaacagcagaacatattattggtgtttaattttgctttgtactctgtgatccttcatgatcctgaagctgtcctgcgatgatctaaaacggcaggttctattttatattcttaaaagatcggttgacaagtcggcaggcagatatagttttattaccaagaaatgtttccctgctttcacacgtactgttgtgccaagaacatggaatttagagtcaggagactgtcttaagtatggttcctgggcaamcctgagatggagatttgtgagcaggatgtttactggggattggtctggggatcagcacctacaagaggtaagggaagcaagactgggcagaaggagaaactgaactatgatggaactacaacagatgcttcagctgatcctatagggatctctggaactaggaaggcctttcaatattacctagagttgaagcaaggaggcaggcctctatatcttacagtgactgactagttgggggatagcacccaaccctggggaggatgcacaactctgggggatgcagctcccttaggcctaaggcaatgcccagagagggatgcatctgtgagctgtctgtcacccatcccaccagcagctgaaagaatgagtgctttgctcatgatgggcagggtagggataggaagggtctggttgttctccatatagcacctattccaaaaacttagattccattctgctctaccatactagcctgtgagaccttgggcaaatcctttctgtgagtcatcatggcctcattcaaaaactatgaaccaaaccaaaccaactaacctcattttaaaaataggattacataaacagtgttgtgagcactgttgaggacactttcacttatggtatattgtttagttcttcctgtaactctgtggcatgtctgttttaggccaactttatggataaggaggcagatcctcaaagaggtgaaagcagtttgcttgaattcatatggaaaaaatcatatagaaagtgcagttccagatcttttgaaattaagtccttattttggtcaatttgctagagcctcctctcagcaacagaaataacattaataatactaatattggtaatgacaaataatgtttaatttatatggttgttaggaggattgaatgaaagatatttgtaaattataagttgcagaaaaaaaagtgagtcaatataagtgttcttcaaaattgcttttttcc

SEQ ID NO: 710300 - DNA, 1998 bp, Homo sapiens
tagatttttttccatttctgcctttgtcatcctatcctgcagcatcgagacaggtgtcggtttttcaagctttcttttgcttttagcaacattagcatgtgggaaacagtttacataggcagacattctctctctgccaaagatataattaagatttctggggctttatacaaaacttcacagagaacttggagtagttaagtttcttcggacttcaagtaagagaatcccaattcagattgctttaccaaactccttggaaaatagtatgtcttttagaatccaaggaagaggtgcttctaggtcttgggagacagggttgctctggggctgcagcagcagccagttgtggtcccttttctgcagttcacattattgagaccagcaatctctaggtcttttgatttaaaagtccaaattgttgacagaaagaatgtgattggctcagtttaacccaaacatccttaagaaggtaatgatagtagaaacacgactgctctgagaagacctctgtgggtgaggtgtggttcccgacaacaagacacatcacgtacagacaaccttctagggatggctcatgactactctgtggccaataactaatattctttgtgtgtacactttgatggagttaagacccctaatgcagcagtgtctatgcagctgccttgtctctctgctctctttctctatagagagttgatatcctaggcattttgagtgccctctccttgatagcagggggcagttttatcccattttgtattttctcccacaaaataaacagcagaacatattattggtgtttaattttgctttgtactctgtgatccttcatgatcctgaagctgtcctgcgatgatctaaaacggcaggttctattttatattcttaaaagatcggttgacaagtcggcaggcagatatagttttattaccaagaaatgtttccctgctttcacacgtactgttgtgccaagaacatggaatttagagtcaggagactgtcttaagtatggttcctgggcaaccctgagatggagatttgtgagcaggatgtttactggggattggtctggggatcagcacctacaagaggtaagggaagcaagactgggcagaaggagaaactgaactatgatgsaactacaacagatgcttcagctgatcctatagggatctctggaactaggaaggcctttcaatattacctagagttgaagcaaggaggcaggcctctatatcttacagtgactgactagttgggggatagcacccaaccctggggaggatgcacaactctgggggatgcagctcccttaggcctaaggcaatgcccagagagggatgcatctgtgagctgtctgtcacccatcccaccagcagctgaaagaatgagtgctttgctcatgatgggcagggtagggataggaagggtctggttgttctccatatagcacctattccaaaaacttagattccattctgctctaccatactagcctgtgagaccttgggcaaatcctttctgtgagtcatcatggcctcattcaaaaactatgaaccaaaccaaaccaactaacctcattttaaaaataggattacataaacagtgttgtgagcactgttgaggacactttcacttatggtatattgtttagttcttcctgtaactctgtggcatgtctgttttaggccaactttatggataaggaggcagatcctcaaagaggtgaaagcagtttgcttgaattcatatggaaaaaatcatatagaaagtgcagttccagatcttttgaaattaagtccttattttggtcaatttgctagagcctcctctcagcaacagaaataacattaataatactaatattggtaatgacaaataatgtttaatttatatggttgttaggaggattgaatgaaagatatttgtaaattataagttgcagaaaaaaaagtgagtcaatataagtgttcttcaaaattgcttttttcc

SEQ ID NO: 710301 - DNA, 1014 bp, Homo sapiens
tgaattaggaattcatgtgctaaccaattatacaattttttctattaattaaaaaattataaattcagtaacgagcacttcctggaaactgatgattgcgggcaaagaactaatatctttcaaacctttaatccctggaaaataatctactctaatgctgttattcaacctcaaaacagagtacaaaattgcctaaggaaaatcactattgaagcacgcgagggacttttttaccaaacgatatttgatgtctgcactgagaaacaaataatgcttgtagtaaattcacagtataaaaacagagaaatggactcaatttacacagcatagatgtcaccaatagaaaaatacatattttgactgtatatgcttttattttcttctgaaagcattgccttatacctttcatgtacatactggctcaccaaatataccactaagaaacatttacaatatcattttctcacttgttttctgtattgttgctactactaaaatctataatattgcctttttctgcttgatagaatattaagtgtgctttgtttaaaaattatacatgactaggaatgtttaagccataaattgcaaacacttttagaagtgagtttaaaacatttttgaaatataattattctttaaaatttatcaggccggtcacagtggctcacgcctgtaattgggaggccgaggtgggcggatgacgtggtcaggacatcgagaccatcctggccaacacggtgaaaccacgtctctactgaaaatacaacaacaacaacaamaaattagccgggagtggtggtgggcgcctgtagtcccagctactcgggaggctgaggcaggagaatggcgtgaacccacgaggcggagcttgcagtgagccgagattgggccactgcacttcagcctgggcgacagaccgagactccgtctcaaaaaaaaaaaaaaaaaaaaaaaaaatttatcataaaatggtaattggtagaaacctcacatgacattctattagtaaaa

SEQ ID NO: 710302 - DNA, 762 bp, Homo sapiens
tatattatatgactagattaaatatacaaataacattgttttctaaagaacattgtgccctcccactggaattcatgcaacaatcacattctaagccagcttcctagcattttggtcataattgtctttctgatcctgaaagcttggaaacacaacttcaccatcccagcagatgtttgattctgcaaaggttgatggaactgtattcagaaataaaaattattctcaaccttgccccttcatcatgctctgaacaaaaaagtaaaccttactgaagtagtctgctctattgcctcatagtaggcattatagaaggcagagaaaatacatttgagtcctgctttgagagtgaatatcagacccttgaggaaattaaagctgaataagatgcaagctttttatagtttgccatatacagaaaaagaacatggccttttaatttggaatgaaaggcctggcgactgtttttcttataatagcattaatagaaataggttgtcgttacttgaaaaatgtttgcattcgtcttatatgaacagtagtagtaataaccaacaagtgctgtagatttccctgaaaatctacatcttgaatcaacaaggaagtaattggktcatgttgaatcaacaaggaagtaattaagcagaataatttcagggaccattgttctcatcttttcatttgactgactcattggagatgagctcatttactttttataatttcctagtgtgcctagtacataggaatgagatcagtttg

SEQ ID NO: 710303 - DNA, 762 bp, Homo sapiens
tatattatatgactagattaaatatacaaataacattgttttctaaagaacattgtgccctcccactggaattcatgcaacaatcacattctaagccagcttcctagcattttggtcataattgtctttctgatcctgaaagcttggaaacacaacttcaccatcccagcagatgtttgattctgcaaaggttgatggaactgtattcagaaataaaaattattctcaaccttgccccttcatcatgctctgaacaaaaaagtaaaccttactgaagtagtctgctctattgcctcatagtaggcattatagaaggcagagaaaatacatttgagtcctgctttgagagtgaatatcagacccttgaggaaattaaagctgaataagatgcaagctttttatagtttgccatatacagaaaaagaacatggccttttaatttggaatgaaaggcctggcgactgtttttcttataatagcattaatagaaataggttgtcgttacttgaaaaatgtttgcattcgtcttatatgaacagtagtagtaataaccaacaagtgctgtagatttccctgaaaatctacatcttgaatcaacaaggaagtaattgggwcatgttgaatcaacaaggaagtaattaagcagaataatttcagggaccattgttctcatcttttcatttgactgactcattggagatgagctcatttactttttataatttcctagtgtgcctagtacataggaatgagatcagtttg

SEQ ID NO: 710304 - DNA, 762 bp, Homo sapiens
tatattatatgactagattaaatatacaaataacattgttttctaaagaacattgtgccctcccactggaattcatgcaacaatcacattctaagccagcttcctagcattttggtcataattgtctttctgatcctgaaagcttggaaacacaacttcaccatcccagcagatgtttgattctgcaaaggttgatggaactgtattcagaaataaaaattattctcaaccttgccccttcatcatgctctgaacaaaaaagtaaaccttactgaagtagtctgctctattgcctcatagtaggcattatagaaggcagagaaaatacatttgagtcctgctttgagagtgaatatcagacccttgaggaaattaaagctgaataagatgcaagctttttatagtttgccatatacagaaaaagaacatggccttttaatttggaatgaaaggcctggcgactgtttttcttataatagcattaatagaaataggttgtcgttacttgaaaaatgtttgcattcgtcttatatgaacagtagtagtaataaccaacaagtgctgtagatttccctgaaaatctacatcttgaatcaacaaggaagtaattgggtcatsttgaatcaacaaggaagtaattaagcagaataatttcagggaccattgttctcatcttttcatttgactgactcattggagatgagctcatttactttttataatttcctagtgtgcctagtacataggaatgagatcagtttg

SEQ ID NO: 710305 - DNA, 673 bp, Homo sapiens
gtgtgtttccagaaggcaatctggctggatattaaggcccacctcagtattggtgaggacacccagtgtctcttggccctgagcttgtgcacacaaacacgcacattgtctaaacggcattgacatcactactacctgagtcatcctcagattctatacaacccctgtaaaaatatcaatgacacattcttcttagaaaaacaatctgggaatcccaaatttgctatgaaatggcagaagatcctgaaaacccagagcaatccagtaaaaagcacaaagctggagccaccacactacctaacttcatgatatactactacaaaactttttgtaccaaaatacaatagcactggcagaaaagcagagactagagcttaggaaaaacaacaggagcccagaactaagtcactgcatttgcagctcacagccttttcccaaagaagcaagaaygaccaatgcaaaatcaagtatcttctataaactaggttggggaaatctgaatagccacacaaaggattttacaagtggattatttatcaccaaactccagtgtcagatgtgaaacgataaaaatagcagaagagatcacaaggaagaagctccatggcgtccgtgtgtgcaatgatggtctcaaagtgactgcaagaacacagtaaacaccatcaaaaataga

SEQ ID NO: 710306 - DNA, 673 bp, Homo sapiens
gtgtgtttccagaaggcaatctggctggatattaaggcccacctcagtattggtgaggacacccagtgtctcttggccctgagcttgtgcacacaaacacgcacattgtctaaacggcattgacatcactactacctgagtcatcctcagattctatacaacccctgtaaaaatatcaatgacacattcttcttagaaaaacaatctgggaatcccaaatttgctatgaaatggcagaagatcctgaaaacccagagcaatccagtaaaaagcacaaagctggagccaccacactacctaacttcatgatatactactacaaaactttttgtaccaaaatacaatagcactggcagaaaagcagagactagagcttaggaaaaacaacaggagcccagaactaagtcactgcatttgcagctcacagccttttcccaaagaagcaagaacgmccaatgcaaaatcaagtatcttctataaactaggttggggaaatctgaatagccacacaaaggattttacaagtggattatttatcaccaaactccagtgtcagatgtgaaacgataaaaatagcagaagagatcacaaggaagaagctccatggcgtccgtgtgtgcaatgatggtctcaaagtgactgcaagaacacagtaaacaccatcaaaaataga

SEQ ID NO: 710307 - DNA, 634 bp, Homo sapiens
ctatctaggtgatgggagggagaagagtaagaatcttccacttcttaactatttctgtacatatttttggaattttkcacaatgagcatattcacattcaattatctactatcacaaaatcctaaaggctcttaaaaaatagtatttttggctgggtgcaatggctcacacctgtaatcccagcactttgggaggccgaggtgggtggatcacttgaggtcaggatttcaagaccagcctggccaacgtggtgaaactccaactctattaaaaatacaaaaattagctgggcttggtggcagatgcctgtaatcccagctactcaggaggccgaggtaggagaatcacttgaacccaggaggcggaggttgcagtgagctgagatcgcaccaccgtactccagcttgggtgacagagcaaggctacatcttaaaaacaaaaatagtatttttaaaaatagttcacaggacaatacacttgtgacttaactaatgtcatctcgtgtagtttttatgtatccctcattgtgacaaaatacaagtttcactccagaaatttaaataaatgcatttgaggctagggtgggcccatcccctgctgggggtgttacatgaccttctaaaatcttaaacaa

SEQ ID NO: 710308 - DNA, 634 bp, Homo sapiens
ctatctaggtgatgggagggagaagagtaagaatcttccacttcttaactatttctgtacatatttttggaatttttcacaatgagcatattcacattcaattatctactatcacaaaatcctaaaggctcttaaaaaatagtatttttggctgggtgcaatggctcacacctgtaatcccagcactttgggaggccgaggtgggtggatcacttgaggtcaggatttcaagaccagcctggccaacgtggtgaaactccaactctattaaaaatacaaaaattagctgggcttggtggcagatgcctgtaatcccagctactcaggaggccgaggtaggagaatcacttgaacccaggaggcrgaggttgcagtgagctgagatcgcaccaccgtactccagcttgggtgacagagcaaggctacatcttaaaaacaaaaatagtatttttaaaaatagttcacaggacaatacacttgtgacttaactaatgtcatctcgtgtagtttttatgtatccctcattgtgacaaaatacaagtttcactccagaaatttaaataaatgcatttgaggctagggtgggcccatcccctgctgggggtgttacatgaccttctaaaatcttaaacaa

SEQ ID NO: 710309 - DNA, 634 bp, Homo sapiens
ctatctaggtgatgggagggagaagagtaagaatcttccacttcttaactatttctgtacatatttttggaatttttcacaatgagcatattcacattcaattatctactatcacaaaatcctaaaggctcttaaaaaatagtatttttggctgggtgcaatggctcacacctgtaatcccagcactttgggaggccgaggtgggtggatcacttgaggtcaggatttcaagaccagcctggccaacgtggtgaaactccaactctattaaaaatacaaaaattagctgggcttggtggcagatgcctgtaatcccagctactcaggaggccgaggtaggagaatcacttgaacccaggaggcggaggttgcagtgagctgagatcgcaccaccgtactccagcttgggtgacagagcaaggctacatcttaaaaacaaaaatagtatttttaaaaatagttcacaggacaatacacttgtgacttaactaatgtcatctcgtgtagtwtttatgtatccctcattgtgacaaaatacaagtttcactccagaaatttaaataaatgcatttgaggctagggtgggcccatcccctgctgggggtgttacatgaccttctaaaatcttaaacaa

SEQ ID NO: 710310 - DNA, 1062 bp, Homo sapiens
gacaggtggaagagtggatgaggcaggttgtgggaaattcatggcattaacatgctcaatgcatgaaggaagagttgttctaacctgttactctaaaacatgaaactagaaaataggtttcagaattgtgtccactcrttaaaagatttattttagaactataaaagaaaccaggaggctggggacagtggctcacgcctataatcccagcactttgggaggccgaggcgggtggatcacgaggtcaagaaatcgagaccatcctggccaacatggtgaaacgctgtctctactaaaaatgcaaaaaattagctgggcgtggtggtgcgcgcctgtagtcccagctactccggaggctgaggcaggagaattgcttgaacccaggacggggaggttgcagggagccaacggagtgccacggcactccagcctggcgacagagcgaggctccgtctcaaaaataaataaataaataaaaaataaaaagaaaccgggaatgctgtgaagcaatttcacaaatctgtagggcattttgctaaaatcatcaaactacaattacaggctttgtgggttgatgagggtgaaagagttcttatgtggcgggtcacttctatgtgacagaaacacacgactggacctgtatcactgaaatcctgagacaggatgaccacattcattcattcatcacttacccactcactcattcatcgtttactgaactactgagcaccaccaggtgtgctgaaatactaccatctgagccacccaagggcctacaggctagtaggagaaacagatacataaacagattatttaactcactggtaaaaaatcaaagacctaaaagtgaaaaatcaagaagcagcaatataagctgttattttaagacataagtaaataccagatgaatcagccaagggttgaaagtggctgccttctggaaaacagactgtgggctgctgattgttgatttatgcacatataactgagattttttttttaaagcttaaatgttttttaaaagtcaaaacaacaatattgtgggtgccatgaaagagaggg

SEQ ID NO: 710311 - DNA, 635 bp, Homo sapiens
tttgggaggtcaatgtgggcagatcacttgaggtcaggagtttgagactagcctgggcaacacggcaaaaccccatctctacaaaaaatacaaaaattagaagggcgtggtggtgtgtacctgtagtcccagctacttgggaggctgaggtgggaagatagcttgagcccaggaggcagaggttgcagttagctgagattgtgccactgtactccagcctgggcaacagagccacagaccttatctaaaaaaaaagtactcattcagccaactatttattgatcyccacggtcaagttcaattgtgatatacagttgtgtgtcacttaatgacgatgatacattctgagaaatgggttgttaggtgattttgtcattgtgagaacattatagagtgtacttacacaaacctagattgtgtagcccactatacaccttggctatatgctatagctttttgctgttaggctacaagcctgtacagcatattactgtactgtacaaaatatatgggcagttgtaacacaagggtaaatatttatgtatcctaaagtagctaaacatagaaaagataatgtttaacactacatctttacaatggctatgtcatcattaggcaataggaatttttcagct

SEQ ID NO: 710312 - DNA, 635 bp, Homo sapiens
tttgggaggtcaatgtgggcagatcacttgaggtcaggagtttgagactagcctgggcaacacggcaaaaccccatctctacaaaaaatacaaaaattagaagggcgtggtggtgtgtacctgtagtcccagctacttgggaggctgaggtgggaagatagcttgagcccaggaggcagaggttgcagttagctgagattgtgccactgtactccagcctgggcaacagagccacagaccttatctaaaaaaaaagtactcattcagccaactatttattgatccccacggtcaagttcaattgtgatatacagttgtgtgtcacttaatgacratgatacattctgagaaatgggttgttaggtgattttgtcattgtgagaacattatagagtgtacttacacaaacctagattgtgtagcccactatacaccttggctatatgctatagctttttgctgttaggctacaagcctgtacagcatattactgtactgtacaaaatatatgggcagttgtaacacaagggtaaatatttatgtatcctaaagtagctaaacatagaaaagataatgtttaacactacatctttacaatggctatgtcatcattaggcaataggaatttttcagct

SEQ ID NO: 710313 - DNA, 635 bp, Homo sapiens
tttgggaggtcaatgtgggcagatcacttgaggtcaggagtttgagactagcctgggcaacacggcaaaaccccatctctacaaaaaatacaaaaattagaagggcgtggtggtgtgtacctgtagtcccagctacttgggaggctgaggtgggaagatagcttgagcccaggaggcagaggttgcagttagctgagattgtgccactgtactccagcctgggcaacagagccacagaccttatctaaaaaaaaagtactcattcagccaactatttattgatccccacggtcaagttcaattgtgatatacagttgtgtgtcacttaatgacgatgatacattctgagaaatgggttgttaggtgattttgtcattgtgagaacattatagagtgtacttacacaaacctagattgtgtagcccactatacaccttggctatatgctatagctttttgctgttaggctacaagcctrtacagcatattactgtactgtacaaaatatatgggcagttgtaacacaagggtaaatatttatgtatcctaaagtagctaaacatagaaaagataatgtttaacactacatctttacaatggctatgtcatcattaggcaataggaatttttcagct

SEQ ID NO: 710314 - DNA, 1300 bp, Homo sapiens
gttggatttagtacaataagcacttcttgaggacctgccatgaccccaggcattgtagtaagtcctcarttccaaagatgagcaagacatggcctctaccctcgaagagcttacattctagttccaagcccaacaaaggctttctcagaacaaattcaatttaacacagcaacatctgctattaatagttatagtaattaaaataaagaaaacttaaatgtgctcataagtatatactctagagaaaaagaagatattattttaagaaaatcaagacaacagagccagctggtttgttcaaggtcatatcatgaggtaaagtggaagcaaagaaaacaccctagggcgctttgagttacaaaccaggtttacatgctttctggaaccaaaaagggccaggcagctttctttttctttcttttctttgttctcctctttttttaacagctgggaaagttgtggggtgaggtgcttgatgcaaaaaagttacttttttggctttgcttagttttgcaaaactaaaaagcatttcaaatagatattgcattgttgcagttcatttaaccctccagatattttcccacttcgtcaaccatttcattctgcatcttagttaaaaaatatcttcccctactccttatcaatttctataccattttccatcttatttagtaatgatatccctcctgtctacagaaagataggactttgtaatattacagtatattccacagatatttagccaaataaaattgatgtggatgaagaaaatggctataaagtccatgaactcattgtccaaatatagagatatctgtgcacactgattttactgactacttcatgggtcttttcttcctagatagggggaaaagacatcatgggctacaatttatggcatcccagacatggacaatcttttatctcattgcacttggtacagatatactactcatccattctgggctaaagtggtttggcaaacaatgcattcctcagtctctttattctccctcagattcgaccaatatactgaatggggtgatgaccagtctgacactacttaccaatgcacagtcaatctactctactgtaaaagtggttattaataaaacctccaaaagagcagatgacttctcaaaaaagtagtctctcacaaaaaaaaaaaaaaggaatcagtagattgaagagaaatctgtatgcctgtttaaagcagcactattcacaagagccaaaatatggaaccaacctaagtgtccaccaatggatgaatggataaagaaaatatgatatatataca

SEQ ID NO: 710315 - DNA, 1300 bp, Homo sapiens
gttggatttagtacaataagcacttcttgaggacctgccatgaccccaggcattgtagtaagtcctcaaytccaaagatgagcaagacatggcctctaccctcgaagagcttacattctagttccaagcccaacaaaggctttctcagaacaaattcaatttaacacagcaacatctgctattaatagttatagtaattaaaataaagaaaacttaaatgtgctcataagtatatactctagagaaaaagaagatattattttaagaaaatcaagacaacagagccagctggtttgttcaaggtcatatcatgaggtaaagtggaagcaaagaaaacaccctagggcgctttgagttacaaaccaggtttacatgctttctggaaccaaaaagggccaggcagctttctttttctttcttttctttgttctcctctttttttaacagctgggaaagttgtggggtgaggtgcttgatgcaaaaaagttacttttttggctttgcttagttttgcaaaactaaaaagcatttcaaatagatattgcattgttgcagttcatttaaccctccagatattttcccacttcgtcaaccatttcattctgcatcttagttaaaaaatatcttcccctactccttatcaatttctataccattttccatcttatttagtaatgatatccctcctgtctacagaaagataggactttgtaatattacagtatattccacagatatttagccaaataaaattgatgtggatgaagaaaatggctataaagtccatgaactcattgtccaaatatagagatatctgtgcacactgattttactgactacttcatgggtcttttcttcctagatagggggaaaagacatcatgggctacaatttatggcatcccagacatggacaatcttttatctcattgcacttggtacagatatactactcatccattctgggctaaagtggtttggcaaacaatgcattcctcagtctctttattctccctcagattcgaccaatatactgaatggggtgatgaccagtctgacactacttaccaatgcacagtcaatctactctactgtaaaagtggttattaataaaacctccaaaagagcagatgacttctcaaaaaagtagtctctcacaaaaaaaaaaaaaaggaatcagtagattgaagagaaatctgtatgcctgtttaaagcagcactattcacaagagccaaaatatggaaccaacctaagtgtccaccaatggatgaatggataaagaaaatatgatatatataca

SEQ ID NO: 710316 - DNA, 1300 bp, Homo sapiens
gttggatttagtacaataagcacttcttgaggacctgccatgaccccaggcattgtagtaagtcctcaattccaaagatgarcaagacatggcctctaccctcgaagagcttacattctagttccaagcccaacaaaggctttctcagaacaaattcaatttaacacagcaacatctgctattaatagttatagtaattaaaataaagaaaacttaaatgtgctcataagtatatactctagagaaaaagaagatattattttaagaaaatcaagacaacagagccagctggtttgttcaaggtcatatcatgaggtaaagtggaagcaaagaaaacaccctagggcgctttgagttacaaaccaggtttacatgctttctggaaccaaaaagggccaggcagctttctttttctttcttttctttgttctcctctttttttaacagctgggaaagttgtggggtgaggtgcttgatgcaaaaaagttacttttttggctttgcttagttttgcaaaactaaaaagcatttcaaatagatattgcattgttgcagttcatttaaccctccagatattttcccacttcgtcaaccatttcattctgcatcttagttaaaaaatatcttcccctactccttatcaatttctataccattttccatcttatttagtaatgatatccctcctgtctacagaaagataggactttgtaatattacagtatattccacagatatttagccaaataaaattgatgtggatgaagaaaatggctataaagtccatgaactcattgtccaaatatagagatatctgtgcacactgattttactgactacttcatgggtcttttcttcctagatagggggaaaagacatcatgggctacaatttatggcatcccagacatggacaatcttttatctcattgcacttggtacagatatactactcatccattctgggctaaagtggtttggcaaacaatgcattcctcagtctctttattctccctcagattcgaccaatatactgaatggggtgatgaccagtctgacactacttaccaatgcacagtcaatctactctactgtaaaagtggttattaataaaacctccaaaagagcagatgacttctcaaaaaagtagtctctcacaaaaaaaaaaaaaaggaatcagtagattgaagagaaatctgtatgcctgtttaaagcagcactattcacaagagccaaaatatggaaccaacctaagtgtccaccaatggatgaatggataaagaaaatatgatatatataca

SEQ ID NO: 710317 - DNA, 619 bp, Homo sapiens
ttgttattctctgggatttgtagtttcacaaaccagcacctgccttctgattctcttttccagcctgtattttggacactgaaccaatcgcatggagatttattttttagctggtgaatctttcattatgtaaatgttaatgtattattaatgataataataatgctaataataatgtgactaatttcttaagtcttccttatgtgcaaggaactgtgtattgtgtcatttacttgcccagtgatagtaatgtaggcaytttaggattcccatcttacagatgagggaaccaaggctttaaaaatttaataaattgcttgtgagcccacagccaatatcaagctagaaacgtgcacctgagaacatgattccctgtccagggctgttactttcaccaagtacttaatttgacataaatgtaaaggaagagattgcctttttggttaaatgttctctgacactagaaatacagttaaaggctcttaaaaggctctatagcttctaagatgaataacatgaattgaaaatacaatgaaaagtgtaccccttttgtagctgggggattcttgcctttgcatctagactggagttctgctttaaatgggttgccatttcagga

SEQ ID NO: 710318 - DNA, 1222 bp, Homo sapiens
gtacacatatatgtacatgtatagagatataattttttacaaaatgagatcatactatacrtactcttaaagcctaatggttttgcttttaagtgtaccacggccatatttccattactataaacattgatctccagctttatttttaatgttcactttgtattccattatatcaatgaaccatcatttacttagccaatcctgtgttggtgaacacttacatttttttgacttttttgttataataaaaacattgtggtaagcctcctccttatacatctttatacgtttgtgaaattaattcttagaacttgctggcccataatacactctcattaatgtgttgaattaatggataaaatatggcttggtcaaagaattggtaaagtttatattttgatatatattgctaaattgcctttcagaaaggcaactaatcaattttctgttatttataactttttttttttactttatgatttaaatatttcaggaagtttaaaatcttttactttgtggttctgccccagggacagtggtatgttggagtaaaagcacaacagcttatgaaagcctactgtcaaattttcagaaattttcaactacttgtaaaatgtagccattattttaaaattatggaaaattattaaattatataaaaaaacaaaggtaataaatactcaaagtatagtagttcctaattatttgctattatctatgctcttgaagtcagttatgactatcacatctggatagtgggaatacctggcagtggtgtactgccctgcatctcttcccaattccacactcagtgactatgtcgatagcttaatattggtcatggtggaagtatttatactatggaaatcagcaagtgctagaaatcagggcctgatttagtgctgaagctgaaagagtttttaatttaattaataatttatacaagggtgagaaatagtttaacaataagccacatatcagatttaatggcaataaatttattgggaaaagagttagcagactggaataagctccatttgtcaaatcatggctgaatgttgactacagagtcaaagaaaaaaaaaaatcaagagaagcattcttggagaatcagttgactgaaaagtttacatactttttcagagagctgacagttaaatgtctaatagcacactactgcttagggatgctttgagaagctttccctttataagaactgaca

SEQ ID NO: 710319 - DNA, 1222 bp, Homo sapiens
gtacacatatatgtacatgtatagagatataattttttacaaaatgagatcatactatacgtactcttaaagcctaatggttttgcttttaagtgtaccacggccatatttccattactataaacattgatctccagctttatttttaatgttcactttgtattccattatatcaatgaaccatcatttacttagccaatcctgtgttggtgaacacttacatttttttgacttttttgttataataaaaacattgtggtaagcctcctccttatacatctttatacgtttgtgaaattaattcttagaamttgctggcccataatacactctcattaatgtgttgaattaatggataaaatatggcttggtcaaagaattggtaaagtttatattttgatatatattgctaaattgcctttcagaaaggcaactaatcaattttctgttatttataactttttttttttactttatgatttaaatatttcaggaagtttaaaatcttttactttgtggttctgccccagggacagtggtatgttggagtaaaagcacaacagcttatgaaagcctactgtcaaattttcagaaattttcaactacttgtaaaatgtagccattattttaaaattatggaaaattattaaattatataaaaaaacaaaggtaataaatactcaaagtatagtagttcctaattatttgctattatctatgctcttgaagtcagttatgactatcacatctggatagtgggaatacctggcagtggtgtactgccctgcatctcttcccaattccacactcagtgactatgtcgatagcttaatattggtcatggtggaagtatttatactatggaaatcagcaagtgctagaaatcagggcctgatttagtgctgaagctgaaagagtttttaatttaattaataatttatacaagggtgagaaatagtttaacaataagccacatatcagatttaatggcaataaatttattgggaaaagagttagcagactggaataagctccatttgtcaaatcatggctgaatgttgactacagagtcaaagaaaaaaaaaaatcaagagaagcattcttggagaatcagttgactgaaaagtttacatactttttcagagagctgacagttaaatgtctaatagcacactactgcttagggatgctttgagaagctttccctttataagaactgaca

SEQ ID NO: 710320 - DNA, 3033 bp, Homo sapiens
ttcatcattttggtggcagttataccaaagtatgtctgaccacagcggaccagctcaactaaactaccacgagttaccttccttatttaggctgtgaaatgtggcagaataagtgattccattgttaagggaaatcacacccataaagaaaatcagagttgatggttttcttacatagatttgggcttcgtgttaaaattctagctgcaattttgccaactggagaaaaattagaaaagtttatagagcaatgattctactgacagcatctcgatgaactagtctcagattgttagacttgtgtggtatttatgggtgaataatatgaagtcccatcaactgtgatgtctgactctgcctaaatgctaattaataataacttaaaatattacttcataaagattaccaaaaggtgttattcagaaataaaattataatgtttattaaaatacacttacgatgttaaatcagtattctaagaaaatttggctccagttaacatttggtggtttttcaaaactctcaggatgtatcacataggcaattggttgacattttaggaaagacagcttattagttcattctcagccttgcttatcattgcttatcattttcaaatgtcaccattcttgctttataatcagacattaggcttgcttaatttcatcttaaatttgtcatgcactttttgtttaaacaagtttgagtaaggtatcttcatcaataaaattttgatgtaggatttggtaacatttacttcaaccagtttgctctgccttttgacacaaatcagccatatctttattgctaaatagatacgtacactcataacttgaacgtgcactgtgttactcatcattaatttattttccattggaatatgagacatagtgatacaatgaacatgaaatcttttgtctagactcagtggatagcatgaaaaagtttaagacactaataagaagttatttcaaagtacataatggggtattgatacaaatctaatgttgatcctaaagtgaaatctatatcagctaatggaagaaaaacaaatgaatgtaagatttgtcttgagtaaaattgttaacgtaggaaatgctggttatgttttgtctttgtcttctccatccttgccagttcttactcccatgctaccaaaagactggactctgtgcctttggcagcctcctcctccccactagccctagagctagtggtcccacattcactatattcccctcctttctcaacacacacacacacacacacacacacacacacacacacacacaccccttattataatgcatcttaacatgtttcattaagcacctagtattcaactagttaagttatccagtcatctagtaagcctatagttattcagggtaataagatttgtaaatattggtgttttagtggaacattataagatactggtatagataattctatcaaacatgaaatttttttcccaaataaaagcctgcagtttttctttatccaatcttatctaatactgatacattataatacttgtcatcgtgggataatatgtgtacatatataattatatataaaatataaaaatataatatataatatttttatataatatgcccccatgtagcttattcaattatggctcccatttctaaacattcctagcactaaatgaagtataaatgcacaataaaatatatataatatataatatttttatcatatatgatatataatatataatgttatatagatatccgtcatactactggagatatatattatatatatatataatactggatatatatttgtatatatatacacacattctactggatacacacataaacacacacacacatacatatacatccatacagtatactactggaaaatggtgctaacatataattttcttctgacttatccccagtagaggcaagagagccctgtcaaatgtccttaacagttaaaagttcaaactgcacagcatttccctagttttgactggcacatctgtttgttttctccactatttctttttttttttttttttcatttctcttcaacagttttgacctaaatagctggggaattatgccaaggaagggtatcacactggatataaaactacaagtttaataaagccttgaaaagctttcaagacaaatcatagtaggtatttggggattgggggaagaattttgtaattatgaagtgcatgataaaaatcactgtggcctggaaggactgactcaaaatggataggaatgggactgggggaaggcatggccccaggagtttagttgatttaagaggcttggaagacaaaggaagaacatttgccatcttagcaaatgaacatagttctagatgggctatgcccccatgtagcttattcaattatggctcccgtttctaaacattcctagcactgaatgaggtataaatgcacaataaaatcacatcttcaaatattcattttggaatcaacaartaatagctaactttctgatttagcaaggccatcatatcctaagtttcctattaatgtatttctgttgctggttcattaattttgttaaattgtagcatttattagctggcaccaaatgtttatgattgaaaatgctttcatctagtagtttaattatccctgtgaattgggaaaaatattaaacattcaattttttcagcaaatatatttcgttcaagtcaaggaaaccattaaatcatggctttaaatacacatgactaatccaaggagatatgaagcagtggcataaagggtcccacctagatgagatggaaacaatatgaaactacagcctaagaatcctactggcctatgttaagaatgccaacttcaaggcttagattcagagatacttggaatcccacctctacctgtttataggcaacatgtctttagggaaacgatgtaaatcatgaccttcagtttttcccataaataaaatgaaaatattattcatatctacaacattgagttgtcacaatagttaaata

SEQ ID NO: 710321 - DNA, 3033 bp, Homo sapiens
ttcatcattttggtggcagttataccaaagtatgtctgaccacagcggaccagctcaactaaactaccacgagttaccttccttatttaggctgtgaaatgtggcagaataagtgattccattgttaagggaaatcacacccataaagaaaatcagagttgatggttttcttacatagatttgggcttcgtgttaaaattctagctgcaattttgccaactggagaaaaattagaaaagtttatagagcaatgattctactgacagcatctcgatgaactagtctcagattgttagacttgtgtggtatttatgggtgaataatatgaagtcccatcaactgtgatgtctgactctgcctaaatgctaattaataataacttaaaatattacttcataaagattaccaaaaggtgttattcagaaataaaattataatgtttattaaaatacacttacgatgttaaatcagtattctaagaaaatttggctccagttaacatttggtggtttttcaaaactctcaggatgtatcacataggcaattggttgacattttaggaaagacagcttattagttcattctcagccttgcttatcattgcttatcattttcaaatgtcaccattcttgctttataatcagacattaggcttgcttaatttcatcttaaatttgtcatgcactttttgtttaaacaagtttgagtaaggtatcttcatcaataaaattttgatgtaggatttggtaacatttacttcaaccagtttgctctgccttttgacacaaatcagccatatctttattgctaaatagatacgtacactcataacttgaacgtgcactgtgttactcatcattaatttattttccattggaatatgagacatagtgatacaatgaacatgaaatcttttgtctagactcagtggatagcatgaaaaagtttaagacactaataagaagttatttcaaagtacataatggggtattgatacaaatctaatgttgatcctaaagtgaaatctatatcagctaatggaagaaaaacaaatgaatgtaagatttgtcttgagtaaaattgttaacgtaggaaatgctggttatgttttgtctttgtcttctccatccttgccagttcttactcccatgctaccaaaagactggactctgtgcctttggcagcctcctcctccccactagccctagagctagtggtcccacattcactatattcccctcctttctcaacacacacacacacacacacacacacacacacacacacacacaccccttattataatgcatcttaacatgtttcattaagcacctagtattcaactagttaagttatccagtcatctagtaagcctatagttattcagggtaataagatttgtaaatattggtgttttagtggaacattataagatactggtatagataattctatcaaacatgaaatttttttcccaaataaaagcctgcagtttttctttatccaatcttatctaatactgatacattataatacttgtcatcgtgggataatatgtgtacatatataattatatataaaatataaaaatataatatataatatttttatataatatgcccccatgtagcttattcaattatggctcccatttctaaacattcctagcactaaatgaagtataaatgcacaataaaatatatataatatataatatttttatcatatatgatatataatatataatgttatatagatatccgtcatactactggagatatatattatatatatatataatactggatatatatttgtatatatatacacacattctactggatacacacataaacacacacacacatacatatacatccatacagtatactactggaaaatggtgctaacatataattttcttctgacttatccccagtagaggcaagagagccctgtcaaatgtccttaacagttaaaagttcaaactgcacagcatttccctagttttgactggcacatctgtttgttttctccactatttctttttttttttttttttcatttctcttcaacagttttgacctaaatagctggggaattatgccaaggaagggtatcacactggatataaaactacaagtttaataaagccttgaaaagctttcaagacaaatcatagtaggtatttggggattgggggaagaattttgtaattatgaagtgcatgataaaaatcactgtggcctggaaggactgactcaaaatggataggaatgggactgggggaaggcatggccccaggagtttagttgatttaagaggcttggaagacaaaggaagaacatttgccatcttagcaaatgaacatagttctagatgggctatgcccccatgtagcttattcaattatggctcccgtttctaaacattcctagcactgaatgaggtataaatgcacaataaaatcacatcttcaaatattcattttggaatcaacaagtaatagctaactttctgatttagcaaggccatcatatcctaagtttcctattaatgtatttctgytgctggttcattaattttgttaaattgtagcatttattagctggcaccaaatgtttatgattgaaaatgctttcatctagtagtttaattatccctgtgaattgggaaaaatattaaacattcaattttttcagcaaatatatttcgttcaagtcaaggaaaccattaaatcatggctttaaatacacatgactaatccaaggagatatgaagcagtggcataaagggtcccacctagatgagatggaaacaatatgaaactacagcctaagaatcctactggcctatgttaagaatgccaacttcaaggcttagattcagagatacttggaatcccacctctacctgtttataggcaacatgtctttagggaaacgatgtaaatcatgaccttcagtttttcccataaataaaatgaaaatattattcatatctacaacattgagttgtcacaatagttaaata

SEQ ID NO: 710322 - DNA, 631 bp, Homo sapiens
tttttgtctgctaagttgaaagtgctttgaagggttttagccctggagtggagttgggaggctcaggcctgcagtcccagcacagaatctgtaacamcaatgccagcctgggcagcgagagacttcctttctcttgggtatgaatcacaccaggcgtcaggagaaataattgtgagttccagatctgcagcatcatgactaatgcaaataacaagctgccatgtgttaagggcttattatgttctgggtaataaatccttgacacggattatcccgttcactgtgtggccttgagcggatgactttgcctttctgtttctgtttcttcatctctaaaatggagaagacaacacttaacagggaggttgagaagagctaatgaaataacatatgcgagagtcttagaaaaaagcacaaggggatatatgcatgccttatttttaccaatgaggaagatggtaatcttcaggcctttgaagagtctgcattgcacagaggagggatgttggcaaagctccggctgatggtgaatttgatagcccagctttgtgagggcagaatatgaggcccacggtggtgctttatctgtcacctgagattggggtgtctgtctcctggcacaaatgtgaca

SEQ ID NO: 710323 - DNA, 1078 bp, Homo sapiens
tcaatcttcagttttgaagttcttctcaccccaatttaaatcagcctcccatagcctatattggaggtccattgtgggactgagtttgctataataaagagagtattgggttagaagactacaaacagagattatttaggctggggtgaaagaatcttctaacttgaggaagatccaatattggctggtcctgtgtgaagcaactccatccttctgttactctttaggtaccaccttcatctcttcttggaaaccaccatcattaccatataatcatcctgtagaagccagttcaaaattagaccaggtgtgggacaggagagaaaaggtgtgtggggggagtaatcattatctgtttgattttctgtattgcccctccaataaaccagagaccacactgagttgagtactattccctcattatatttaataatatctttctctgcctgcattaatttcctggatgaccttatttagtcccatggtcttgaatcccagtctgaatgatgatgactaccaaatctgtattgacagtcatgaccctcctctgaactccaaactatgtgttcaatcatctgcttagaaggttcttttggatgcttaatgagcaatgaaaacttaatatgtccaaattcaaactcttggtttcaagcctaatactccttcttagtgttctccatctgcatagtgacgtctaattcaccctcatgatctagcaaaaaaaaaaaaagtgtggcttcatctgggagtcttctctttctttcatccccttagcaagtcctattgaattcacctccaagatatatactgtgtttctcagggtaaacaatgttagatgccaaaataaacactatatctctgagtttagcataagaaaaagttgcccaatatgggtcaggagaccctcatccatctttggcatgcacgtactggcatcatgtccaagactgctgtgtaaggggaggagataaatgaggagacacaacaactattaactcccatattctgggaagtgacgtgtatcatttctactcrttggccagaaatggtcagctggccctaaggtaatgcagaaaga

SEQ ID NO: 710324 - DNA, 716 bp, Homo sapiens
ttacaatgtggataagcgggtaagttctagagatctaatgtacagcatgatgacttaatactgtattgtatacttgaaatttgctaagagggtagattttaaatgctcctaccacatacacaaaaatggtaactaggtggggtgatgaatgtattaactaactttataaaaaaaattttctctttgaattctatgttaaccaacttgattgggctatcatttcataatatacacatatatatcaaatcatcaggttgtacaccttaaatttatagaattttatctttcagttacacctcaataaagctggaagaaaatgaagccctgcggagatagagcaagtgagcccaactcctggaaaagaggtgagtgcagggaggcaaatcctaggacagggtgcacgcaagcctgtgtgggcacaaagaagggtgcggggagacctggcgctgggagagtgttagcaaaatgctcctcagaaaagaaatgaattcttgaagggagacaagaaaactgcaagcaayagaggcaggcagacattcacaactgagtaagtaaatagtaataaaataacaaccaacaatggtggcaactaacagttcctgacacaatgacccaggcagtgtttgaaagttttctgggtactaacccatttaatcctcctccaaagcctgtaaggtagttcaaggattagccccattttatggatcagtaaactg

SEQ ID NO: 710325 - DNA, 1197 bp, Homo sapiens
acctttaaaatatttgtggtataccatttcaagtcctaagactttgagagaaggacttcagaaacatctggagttgatacgccccctgtttcaatttgaagctaagtttatggcccatcttttctgacacacatttttttaaaaagagcatagaatatcatatctcagagggcatattgtgttctgaggtgttaactttacaatgttaagaacccgagttcttaacccgaacccccaaggaagacaaaacttgggggctccataactcaagcatgatggagaacacagccaggaggtagtgccagaggtaaataagaagctggggagtacagccagaagcacgttaggggattcagaatctttctggcaaggtgagggatgggtggatgggtgagctgaaggagtaaggttgacagggaactcactggtaacagtctttctgcgcacggcctcagaaaatggccaacgatctttttctaaattaacttaaattaatgcgacttcacctgaagaaagaaggaaaacagattagatgacagtatgtggcacggttatttaggaagaattttcaccaggcaaaattctaaaataatagactaggttcctattgggaagatgtgtccttttcctagcagttactataaacgggataaatacctatgtcggtggatttgaccaggggttgtcccacctggtggcagggactagataacttctggaaggtcctttgaccctgctctctaaaatgcagctatgaactcagcgcccagtttgttgtgccagttccgaagcaagatgctgccacctagcgtctgctgttctcacacgcagtagcacctaactgcctacatacactttcattagaaaagccctgataatgtagtctgtccttcagtcggacaaaacaggcctaaacactaaatccatgtggaaaatggaatcaacattaaattatttgttaaactaaaatattcttttgagaagaatgtaagagcagtcagcayagcaaggaatcatgaaaatccagagttcacctacattgcccgtgggtcaactacgtaaacagctagagaacatgcagggaactcgttctgagtgtctttaatgtatagatatagacccaagcagtggaatatacgaggaaagaaattatagatcaaggccgggcgcggtggctcaagcctgtaatcccagcac

SEQ ID NO: 710326 - DNA, 614 bp, Homo sapiens
ggcagaaatggagtatagcccagtatttcttagcccattcatatgggtcagtgaatactgattcataattctcagggtactgagacacagacctatttattaagagtcctgtgacatgtcactggtagtaacccttctcttctttctccgtggcttgtctacttagaccttccactttggttacattttctgaaaaaattttgtgagtctcaaagcatgatctgaataagcaggttacatactgcgttatttctaatcaatgaaaaagactaagttctcctagaatgatcttcctctattgggatcaatctttcccagtgttactacatcagaagtagggtcttatttcytattggtttacttgtctaaggtcaggaaagcaaaagatttggttcctatggacccaacttgaaaaaaaaaattttagaaatatgtaaatatagctaccaacacactttcagcatcacaagtcacgagtacaagattattttcacttaattaccccaaacatggttgatatctgtactctttgcccatttcttaaggtgttaaaataaaagaacaggtatttaagaaatctctctctctctctctctctcacacacacacacaca

SEQ ID NO: 710327 - DNA, 1148 bp, Homo sapiens
ttaaagtaggtttttcataggcaatatatagttggtttcgctttttatttcaatcttacaacctcttcctttaaattggagtgattagaccatttacatttaatgtgactgactgttgatatgtttgggtttaagtatgccgtattgtatttattattcatatctcttcctatttttcatcttttgatgaaatacttggaaaagtatgaagtatttgaaaaatacttctttggggctaattatctttctatgattccatttcttttttttttctttttgttttggagacggggttttgctctgtcacccaggctgcagtgcagtggcgtgatctcggctcactgcagcctccacctcctgggtttgactgattctcctgccttggcctccagagtagctgggattataggcatctgccaccactcctggctaatttttatattattagtagagacagagtttcaccgtgttggccaggccagattggtctcgaactcctgacttcaagtgatctgcccacctcggcctcccaaaatgctgggattacaggcatgagccactgtgcctggcctccatttatttttttaatggagaaattaaaatgactttattgttgtatatatacaaaatagaatttaatagagggcaaaatttattgaactgtatacactgcacctgtagtctcagctacacaggaggttgaggtaggaggatcccttgagaccagggaggcagaggttgcagtgagctgagatggagccactgcattccagcctaagcgacagtgccagaccttgtctcaaaaataaataaataaataaataaataaataaataaaagcaaagtacacatttttttttccaagtacacacagagcatttaacaagatagacwatattttggcccaaaaaacaagtttcaataaattttcaagggttcaggaaaaagtacgttgtctgaccacaatggaattaaatagaaatcaatagctaaaatatatttggaaaatccccaaatttttggagactaggtaacacacttctaagtagcccatgggttaaagaaaaaaatcaaaagggaaaatagaaagtattttaaacctttcttatagggcatgactgctggcgatgaatactttcagcttcttt

SEQ ID NO: 710328 - DNA, 645 bp, Homo sapiens
atgttcacaaaggcctcccaaaagttcctcctgactttatgtgattcactaacccaggcctgtactctctattgtgggtcttcttaaatatctgttgtggggtgagaggtttgaagaattataagtgggggagtttataaagaktgcttacttcttaaataggaagaatcccattcaactgcattttctgttttgttttgtacttccactgagggacagattaacagagtagctggggaaagaaaggaaagggaggagtctataagcctcaccatcaggtgcctatacggtgtctggggaggctagatttacttatgtaaaaagaactgcccagcaatacaaggcttattatctgattaagtattacacaaatagatggtatgagtcatggttaaacggcttgcctggctgacacagcagagaaaattattctgtaagatgcatttgaatgtgccctaagggagatgggtggcaaaaactgttaaccacatctgggttgaacaatctgtaaaaaaaaaaaaagcatgaccagaatgtgaaagagatcaactcaacacccatagagctttaaaacccccattctaactttcagagaaaatctgctgatgttgactatgggtgctactgtgctggtgagattgcccc

SEQ ID NO: 710329 - DNA, 645 bp, Homo sapiens
atgttcacaaaggcctcccaaaagttcctcctgactttatgtgattcactaacccaggcctgtactctctattgtgggtcttcttaaatatctgttgtggggtgagaggtttgaagaattataagtgggggagtttataaagagtgcttacttcttaartaggaagaatcccattcaactgcattttctgttttgttttgtacttccactgagggacagattaacagagtagctggggaaagaaaggaaagggaggagtctataagcctcaccatcaggtgcctatacggtgtctggggaggctagatttacttatgtaaaaagaactgcccagcaatacaaggcttattatctgattaagtattacacaaatagatggtatgagtcatggttaaacggcttgcctggctgacacagcagagaaaattattctgtaagatgcatttgaatgtgccctaagggagatgggtggcaaaaactgttaaccacatctgggttgaacaatctgtaaaaaaaaaaaaagcatgaccagaatgtgaaagagatcaactcaacacccatagagctttaaaacccccattctaactttcagagaaaatctgctgatgttgactatgggtgctactgtgctggtgagattgcccc

SEQ ID NO: 710330 - DNA, 3031 bp, Homo sapiens
attttgtaaattacttcttacaagaaacatgttctgattttaatataaataaagctagacagaaatttcgagctggaagaaatttttagaaaccaacctatgtaatcacatcacctcactcataagaaaactgaggaccagagagcaccagtgattaccaaagagttgatgttaatgatgatgataataataatggccaaatgcaagccatctcagtcaatgacagactagtccacaacgcagaatccctcctatctgctccaaatgttctctatgattctcagcaatagtgcaaaaactcagtggtggcaactgatcatgccaatgatcaagaactcaagtttgtagaggatttgctttcctagtagaatcaaatcaacgcatctttaaaacagtgtcattctaacatacacttgaatagcaatttcagggttttttttgtaatgaagacatttgttaaatcattagagtgttttacctgcaagtacacaaaacctagcaaaaagtgttttccataataatgagtttcatatgtcacgcatagcccagaggtaagtcaattccaaggataatccactgacttaatgatgtcatccatgagccaggttcttttggtcttcctgctttgcaaatatttgcacactggcccttgtcctcacgacttatttttcttggttgtaatgtgactgcagtagtcccaagcaccatatcctaaaagaggaaaaaaagtttcccattttaacagcaagagaaactttctcaaaatctctacctaagccccactggccagaactgtgtcagaagctcacttctgaaccaaatgctataaacagggtcattaaatcaccatggttaacctagacaaatcagcattttttttcttgctttggagaaggacagtttctcgtgaagtagacagctcaagaagggggcaaatgtcgaccagctgatgccagtaggtaatgaacaatgcttgtcatatttattttagactttttttttttaagatcagatgattgcctagctgagatttgataggggaaatgttaagtatttttgacttctgtcaaattttataaaaagctttaaaatattttaacttccctgtgatgtcttaattgctagtacaatacatccaattgctaaacattttctaagattgaacattaattgttcagaacttcaactctatctgataaataacatgaaaataaatgcacggggttttttttgttgttgtttgtttgtttggtttggttggtttctttgtcattattagcccaactgctacttctgggattctgtcttaaaaggaacaaagaccaactatttatatgaaactgatcaatatgaagacacatccggaggatctgactgtattgtgttagatgaaattagtatgccagaagctcaaatgtcaaaaagacagaacactcaacttcatgagggattttttagcagtcagacatarcgcattgtcctgtacagacatatgctgtctatgctaagcattcttgatgctatcttaatgaatagaggaagaactcattttgaatctgtaaagtttaccaccaagttgaataattacactgacaattggaaaaaaagaagctcttaaattttccatgttcctttttcatataaaaacattatttttcaaccaatctttctcctgacacccaaccattgtactccatatcaaataaatagataaaaatattaatttcccccatgtctgtcctagtctatgaatgttcatgtttatttataatcatggttctctcttaggctgcaagctgcctttgggagaaggtctctgtgtctgtttattcagtctctacatcacacttaacagagtgtcacatgaaaaggtgctttgtgattgttatcaggaatctgattgtaagaggaaaaattaaaatgaattttatacctgtttaagttaactaagcagtggctcctcattcagatgaagaacattgttacaggaaaaatgtgattttaccattacatctcacgaatactgacaatgaatgacaggttagagaatgaaaagaaaattttaaaaatatatgataacttagcaataacttgatatatttataatggatgtatttataaaatcaaaatagttttgagaatatttaaaattagaatatagtgttatataacactatacaaatgttaacaaaacatattgtattagctagagttggaggccacagattctcattctgtttcacttgaccacagaggatatcaaagagctcagaatctttaaaggaaggcacatggacaggcataagaaaacagcaggagtcagggtgcagtggggggctgctggtaagaaacatagacagacaaggactccagacaggaagactcttgaaggaaactactccagagccactaccctaacacacctgctgcttagtttctgaaactgcaacacctccaccactcatcattaacacctctcagaccaaattaaattgtttctaaaatgctcctgtgtctttgcatctctccttcaacataaagtcccagatagttgagccttctccaactgagaagagagaagacacggtcctttccatttctgaaatggaatcctcccaaaactgacacagtggtgaacttgcccaaaccacagaaagcatacagatgctgagtagtcaagagaataggaaaaggaccctgtctgtcatctgagtatcaggcctaccttgtttgtgcttcgcatagttgcaaattttttcatattgaagatttctggcaatcctgtgattagcaacattcccttaagccaaagcttaatccagaggaaggtcctaacccttctcaagttcatgatgtctgagagagatgagaaaactgcagaagaaaagtttgaaactattgattcatgaagcttaagaaaagaagccatcttgataacataaaagtgcaaggtgaagcagcaagagctgttgtagaaactgcagcaagttatccaggtctagttaagatcattgatgaaggtggctacatt

SEQ ID NO: 710331 - DNA, 3031 bp, Homo sapiens
attttgtaaattacttcttacaagaaacatgttctgattttaatataaataaagctagacagaaatttcgagctggaagaaatttttagaaaccaacctatgtaatcacatcacctcactcataagaaaactgaggaccagagagcaccagtgattaccaaagagttgatgttaatgatgatgataataataatggccaaatgcaagccatctcagtcaatgacagactagtccacaacgcagaatccctcctatctgctccaaatgttctctatgattctcagcaatagtgcaaaaactcagtggtggcaactgatcatgccaatgatcaagaactcaagtttgtagaggatttgctttcctagtagaatcaaatcaacgcatctttaaaacagtgtcattctaacatacacttgaatagcaatttcagggttttttttgtaatgaagacatttgttaaatcattagagtgttttacctgcaagtacacaaaacctagcaaaaagtgttttccataataatgagtttcatatgtcacgcatagcccagaggtaagtcaattccaaggataatccactgacttaatgatgtcatccatgagccaggttcttttggtcttcctgctttgcaaatatttgcacactggcccttgtcctcacgacttatttttcttggttgtaatgtgactgcagtagtcccaagcaccatatcctaaaagaggaaaaaaagtttcccattttaacagcaagagaaactttctcaaaatctctacctaagccccactggccagaactgtgtcagaagctcacttctgaaccaaatgctataaacagggtcattaaatcaccatggttaacctagacaaatcagcattttttttcttgctttggagaaggacagtttctcgtgaagtagacagctcaagaagggggcaaatgtcgaccagctgatgccagtaggtaatgaacaatgcttgtcatatttattttagactttttttttttaagatcagatgattgcctagctgagatttgataggggaaatgttaagtatttttgacttctgtcaaattttataaaaagctttaaaatattttaacttccctgtgatgtcttaattgctagtacaatacatccaattgctaaacattttctaagattgaacattaattgttcagaacttcaactctatctgataaataacatgaaaataaatgcacggggttttttttgttgttgtttgtttgtttggtttggttggtttctttgtcattattagcccaactgctacttctgggattctgtcttaaaaggaacaaagaccaactatttatatgaaactgatcaatatgaagacacatccggaggatctgactgtattgtgttagatgaaattagtatgccagaagctcaaatgtcaaaaagacagaacactcaacttcatgagggattttttagcagtcagacatagcgcattgtcctgtacagacatatgctgtctatgctaagcattcttgatgctatcttaatgaatagaggaagaactcattttgaatctgtaaagtttaccaccaagttgaataattacactgacaattggaaaaaaagaagctcttaaattttscatgttcctttttcatataaaaacattatttttcaaccaatctttctcctgacacccaaccattgtactccatatcaaataaatagataaaaatattaatttcccccatgtctgtcctagtctatgaatgttcatgtttatttataatcatggttctctcttaggctgcaagctgcctttgggagaaggtctctgtgtctgtttattcagtctctacatcacacttaacagagtgtcacatgaaaaggtgctttgtgattgttatcaggaatctgattgtaagaggaaaaattaaaatgaattttatacctgtttaagttaactaagcagtggctcctcattcagatgaagaacattgttacaggaaaaatgtgattttaccattacatctcacgaatactgacaatgaatgacaggttagagaatgaaaagaaaattttaaaaatatatgataacttagcaataacttgatatatttataatggatgtatttataaaatcaaaatagttttgagaatatttaaaattagaatatagtgttatataacactatacaaatgttaacaaaacatattgtattagctagagttggaggccacagattctcattctgtttcacttgaccacagaggatatcaaagagctcagaatctttaaaggaaggcacatggacaggcataagaaaacagcaggagtcagggtgcagtggggggctgctggtaagaaacatagacagacaaggactccagacaggaagactcttgaaggaaactactccagagccactaccctaacacacctgctgcttagtttctgaaactgcaacacctccaccactcatcattaacacctctcagaccaaattaaattgtttctaaaatgctcctgtgtctttgcatctctccttcaacataaagtcccagatagttgagccttctccaactgagaagagagaagacacggtcctttccatttctgaaatggaatcctcccaaaactgacacagtggtgaacttgcccaaaccacagaaagcatacagatgctgagtagtcaagagaataggaaaaggaccctgtctgtcatctgagtatcaggcctaccttgtttgtgcttcgcatagttgcaaattttttcatattgaagatttctggcaatcctgtgattagcaacattcccttaagccaaagcttaatccagaggaaggtcctaacccttctcaagttcatgatgtctgagagagatgagaaaactgcagaagaaaagtttgaaactattgattcatgaagcttaagaaaagaagccatcttgataacataaaagtgcaaggtgaagcagcaagagctgttgtagaaactgcagcaagttatccaggtctagttaagatcattgatgaaggtggctacatt

SEQ ID NO: 710332 - DNA, 3031 bp, Homo sapiens
attttgtaaattacttcttacaagaaacatgttctgattttaatataaataaagctagacagaaatttcgagctggaagaaatttttagaaaccaacctatgtaatcacatcacctcactcataagaaaactgaggaccagagagcaccagtgattaccaaagagttgatgttaatgatgatgataataataatggccaaatgcaagccatctcagtcaatgacagactagtccacaacgcagaatccctcctatctgctccaaatgttctctatgattctcagcaatagtgcaaaaactcagtggtggcaactgatcatgccaatgatcaagaactcaagtttgtagaggatttgctttcctagtagaatcaaatcaacgcatctttaaaacagtgtcattctaacatacacttgaatagcaatttcagggttttttttgtaatgaagacatttgttaaatcattagagtgttttacctgcaagtacacaaaacctagcaaaaagtgttttccataataatgagtttcatatgtcacgcatagcccagaggtaagtcaattccaaggataatccactgacttaatgatgtcatccatgagccaggttcttttggtcttcctgctttgcaaatatttgcacactggcccttgtcctcacgacttatttttcttggttgtaatgtgactgcagtagtcccaagcaccatatcctaaaagaggaaaaaaagtttcccattttaacagcaagagaaactttctcaaaatctctacctaagccccactggccagaactgtgtcagaagctcacttctgaaccaaatgctataaacagggtcattaaatcaccatggttaacctagacaaatcagcattttttttcttgctttggagaaggacagtttctcgtgaagtagacagctcaagaagggggcaaatgtcgaccagctgatgccagtaggtaatgaacaatgcttgtcatatttattttagactttttttttttaagatcagatgattgcctagctgagatttgataggggaaatgttaagtatttttgacttctgtcaaattttataaaaagctttaaaatattttaacttccctgtgatgtcttaattgctagtacaatacatccaattgctaaacattttctaagattgaacattaattgttcagaacttcaactctatctgataaataacatgaaaataaatgcacggggttttttttgttgttgtttgtttgtttggtttggttggtttctttgtcattattagcccaactgctacttctgggattctgtcttaaaaggaacaaagaccaactatttatatgaaactgatcaatatgaagacacatccggaggatctgactgtattgtgttagatgaaattagtatgccagaagctcaaatgtcaaaaagacagaacactcaacttcatgagggattttttagcagtcagacatagcgcattgtcctgtacagacatatgctgtctatgctaagcattcttgatgctatcttaatgaatagaggaagaactcattttgaatctgtaaagtttaccaccaagttgaataattacactgacaattggaaaaaaagaagctcttaaattttccatgttcctttttcatataaaaacattatttttcaaccaatctttctcctgacacccaaccattgtactccatatcaaataaatagataaaaatattaatttcccccatgtctgtcctagtctatgaatgttcatgtttatttataatcatggttctctcttaggctgcaagctgcctttgggagaaggtctctgtgtctgtttattcagtctctacatcacacttaacagagtgtcacatgaaaaggtgctttgtgattgttatcaggaatctgattgtaagaggaaaaattaaaatgaattttatacctgtttaagttaactaagcagtggctcctcattcagatgaagaacattgttacaggaaaaatgtgattttaccattacatctcacgaatactgacaatgaatgacaggttagagaatgaaaagaaaattttaaaaatatatgataacttagcaataacttgatatatttataatggatgtatttataaaatcaaaatagttttgagaatatttaaaattagaatatagtgttatataacactatacaaatgttaacaaaacatattgtattagctagagttggaggccacagattctcattctgtttcacttgaccacagaggatatcaaagagctcagaatctttaaaggarggcacatggacaggcataagaaaacagcaggagtcagggtgcagtggggggctgctggtaagaaacatagacagacaaggactccagacaggaagactcttgaaggaaactactccagagccactaccctaacacacctgctgcttagtttctgaaactgcaacacctccaccactcatcattaacacctctcagaccaaattaaattgtttctaaaatgctcctgtgtctttgcatctctccttcaacataaagtcccagatagttgagccttctccaactgagaagagagaagacacggtcctttccatttctgaaatggaatcctcccaaaactgacacagtggtgaacttgcccaaaccacagaaagcatacagatgctgagtagtcaagagaataggaaaaggaccctgtctgtcatctgagtatcaggcctaccttgtttgtgcttcgcatagttgcaaattttttcatattgaagatttctggcaatcctgtgattagcaacattcccttaagccaaagcttaatccagaggaaggtcctaacccttctcaagttcatgatgtctgagagagatgagaaaactgcagaagaaaagtttgaaactattgattcatgaagcttaagaaaagaagccatcttgataacataaaagtgcaaggtgaagcagcaagagctgttgtagaaactgcagcaagttatccaggtctagttaagatcattgatgaaggtggctacatt

SEQ ID NO: 710333 - DNA, 3031 bp, Homo sapiens
attttgtaaattacttcttacaagaaacatgttctgattttaatataaataaagctagacagaaatttcgagctggaagaaatttttagaaaccaacctatgtaatcacatcacctcactcataagaaaactgaggaccagagagcaccagtgattaccaaagagttgatgttaatgatgatgataataataatggccaaatgcaagccatctcagtcaatgacagactagtccacaacgcagaatccctcctatctgctccaaatgttctctatgattctcagcaatagtgcaaaaactcagtggtggcaactgatcatgccaatgatcaagaactcaagtttgtagaggatttgctttcctagtagaatcaaatcaacgcatctttaaaacagtgtcattctaacatacacttgaatagcaatttcagggttttttttgtaatgaagacatttgttaaatcattagagtgttttacctgcaagtacacaaaacctagcaaaaagtgttttccataataatgagtttcatatgtcacgcatagcccagaggtaagtcaattccaaggataatccactgacttaatgatgtcatccatgagccaggttcttttggtcttcctgctttgcaaatatttgcacactggcccttgtcctcacgacttatttttcttggttgtaatgtgactgcagtagtcccaagcaccatatcctaaaagaggaaaaaaagtttcccattttaacagcaagagaaactttctcaaaatctctacctaagccccactggccagaactgtgtcagaagctcacttctgaaccaaatgctataaacagggtcattaaatcaccatggttaacctagacaaatcagcattttttttcttgctttggagaaggacagtttctcgtgaagtagacagctcaagaagggggcaaatgtcgaccagctgatgccagtaggtaatgaacaatgcttgtcatatttattttagactttttttttttaagatcagatgattgcctagctgagatttgataggggaaatgttaagtatttttgacttctgtcaaattttataaaaagctttaaaatattttaacttccctgtgatgtcttaattgctagtacaatacatccaattgctaaacattttctaagattgaacattaattgttcagaacttcaactctatctgataaataacatgaaaataaatgcacggggttttttttgttgttgtttgtttgtttggtttggttggtttctttgtcattattagcccaactgctacttctgggattctgtcttaaaaggaacaaagaccaactatttatatgaaactgatcaatatgaagacacatccggaggatctgactgtattgtgttagatgaaattagtatgccagaagctcaaatgtcaaaaagacagaacactcaacttcatgagggattttttagcagtcagacatagcgcattgtcctgtacagacatatgctgtctatgctaagcattcttgatgctatcttaatgaatagaggaagaactcattttgaatctgtaaagtttaccaccaagttgaataattacactgacaattggaaaaaaagaagctcttaaattttccatgttcctttttcatataaaaacattatttttcaaccaatctttctcctgacacccaaccattgtactccatatcaaataaatagataaaaatattaatttcccccatgtctgtcctagtctatgaatgttcatgtttatttataatcatggttctctcttaggctgcaagctgcctttgggagaaggtctctgtgtctgtttattcagtctctacatcacacttaacagagtgtcacatgaaaaggtgctttgtgattgttatcaggaatctgattgtaagaggaaaaattaaaatgaattttatacctgtttaagttaactaagcagtggctcctcattcagatgaagaacattgttacaggaaaaatgtgattttaccattacatctcacgaatactgacaatgaatgacaggttagagaatgaaaagaaaattttaaaaatatatgataacttagcaataacttgatatatttataatggatgtatttataaaatcaaaatagttttgagaatatttaaaattagaatatagtgttatataacactatacaaatgttaacaaaacatattgtattagctagagttggaggccacagattctcattctgtttcacttgaccacagaggatatcaaagagctcagaatctttaaaggaaggcacatggacaggcataagaaaasagcaggagtcagggtgcagtggggggctgctggtaagaaacatagacagacaaggactccagacaggaagactcttgaaggaaactactccagagccactaccctaacacacctgctgcttagtttctgaaactgcaacacctccaccactcatcattaacacctctcagaccaaattaaattgtttctaaaatgctcctgtgtctttgcatctctccttcaacataaagtcccagatagttgagccttctccaactgagaagagagaagacacggtcctttccatttctgaaatggaatcctcccaaaactgacacagtggtgaacttgcccaaaccacagaaagcatacagatgctgagtagtcaagagaataggaaaaggaccctgtctgtcatctgagtatcaggcctaccttgtttgtgcttcgcatagttgcaaattttttcatattgaagatttctggcaatcctgtgattagcaacattcccttaagccaaagcttaatccagaggaaggtcctaacccttctcaagttcatgatgtctgagagagatgagaaaactgcagaagaaaagtttgaaactattgattcatgaagcttaagaaaagaagccatcttgataacataaaagtgcaaggtgaagcagcaagagctgttgtagaaactgcagcaagttatccaggtctagttaagatcattgatgaaggtggctacatt

SEQ ID NO: 710334 - DNA, 609 bp, Homo sapiens
tttccctctgagtactcacttggcccaagggaaacatatcatccttgccataccccatagtgggagttcagactgactcactgctgccttctctttctgtgttattatggattgtggtctcccttcagaattttccagaaaaggggctcatragtctctatgttcatatatgcctcactctactgaggatacatgtcaggtttgctcaagaaccctgttgctgtattctgctctgacgacacagtgaggtgggctaaccaggttctgcatttctgcaagtgtacagtttaagaatgagaggccagtctcctttgttcactctccattctccttcagtgtttctcctgatcaccatccgtttagcttgaaggagtaggtgcaccttccactccatttataaggccaccacactttccctttaggctgcaaactcctcatttctgttggtgactgaattcctatagggaattcttttttttttttttttttcagacggagtctcactcagtcagttggaattcttaagcaggttggaacgagtaacatcacagttacaacatccaactgactgggtcctgcagaaggtttgtgctattacaagaggctaca

SEQ ID NO: 710335 - DNA, 609 bp, Homo sapiens
tttccctctgagtactcacttggcccaagggaaacatatcatccttgccataccccatagtgggagttcagactgactcactgctgccttctctttctgtgttattatggattgtggtctcccttcagaattttccagaaaaggggctcataagtctctatgttcatatatgcctcactctactgaggatacatgtcaggtttgctcaagaaccctgttgctgtattctgctctgacgacacagtgaggtgggctaaccaggttctgcatttctgcaagtgtacagtttaagaatgagaggccagtctcctttgttcactctccattctccttcagtgtttctcctgatcaccatccrtttagcttgaaggagtaggtgcaccttccactccatttataaggccaccacactttccctttaggctgcaaactcctcatttctgttggtgactgaattcctatagggaattcttttttttttttttttttcagacggagtctcactcagtcagttggaattcttaagcaggttggaacgagtaacatcacagttacaacatccaactgactgggtcctgcagaaggtttgtgctattacaagaggctaca

SEQ ID NO: 710336 - DNA, 2091 bp, Homo sapiens
ctatcacgaggactgcaagagggaagtccactccatgattcaatcacctcccaccaggcccctcccctgacacatgaggattacaatttgagatgagatttaggtggggacacggagccaaaccatatcagtctttcaatctgtaactcaaataatttatgaccctttcctgcccctcacccccacactagaccttgggaaagccatgtgcaggaagatatgccacttgcagcaagggttttctcattttatgtagagtagtacaaaagataaataagacaacatattccgggatttggggtctttttcttcacttaagaatcagagaccagtgcatgctactgatgtaactcataaaaaataatgggtgagacaagaggccagaggtccctgcacatgcaatcaataaggccagaagaaaggagaaatccccatgacaggcaaatccttgatgagcttctctgttccaaccactgggacacagtacagtaaatggcaaatgaataggggaaataggaaaaaaaaaaaatgaaatatgcaagttttgcttttccagatggcacaattcatggaaattatcaccttcatttctgataagcatctggtagttaatacccaatcttttctttgcaggagccatgacatcgtttaaaagaattcaggccgggcatggtggctcacgcctgaagccgaggcaggcggatcacctgaggtcaggcattcaagaccagcctggccaacatggtgaaaccccatctctactaaaaaaaaaaaaaatacaaacaattagccaggcatgatggtgggtgcctttaatctctgctcaggaggctgtggtgggagaattgcttgaacctgggaggcagaggttgcagggagccgagatcgcaccactgtactctagcctgggtgagagagcaagacttcatctcaaaaaaaaaaaaaaagaaagaaaaagaaagaaagcaaagaataggagatctatttggtacagcaatatttgctcttacttcaaagatgtttggcttaggggatctcctcctatctggttgtgacctctccccataatatgcctttatgctcaactccttggtattaggttctcccatgcactcattatttattgcataaaagtagctacaattcccggaaccttactgcatgtcaggcactatgataagcactttatatgcattatctcaattctcacagtctatacagtagaatgaatatccccattataaagatgaggaaactggggcttgtgactaccaatttcttgccaagattcacataacttgttattgaaggagctgaaattcaaagccaagaaacttgatttcagagcctgcattcaaccactatagcagcaaggagaaatgagaaatacctggaaaaactttcctagacaaaaagagtgcagattgtcacctgtcagctctacttaatacataagaaaattcaaaagagaggtaacattgctttatcttgtaacaacttttacctcaaatctattcctgtttaatagccctgagaatgcttatgtcrgtgggaatgtaaattaattcagtcactgtggaaagcagtttagagatttctctaagaacttagaactaccattcaaccgagcaatctcattactaggtacacatccaaaagaaagtaagccggtctatcaaaaagacacatgcactcataggttcatggaagcactattcataatcatagaaaagacacagcaaagacatggaattaacctagatgaccatcagtgtggattggattttttttaatgcagtacatatataccatgaaatactacataaccataaaaattttttttttaaaaatcatgtcctttatggcaacatggatgcagctggaggacattattctaagcgaattaactcaggaacagaaaaccaaataccacatgttctcgattataagtgggagctaaactttgggtacacacggacataaagatggcaacaataggcactggggactactagagagggaagggagagaggggagcaaaagttgagaaacctctctattgggtatcatgcttactacctgggtgacaga

SEQ ID NO: 710337 - DNA, 2091 bp, Homo sapiens
ctatcacgaggactgcaagagggaagtccactccatgattcaatcacctcccaccaggcccctcccctgacacatgaggattacaatttgagatgagatttaggtggggacacggagccaaaccatatcagtctttcaatctgtaactcaaataatttatgaccctttcctgcccctcacccccacactagaccttgggaaagccatgtgcaggaagatatgccacttgcagcaagggttttctcattttatgtagagtagtacaaaagataaataagacaacatattccgggatttggggtctttttcttcacttaagaatcagagaccagtgcatgctactgatgtaactcataaaaaataatgggtgagacaagaggccagaggtccctgcacatgcaatcaataaggccagaagaaaggagaaatccccatgacaggcaaatccttgatgagcttctctgttccaaccactgggacacagtacagtaaatggcaaatgaataggggaaataggaaaaaaaaaaaatgaaatatgcaagttttgcttttccagatggcacaattcatggaaattatcaccttcatttctgataagcatctggtagttaatacccaatcttttctttgcaggagccatgacatcgtttaaaagaattcaggccgggcatggtggctcacgcctgaagccgaggcaggcggatcacctgaggtcaggcattcaagaccagcctggccaacatggtgaaaccccatctctactaaaaaaaaaaaaaatacaaacaattagccaggcatgatggtgggtgcctttaatctctgctcaggaggctgtggtgggagaattgcttgaacctgggaggcagaggttgcagggagccgagatcgcaccactgtactctagcctgggtgagagagcaagacttcatctcaaaaaaaaaaaaaaagaaagaaaaagaaagaaagcaaagaataggagatctatttggtacagcaatatttgctcttacttcaaagatgtttggcttaggggatctcctcctatctggttgtgacctctccccataatatgcctttatgctcaactccttggtattaggttctcccatgcactcattatttattgcataaaagtagctacaattcccggaaccttactgcatgtcaggcactatgataagcactttatatgcattatctcaattctcacagtctatacagtagaatgaatatccccattataaagatgaggaaactggggcttgtgactaccaatttcttgccaagattcacataacttgttattgaaggagctgaaattcaaagccaagaaacttgatttcagagcctgcattcaaccactatagcagcaaggagaaatgagaaatacctggaaaaactttcctagacaaaaagagtgcagattgtcacctgtcagctctacttaatacataagaaaattcaaaagagaggtaacattgctttatcttgtaacaacttttacctcaaatctattcctgtttaatagccctgagaatgcttatgtcagtgggaatgtaaattaattcagtcactgtggaaagcagtttagagatttctctaagaacttagaactaccattcaaccgagcaatctcattactaggtacacatccaaaagaaagtaagccggtctatcaaaaagacacatgcactcataggttcatggaagcactattcataatcatagaaaagacacagcaaagacatggaattaacctagatgaccatcagtgtggattggattttttttaatgcagtacatatataccatgaaatactacataaccataaaaatttttttttwaaaaatcatgtcctttatggcaacatggatgcagctggaggacattattctaagcgaattaactcaggaacagaaaaccaaataccacatgttctcgattataagtgggagctaaactttgggtacacacggacataaagatggcaacaataggcactggggactactagagagggaagggagagaggggagcaaaagttgagaaacctctctattgggtatcatgcttactacctgggtgacaga

SEQ ID NO: 710338 - DNA, 2091 bp, Homo sapiens
ctatcacgaggactgcaagagggaagtccactccatgattcaatcacctcccaccaggcccctcccctgacacatgaggattacaatttgagatgagatttaggtggggacacggagccaaaccatatcagtctttcaatctgtaactcaaataatttatgaccctttcctgcccctcacccccacactagaccttgggaaagccatgtgcaggaagatatgccacttgcagcaagggttttctcattttatgtagagtagtacaaaagataaataagacaacatattccgggatttggggtctttttcttcacttaagaatcagagaccagtgcatgctactgatgtaactcataaaaaataatgggtgagacaagaggccagaggtccctgcacatgcaatcaataaggccagaagaaaggagaaatccccatgacaggcaaatccttgatgagcttctctgttccaaccactgggacacagtacagtaaatggcaaatgaataggggaaataggaaaaaaaaaaaatgaaatatgcaagttttgcttttccagatggcacaattcatggaaattatcaccttcatttctgataagcatctggtagttaatacccaatcttttctttgcaggagccatgacatcgtttaaaagaattcaggccgggcatggtggctcacgcctgaagccgaggcaggcggatcacctgaggtcaggcattcaagaccagcctggccaacatggtgaaaccccatctctactaaaaaaaaaaaaaatacaaacaattagccaggcatgatggtgggtgcctttaatctctgctcaggaggctgtggtgggagaattgcttgaacctgggaggcagaggttgcagggagccgagatcgcaccactgtactctagcctgggtgagagagcaagacttcatctcaaaaaaaaaaaaaaagaaagaaaaagaaagaaagcaaagaataggagatctatttggtacagcaatatttgctcttacttcaaagatgtttggcttaggggatctcctcctatctggttgtgacctctccccataatatgcctttatgctcaactccttggtattaggttctcccatgcactcattatttattgcataaaagtagctacaattcccggaaccttactgcatgtcaggcactatgataagcactttatatgcattatctcaattctcacagtctatacagtagaatgaatatccccattataaagatgaggaaactggggcttgtgactaccaatttcttgccaagattcacataacttgttattgaaggagctgaaattcaaagccaagaaacttgatttcagagcctgcattcaaccactatagcagcaaggagaaatgagaaatacctggaaaaactttcctagacaaaaagagtgcagattgtcacctgtcagctctacttaatacataagaaaattcaaaagagaggtaacattgctttatcttgtaacaacttttacctcaaatctattcctgtttaatagccctgagaatgcttatgtcagtgggaatgtaaattaattcagtcactgtggaaagcagtttagagatttctctaagaacttagaactaccattcaaccgagcaatctcattactaggtacacatccaaaagaaagtaagccggtctatcaaaaagacacatgcactcataggttcatggaagcactattcataatcatagaaaagacacagcaaagacatggaattaacctagatgaccatcagtgtggattggattttttttaatgcagtacatatataccatgaaatactacataaccataaaaattttttttttaaaaatcatgtcctttatggcaacatggatgcagctggaggacattattctaagcgaattaactcaggaacagaaaaccaaataccacatgttctcgattataagtgggagctaaactttgggtacacayggacataaagatggcaacaataggcactggggactactagagagggaagggagagaggggagcaaaagttgagaaacctctctattgggtatcatgcttactacctgggtgacaga

SEQ ID NO: 710339 - DNA, 1092 bp, Homo sapiens
tgaataaactgaagaataacccaggtcttgaccagtggcctctcgacctgcccctgactctctgtcactttaacaagggcagcaccctctcactgcccctaaagcaaatgctcaggaaagaacctactccgagcccttaactatgggctccttgaggacagagaccacgtgttattcacctctgtatccttccaagcatctgagatgggacccagttcccattaggtgtctgaaaactctatgttgaagtgttgaatgtgacttttttgtagggttatttgcattagaatataatttcttgccctaaatgaaaatctactctctgttggaagaacctcaagccacagaaagaaggtgggagatggccccatggtgacatgagaggcagcttttgttgggagcccacggtaagttcagaaatgtgaagaatgctgtggtcccagggatatgggctttggagccaggcagggtgtgactcccagctctacccacttgtactctggtcacatttacagtcaacttccaaatttcagttttcttgtctataaatagaaacaatccctccctcatagactaagagcattaggaagcaaatttttataaagactagcactgaataggcactcagtaaatgggagttttattacattctggtccctgactttaaaaatataatctaattagagagagaagactaacatacaagaaacaatttaagaaaaatgcaagtcagagcttggcccaggactaagcagcatggtgctcatcagaggagctgcaggagtttggagggcagcagcaattcagaggggctcttggaggacatgggacctccttggccctcaaagtgggaatttaggaagccagagaatggaaaggattctggcccgggccacagcaggacagcattagtcattaagaggagcatttgggaaagtgagcgaaagacagaaagacgaaagaaaagaaagaaagaaagaaagaacgaaagaaagaaagaaaggaaggaaggaaggaaggaaggaagggaaagaaagaaagaaagaaagaaaaaawcaaagaaagaaagaaagaaagaaagaaagaaagaaa

SEQ ID NO: 710340 - DNA, 1092 bp, Homo sapiens
tgaataaactgaagaataacccaggtcttgaccagtggcctctcgacctgcccctgactctctgtcactttaacaagggcagcaccctctcactgcccctaaagcaaatgctcaggaaagaacctactccgagcccttaactatgggctccttgaggacagagaccacgtgttattcacctctgtatccttccaagcatctgagatgggacccagttcccattaggtgtctgaaaactctatgttgaagtgttgaatgtgacttttttgtagggttatttgcattagaatataatttcttgccctaaatgaaaatctactctctgttggaagaacctcaagccacagaaagaaggtgggagatggccccatggtgacatgagaggcagcttttgttgggagcccacggtaagttcagaaatgtgaagaatgctgtggtcccagggatatgggctttggagccaggcagggtgtgactcccagctctacccacttgtactctggtcacatttacagtcaacttccaaatttcagttttcttgtctataaatagaaacaatccctccctcatagactaagagcattaggaagcaaatttttataaagactagcactgaataggcactcagtaaatgggagttttattacattctggtccctgactttaaaaatataatctaattagagagagaagactaacatacaagaaacaatttaagaaaaatgcaagtcagagcttggcccaggactaagcagcatggtgctcatcagaggagctgcaggagtttggagggcagcagcaattcagaggggctcttggaggacatgggacctccttggccctcaaagtgggaatttaggaagccagagaatggaaaggattctggcccgggccacagcaggacagcattagtcattaagaggagcatttgggaaagtgagcgaaagacagaaagacgaaagaaaagaaagaaagaaagaaagaacgaaagaaagaaagaaaggaaggaaggaaggaaggaaggaagggaaagaaagaaagaaagaaagaaaaaatmaaagaaagaaagaaagaaagaaagaaagaaagaaa

SEQ ID NO: 710341 - DNA, 597 bp, Homo sapiens
caacacccaaactcagtgactgaacacaacagtgagtcgtttgtgcacattatctgcctcatgcaggtgaggtgggccctacttcactcaccactcgaggctctgggctgctggagactcagccgccatgtagctgcttcatctgcagcatgaggtctccttggttaccttgacgaggtatagagagtggagaaccaagcgggtcctttccaccccttcaggctggaaggggcgctgatcattaattacctctccttacatggcacacctaagtgcaaggcatacagtgtgtgtgggattcagtggaatatttggcgaacattaatgtctctttcacaagcagtgcaattttaattatgagtgagattaatcaacttttcatcttgagagccattcctatttcctcttctgtgaattgagtataacattttacctacttttaaacttgtattatcagtctttttcttatttatttttagaagctctttatgtataaacgagattatatttttgcattaagagattcaaatgtgtctttgtcatttgacctttktctttacttagggtggatttttaaatattaattctgattgatgt

SEQ ID NO: 710342 - DNA, 2644 bp, Homo sapiens
tcagtctctcaattttcacactgttaaggttcttcttatgtgacaaactgaccacacccattgtcctgcattcacctacatgctaataactcccaatctcgatccctagacttctcccttgaggagcaaacctatattccttagtgtgcaggagaagcccgtggatgtctcttatctgagtggcgtgtagtcattgcaacttatcctacttctgaggaacttattacatctggtcttttgccctgtcaccaagtttatacccatccagcacacactaattcgactcatcccaacctcatccagccaggcttccaagataacacctcacaatcatctttaccaattctctgctcatccaaatagttgccaagtcctgctcaggtcactttccaataccatccccacctctgcacctccggggccactgactaattgaggctgtcttcatctcctgcggatctaccacaagtcttcgaacacttgatgcccaaccttcacatttcatcttcttaaaacaatctgaccatgctacagactgagtgacctctcctgggctcctaatttttggggaggagacagaattataggcttaaaataccttaccagcttttaatcctactcctggacaacatgaactctagcctggggttgccctgttgtctttcatatttctgaattttagtgtttaccacttcttctccttccttttacaagattcagcccatatgtcgtctcctcaatgtggggctgtcttcaccttcccaccttccctacatccctatgtcaacactagcttgcttgctttctggtttttttttttttttttttttgagacagagtctcactctgtcacccaggctggagtgcagtggcaggggctcactgcaacctccatctcctgggttcaagagattctcctgcctcagtctcccaagtagctgggattacaggcacccaccaccatgcccggctaacttttgtatttttagtagagatggggtttggccatgttggccaggctggtctcaaactcctgacctcaggtgatccacctgcctcggcctcccaaagtgctgggattacgggcatgagccaccactcccagctgacattagctctctatccagtgctttcttaaagtccttctaatgtacatgcagtcgtgtgaagcataatgacattttggtcaatcatgggctatataagtgacagtggtcaaataagattatgatatygcatttttactgtaccttttctatgttttgatatgtttagatccacgaatacttatcatcgtgttacaactgcctacagtattcagtgaagtatatgctgtagagttttgtagcctaggagcaataagctgtaccatggagcctaggtgttcagtaggctgtaccatttagttttgtgtaaagtacactctatgatgtctgcacaatgacaaaatcacctaatgatgcatttctcagaatgtatccctgtcattaaacaatgcatgactgtatatatacacaaatatgcatatatttgtatatgcatatacataggtatgtatatataaatatacataaaaatttgtgtattttatatatggcttttattattcattgtattgaattgttattgtatggatctgtttcttttacctttttttttaatctccttgtcatgtttcttagcacgcaaagacaattttcttaaatgctagaccatttgtataagttgcagaggctctggatgatattctcttcttccagagtggctcctttgtgtccttggaaggcagatagatagaggtagattatctcaatctaaactgagcagacggtgttgtagttttatgagaacttgtctacctctagtccattcacaccctcttcaggagttccaaccatgagccttagatatctactggggccttttccctttggtgaagtactccccagtccacaaaaacagcaaacaaaaactttatcagcagcttctgcctggttttttatccccttgtcctttgcaattccagatgtcagcaagtgactccaggggaatgaagctgagagcaggatcgcctcactgtacccactttgtcacctagacaccgcttcccatgccttgttgacgtggccaatgtcaagtccactttgtctttccagcaccatgagattgcagaaagctctgcctgttcctttcagtgctggcagtggccttgtaaccaagccctctgcctgcatgcccgctctctgcctcccacagaaagctggcaaggtctccaaagagaaaggagcagtgtcagcacctaggctcacctccctaaagttccttcttacagggactttggccacataacttctcgttacctcagcaaatcatcaacaccttcaagcgctttctccgtctctctcttttgtatttcatccagtttttccaggtgttcttagcgggagtgttggtctgctgcgagtacttcagcatagccagatatggagtctgaaatcgattctttcaagcaatagtatttcaaatcagaatgtgctacattttctgttatttttgaaagagattactacttttatagaatgaagttctctcttcataaatctataatgggtaatgctaaggaactagacaaatagtcaaaact

SEQ ID NO: 710343 - DNA, 2644 bp, Homo sapiens
tcagtctctcaattttcacactgttaaggttcttcttatgtgacaaactgaccacacccattgtcctgcattcacctacatgctaataactcccaatctcgatccctagacttctcccttgaggagcaaacctatattccttagtgtgcaggagaagcccgtggatgtctcttatctgagtggcgtgtagtcattgcaacttatcctacttctgaggaacttattacatctggtcttttgccctgtcaccaagtttatacccatccagcacacactaattcgactcatcccaacctcatccagccaggcttccaagataacacctcacaatcatctttaccaattctctgctcatccaaatagttgccaagtcctgctcaggtcactttccaataccatccccacctctgcacctccggggccactgactaattgaggctgtcttcatctcctgcggatctaccacaagtcttcgaacacttgatgcccaaccttcacatttcatcttcttaaaacaatctgaccatgctacagactgagtgacctctcctgggctcctaatttttggggaggagacagaattataggcttaaaataccttaccagcttttaatcctactcctggacaacatgaactctagcctggggttgccctgttgtctttcatatttctgaattttagtgtttaccacttcttctccttccttttacaagattcagcccatatgtcgtctcctcaatgtggggctgtcttcaccttcccaccttccctacatccctatgtcaacactagcttgcttgctttctggtttttttttttttttttttttgagacagagtctcactctgtcacccaggctggagtgcagtggcaggggctcactgcaacctccatctcctgggttcaagagattctcctgcctcagtctcccaagtagctgggattacaggcacccaccaccatgcccggctaacttttgtatttttagtagagatggggtttggccatgttggccaggctggtctcaaactcctgacctcaggtgatccacctgcctcggcctcccaaagtgctgggattacgggcatgagccaccactcccagctgacattagctctctatccagtgctttcttaaagtccttctaatgtacatgcagtcgtgtgaagcataatgacattttggtcaatcatgggctatataagtgacagtggtcaaataagattatgatattgcatttttactgtaccttttctatgttttgatatgtttagatccacraatacttatcatcgtgttacaactgcctacagtattcagtgaagtatatgctgtagagttttgtagcctaggagcaataagctgtaccatggagcctaggtgttcagtaggctgtaccatttagttttgtgtaaagtacactctatgatgtctgcacaatgacaaaatcacctaatgatgcatttctcagaatgtatccctgtcattaaacaatgcatgactgtatatatacacaaatatgcatatatttgtatatgcatatacataggtatgtatatataaatatacataaaaatttgtgtattttatatatggcttttattattcattgtattgaattgttattgtatggatctgtttcttttacctttttttttaatctccttgtcatgtttcttagcacgcaaagacaattttcttaaatgctagaccatttgtataagttgcagaggctctggatgatattctcttcttccagagtggctcctttgtgtccttggaaggcagatagatagaggtagattatctcaatctaaactgagcagacggtgttgtagttttatgagaacttgtctacctctagtccattcacaccctcttcaggagttccaaccatgagccttagatatctactggggccttttccctttggtgaagtactccccagtccacaaaaacagcaaacaaaaactttatcagcagcttctgcctggttttttatccccttgtcctttgcaattccagatgtcagcaagtgactccaggggaatgaagctgagagcaggatcgcctcactgtacccactttgtcacctagacaccgcttcccatgccttgttgacgtggccaatgtcaagtccactttgtctttccagcaccatgagattgcagaaagctctgcctgttcctttcagtgctggcagtggccttgtaaccaagccctctgcctgcatgcccgctctctgcctcccacagaaagctggcaaggtctccaaagagaaaggagcagtgtcagcacctaggctcacctccctaaagttccttcttacagggactttggccacataacttctcgttacctcagcaaatcatcaacaccttcaagcgctttctccgtctctctcttttgtatttcatccagtttttccaggtgttcttagcgggagtgttggtctgctgcgagtacttcagcatagccagatatggagtctgaaatcgattctttcaagcaatagtatttcaaatcagaatgtgctacattttctgttatttttgaaagagattactacttttatagaatgaagttctctcttcataaatctataatgggtaatgctaaggaactagacaaatagtcaaaact

SEQ ID NO: 710344 - DNA, 1522 bp, Homo sapiens
ttctccatataagactgcatatatatatatatatatatatacacacacacatatacatatatacacttaactctatgtgacgttaaatatagtcagttttatttccaattatataacacttttcacttgctatctagcaggaagttggcatacgatacaaaatgatacctactcaattagcctgtgcgtctgatggagataaacaaaacaaaaataatttgaaggtacacccaccccttgttaatgtattcttttggttaatttattacagctcaagtatactatctgcttttgactattaaggagcttatctatttagtacttactccagtttgggcagctatgctcaacgcatgatcaggaattgttgtttaacagaactgagagggcaaggggttaatttccaccctggaaattgctgactgatgatgcattcacactgaggttgtgtcgctgaacgtttcacaggtagattgggaataacgtgatttagagaggcaataatatacttctcaggatgggagaaactgaaaaccgcttgtacagtagtttaagttacaagtgtaaatgatttatttggtttgaagctaagtcacatgttaggcacatgaaaagtgggtgtaattargcctgcttcacgttaagtaccatgtttatttcccatctataaactgataaataatgcagcaattggtaactgaaattgtcatgcaatagtgatgcatagatttagcatttttatagaagattttatgcatatcctagaaatgagtcaagaacataattgacttgcttgcaattaaatacaaagttcacatagaacgtaagattaatgttttcccctgttttgggacacacaaacagaaacacacacacactcacatagtggtaaaatatatataacatacatttgcccttttaatctcatgtgtatgattatatgattcagagccattaattgctttcaaaatgttgtgcatccatcaccattatttctagaaagttttcagcacccaaacagaaactttataccagttaagcaataacacttcattgcctacccgccagcccctggtatctgctaatctactttctatctctatggactttcccactatagatatttcatgtaagtgcaatcatagaagatttattcttttgtgtctggtttatttcacttaacattttcaaggctcgcccttgctgcagcgcgtatcagaacttcatacattttcttgcctaaataatattctactgtataaatacgtccatttagtttattcattcatcaatcgatggacataggttgtttctgcattttgacaatcatgaataagggtaagattggattttaataaatagaagggcaagactgagatatcccttgacctttacaattctttttgtccttttcaaacttgccatcctccacctctctagaaaaaaaataataatagtaagtagggctatttgcattgagagggggaaataactgaattttaaaggaatcatctcgataaaa

SEQ ID NO: 710345 - DNA, 1522 bp, Homo sapiens
ttctccatataagactgcatatatatatatatatatatatacacacacacatatacatatatacacttaactctatgtgacgttaaatatagtcagttttatttccaattatataacacttttcacttgctatctagcaggaagttggcatacgatacaaaatgatacctactcaattagcctgtgcgtctgatggagataaacaaaacaaaaataatttgaaggtacacccaccccttgttaatgtattcttttggttaatttattacagctcaagtatactatctgcttttgactattaaggagcttatctatttagtacttactccagtttgggcagctatgctcaacgcatgatcaggaattgttgtttaacagaactgagagggcaaggggttaatttccaccctggaaattgctgactgatgatgcattcacactgaggttgtgtcgctgaacgtttcacaggtagattgggaataacgtgatttagagaggcaataatatacttctcaggatgggagaaactgaaaaccgcttgtacagtagtttaagttacaagtgtaaatgatttatttggtttgaagctaagtcacatgttaggcacatgaaaagtgggtgtaattaagcctgcttcacgttaagtaccatgtttatttcccatctataaactgataaataatgcagcaattggtaactgaaattgtcatgcaatagtgatgcatagatttagcatttttatagaagattttatgcatatcctagaaatgagtcaagaacataattgacttgcttgcaattaaatacaaagttcacatagaacgtaagattaatgttttcccctgttttgggacacacaaacagaaacacacacacactcacatagtggtaaaatatatataacatacatttgcccttttaatctcatgtgtatgattatatgattcagagccattaattgctttcaaaatgttgtgcatccatcaccattatttctagaaagttttcagcacccaaacagaaactttataccagttaagcaataacacttcattgcctacccgccagcccctggtatctgctaatctactttctatctctatggactttcccactatagatatttcatgtaagtgsaatcatagaagatttattcttttgtgtctggtttatttcacttaacattttcaaggctcgcccttgctgcagcgcgtatcagaacttcatacattttcttgcctaaataatattctactgtataaatacgtccatttagtttattcattcatcaatcgatggacataggttgtttctgcattttgacaatcatgaataagggtaagattggattttaataaatagaagggcaagactgagatatcccttgacctttacaattctttttgtccttttcaaacttgccatcctccacctctctagaaaaaaaataataatagtaagtagggctatttgcattgagagggggaaataactgaattttaaaggaatcatctcgataaaa

SEQ ID NO: 710346 - DNA, 1522 bp, Homo sapiens
ttctccatataagactgcatatatatatatatatatatatacacacacacatatacatatatacacttaactctatgtgacgttaaatatagtcagttttatttccaattatataacacttttcacttgctatctagcaggaagttggcatacgatacaaaatgatacctactcaattagcctgtgcgtctgatggagataaacaaaacaaaaataatttgaaggtacacccaccccttgttaatgtattcttttggttaatttattacagctcaagtatactatctgcttttgactattaaggagcttatctatttagtacttactccagtttgggcagctatgctcaacgcatgatcaggaattgttgtttaacagaactgagagggcaaggggttaatttccaccctggaaattgctgactgatgatgcattcacactgaggttgtgtcgctgaacgtttcacaggtagattgggaataacgtgatttagagaggcaataatatacttctcaggatgggagaaactgaaaaccgcttgtacagtagtttaagttacaagtgtaaatgatttatttggtttgaagctaagtcacatgttaggcacatgaaaagtgggtgtaattaagcctgcttcacgttaagtaccatgtttatttcccatctataaactgataaataatgcagcaattggtaactgaaattgtcatgcaatagtgatgcatagatttagcatttttatagaagattttatgcatatcctagaaatgagtcaagaacataattgacttgcttgcaattaaatacaaagttcacatagaacgtaagattaatgttttcccctgttttgggacacacaaacagaaacacacacacactcacatagtggtaaaatatatataacatacatttgcccttttaatctcatgtgtatgattatatgattcagagccattaattgctttcaaaatgttgtgcatccatcaccattatttctagaaagttttcagcacccaaacagaaactttataccagttaagcaataacacttcattgcctacccgccagcccctggtatctgctaatctactttctatctctatggactttcccactatagatatttcatgtaagtgcaatcatagaagatttattcttttgtgtctggtttatttcacttaacattttcaaggctcgcccttgctgcagygcgtatcagaacttcatacattttcttgcctaaataatattctactgtataaatacgtccatttagtttattcattcatcaatcgatggacataggttgtttctgcattttgacaatcatgaataagggtaagattggattttaataaatagaagggcaagactgagatatcccttgacctttacaattctttttgtccttttcaaacttgccatcctccacctctctagaaaaaaaataataatagtaagtagggctatttgcattgagagggggaaataactgaattttaaaggaatcatctcgataaaa

SEQ ID NO: 710347 - DNA, 1522 bp, Homo sapiens
ttctccatataagactgcatatatatatatatatatatatacacacacacatatacatatatacacttaactctatgtgacgttaaatatagtcagttttatttccaattatataacacttttcacttgctatctagcaggaagttggcatacgatacaaaatgatacctactcaattagcctgtgcgtctgatggagataaacaaaacaaaaataatttgaaggtacacccaccccttgttaatgtattcttttggttaatttattacagctcaagtatactatctgcttttgactattaaggagcttatctatttagtacttactccagtttgggcagctatgctcaacgcatgatcaggaattgttgtttaacagaactgagagggcaaggggttaatttccaccctggaaattgctgactgatgatgcattcacactgaggttgtgtcgctgaacgtttcacaggtagattgggaataacgtgatttagagaggcaataatatacttctcaggatgggagaaactgaaaaccgcttgtacagtagtttaagttacaagtgtaaatgatttatttggtttgaagctaagtcacatgttaggcacatgaaaagtgggtgtaattaagcctgcttcacgttaagtaccatgtttatttcccatctataaactgataaataatgcagcaattggtaactgaaattgtcatgcaatagtgatgcatagatttagcatttttatagaagattttatgcatatcctagaaatgagtcaagaacataattgacttgcttgcaattaaatacaaagttcacatagaacgtaagattaatgttttcccctgttttgggacacacaaacagaaacacacacacactcacatagtggtaaaatatatataacatacatttgcccttttaatctcatgtgtatgattatatgattcagagccattaattgctttcaaaatgttgtgcatccatcaccattatttctagaaagttttcagcacccaaacagaaactttataccagttaagcaataacacttcattgcctacccgccagcccctggtatctgctaatctactttctatctctatggactttcccactatagatatttcatgtaagtgcaatcatagaagatttattcttttgtgtctggtttatttcacttaacattttcaaggctcgcccttgctgcagcgcktatcagaacttcatacattttcttgcctaaataatattctactgtataaatacgtccatttagtttattcattcatcaatcgatggacataggttgtttctgcattttgacaatcatgaataagggtaagattggattttaataaatagaagggcaagactgagatatcccttgacctttacaattctttttgtccttttcaaacttgccatcctccacctctctagaaaaaaaataataatagtaagtagggctatttgcattgagagggggaaataactgaattttaaaggaatcatctcgataaaa

SEQ ID NO: 710348 - DNA, 1008 bp, Homo sapiens
actcatacacagattaccctcggcactttcagaaaacaacacagtgaccagtatattctgtctttttgatacagccagaagcaccctgaaagctgagacctaactgtgcttttggaaaataagcttttaggagttgaatgaccttgtctacttcttttagtcagaataatgttggcatgtctattttaggttaaaaaaaaatacaaattctaaaaagtgactttaaaggcccactttgaaagccttagcatttaaactaacattagatttaaaagaagggcttttctcccccattataggaagctgtgtaaaatcatgtgtgaggttgtgagggtcaaatggaagtctaagataaagttctgccaattactggtgtctttaagcttccaccagcagccaagcacagtgcagatcatgagtccttcaaaatacggggtggttttaatgctctaagttggtatgattactttttctaaagagctcaaagtgctttggtgccatagtatgaatttcattacccattgtgagacacaaagggggttagcaatgattctgtttgcaccctggaagccaaaggcaggttactcacccacttagttccctaccacaagaccttgaaagaaactggaaccccaggtctccagcccagagattttgttggaagtttccatttgcaggaaatgactgcagggcacatgtgggaagtgacaggaatttgaggactaacattttagttttcctcatttctttttaaatctgagcaattgttcattgatcgataatctatgttcttacattcagataaataaaaacaccaactggctattttgttcttacttagttttatgtgtrtgtccaggcatttgccactgctcctaaatagctctccctgaagtcttctggtcatgagttaggtttcttatccagaagctcatgtagtgccagagcttagctctcctatgacaacacaatcacattattgaaacatctatttagggatctgtcttc

SEQ ID NO: 710349 - DNA, 624 bp, Homo sapiens
ccaggggcagttttttgagaaacatgattaaacatcccaattgtgtttgtacagtctaggagcttgcagtttaaccatttcatacccaccattgtatgggctacctaagacaagatgaacactttctagtgtgtttattatttaactttcctctggtgtaaactttcattcatttcctttgcccatgtacatatcaaggtcttaaatgacttttcatccaaatgtaaatgtaggtagttctttccaccctctctttctgcccctttctctttacatgactgtaagagctgcttccattcacaccagttgtgttaatgatcttctcatttcaaatattaatcacttcattttttaaggrtagtgtgtgagaaatacagagatctttctgatcacagaatctgtctttaggtcttgcaactattttcttcctttcacttaatatcttttcaaattactaacccaagacttcagtcccctctttttagctgacagttttgaatcaggaatattgtaccgtgtctacgtctccgaaatctaataagacagaacatgcttttcctgctctgtggaaacgaaggaaagcaactggagaatgctctaggccaccgtcaatgagccctaacc

SEQ ID NO: 710350 - DNA, 2148 bp, Homo sapiens
tgtattctatcatcttctgaactctcattgatttttccaattttccagttgattctctgccatattctaggtacataaccatatagttttttctctttctggtatctatgactttcacttattttctttgtctcatttcataggctagaggattgtttttaaacctatcacccagagagctttgtaacataccagtgcctgagccccacccccaggaattctgactcaggtgcactgagatgggatgcaggcatattggtattattttaggactcccacatgatcccaatagacaagctgctttgaggacccctggaccaggagctcaaccccagcattgagtaggagaggcaataggcagtatctgcatcmtgttccatatgtgctaagcacctcaaaaacattcagtgtgacgtttcctaggtctcatgtaaatacccattaccaaatgcagcacattttctactctatctagttcgaagagactttttaaatagggaatggagttttcttttgtgcttgtgtctgacttcttggctgaaagacacttgattttaagctctcttttatttttataaaagcatttatggttatagattttcctccgaataccattttatctataacacagagtttgctccctaatgtttttttaaatcaatatataaagagattttaattttaatacattttgatttcttctgtaacccaagagtggttagaaacacacatgggattttctaaacctttcaagtaataaggtttttcagttatgtttttgttatgaatatctaattctattgcattttgcatatgaaaatagcctgtttgaattcaccatatgaaagtggcttgtttctgccttttagaacgtactgtcatttcctttgtggcccaacttgagctgatttttaatctaaaacataattacaagtaatgtagttgaaagctatattctctcttaggcacaaaactacaaaatcaaacatttttattcaaattatcttttttcttaattattttcatctatttaatgagccaatttatgagtgaagaataaggctttgtctatttttcctttcatttctgttttaactttatgtgtggttgcagctttgggcatttctccttgtatttctatctggttttgctttaatatttccatatctatgctgttggcatacaatggttcacaactgtgatcattacttgatggattatttctttttacctataaacagtgtttcagtttgccctttataatgcttttcaccctaaattccattctgcttggtgttaatattgctattctagatttgtttgttaatatttgtttatatttttcacccctttgttttctttttttttttttaagacaaaaaaaagaaaacttttttctttgttgcccaggctggagtgcaatcgtgtggtctctgctcactgcaacctcagcctcctgggttcaagagattctcatgcctcagcctcccgagtagctggtattataggcgcacaccaccatacatggctaattttttgtacttttagtagagacagggtttcaccatgttggccaggctggtctcgaactcccgacctcgtgatccacttgcctcagcctcccaaagtgctgagattacaggcatgagccaccgtgctcagactcacccctttattttcaacattcctctgtcattttgttttaagagtttcttgtacaaatcacatatatccagatattgggttttttactcagcttagagtctctgtcttttaataagtaaatttaacacattattattgttacttggacttacaccagccaagtgattttgtgtttttcatactttctcactgttcttgtttttccctttctggctttgtttgatttgctcaaacttgctttcatttttcttctaagtttgaaatttacatattgtattcattcgcccaatgtttagtcttagctttttaacacttctacttagacttgttttttttttttttttttaatttcttcttctttttacagctcactggagcctcaaactcctgggctcaagcaatcctcctacctcagcctccagaatagctgagactacaggagtgtgccaccatgccaattacttttttaattttttgtggaga

SEQ ID NO: 710351 - DNA, 2148 bp, Homo sapiens
tgtattctatcatcttctgaactctcattgatttttccaattttccagttgattctctgccatattctaggtacataaccatatagttttttctctttctggtatctatgactttcacttattttctttgtctcatttcataggctagaggattgtttttaaacctatcacccagagagctttgtaacataccagtgcctgagccccacccccaggaattctgactcaggtgcactgagatgggatgcaggcatattggtattattttaggactcccacatgatcccaatagacaagctgctttgaggacccctggaccaggagctcaaccccagcattgagtaggagaggcaataggcagtatctgcatcatgttccatatgtgctaagcacctcaaaaacattcagtgtgacgtttsctaggtctcatgtaaatacccattaccaaatgcagcacattttctactctatctagttcgaagagactttttaaatagggaatggagttttcttttgtgcttgtgtctgacttcttggctgaaagacacttgattttaagctctcttttatttttataaaagcatttatggttatagattttcctccgaataccattttatctataacacagagtttgctccctaatgtttttttaaatcaatatataaagagattttaattttaatacattttgatttcttctgtaacccaagagtggttagaaacacacatgggattttctaaacctttcaagtaataaggtttttcagttatgtttttgttatgaatatctaattctattgcattttgcatatgaaaatagcctgtttgaattcaccatatgaaagtggcttgtttctgccttttagaacgtactgtcatttcctttgtggcccaacttgagctgatttttaatctaaaacataattacaagtaatgtagttgaaagctatattctctcttaggcacaaaactacaaaatcaaacatttttattcaaattatcttttttcttaattattttcatctatttaatgagccaatttatgagtgaagaataaggctttgtctatttttcctttcatttctgttttaactttatgtgtggttgcagctttgggcatttctccttgtatttctatctggttttgctttaatatttccatatctatgctgttggcatacaatggttcacaactgtgatcattacttgatggattatttctttttacctataaacagtgtttcagtttgccctttataatgcttttcaccctaaattccattctgcttggtgttaatattgctattctagatttgtttgttaatatttgtttatatttttcacccctttgttttctttttttttttttaagacaaaaaaaagaaaacttttttctttgttgcccaggctggagtgcaatcgtgtggtctctgctcactgcaacctcagcctcctgggttcaagagattctcatgcctcagcctcccgagtagctggtattataggcgcacaccaccatacatggctaattttttgtacttttagtagagacagggtttcaccatgttggccaggctggtctcgaactcccgacctcgtgatccacttgcctcagcctcccaaagtgctgagattacaggcatgagccaccgtgctcagactcacccctttattttcaacattcctctgtcattttgttttaagagtttcttgtacaaatcacatatatccagatattgggttttttactcagcttagagtctctgtcttttaataagtaaatttaacacattattattgttacttggacttacaccagccaagtgattttgtgtttttcatactttctcactgttcttgtttttccctttctggctttgtttgatttgctcaaacttgctttcatttttcttctaagtttgaaatttacatattgtattcattcgcccaatgtttagtcttagctttttaacacttctacttagacttgttttttttttttttttttaatttcttcttctttttacagctcactggagcctcaaactcctgggctcaagcaatcctcctacctcagcctccagaatagctgagactacaggagtgtgccaccatgccaattacttttttaattttttgtggaga

SEQ ID NO: 710352 - DNA, 757 bp, Homo sapiens
aaatttgtttttctttttataacttctgcttcaagatggcctagaacccatctaatcaggcacctgtcttgtctccaccacctgctcaccaccagtttttgtggccacttcacatccacagtgagtgctgggggctgcggccttgggccaagtcactgccaggaaagtgcttggcagcttccagccagggagcaggtggcaacagcaaccacccagcaaggccacccagcaaacccagcagcaggagttttctccactgttgagctagcatttattactcttaaaataaagtggtgccatgcagcatgaattcaggagaagaagctgcaaattccaggcccttttgaaggcttgttttcacaatgaattaatrggctttaatttaacactgcatcaacaaaccaggctgctgaaggaattccaaatactagcggctttctgcacccattctggctctcagctgccaccacaggactgcagcaacattattcatcactgtgcaagataataacagtaatagctaatatttattgagtgcttactatgtgtcaagcattgtgttcaacgctttacaagcattattgcacttaatcttcacaaaaagcctctgaagtagacattattattacctttattttatagaagagaaaataagcttatgaaggtgaagttgcttaaggtcacataggtagaaagtggtagaaccaaagtgtgaacccatgtactgatagaagtccccaggaaatgttgtttgctg

SEQ ID NO: 710353 - DNA, 414 bp, Homo sapiens
agaactaagaaaaatatgagcccaactggtttgtggtaggcctggtaagaaatgccagtttctataattaccaacctcaaaatttcagtgatttaactaacacacggtggtttcttgttcctatcacgacttgaaacaagataagayattgtcctggggtcgctcctccaagtagggattcagggattcaagctccagctgtcttagaaaaccaccattcaggaagcctggagggttgagtggaatgtttttagctcaatcctggaaaagacttacatcagttctgcccgtattcctctggttagaactcaatgtgtgatgaacaataacattgactttgccacagagaaatgtcactttctgttggtaaagaaaggtagcacctattaggactcagacccattgtatttaaca

SEQ ID NO: 710354 - DNA, 414 bp, Homo sapiens
agaactaagaaaaatatgagcccaactggtttgtggtaggcctggtaagaaatgccagtttctataattaccaacctcaaaatttcagtgatttaactaacacacggtggtttcttgttcctatcacgacttgaaacaagataagatattgtcctggggtcgctcctccaagtagggatkcagggattcaagctccagctgtcttagaaaaccaccattcaggaagcctggagggttgagtggaatgtttttagctcaatcctggaaaagacttacatcagttctgcccgtattcctctggttagaactcaatgtgtgatgaacaataacattgactttgccacagagaaatgtcactttctgttggtaaagaaaggtagcacctattaggactcagacccattgtatttaaca

SEQ ID NO: 710355 - DNA, 980 bp, Homo sapiens
aaaaaatatttttggttggcagttggttcaatctgcagatgtggaacctgcaatacagagagctaacatatatatatatatatatatatatatatatgtacacacatacatacatacacacacacgcatatctcatctacagggggccagatgtggtggttcatgccgtaatyccagcactttgggaggttgaggttgggggatcacttgagatcaggagttcgagaccagcctggccaacatagtgaaactctgtctctactaaaaatacaaaaattagctgggcttggtggtgcatgcttgtaatcccagctacttgggaggctgaggcaggagaatcacttgaacctgggaggcagaggcttcagtgagccaagatcgcgctactgcactccagcctgggtgacagagtgagactatctcaaaaaaagttaaaaaaaaaaaaaatctacagggaattgtctcctattttgggggagagcattgacatactgaaacaatttcaaaggacaattgattcctggctgggcatggtggcttgcgcctgtaatcccagcactgtgggaggctgaggtgggtggattaattgagcccaggagttcaagaccagcctgggctacatggcgaaaccttatctctacaaaaaatagaaaattagcgggcatggtggtatgcgcctgtggtcgcagctgttctggaggctgaggtggaaggatcacctgagcctgggaggctaaggctacagtgagctatgattgtgccacttcactctagcctgggtgacagagtgagaccctgtctcaaaaaaaaaaaaaaggaaaagaaaattgatttctaagttgcacagcacttacatgatgtaggatcaggtagttagggaaggaagatgccaaaccatcagaaaagccctctggaaggagctgtcgccggggctgagtctggagtttgttcagggaagagaaagacaagggaggggagga

SEQ ID NO: 710356 - DNA, 1838 bp, Homo sapiens
ctgggagagggatgctgagccaagatggcttttctggtggtctggtgtccggggctcctctcagggacccacaggcctggattcaaatcccaaggcctctactggttagttctgggaccttggtctggcctttcccaccgagccctcagacttcatctgtgaaatgggcagatgcctcccaggattgtggatggcattcatgcgaaaacattggtgacagggcctggcacggcttatcccaggcttttaatccctcctgatgcatccccgcgccttcacctataaaacaggaagacaatgcctcttgcagactttttgctaggttggatgagggagccatgcagcgtgctagggcagcccagaggcaccttttctttctttttttctttttctttttttgttttgagacagagtctcgctctgtcacccaggctggagtgaaatggtgcaatctcggctcactgcaacgtctgcctcccaggttcaagcgattctcttgcctcagcctcccaagtagctgggattacaggcgtgcaccaccacgcctggctaattttttttttttgtattttagtagagacaggttttcgccatgttggccagggtggtcttgatttcctgaccttgatccgcctgtctcagcctcccaaagtgctgggattccgtgagctgagattgcgccactgcagtccagcctgggcgacagaataagactccgagactccgtctcaaaaaaaaaaaaaggggctggggttacaggtgtaagccaccgcgcccggccatcccagaggcaggcacctattcatcggacccagccctctgcttcctcccactggccatggatgggacccatcctcgtccacactcgcatcaaagcccagcggctacttccaggggggatgtccttgggcccggcctcctcctcagtcctggtggtgacgacatgtttcatagtcccccttgattcagctgggagctgtgaggaccgactgcatcttattgcatgactgcgtctcgttgcgtggctgccggagtagcccctgctcctagaacagagcctgtgcatattgttggaatgaatgagaaaacaagtacataaacgagcaagccaatgaatgaacgaagttccttcttatccatcttgggctttgctttccgtttctgtccagccctctcctacctcctgggctgggggaggggggttttcctccgtggctgggggatcctgagaagtggggtgtggggaggctgggccccagctggccaggcctcgtgaggaccccagacccttctcacctgctggggctggggagttgaggaggggtccaagccgccagccagccagcaaggcccctcctcccggccctgctcctgcctctttgtaggaaccgaaagattcctgttcagaggcaggagctggggctatttttggcactgtgggggaaacagcgaatgctttccttctgttcaaaaatatatggtgtgtgtgctgggcagaggaggagcttgagagctcaaagcctgcactggccgggttcttgcccctcggccagtggccccaccaccccctgcgcgcccagcagcccacacagccttgccgggccattgttgtcttcaggcttyccgtgatgaggcctttgctgcgcctgagcgcaacatgatctcaattaaaatgaagagcagctgtcaaaatcgctgagcgaagcctgcctaggtgccccggccatgattccccagctcaggttctgtggagctggggacggccttgagaagagatctaggtgcatctcaaggaaggaggcatggccagcagggagcagaggggaggccctgggtcc

SEQ ID NO: 710357 - DNA, 1838 bp, Homo sapiens
ctgggagagggatgctgagccaagatggcttttctggtggtctggtgtccggggctcctctcagggacccacaggcctggattcaaatcccaaggcctctactggttagttctgggaccttggtctggcctttcccaccgagccctcagacttcatctgtgaaatgggcagatgcctcccaggattgtggatggcattcatgcgaaaacattggtgacagggcctggcacggcttatcccaggcttttaatccctcctgatgcatccccgcgccttcacctataaaacaggaagacaatgcctcttgcagactttttgctaggttggatgagggagccatgcagcgtgctagggcagcccagaggcaccttttctttctttttttctttttctttttttgttttgagacagagtctcgctctgtcacccaggctggagtgaaatggtgcaatctcggctcactgcaacgtctgcctcccaggttcaagcgattctcttgcctcagcctcccaagtagctgggattacaggcgtgcaccaccacgcctggctaattttttttttttgtattttagtagagacaggttttcgccatgttggccagggtggtcttgatttcctgaccttgatccgcctgtctcagcctcccaaagtgctgggattccgtgagctgagattgcgccactgcagtccagcctgggcgacagaataagactccgagactccgtctcaaaaaaaaaaaaaggggctggggttacaggtgtaagccaccgcgcccggccatcccagaggcaggcacctattcatcggacccagccctctgcttcctcccactggccatggatgggacccatcctcgtccacactcgcatcaaagcccagcggctacttccaggggggatgtccttgggcccggcctcctcctcagtcctggtggtgacgacatgtttcatagtcccccttgattcagctgggagctgtgaggaccgactgcatcttattgcatgactgcgtctcgttgcgtggctgccggagtagcccctgctcctagaacagagcctgtgcatattgttggaatgaatgagaaaacaagtacataaacgagcaagccaatgaatgaacgaagttccttcttatccatcttgggctttgctttccgtttctgtccagccctctcctacctcctgggctgggggaggggggttttcctccgtggctgggggatcctgagaagtggggtgtggggaggctgggccccagctggccaggcctcgtgaggaccccagacccttctcacctgctggggctggggagttgaggaggggtccaagccgccagccagccagcaaggcccctcctcccggccctgctcctgcctctttgtaggaaccgaaagattcctgttcagaggcaggagctggggctatttttggcactgtgggggaaacagcgaatgctttccttctgttcaaaaatatatggtgtgtgtgctgggcagaggaggagcttgagagctcaaagcctgcactggccgggttcttgcccctcggccagtggccccaccaccccctgcgcgcccagcagcccacacagccttgccgggccattgttgtcttcaggctttccgtgatgaggcctttgctgcgcctgagcgcaacatgatctcaattaaaatgaagagcagctgtcaaaatcgctgagcgaagcctgcctaggtgccccggccatgattccccagctcaggttctgtggagctggggacggccttgagaagagatctaggtgcatctcaaggaaggaggcayggccagcagggagcagaggggaggccctgggtcc

SEQ ID NO: 710358 - DNA, 1838 bp, Homo sapiens
ctgggagagggatgctgagccaagatggcttttctggtggtctggtgtccggggctcctctcagggacccacaggcctggattcaaatcccaaggcctctactggttagttctgggaccttggtctggcctttcccaccgagccctcagacttcatctgtgaaatgggcagatgcctcccaggattgtggatggcattcatgcgaaaacattggtgacagggcctggcacggcttatcccaggcttttaatccctcctgatgcatccccgcgccttcacctataaaacaggaagacaatgcctcttgcagactttttgctaggttggatgagggagccatgcagcgtgctagggcagcccagaggcaccttttctttctttttttctttttctttttttgttttgagacagagtctcgctctgtcacccaggctggagtgaaatggtgcaatctcggctcactgcaacgtctgcctcccaggttcaagcgattctcttgcctcagcctcccaagtagctgggattacaggcgtgcaccaccacgcctggctaattttttttttttgtattttagtagagacaggttttcgccatgttggccagggtggtcttgatttcctgaccttgatccgcctgtctcagcctcccaaagtgctgggattccgtgagctgagattgcgccactgcagtccagcctgggcgacagaataagactccgagactccgtctcaaaaaaaaaaaaaggggctggggttacaggtgtaagccaccgcgcccggccatcccagaggcaggcacctattcatcggacccagccctctgcttcctcccactggccatggatgggacccatcctcgtccacactcgcatcaaagcccagcggctacttccaggggggatgtccttgggcccggcctcctcctcagtcctggtggtgacgacatgtttcatagtcccccttgattcagctgggagctgtgaggaccgactgcatcttattgcatgactgcgtctcgttgcgtggctgccggagtagcccctgctcctagaacagagcctgtgcatattgttggaatgaatgagaaaacaagtacataaacgagcaagccaatgaatgaacgaagttccttcttatccatcttgggctttgctttccgtttctgtccagccctctcctacctcctgggctgggggaggggggttttcctccgtggctgggggatcctgagaagtggggtgtggggaggctgggccccagctggccaggcctcgtgaggaccccagacccttctcacctgctggggctggggagttgaggaggggtccaagccgccagccagccagcaaggcccctcctcccggccctgctcctgcctctttgtaggaaccgaaagattcctgttcagaggcaggagctggggctatttttggcactgtgggggaaacagcgaatgctttccttctgttcaaaaatatatggtgtgtgtgctgggcagaggaggagcttgagagctcaaagcctgcactggccgggttcttgcccctcggccagtggccccaccaccccctgcgcgcccagcagcccacacagccttgccgggccattgttgtcttcaggctttccgtgatgaggcctttgctgcgcctgagcgcaacatgatctcaattaaaatgaagagcagctgtcaaaatcgctgagcgaagcctgcctaggtgccccggccatgattccccagctcaggttctgtggagctggggacggccttgagaagagatctaggtgcatctcaaggaaggaggcatrgccagcagggagcagaggggaggccctgggtcc

SEQ ID NO: 710359 - DNA, 1035 bp, Homo sapiens
tattttgaaaaatcaagaggaacattgatgtggtggtgcagggatgcctctgtgtcctcgagtccccggctctgctgcatctgtcccctctctttctacatacgtgagtgtgtatatttctaaaccatgtcacaagaggctgcaggcgtcttgaccctcacccctgaatagctcagagcatatctccaaagctgggcgcggcgtctcacgcctgtaaccccagcactttgggaggccgaggcggatggaacacttgaggtcaggagttcgggaccagcctggccagcatggtgaaaccccgtctctaccaaaaatacgaaaattagccaggcgtggtagcaggtgcctgtaatcttggctacttgggaggctgaggcaggagaattgcttgaaccctggaggcggaggttgcagtgagcccagatcaaccattgcactctagccccagcctgggtgacagagggagactcctcaaaaaaaaagaaaaagaaaaagggcattagcctcagtgctgttaccacccccacctcatccccatggcagcacctaattaccagtccacagtgcagtggcttcccagctggcccagcgacagccatgataacagttttttcctgctgatctggacccgatccaggcatcttgagttacatttggttgcctcgtctgtttagactctttttttctggaacaatcctccaacttgctttgcctttcctggccctgacttgaagtgtcctggtcagtggtcttgtagaatgtcccacagccyggatttgtctgattatgtccttgtggttagactcaggttaattatttttggcgggagaccttcacggataacgtgcccttccactgcatcaaattaaggggtacatgatattgggctatttcacgatcgaaggcagggcaggtttgatcaaggacggtggcttttttttgaatttgttatattttttattgtgtattagaaaagatatgaccagcacagtcactggtaactttatggatattattgcttaggctgaagctaga

SEQ ID NO: 710360 - DNA, 1617 bp, Homo sapiens
gaaagtttaaatctgttccttcttgtcctggtttgtgctgggtgaggtcttgaaaaaaatgggtgtgggtgtgttaaggggaaagtgctgtgaatcacaggccctgagcttctttgcattgccaagggcaggagggaagaacactgaggctcgccccatcctgccttcctggcccgtccagagcttggaggtctggaagaggtgcacaggcagtccccagctccctgccccagagttagtcgtctgacctggccacagcaccaccccaaccctggtgggtgggagaggtgtactagggcccccagggcttccctctcaggggctggtgcctggggcaggccttccctcagctggcctagcagttcatggccccttgggaagaggttaaaatacagattacagggcctcacctggttgtactgaatcagaatctctggagtgggtgtcgaggggattccagcagtgggatctttaaccagggacatttgggtccagcgatctaagaatcctcctagattcagggcctgaagctttcctcacttgactgacacaggctgggtgcatggcgccccaagcactgacttggccctgaggccttcctggggttgtggaactccaggtgagagtaaagttggaagtgccctgtttgggaggaggtgtgtcccctttgaagccaagcaataaggagggtgaggtgcagggagtgagggctaaaggcttaggctaggacagtcctgggacctacccccagttcctcccggttcgagggctccaagtgtgaggcctgtggccgcagagaccacagcccccacctgccaccgcattgccaaggtgtttactgatgtgacagatgacagtgtagaagggaggggagccggagggaatgccagggacaaatatgacgcccttggcctggccctttgccttcaggacagggctggccacaaacagaagtccattgcctctggttcaagtccatagacaattcctgatgttgggccctggcggcggggggctccagtccccagtggtgccgacgggagtgggcgtgtagctcctgggctgggggaggtggacgtgtacaggcaggagggtgtgggccatgcccaaagctgctcccagctctcacttcaccctcaggcaggagcacttcctcctccctgcttgaatcctgttcctttcatgccacacccactgtgggggtcttcgctgctygtagacccagtttccctggccctgtggcattgagtctctggcagggctgaggccagctgttttcctagtggagctgaaagagggtggatccgggagggtttagttggccgaatgggtccagtgccgtgtatctgacctgtccctggaccctgcccagtcaccctctctgctcttgccacattgaggcttttctctgtgcctcacgtatctggtctttgaggtagggattaaagacctcttagcaagactttgtgcttagggtaggagttggcggggggttctgaatgtttttcaaaacttaaaaaaattgagctatagggccgggcacggtggctcacgcctgtaatcccagcactttgggaggctgaagagggtggatcacctgaggtcaggagctcgaga

SEQ ID NO: 710361 - DNA, 1617 bp, Homo sapiens
gaaagtttaaatctgttccttcttgtcctggtttgtgctgggtgaggtcttgaaaaaaatgggtgtgggtgtgttaaggggaaagtgctgtgaatcacaggccctgagcttctttgcattgccaagggcaggagggaagaacactgaggctcgccccatcctgccttcctggcccgtccagagcttggaggtctggaagaggtgcacaggcagtccccagctccctgccccagagttagtcgtctgacctggccacagcaccaccccaaccctggtgggtgggagaggtgtactagggcccccagggcttccctctcaggggctggtgcctggggcaggccttccctcagctggcctagcagttcatggccccttgggaagaggttaaaatacagattacagggcctcacctggttgtactgaatcagaatctctggagtgggtgtcgaggggattccagcagtgggatctttaaccagggacatttgggtccagcgatctaagaatcctcctagattcagggcctgaagctttcctcacttgactgacacaggctgggtgcatggcgccccaagcactgacttggccctgaggccttcctggggttgtggaactccaggtgagagtaaagttggaagtgccctgtttgggaggaggtgtgtcccctttgaagccaagcaataaggagggtgaggtgcagggagtgagggctaaaggcttaggctaggacagtcctgggacctacccccagttcctcccggttcgagggctccaagtgtgaggcctgtggccgcagagaccacagcccccacctgccaccgcattgccaaggtgtttactgatgtgacagatgacagtgtagaagggaggggagccggagggaatgccagggacaaatatgacgcccttggcctggccctttgccttcaggacagggctggccacaaacagaagtccattgcctctggttcaagtccatagacaattcctgatgttgggccctggcggcggggggctccagtccccagtggtgccgacgggagtgggcgtgtagctcctgggctgggggaggtggacgtgtacaggcaggagggtgtgggccatgcccaaagctgctcccagctctcacttcaccctcaggcaggagcacttcctcctccctgcttgaatcctgttcctttcatgccacacccactgtgggggtcttcgctgcttgtagacccagtttccctggccctgtggcattgagtctctggcagggctgaggccagctgttttcctagtggagctgaaagagggtggatccgggagggtttagttggccgaatgggtccagtgccgtgtatctgacctgtccctggaccctgcccagtcaccctctctgctcttgccacattgaggcttttctctgtgcctcacgtatctggtctttgaggtagggattaaagacctcttagcaagactttgtgcttagggtrggagttggcggggggttctgaatgtttttcaaaacttaaaaaaattgagctatagggccgggcacggtggctcacgcctgtaatcccagcactttgggaggctgaagagggtggatcacctgaggtcaggagctcgaga

SEQ ID NO: 710362 - DNA, 1083 bp, Homo sapiens
cagtgagtaagcagctgtcttcaagccaggaagagagccctcaccaggaacagaatatgctggtaccttgatcttggacttctagactgcagaaatgtgagaaatacgtttctgttgtttaagccacccaatctggtattttgttatagcagcctgagctcaracaatctgttaagaatatattcagttataaataacagaaaactctatgacagtagatccaacattaggatttacttgtattagttcgttctcacactgttataaagaactgcctgagactgggtaatttatgaagaaaagaggtttaactgactgtacagttctgcaagctgtacaggaagcatggctaggaggccttaggaaacttacaatcatggcggaaggcaaaggggaagcaagtacatcttgtcatggcagagcaagggagagcgagcgaaggggggaggtaccacacactttcaaacaaccagatctcatgagaattcactatcacaagaacatcaagggggaagtccgtccccatgattcaatcacctcccaccaggcccctcccatgtcacagggggttacaagtcgagatgagatttggttggggacacagaaccaaaccatattgcttgtctcacaaaaatattcagagatgagtagccagtgcaaaacatgtgtggtcgctcagcaatgccattgtgacccactccgccatctttaacactcaggccattatttccatgcctcttgctttatagtcacagaatggtggcagcacttccacacctcccctctgtgttccaagtgtgcgcaagaaagttgaagtctgtccagttttaccaatgagaccttgtctttttacttgggaaatgttgctttcactagggatttctgtctctcattggctagaactatgtcatatgatcactttgagctgcaaaaaaccaaacaaataaaaaagcaaaaactgcatccatctataggttcagggatcttttagttgagaaaaaatatcagaaaccttgtacctcttggaccacccaggatccgttcacatcttcctttacataaatattctttatgtggaatgca

SEQ ID NO: 710363 - DNA, 1083 bp, Homo sapiens
cagtgagtaagcagctgtcttcaagccaggaagagagccctcaccaggaacagaatatgctggtaccttgatcttggacttctagactgcagaaatgtgagaaatacgtttctgttgtttaagccacccaatctggtattttgttatagcagcctgagctcaaacaatctgttaagaatatattcagttataaataacagaaaactctatgacagtagatccaacattaggatttacytgtattagttcgttctcacactgttataaagaactgcctgagactgggtaatttatgaagaaaagaggtttaactgactgtacagttctgcaagctgtacaggaagcatggctaggaggccttaggaaacttacaatcatggcggaaggcaaaggggaagcaagtacatcttgtcatggcagagcaagggagagcgagcgaaggggggaggtaccacacactttcaaacaaccagatctcatgagaattcactatcacaagaacatcaagggggaagtccgtccccatgattcaatcacctcccaccaggcccctcccatgtcacagggggttacaagtcgagatgagatttggttggggacacagaaccaaaccatattgcttgtctcacaaaaatattcagagatgagtagccagtgcaaaacatgtgtggtcgctcagcaatgccattgtgacccactccgccatctttaacactcaggccattatttccatgcctcttgctttatagtcacagaatggtggcagcacttccacacctcccctctgtgttccaagtgtgcgcaagaaagttgaagtctgtccagttttaccaatgagaccttgtctttttacttgggaaatgttgctttcactagggatttctgtctctcattggctagaactatgtcatatgatcactttgagctgcaaaaaaccaaacaaataaaaaagcaaaaactgcatccatctataggttcagggatcttttagttgagaaaaaatatcagaaaccttgtacctcttggaccacccaggatccgttcacatcttcctttacataaatattctttatgtggaatgca

SEQ ID NO: 710364 - DNA, 648 bp, Homo sapiens
ttttccagctacactagtatgactttgttaccgcaaatacatgacgttcaggatctttgcactgttacttctgcctagaatggcttctttccaaatccttgtctagttatatttaacttccactgcaaattttagccacaatatcactcctttcatatccttgggggaaatatttcttgatactccccttcaaacccacackcagaaactaaatcagatctccccaattttctttcttaacagcatttgtcaaagtttcaaattatgatcttatactattcctgagttaatctctattttttctcttccccacgtgtggatggaagcttcaggggagcagggtctgagcttctgctcctcaacattttaccccagtgccaagtagagtccttgacacatagtaggtgattaatacatttttgttaaataaatcagtgcctgaacttgctgttagggacttgcgcccattgaagaagtcagttcatgggcaaattacacttgcttaatgatatcaaaatgtaaagattttcagcaattattgttgttctcatttagtccctcctgaatattgaccaagcatgctaaaggctccaggtcagtctaatagagtgaaaatggccttgactttgtcttcaggaagacttgggc

SEQ ID NO: 710365 - DNA, 1237 bp, Homo sapiens
taatctcaatatcaaataaggttggtgttctgaatatctctctcctacctgactctacaatactgaaataagataatgttctcttctgtattgacaccaacagttcatgttattaaaattagaaaaatatttcgtaactcaaaatagtctccacctgcattaaatcttggcctctgactgggtctttaactctgctttatccactgttctgggcttgggggcctcatctcctatgatgcgtctttggatagagtgtgcatttctatgtccagatagcaagtatcgccttgaatctgtttttactttttcaaaatccttttctggggcaactgctgacttcccaacaaaatgaacagtgagcactgtcacactgaaatactttattaatgggatttatatcagatatttaaagcaagtactggagcaaatggctcttttacaaatgcaaaataagcaggttggcatggtatggttggatcatccaatccaatattatttgagtcatatctgaattctctcttaaatgtcttacgctgggaggcataggacttcttcccttgcaataaatcctatgtagctctgaccattcattacttattatgaataattgaagctttttctttgtcatttaaacacattgttcctaattttgcttctttgrtttcctcaaaacaagtgtctttccatgtgacactccatcagatctttaaagaacaactattgtatcttctaccatcttctcttttctaggctaaatacttctagtttttttcaacataattctctccaagcacaccaatcaatactcactttccttatacccataagattaaagggggaatataagagacagctcttcaattaaataatagccacatcctctctatctcagagaaaagggttaagttttcatagaaagctactcttattgttccttcacaatccaacctccttattaacgaggtctcattcatggtttaaaaatatctcatttggacaatttctttcattaagtgcagtaattaaatgcactcattaatgtcattaagagtatgagggtatttcttataataaatttgtatggatccgggacataatgtgcctgagtttaggataaatggaaataagagacaacatcaatcttcaaatccctgaactgaaaagtaattcatcttgcaaatgctgtagtgtctgtttaatcagaaaagttaatttagaccaggtctgggatccagcc

SEQ ID NO: 710366 - DNA, 696 bp, Homo sapiens
cacagctcgtctcagcatcaaaaagttgaaatggtgcctttagattctttgtgcatgtcctgcttctatagtggagcagacactattctgcatttctgtgtctttctgcaggaaatgcttcttcacaagcacacacacacacacatgcacacacacacacacacaccacacacacatgtttattcctgaaaataaaatagataatccatggcctgaaggagcaatgtggatctttgcaccaacgtccacactgtcccaccccaccctgtttccctactcaggaagcccaccctgctcttgagatataaataaccgactacccaaacagtgagagaagaaagagaagatggtgattctagagaaaattcaaaatggcacttgcatcaagcagcaagaaaaatagtcacaggagtcacagaagaaaccatgctgtttcctgctaagagtgctgagggtatggagagtaaatcggcaactgttgatggagtaataatggcagcatcttctaggaacaggtggtggctcacagtcgccatggaggggcccctgaaaccacccccaaccaacacacatacacatacgtgagcttctactttccatcttctcttcagagtgagagattaggatgctgcacataatccacaaaggaatgagctgcatgtggtgttgaccttgacatgttagtcacccrttgtc

SEQ ID NO: 710367 - DNA, 632 bp, Homo sapiens
tccaagtctgggagctttttgagagcaggaatcttgtttcattagtatctattctctctcaccaaatatagacaaatgctcaaaaatgtattatatcagttttaagaacaattgtgtattttcatggtggtgaagaaaaagaattcatgtggggaaatgaaagtgattattgggatgcatgttaagatgtggattatcaggcctcacttcagacaaatgaaatcagaatttcttatggaggtagttttctagaagttatccatgtgattctaatatgcrttgttcagaatctatagggtagtgactatgagaatgagattttaagaagtagtagaagcctttctcacttctttctgaaaagtcctcaaaaataaaactgaaaatacctaacagtgtgatatttagcactgaaggagatacaagtttgcactcaccaacactgacaatgtcctacccatttgcatctacttttgtggtcaattttgtaacttcattgtcagagacaggtatctatttttgtctatttccacacaaggccaacattcatagaagtaaacggtagatacaattacaatcatttctgtactacattgccgattatcttctagaaattcagcaaattgttcaagaca

SEQ ID NO: 710368 - DNA, 905 bp, Homo sapiens
aatcttttcaacgaaagtagcatatatctaggactttgaatggcaagcagcttagagcaaaaaaccaagtgctgaagatatagtttaaaaaaaaggtagaaacatgcttagcaaagagtcccccacaaaacttgtaatctgcataaattgtcaaggcacagctgtggaggtgacaagggcatttcctgattcccaagacatcagcaaagtcctttaatcaacacatacattattctgttctgtatgtaatattgttcttgaatattaagcagccagtgattcagtaccatctggcacttcctggttaagcacagctctgatacagtaagaatgtgtcaagagtccaggaaagcagtttccaatgaggacaatgcaacagagtgaatcagacaggctaggtaggagtgggagaaaagacacactcttccttcacccaggatgaatggaaaaaagaggaggtggtagggcatcaaatgctttgtgccactgaccttctttttccatgcggactataaagatgcactttctgagtgctatggggggatttttgtttttgttttttatccctcagtaatgatgcaaagtgtgggagagtacatcgggcttagatgacaaaacatccacgactcacacagaccaarcaagctgttcttggcattcagaatctctacatttggaatatgtcgagtgtgatggaggaacactggaatttttgctatcccttttcctctttttgtcctctaagactgaaggtgtccttgcaatttaaccacaggattgcctgtgtcaggtttactggaaccttctgtagccatgccagaagacgcaaagtggtcttcaaatgaatctaaaccatgacctcagatcttatagttaaaagcaacaatgagttggggaaaccaggt

SEQ ID NO: 710369 - DNA, 599 bp, Homo sapiens
attaatgacactatttaattgtctaagataggaatcctggactcattcttgcttaaaactaatttattaaatcttataacctttttttccaccagttaaacttcttgtttgttctacattaagcaatacctgaataggagtaatccattggatgctgtatgtcatctacaaattctgcccattgacacctttgagcgttctgtcttctggggctacagtgtgatgacatcaaaatccctcttctgttgatttaggcacatccaattccatgctcatcaattgtagaagtcaatcctcattagtcagttgattatcagctcttgcccttgcaaggaaattggtgagccatcatcatctaggctagtcctatcaaatggtgttgggtaattggtaaccatagaaccattcaattctaaatttcaaacatasataactgcattttgctttcattctgaggattcaagggaacataatagataccatagcaatcaaaagctgtcttttagacaggatcaagaactaaaggcaaatattctaatttggtaatcatccttatgacctttaacaatatttattcacaaaagatttgttttaggaga

SEQ ID NO: 710370 - DNA, 2617 bp, Homo sapiens
aaagactcaacctaaaaataaccctgcagaatccctaaatgggacataccgctgaaaggggcctatgcactcaacactgccaatccgggtgtcttacaggtaccttaaggtatcaaggtattctcagactcccaatgaggagagagtagaaagggagaagctggattttcaaaaacatgtgcccagctgggtgtggtggctcatgcctgtaatcccagcactttgggaggcagaggcaggcggatcacctgaggtcaggagtttgaccccagcctgaccaatatggagaaaccccttctctactaaaaatacaaaattggccaggcatggtggcacatgcccataatcccagctacttgggaggctgaggaaggagaatcgcttgaacctgggagacagaagttgtggtgagctgagatcgtgccattgcactccagcctggtcagcaagagcaaaactccatgtcaaaaataaaataaagtaaaataaaaataaaaacatgggcccaggagagatcctaaggtcaggtactggtgctgcaaaatcagagaactgttgttgattcaagatctgagagagctgaggtccaaagtcccctatagcctgtcctctctgaagtctaggaggagaggagaggatatgactttgtggaatgggaagcagaaatgggagtaggaaggaaggaaattgaaaggattccaatacgtaggagcgaaggatagagtggaagaagtgggtcagcaaggaggctgaaggcacttggcaataagacgacctctgttggcagaggacacaccagcttagttccctactacacatgtacagtttgaggaagaggtgtgatagagcagtttaaaacataatttgcagtcagtgtgcctgggtttgaatcctagatataccactcactgtgactctctgaatttcagcctcctttgttataaagagggacatagtggtacttaaaacatagtgttattgtgagaattaaatgagacaaatgttaaatacagactctgtctaataaatgttagctgcatttttccagtttagtcactttccaactgtctttgcttatttagggaagcagaagcatggataatgggtagctttccaccagcacactgcccacccagcattgttaatccaatttgggaagtgcatacttgctgctagtgtgtactccctggtttcatgtggaccagtggctaagagaaggacactacacaaatgatgaggaagcaaggaaaggagaaataacctgagatgacaaatgtccacaatgtgaaaattccaatagagaaagatgagaagtatagaaatagtccacatttcctgtctatcaaggaagagagtaaataccttttcaggtgagatgatgtgatttttttaaaccttatagaaatttatatttattaaatccctcaacatttctttttttttattttaatggcatatttaattcagtgagtacatgtagaattggcatcctgacattttctttaattttctttattattattattattattatactttaagttttagggtacatgtgcacaatgtgcaggttagttacatatgtatacatgtgccacgctggtgtgctgcacccaytaactcgtcatttagcattaggtatatctcctaatgctatccctcccccctccccccaccccacaacagtccccagagtgtgatgttaaaaggcttagaaagactcccaggcctttctggttcttcccaccactaacaagactcatcattaaaatgtcatttctctagcttattgtttgagcaataatactaaccacgtgtattagggtttgacaaactgtcactcaactgtcacttgagtctccaaatgacagtggcaggcggggaagaacagcacacacacaaaaatcagcctctaccccacacacacaccccatcttattaatagatatacagaactgtaatgacttgcccaagacatgagaaaatatacaatgttgtcagatccagttaaacgggaagggactaagctactacctctgaggcaaacatcacactgatcttagaaactccaagttcaagtccaaaggaaatcatagcccttcacccccagcaaacacaatgtcccaggagtgaggctgaaagagacagagaagaaactggggaaagagtccagagagtcaaatagatacattccccaggagtaggatgaagggtagttatctcgggttgtaagtatctattaagattttcaatgtttataaattccaactttgcaatttgtatctcagaatctattccacgccttagaaattatctgatgagtgcaatacacacaaaaacatccattgtaacagtctgtgggggatagtatggctccaatacaatatatagtgtgcatatagatctatggagagaaaaagttggctgggggatgaaattgttcagaactttcacccttttaattataaaattcatgtaaaaaatcacgtgttcattatttttaaatacaagcaatataatcttaccacaccaaaaaaatgataactatgtgagagagcacatatgttaaatagctcaatttagccattccacaatgtatacatatttcaaaacatca

SEQ ID NO: 710371 - DNA, 2468 bp, Homo sapiens
accaaatacatattcagtctcaggctaggtactgttaggaatccagatttcaggaaaaggtttcaggttttgaaagctgagtattgcatcctcaatagattggcaatcatatagagaaataaagctatctccaaataacttgtctataagcctgacaatggctagcagtcaaggagtttaaatcctgttagttttttgtttggcggaggggggttgttcttgtgtgtgcgtggcttttttttttttagaaacataatctcactgtgttgttcaggctggagtacaatggtgcgattatagctcactgcagcctctaactcctgtgctcaagtgattctcctgccttagcctcccaagtatctgggactacaggaacatgccaccacactcgacttttttttttttctttgtagagacaaggtcatgttatctcaccctggtaggtcttgaactcctggcttcaagggttcctcctgcctcagcctcccaaagtgctgggattacaggggtgagccaccacgacttataaaactcattagttttaagaagaagaaactacatgggtttgataggtcattgggtaagacttcttgaaggaatggcatcttgaaggatggactgaattttgaaagaggaagtttcaaaagatgaagaaatgggcaaagcatttcaaatagtgaaaaccacccaagcatgtggagacaataagcactgcaatgtgtttgagggacaatgaaaagctgaggcttcatcagtttgagagaaaggagaatacggctggaaagatagaagaatctacaaaatgcatttattctcccccccaccaacacttaagtttcatgacagtgtgaaggctcagtacccgatttcttttcccttccctcttaattcttcccttcatacatccagcatcctcaccaagctgcattttgtatcctagaaaaagctaatgtatcagttaggaaaaagctcggttgtgctatggaaacaatcaacctcaaagtcttaggaccttaaaaccaaaggtttatttctcattcacattgtaggtccaccatagaaaagtgtaagtgtgctacttattttcaacatgcagagacccaagatcgtggagcagtcaccactgaaaacattaatcatcactctgccagaagctgagaaaggctcttggaggtttcacactggcagttaaaaactctggcccagaagtgaccctcacctcttatgaccataacttattgtctaaaacacctctcatgaccccacccaaacgcaaggcagccaggaggcacaatccaactatgtccctctaagattttagaaagccagaagtatttgataaaccgcattcattactactacccaactatattaacatacaaacacatcagtgtgaattagttgcttcatcagttctcctggattgtgttattgtcaataacaatagtaatgtaacacttacacactgtctgggatttttctgcttcaattatttcatcaagttcccacaaccatcagcttttctaggtcacaagcttgtgtggcaggacctgacgctgaatacaagttttttggccttaaagatttagtaagaggtgaatggtgtccaaggaaatacagggacacctaggttccgacatcaaggtccctgctagtgctttcactacgtgctcctaattataagggagtaaccagaaagccaggaaagaaacccaaagcaataaccttcgtgtttgtacaggcacacctggttttcaccactatctctcactgatcatttggtttgtgggatgctggcctagaagatatgtaccatttccacttactcaatttatgtgccatagttttctcatgctcaaccaagttcaattagctacttcagaatgttaggaatatctatattaaataaatctattcataaattatatgtatattacatatacattaaataaacaaattcattaattatgccaccattaacttataaatccaattaagttctttagtcctgagaacactaacttacttttttttttttaacttattttaaattccaggatacatgtgcaggacgtgtaggtttgttacatgggtaaacgtgtgctatggtggtttcctgcacctatcaacccatcacctaggtattaagccccatatgcattagctatttatcctgatgctctccctccccactcccacccagaccgcagtgtgggttgtwcccctccctctgtccatgttttctcgttgttcagctcccacttgtaagtgagaatatgcagagttcagttttctgttcttgtgttagtttgctgaggataatagattccagctccatccatgtccctgcaaaggacatgatcttgttcctttttataacttcatagtattccatggtgtatatgtaccacattttctttatgcagtgtatcattgatggacatttgggttgataccatgtctttgct

SEQ ID NO: 710372 - DNA, 631 bp, Homo sapiens
tgctcattctggtaactgcaaccttctttcaatattcctctttcctagtaaaaccytaagcatcacacaagaatatattttttcttctgcttttctccctgattttggaacagtttcttaacattcccacaaaaacatggtttgaggtaacgacactatcgactgaagaaggaatgagtttgggaagcgttgagatgtgggaaagactaattgtgccttcatataaagactcttagaaaatgacctcaggctagtatttccaatcatcttcaaatcttccgttgaaagaaagtgactgctgagtaatcatttgcactcagagttttgcaaaatatttgagatttagttaaagaaaaggggaaagaagaatccagtgctactgacaactgtggtacccagaccaatgacagcaaatgagtctgtgggatcatcttcacagcctccgaatgacagagcatcaatgaaatgaagaaaatagtgctttttgcgcttctattatcttctaactgataacgtgcatacattgttagtatttttccacagaatggtttatgtcaaatacttaggctaacagcatctgtactgagaagactctactcaggtgcttagaaatttttctactgaagtgttt

SEQ ID NO: 710373 - DNA, 631 bp, Homo sapiens
tgctcattctggtaactgcaaccttctttcaatattcctctttcctagtaaaaccctaagcatcacacaasaatatattttttcttctgcttttctccctgattttggaacagtttcttaacattcccacaaaaacatggtttgaggtaacgacactatcgactgaagaaggaatgagtttgggaagcgttgagatgtgggaaagactaattgtgccttcatataaagactcttagaaaatgacctcaggctagtatttccaatcatcttcaaatcttccgttgaaagaaagtgactgctgagtaatcatttgcactcagagttttgcaaaatatttgagatttagttaaagaaaaggggaaagaagaatccagtgctactgacaactgtggtacccagaccaatgacagcaaatgagtctgtgggatcatcttcacagcctccgaatgacagagcatcaatgaaatgaagaaaatagtgctttttgcgcttctattatcttctaactgataacgtgcatacattgttagtatttttccacagaatggtttatgtcaaatacttaggctaacagcatctgtactgagaagactctactcaggtgcttagaaatttttctactgaagtgttt

SEQ ID NO: 710374 - DNA, 631 bp, Homo sapiens
tgctcattctggtaactgcaaccttctttcaatattcctctttcctagtaaaaccctaagcatcacacaagaatatattttttcttctgcttttctccctgattttggaacagtttcttaacattcccacaaaaacatggtttgaggtaacgacactatcgactgaagaaggaatgagtttgggaagcgttgagatgtgggaaagactaattgtgccttcatataaagactcttagaaaatgacctcaggctagtatttccaatcatcttcaaatcttccgttgaaagaaagtgactgctgagtaatcatttgcactcagagttttgcaaaatatttgagatttagttaaagaaaaggggaaagaagaatccagtgctactgrcaactgtggtacccagaccaatgacagcaaatgagtctgtgggatcatcttcacagcctccgaatgacagagcatcaatgaaatgaagaaaatagtgctttttgcgcttctattatcttctaactgataacgtgcatacattgttagtatttttccacagaatggtttatgtcaaatacttaggctaacagcatctgtactgagaagactctactcaggtgcttagaaatttttctactgaagtgttt

SEQ ID NO: 710375 - DNA, 575 bp, Homo sapiens
aggtttttgatcaacctcatcagaagagttaaattgtctgtcagtatttcagatggccacatttataaagctgagtgcaaacarttacccaccatggtgatacacatttatacattttgctttttgacctatttctttatgtatacattttgtctgctcataaatgttaagccattgcaacagtctttagtatatctgaatgtttatgcttgcaaaaataagtattgtgtaaagtggcctatgaagtgttctgtcatgtttttatgtttctcagataaatccccttttaagatataaataaatgttttaaaaattatttttcccagaattgtattttcggggttttgatctttcaggattacaacatttagggttatagcatttgggactgtgtctttcttaatggcccaaacccattaagaatgattactttacctggatgcaagagaccttggaataacaatggtgattcttgtccattcttcaaagtcccctgtgtgatacatggtgggctcacttagttctctggagtttccttcgcatcctttgcctgcagaagccgggtaacagccttc

SEQ ID NO: 710376 - DNA, 575 bp, Homo sapiens
aggtttttgatcaacctcatcagaagagttaaattgtctgtcagtatttcagatggccacatttataaagctgagtgcaaacaattacccaccatggtgatacacatttatacattttgctttttgacctatttctttatgtatacattttgtctgctcataaatgttaagccattgcaacagtctttagtatatctgaatgtttatgcttgcaaaaataagtattgtgtaaagtggcctaygaagtgttctgtcatgtttttatgtttctcagataaatccccttttaagatataaataaatgttttaaaaattatttttcccagaattgtattttcggggttttgatctttcaggattacaacatttagggttatagcatttgggactgtgtctttcttaatggcccaaacccattaagaatgattactttacctggatgcaagagaccttggaataacaatggtgattcttgtccattcttcaaagtcccctgtgtgatacatggtgggctcacttagttctctggagtttccttcgcatcctttgcctgcagaagccgggtaacagccttc

SEQ ID NO: 710377 - DNA, 575 bp, Homo sapiens
aggtttttgatcaacctcatcagaagagttaaattgtctgtcagtatttcagatggccacatttataaagctgagtgcaaacaattacccaccatggtgatacacatttatacattttgctttttgacctatttctttatgtatacattttgtctgctcataaatgttaagccattgcaacagtctttagtatatctgaatgtttatgcttgcaaaaataagtattgtgtaaagtggcctatgaagtgttctgtcatgtttttatgtttctcagataaatccccttttaagatatwaataaatgttttaaaaattatttttcccagaattgtattttcggggttttgatctttcaggattacaacatttagggttatagcatttgggactgtgtctttcttaatggcccaaacccattaagaatgattactttacctggatgcaagagaccttggaataacaatggtgattcttgtccattcttcaaagtcccctgtgtgatacatggtgggctcacttagttctctggagtttccttcgcatcctttgcctgcagaagccgggtaacagccttc

SEQ ID NO: 710378 - DNA, 640 bp, Homo sapiens
tataaatctattccattatgttagccattttatagaggcactgaaagtcttcaatactgagaatactcttcacagctgttgagaataataggaagtgacttttccatttgccactcaatgtatttacctatctatctgctaagcttcctagacaatcatttactgtgaaatggtcgytgaggtggctcctgggagccatctcacccggactgacttccttcagcagtacaattttagttgatttaatgctctttttaagagtctttgtaagaaacaattccaagaatactctaagcttgctaataaactatttaaaagacaaaatttctgtataagctacaggttaatgtttcgtgaaaggaaaatcctaacaaaatttacttggctgttattctataggttgattcattttataaaagattgtcagtaatttttttccttgtaaaccaaggaatacagctatctaatattgcatttaggcactaatctgactcctcctttgctcatgtttaccaacaacacaatccttacattagtatcaggcaaacactgactagtttcccaagattggtctgaaggaataaagatctgcatgtagtaaagattctgattcaaacctctgcaaacacatattcctatt

SEQ ID NO: 710379 - DNA, 1026 bp, Homo sapiens
tgtccagtcccaaactccaactatatcaagctgcccccaaaatgccagtccataattaaactttattttcaaatacttgtcagagtttagtcttggcaagaagcacttcttaccttttgaactttcagactgctgagctgagggaaatggctggagttttcctttgaacaaaagcctacaaggattttttttgaacttcttatttattcaaatgttctgaatacaaatgaaccaccttagttggatatttattattgttcacttgccttgacacagaaactgcaagcactatgataaataggctgaagggtctggtttcactgtggttcccttctgctgaaatcttattttgaaaatttctcactgccaccctccttggtgaatgtcagcatctgttctcctaagccagttgtattcaaaaggatctgttttttaaacataaacttaaaatttcaagcacacaacattgctttcattaaataggggttttggttgactcattatgaaactgcatacagcaaaaacaatcaggaacttttaaagacaaaaggactctaaaagcacaccaaggtgatgtgaataaaattagatgaaagctcatagttattctttgaatgtaaatggactatatatgtagaaggaacaaaatttgactattttgcacctgagaacatttaatacactttttgtgtgtatytcgtgtccaataaatgcaagaaaagagtaatttaaacatggatttttgtatatatatatgcttttagcatccagcacttgtgccattactatgtaccatgttgaataccaaccaagggatggttcactgagttggagaaaatttaacttttgccttccagccattcatgcctgcatgggttttaagaagagtgctaattcttttcctgaaacaaggactagacaacacccttaaggcaaatttttctcttcacagaaatggttgaaggcagtttgaaacgtgggtttataccattctgagaacaggcatgcatgcctccttgatacatt

SEQ ID NO: 710380 - DNA, 623 bp, Homo sapiens
ctttacatacttcaggaccttgtttatttaaaaattactataacccactctctgttgtgagaagcttcttcccattagagtattatatattcaatagtttgggcaccagaatgagaacaaaatatgcaaaatgaaagccagctggtatctggcatgagtggcagtaattctatcaatgagattaacatcttttataaaatataagaagcyagtttgtttttcattagatttcactgtcaacaatatatgctccaaattctgaaattgtgatcccattacagtgttaactgttattaatggctaattaggaaaataacgatccacagttatgtcactgctaatgaacatgtaacgaagtcccatcaccctagactgcatgaaggtatagcaattctgtgcacatctgcttggcatttgtgagctgggctatcccattcttttcagcttggatatggagagtttcaaaaagatgctacttgcccagtaggtgtcattaatccatcaaacaaaatttacagaaggataaattatgtggagaatatatctatgcctggaatttgagaggaatgatgcgaattatgcaggcaatgtagaagactgtccaaatggaatctccttccaca

SEQ ID NO: 710381 - DNA, 1382 bp, Homo sapiens
cttgttttgaaaactatcagatctcgtgagacttattcactaccacaagaacagcccaggaaagacccacccctatgattcaattatctctgtggtaaggtaatagtagaggactgtgccacaccgtggatgaatttctgatgatgtctttaaacttattcccatgaatgttttgaccaaatccccaaaaggatgggtggcactgttcagatggaaatgctgtgagataagggacacaggaaggacatctttggaagaagcccagccctctgcagaattgccagatttaggaggaataggcacaagatgtccagaaaaatctgaattttaggtaaacaacaaatagcattttgatatcagtatgtttaatgcaatatgtaactgaaaaacatttgttattcatctaaagtccaaatgtaacaagcatcttgtattttctctggcgtctccagttctgcggcaatgacaaagtaatgatgatctctctttaaatgaaaataatcatcagcctgttagagggcggcttcacatgagcttatggctttcagagatctgcaatgcaaaaatggctcactagtcagaataaggccttggccccaatctgtctaactatgtgtcccagttggagcatgggttcatactgtggttgttttctcagtcccaggttgcagaattcccatatcagctctctggccctggggatgaaggttgttgtgataaggaaaactaaatggaagccctctgccatatcacaataagaaagcaaaagcaaaattacatccctggagaatgtccagaaattagtgttgccttaaagactcattcccgccacatcctcatttactggattaaccactataaacccgaggtgtgtggtgaagtatggctgtggatggtcataaactgaaccagggactgatgatcatgaaggcggtcttattggatatgtttactggagaaaccaacaatccgcccccatcatgcacacacacacttggcagggctattggcctagaaagtcttgtcaggaagggaattcaaaagcaagtttcaattacatagcagggacaaaaatgtagcttcattgttttgcttcaagactgtaaccactatcctgctrgttcctaaaatatagttcagagggactttggttagcttcacatcccatatcatttatttctggcttactatattgtagacattattctaccttgatccagtgaatagcaagtaataagcaccagatactgtaataagcctgccagaggtgtgagattaactctacaaaattttagggtttgtcatactgtgacatttctagagggatagtgtattaggatatctattctaaccaaatgggaggtgggtgactttaccttgta

SEQ ID NO: 710382 - DNA, 1382 bp, Homo sapiens
cttgttttgaaaactatcagatctcgtgagacttattcactaccacaagaacagcccaggaaagacccacccctatgattcaattatctctgtggtaaggtaatagtagaggactgtgccacaccgtggatgaatttctgatgatgtctttaaacttattcccatgaatgttttgaccaaatccccaaaaggatgggtggcactgttcagatggaaatgctgtgagataagggacacaggaaggacatctttggaagaagcccagccctctgcagaattgccagatttaggaggaataggcacaagatgtccagaaaaatctgaattttaggtaaacaacaaatagcattttgatatcagtatgtttaatgcaatatgtaactgaaaaacatttgttattcatctaaagtccaaatgtaacaagcatcttgtattttctctggcgtctccagttctgcggcaatgacaaagtaatgatgatctctctttaaatgaaaataatcatcagcctgttagagggcggcttcacatgagcttatggctttcagagatctgcaatgcaaaaatggctcactagtcagaataaggccttggccccaatctgtctaactatgtgtcccagttggagcatgggttcatactgtggttgttttctcagtcccaggttgcagaattcccatatcagctctctggccctggggatgaaggttgttgtgataaggaaaactaaatggaagccctctgccatatcacaataagaaagcaaaagcaaaattacatccctggagaatgtccagaaattagtgttgccttaaagactcattcccgccacatcctcatttactggattaaccactataaacccgaggtgtgtggtgaagtatggctgtggatggtcataaactgaaccagggactgatgatcatgaaggcggtcttattggatatgtttactggagaaaccaacaatccgcccccatcatgcacacacacacttggcagggctattggcctagaaagtcttgtcaggaagggaattcaaaagcaagtttcaattacatagcagggacaaaaatgtagcttcattgttttgcttcaagactgtaaccactatcctgctagttcctaaaatatagttcagagggactttggttagcttcacatcccatatcatttatttctggcttactatattgtagacattattctaccttgatccagtgaatagsaagtaataagcaccagatactgtaataagcctgccagaggtgtgagattaactctacaaaattttagggtttgtcatactgtgacatttctagagggatagtgtattaggatatctattctaaccaaatgggaggtgggtgactttaccttgta

SEQ ID NO: 710383 - DNA, 363 bp, Homo sapiens
gttcaacatcactagttgttagggagatgcatgctaaaaccacattgagatccactcacatccactgggatggctgtaatcaaacagccaagagataagagaattacggtcgatgtggcgattccgcccmgggacatatccagggatgtgggtggacaccctcacatccacattcacagcaggattactcacaacagcccaaagccggaaacaacggcactgtccattaatacacaaatgaatccacaaagtgcggtccatccatgccatggaatatgagtcagtcataaaaaggaagttagtgctgacacacaccacgacacaggccaacctcgaaggcattatgcaaagtgacatataaca

SEQ ID NO: 710384 - DNA, 363 bp, Homo sapiens
gttcaacatcactagttgttagggagatgcatgctaaaaccacattgagatccactcacatccactgggatggctgtaatcaaacagccaagagataagagaattacggtcgatgtggcgattccgcccarggacatatccagggatgtgggtggacaccctcacatccacattcacagcaggattactcacaacagcccaaagccggaaacaacggcactgtccattaatacacaaatgaatccacaaagtgcggtccatccatgccatggaatatgagtcagtcataaaaaggaagttagtgctgacacacaccacgacacaggccaacctcgaaggcattatgcaaagtgacatataaca

SEQ ID NO: 710385 - DNA, 709 bp, Homo sapiens
ataggataatgatgtaaaatcctgttctatgcatactacatcacaattactttttcaccaacctaatacaktgattataacaactgacacaaaggattcatttctaccatttttattttgcattttgaatgtgtcttttcttaagtttcaaattttttatattttacttttttggcatgactgccttttttctttttcatcttttccctttgaataaaaatatttggaaattgtatcacttatgtatatatttaacttttttctaaagttattcagtgtcttcatcccctaccaaacaatacaaggtccttagattttttcaattttgatttctcctactatttatctgtttttccttatctctataaattagactatactattattttatatagacaatacacattttaatttacttgtttcttagttcgttattctttcttgtaactgttctccttctctggtcatttcccatttttaaaaaacataccttacagaaatttcttattgcagatatattgatgtaaacattcattcaaaaacgtctttactcatcttagtttcagttcactcttttttttgtttgtttttgaggtggagtcttgctgtgttgcccaggctagagtgcagtggcactatcttggctcacagcaacctctgcctcctgagttcaagcgattctcctgcctcagcctcctgagtagctggg

SEQ ID NO: 710386 - DNA, 1362 bp, Homo sapiens
tgccttatgttcatttagaatagaaaaattttaagataaaaatgtgatcttacctgcaaagtatatctgtttttgaagcagttagttaccaattctcctttagacaactgatataaccacgtcaattttcggccactgtggcggctggcgtagaaagctgtgaatcgctgataactacgttccaactagatraaaggacagcattatatggaatacagatctcaccacatcctacaggcagcgtttctaagtaaagcccactgttccaagcttacagtacaaagtcagtgcttacataaaagtaaaatacaaacgccaggtgtctgcctctcttgtaaagcactttaagcactggaaggtacaatcttaaaaaaggtttgtacttcaagaccagcaggtccatcgaggtgttcattacacaactaattaggttctgctttacaagataaggaaacatgtctgtagagctgggacagacagcccacctttagacatccagacctgccccactgcacagggctcttccctgagtgttgcccccatggttcaccgtgatgcagccagccagcaggaaggccatctgcaggcctgtccccttccacagtgaaggctgccctgccccaccctccacttagcactaatgggatggcagacaaacccatccttacctctgacggcaaggcaaatgtacaagactgctggaagggccaggacccggagctcagcacttgaatgctgaaatccactgtgggacggaagagaggggagagtgaacattctggaatacattaattagtttataaactgaaaaattcaatcatttcagatgaatgtggattgctctttattaaaaagcacattaaataaaaatcctgcttgaatataaaattaagaattgaacattttattcaattaaaattagcaaaaagtgcaagagccagatactcttttcttccaaagagtgagagtcttcattttgcttccacctcggaattctgctgtcacacgcctgccctgcttcccttgctttccttttctgtcctgaatcactcagtccactcaagccacgcctgtgcttgccaggcccggcatcatcacagccccagactcatgcaaactcacaagcaggagaaaaccgctaacttcattatagtgtatgtttcacttattactgggaaacgccacacatggtctataaattataacagtaatttcatcttcgcagatagttaaaaagcccactggcaaaactgtccagttttacaatagaattgtcattctgatttgggaaaaataaaattctccatttttcatttaaaaagacaaagatgatcaaaagatgatgtaagcataaatccgcca

SEQ ID NO: 710387 - DNA, 1362 bp, Homo sapiens
tgccttatgttcatttagaatagaaaaattttaagataaaaatgtgatcttacctgcaaagtatatctgtttttgaagcagttagttaccaattctcctttagacaactgatataaccacgtcaattttcggccactgtggcggctggcgtagaaagctgtgaatcgctgataactacgttccaactagataaaaggacagcattatatggaatacagatctcaccacatcctacaggcagcgtttctaagtaaagcmcactgttccaagcttacagtacaaagtcagtgcttacataaaagtaaaatacaaacgccaggtgtctgcctctcttgtaaagcactttaagcactggaaggtacaatcttaaaaaaggtttgtacttcaagaccagcaggtccatcgaggtgttcattacacaactaattaggttctgctttacaagataaggaaacatgtctgtagagctgggacagacagcccacctttagacatccagacctgccccactgcacagggctcttccctgagtgttgcccccatggttcaccgtgatgcagccagccagcaggaaggccatctgcaggcctgtccccttccacagtgaaggctgccctgccccaccctccacttagcactaatgggatggcagacaaacccatccttacctctgacggcaaggcaaatgtacaagactgctggaagggccaggacccggagctcagcacttgaatgctgaaatccactgtgggacggaagagaggggagagtgaacattctggaatacattaattagtttataaactgaaaaattcaatcatttcagatgaatgtggattgctctttattaaaaagcacattaaataaaaatcctgcttgaatataaaattaagaattgaacattttattcaattaaaattagcaaaaagtgcaagagccagatactcttttcttccaaagagtgagagtcttcattttgcttccacctcggaattctgctgtcacacgcctgccctgcttcccttgctttccttttctgtcctgaatcactcagtccactcaagccacgcctgtgcttgccaggcccggcatcatcacagccccagactcatgcaaactcacaagcaggagaaaaccgctaacttcattatagtgtatgtttcacttattactgggaaacgccacacatggtctataaattataacagtaatttcatcttcgcagatagttaaaaagcccactggcaaaactgtccagttttacaatagaattgtcattctgatttgggaaaaataaaattctccatttttcatttaaaaagacaaagatgatcaaaagatgatgtaagcataaatccgcca

SEQ ID NO: 710388 - DNA, 1362 bp, Homo sapiens
tgccttatgttcatttagaatagaaaaattttaagataaaaatgtgatcttacctgcaaagtatatctgtttttgaagcagttagttaccaattctcctttagacaactgatataaccacgtcaattttcggccactgtggcggctggcgtagaaagctgtgaatcgctgataactacgttccaactagataaaaggacagcattatatggaatacagatctcaccacatcctacaggcagcgtttctaagtaaagcccactgttccaagcttacagtacaaagtcagtgcttacataaaagtaaaatacaaacgccaggtgtctgcctctcttgtaaagcactttaagcactggaaggtacaatcttaaaaaaggtttgtacttcaagaccagcaggtccatcgaggtgttcattacacaactaattaggttctgctttacaagataaggaaacatgtctgtagagctgggacagacagcccacctttagacatccagacctgccccactgcacagggctcttccctgagtgttgcccccatggttcaccgtgatgcagccagccagcaggaaggccatctgcaggcctgtccccttccacagtgaaggctgccctgccccaccctccacttagcactaatgggatggcagacaaacccatccttacctctgacggcaaggcaaatgtacaagactgctggaagggccaggacccggagctcagcacttgaatgctgaaatccactgtgggacggaagagaggggagagtgaacattctggaatacattaattagtttataaactgaaaaattcaatcatttcagatgaatgtggattgctctttattaaaaagcacattaaataaaaatcctgcttgaatataaaattaagaattgaacattttattcaattaaaattagcaaaaagtgcaagagccagatactcttttcttccaaagagtgagagtcttcattttgcttccacctcggaattctgctgtcacacgcctgccctgcttcccttgctttccttttctgtcctgaatcactcagtccactcaagccacgcctgtgcttgccaggcccggcatcatcacagccccagactcatgcaaactcacaagcaggagaaaaccgctaacttcattatagtgtatgtttcasttattactgggaaacgccacacatggtctataaattataacagtaatttcatcttcgcagatagttaaaaagcccactggcaaaactgtccagttttacaatagaattgtcattctgatttgggaaaaataaaattctccatttttcatttaaaaagacaaagatgatcaaaagatgatgtaagcataaatccgcca

SEQ ID NO: 710389 - DNA, 2143 bp, Homo sapiens
gcactttctggtatgttctaattgtgaaactaaaacattagattttgttatcaacaacataaattaccacctactgacttattctacctatcatttgcaagaatgctctgattttctgaggttttaaaatagtgcagaattgaggtagatttcatagtaattattctctcaatagaatgatgggtaaatagattaaataggcattatataatatatataatccaggcacagataattgtaattgactttatctacaaattttgttataaaaaaccaagtaaagttctaatgcttttagcaaatagtggtattgtataaccatagcaatcaggacagatatacagtatttggtcatttttcctaaaaaattatattcataaaaatatctttttaatgtttgccagagtaggggcatatgcttattttgggaggtatttacggctaaaattaactgaagtaaagaggagatagtttgtgattctgtgctcttgttgcttttacacacacacacacacacacacacacacacacagagttttctttttaaacaaatctgggctatatatttatcatttccctcaaagtagttacaggtacaaaaactgaaatactgaatggtcactgttgctctttataattctaattaaacaagggtttgccagctgttctgattgtcataaggcttccccaggatacaattatgctctggggtgttttaattctgtaacaatattaaaatataatctgtacagaagcacattttccactccattttcaaagcacacaattagattttccatgattttacttaacacaattctgtatgtccttctaggtataactattgtttagctgaaacttacttcttttgccttgattgggtgttgctccttctgtatttatatcttgtatgtctatttttgcttaaaccaaatgacaaatatcacagagggacttctttacagtgtcattagttagattgatgggaagatagattgatggatagaatttccattcctctgtgcaaggaacctgactctgtgcaaacagccttaagttgtaattatagattcactgtgatggactctagagaatttgctgcaagagactttttttttttgttatgaattgttcccttgaatgtaaaacctatgatagaagtaaattttcttaactggagaagccttatttcctccctttcttttctagttgtctttctttccttttcccctgcaaatgaggcctgcrgagaaaagcaccagaaataatggcataacaagaagggacactcaactcctgaataatggaatatgtatctttctggttgccctgctgtatgctcgtagcttgaaatcacagattgcaaggcatttctcaattttaccccgttacaatagtcacctttggcccctcctcatttcttgggatcagctcttctcctgtctctacttttgaatatctaagttgcgcatctggagtgtgttgctgcgtttggcttgtgggaatcacactaccaaagtagttagggaatgctaactacatcaagccctgaacagcatcttccctttcaatttgggatacatattgcttttctcaaaaaataaaactctttgacctgctccatactattagattagcacctacctctttctaaatttgaaatgaattctacatgtgttttttgaaaaactccctttaattaattacaggttcaataaaaggacaagtgagaatgtaccttgatgtattttctagagaaaaaaaaaacaaaaaccctattgaatctttcatcctgctttgaactaggagggtttaaatatcaagcctctttcgggataacaaaaaactaaactgagaaaggccagttagaataattttttctctagtgtggctaatttttagctctaatgtctgacttcttggaccttagacactgaaagatctatgcttgttagccaatgaaaagaagtacagtataattcatgagcatgcagtattgaaacatattcaattcaatcacacttagtaaagtaaaaagtttcataattttcagttccatttattttaataattgtgaaacagttataaatcatatgtcatgtagaaaggtaacattttctcctttaatgtagttatttctaaa

SEQ ID NO: 710390 - DNA, 582 bp, Homo sapiens
gtcctcggaagttgccttcccgtgagggtcattgccatccctgcccgggctgactgacggaagggccattcctgcagttgcagccacgtgccaggcatcgtttccccaggactggccctcccctgagtgccggctgccctcctggcggccgccacatctcccaaaccaaacccaccctccccagctgctccactcccctctccttcgaggtcttggtgacgggcacyaccccacagccctctccaggctgcatttgcagttgatgaacagtttagttagatatcagtgtgcaccggggctgtgcggtgcctgggagctttggaatgaggttcccagggtggccccagacctgcatcagctcaggaggctgcattctgatggctcttttgtgccaagcttcactttcctctagaaacacatcctctccgctccagcctaacacgggtgaccttgtcctgcccacctggcacaaatgcccatgccccagcccctccgtgttgttacttctctctgatcccacgacactcagacatccctggcctggtgccaccctgggcaggacctggccttccccatctggtg

SEQ ID NO: 710391 - DNA, 549 bp, Homo sapiens
ccccagaagttggacgtgtcctggagcttgtcccacccagatggagcatatgccgagctgggccctttctctctagagcatggggaaatcacggtccagaataagcctgtgaaggaggctccactgcccctctgcttcccagacacaggccagttgctacccggccaaggaacgctccttaccaatgaagtgacacatgtggcgtaagaagggaagaatctgggcttccggggaatcttctatccggatgtgcagaagcttgtcagcatcgcctgcaaaactacacggaaggaccacacaggtcatcaggtggaaygcagaatgcaggcatccccattgtggggttttcatcacagcagaagggccacagggaggacgctgagcttgtgtaagggggaatgtgcacaggtaactcaacctctcctggaaaaaaacatccaggctgggtgtggtggctcatgaataagcccagtaatttgggaaacagagatgggaggatcacatagcgagacccttgtctttttttttgtttgtttgagacagattccc

SEQ ID NO: 710392 - DNA, 637 bp, Homo sapiens
gaggcaggagaatggcgtgaacccaggaggcggagcttgcagtgagccgagattgtgccactgcactccagtctgggtgacagagtgagactccgtctcaaaaaataataataataaaataaaaactaaagggaagggatagcattaggagatatacctaatgctaaatgacgagttaatgggtgcagcacaccaacatggcacatgtatacatatgtaacaaacctgcccattgtgcacatgtaccctaaaacgtaaagtgtaataataataaaattaaaaaaaataaataaaataaatttaaatattatataaaaaataaaatgaaatataaatcagtagtttctctttacttacaagggccctgtatccatggagacattgacatgggctttgattttcaagtccttctgaatcttggggtcacaggcttgactgaaattgccaacgaagaccttccctggcacratttcaatggggtatggctgaaatgcatccagttcctgaagtgtggagggagaaaggcagctatgagcatattcctcagggaagagggatgtctatctcttgaaacacagctcagcaaacgagcgtaaaagggcagttccaggacagtgaatgtgacggagatccagac

SEQ ID NO: 710393 - DNA, 651 bp, Homo sapiens
taaagcaagcatatatattttgaatgtgtaataatccagtgataaacaagagcagtactttaaaagaaaaaaaaatatgtatttctgtcaggttaaaatgagaatcaaaaccatttactctgctaactcattattttttgctttctttttggttaagagaggcaatgcaatacactgaaaaaggtttttatcttatctggcattggaattagacatattcaaaccccagcccccatttccaaactttaagaccacaaacaagtaatttacttttctgaacattggttttttctgtaaaatgggaattataaaatagactttgcagactcttatgagattaaataagataatgtatgaaattctttcttcttttttacttttttttcttttttgagatggagtctcaccccgtcacccaggctggagtacagtggtgcaatcttggctcactgcaacctctacctcccattcaagtgattcttgtgtctcagacttcggagtagctcagactaaaggcatgygccataacgcccggctaatatttgtattttcaggagagatggggtttcaccatgttggccaggctggtcttgaactcctggcctccagtgatgcaacagccttggcctcccaaagtactgggattacagg

SEQ ID NO: 710394 - DNA, 606 bp, Homo sapiens
ggtgatcaacaatctgttgaaataatatattcatatatgaggaaagaggaactctatttccttttcagttttttgtttgtttgtttgtttgtttttttgagacagagtctcactctgtcacccaggctggagtgcagtggcaccatcttggctcactgcagcctccgcctcctgggttcaagcgattctcccgcctcagccttcccaagtagctgggattacaggtgtgagccaccatgcctggctaattttttgtgttttttcgtagagatggggtttcatcatgttggccaggatggtctcgaactcctgatctcaagtgatccagccacctcggcttcccaaagtgctgtgattacaagcatgagccactgtgcccggcctcagttcttaattaaacactgagcatcaaatatttttgtttaagtaaaattacatatgcattttaccctttaacccagaaattccactttagagttactcacatgcctattcagttcagtactatttgtaataactgaagatgagaaacaactcaaatatccatcaatagggagagggatgatygtgtcactacactccagcctgagcaatagagtgagaccc

SEQ ID NO: 710395 - DNA, 2615 bp, Homo sapiens
atggtttagccagccctacaggtgattctaactcatgctaaagtctgaaaaccattagcctatattatccaggctctttcattttgtttccagttccctgcagctctaattcattactaacagaggaggcaggcttttattttatcaaaattataatcataaagcatacttctcacaattaaaccacaaggggggtgtcttttagaaaatatggcctacagaaggaaaaatgagaacatttagccgaagaattagatttttttttcttttttttcttttttttttttttgagatggagtctcactctgtcacccaggctggagtgcagtggcctgatcttggttcactgcaacctccacctcccgggttcaagcgattctgccgcagcctcccgagtagctgggactacaggcatgtgccaccacgcacagctaattttgtatttttagtagagatggggtttcaccatgttggcgaggctggtctcgaactcctgacctcaaatgatccgcctgcctaggccttccaaagtgttgggattacaggcatgagtcaccatgcccggcccaaagaattagaatttttaccaaaactatagccctctattgctatctattgtactcagtgttaaggctacaatacagtccttaaccttgagaatcttggaagaagacagcctgggcaataaattattatcaaacaatgtaatgaatcctatatgagtatagaacacatttatgaggatagaatggagataattaattctgcagaagacttggtttggatggacaggaaaagctttagaaagagagggatgtgcttgaatgagcctttataaatatattactgtattattattattttttgagacagggtctcattctgttgcccaggctggagtgtagtggcgtgatcatagctcctcaaaatcctgggctcaagtggtcctctcacctcagcctcctgagtagccgggcctacaggtgcatgccatcatgctcagctaatttttaagttgtttttttttgtagagatggggtctcactatgttggccaggctggtcctgaactcctggcctcaagtgatcctcccaccatggcctcccaaagtgttaggattataggcatgaggcactatgtccagcctctctattttttttgaaggtagaagaactacaaaagctagcctgggtgtggtggctcacacctgtaatcccagcactttgggaggttgaggtgggtggatcacttgaggccaggaatttgagaccagcctggccaatatggcgaaaccccgtctctactaaaaaaatacaaaaattagctaggtgtggtggcatacacctgtaatcccagctactcgggaggctaacgcacgagaatcacttgaacccaggaggcakagtttgcagtgagccaaaatcgcaccactgcactccagcctgggcgacagagcaagaatctgtcgcaaaaaaaaaaaaaaattattttaataaagagtacttattaattaagtccccactaatctagctttgatttgattaagggatcctatttctaataaatcccaaaatccagaattgagtcaatggccaaaagacaatatgaataatacacctaaagattcctaccattaatcacattctttgaaccattattgctcaagttcagcttcagctgctgggtacattcacttcatctgtacaatcaatgatgtgtctttgaggttaatgtgaatataaaaattaatttctgtatgccagaaatctattcagcattttaagtgtatagattctttctcgcaaagttacactctaagcaaaaacgaaacaaaaatctatgactgagatttaaaaacaacaacaggccgggtgcagtggctcacacctgttaatccccgtgctttgggaggccgaggcaggtgaatcacttgaggtcaggagtttgagaccagcctggccaacatgatgaaaccccgtctctaccaaaaatacaaaaaattagccaggcctggtggcgggtgcctgtaatcccagctactcaggaggctgaggcaggagaattgcttgagcgcacgtggcggaggttggaatgagcagagatcacgccattgcactccagcctgggcgacagagcgagactccatctcaataaataaataaaccaacaaacaaaataaaaacaacataacagaggtatgaccaattgctgtcattcagcttttcatgccccaagatagccaaccaactgtaaatgaattcacaatacatcattcttttccatcctagctcaagatataaaatatcaaactttagagtcccttgaaatgaaatccaatattcagactgatgaaaacaaaaagggctgtgtttttgcttactaagtcacagtttctaaataactcaaaaagacataggagagactaatgaatggttgagtgacctatcagtttagtaaaatgtatttggaccattgcatgatatgttattctcacattaagttaaaactttatctagggtgttctgatgcatatcttatggcataatatacaaacatccccttacatcaaaagctgaaaacgatgacacaaaacttgtacatgaatgttcacagca

SEQ ID NO: 710396 - DNA, 859 bp, Homo sapiens
cataaattactgtctattatcactaagctgttgtgaacaaaacctcaaaaaagttgaattggtcataaacttaaaaaatgaatgcatgcaaaatggtcagttttgcatgactcatttgagaatgaaggataatatacccactgtaatgtaaattctctccatgcggagtgttgttgtcttactctcaatatattccatggcagggacatttaatggtacaatacaaatgcaaacatttaattctttctgccaaacactcaatggcaatacatcacatcacacactaagcaaagctaggcaagaaatttgctatatagttaacagtattcaaaattgttataatatattcttttattttcttcactccttatccttatccttatcttcactccttttttcagcacataatacttttgttccactgatgaagcatataaatataatgtcacttctttctctgatacacatagctaattttatttttagtgagagtaaacatataggtgtatcctaaatctgaactacarctctcaacttctagcttccaaatcacaagcaaattagaaaagaaatcttgatctgtttttatcttttatagaaaaagttgaattgttaactggtttcttttgtttgattgtctctaaactcaagactctacaggctgaaagataatttcttcttggttgctcctcacacttcctatctttcctgttcttttaacattctaggtcttgtgacaaaatgctgcttaattctctatgaaatgatatcatatttaaaagtgttggcaccactgaagtgaacagcaatctgtgttaatgtggccagggtaaagctaaatcactgtggcctcttttgg

SEQ ID NO: 710397 - DNA, 634 bp, Homo sapiens
tgtgcagctaatgtttgtattattagtagagatggggtttcaccatgttggccaggctcatcttgaactcctgacctcaggtgattcgcccaacctcaacctcccaaattgctgggatcacaggcataagccaccatgcccggccaaattctgggttttcttattgtcgtgaaacgtagtttgtattgtcatccttttaaaattgttggttatttccagtttttcgtgactcattcattagataacaaatttatagttatcaatggctatgataaatgawtatgtacttataatttttaaaacttaactacaataaagcacaatatagtgctactcaggtttcaggtttaaaaaaattagactgagtttttgtttactgataaaaattccagggtttcaaacagctgtattgctgttaatgaaatttacaaattaagtttgcctgtttgacttttaccatgtcacagagaaataactaaatgaattttcaccagatttgggtagtatgtttgagatggcctgactcaaagtgtaggctatgtggggtgtgataataatttactgagctcttactaagtgctggcactcttataagtgctgtctgtgtaattaactcacatattccttaccgctc

SEQ ID NO: 710398 - DNA, 593 bp, Homo sapiens
tgagaggccaaggtgggtggattacttgaggccaggatttcgagaccagcctggccaacatggcaaaaccccgttgctactaaaaatacaaaaattagccaggcgtggtggcacatgcctgtagccccagctacttgggaagctggggcatgagaacagctcgaatccaggagatggaggttgcagcaagccaagatcacaccactgcaccccagcctgggccatagagcgagactctgtctcaaaaaagaaaaacccagcatatcctgagctactttgacatttctcctcctcctctactttgtctccctttactgtctctggcactttctccaatatcagactgagcatagtaaaagcacaggagaaaaatgacaaaaaggaaggtgaactatagtacactatatggtttggctcaggtatcagtrgtatttgcatagtcgtaataagttgaaaccttgaatattgacatagcaaaagaattcataactatatggacagtgggaggaagggtttgggggcaaggtgcatttgtgagaggtagtcttgataggcatagagaaaaaatagaaatgactaacatcagtgagcca

SEQ ID NO: 710399 - DNA, 593 bp, Homo sapiens
tgagaggccaaggtgggtggattacttgaggccaggatttcgagaccagcctggccaacatggcaaaaccccgttgctactaaaaatacaaaaattagccaggcgtggtggcacatgcctgtagccccagctacttgggaagctggggcatgagaacagctcgaatccaggagatggaggttgcagcaagccaagatcacaccactgcaccccagcctgggccatagagcgagactctgtctcaaaaaagaaaaacccagcatatcctgagctactttgacatttctcctcctcctctactttgtctccctttactgtctctggcactttctccaatatcagactgagcatagtaaaagcacaggagaaaaatgacaaaaaggaaggtgaactatagtacactatatggtttggctcaggtatcagtagtatttgcatagtcgtaataagttgaaaccttgaatattgacatagcaaaagaattcataactatatggacagtgggaggaagggtttgggggcarggtgcatttgtgagaggtagtcttgataggcatagagaaaaaatagaaatgactaacatcagtgagcca

SEQ ID NO: 710400 - DNA, 1581 bp, Homo sapiens
tgttataactactattttaactacaagctatccgagacacaaaaatgctagataaagtaagatccaaggtcacgttcagccactaagtggtagagaaaggattacaacccaggaagtctaggtttcagaatcttttaagcctaaacactatactactatacttcctcatgatgacacctggccatacctttgcagatgcaataaatygaacaagtaactattatatgtctacataactgaagaagtttatatgctgagaaacaatcccacaggctaaaccactgatgaataaaggcctgaagttcaggtcaataattcatcctttcatctacccttcttaccttccacctgcctaaatacacttacctcctttccatcatatggaatagtacacggaacaaaattcaaaaagtaccaaggagaatataaggaaaagtaagtccctgtcacctcactcttgcttctctcctcttctccctagaggcatctactattagcaatagaccaaaaaaaaaatattttgaacagaatatttaggtcataaatagcattgaaaatcatgcaacaaatggaaagaaatcaatctgccagacccagaatgaaaggctagttgtggctaagcaaacctctcagaccctgggtggccaattaggctgttatttatcagacactgcctcaacaatatgcacattaagataatttatgaaaggctcagggaaatgtttttctagtcaataataattggtcaggtgatcattcttaactcacacacccaaaacaaagtttcttgtggacttgcaagtcactttcgttttcctggtgatttttaatgaacaaaaaccttcaaagaagatgtacaatttttctaaacaaaatgtttttggcctctactgcttgctgttatccctccttattttccaatgcccttctccttttcttcttccatacctctgatggcttactactaatatagaaaaggaacaagttctaggtctggaagcacggggtttccatttcattccactcccctaatttcagtaagacctttggcaagtaagtaccacaattcctcaaaactctgtcctccctagtctgtgaaatgaagctaagaccaccaacctttgtcatgctaaccaatgaaacaatgtttctgaagtcaggcctggtggctcatgcctataaacccagcactttgtaaggcccagatctttacaaaaaatctaaaaattagctgagtatggtggctcatgcctgtgggtctagctacttgggaggctaagtgaggaggatcacttaagcccaagagtttgaggctacagtgagttatgatctcaccactgcactccagcctgggagaccctctctctgaaaactactactactactgctactactactactactactactactactaacatagtatttgttatatacaaataataatactaatatactaatataatactactaataatactaatatatactaatataatagtataatactaatatatcttaatataataataatactaataacatagtatttgtggaaatacttggctcagaaaggcaatc

SEQ ID NO: 710401 - DNA, 1004 bp, Homo sapiens
tgtttaacacaatatctggcacatagtaagtgctgaagaaatgtttgctgaaatgaattgattctgaactgtaacctaagtataagtaaaggccacaagtatgccaattactgtgaggagctgcaaccaaaggggcacagtggagctactggagtcctcaagaatgaattgtggatctcgacctgtagacttcaaataacattaaagggattcaatccatggaagacattatcaaaggtcccctctcctgatccccagtagccttaaaccctttggctctcccagatattaaatgcctcaactcattttgaattaacttaacccctgctaactccaagatgctgaatttagaggatgtaacttggccacttcctaccatttctcctgtttttgcatcacagaagatctgctgtccaggcagatacatttttgagaaaagaattggggtcttgtgttctgtgctggggaaaggtagtagcactcaacagagacataaaaatataaatctcaacctccttacatattaaatggacagcttcctttctccccaattcccagtgctcaccagggtcattactctgcaattgcccaataatgctggctgctccagaagtcccttcacttgagcaagagcagctggttctcgtccctacagatcctatctttcttttcttttctgagacttctatttagtgctgaggctaatttactatcttctataagaactggccagagacccctactsttttcattgatgaatatccaattacaggaaaaaccaatgatactacttcaaagactatttttaaaataaagcaatcatttggaaatcatcttcaaaaagaccactctttcccaaaggactcatgatagtgataatttttttgtgtggattcagcatgaacctgacaaaaggaaatccttttaatatagcctttaaaggtgtatgtaaaattggtggggtaagggaacttaaagcacaatctcttttttttactttcatg

SEQ ID NO: 710402 - DNA, 2353 bp, Homo sapiens
ttacaggataacaggggcctggatacagacgctatctactacactcatatgttctaaccaccaatttaagctaattgcgctcccaaagcaattcaatttgtttatcacaatatgttctgctgaccctcagtgttttaaggttctgagagctattgtctttgagatatccattttgttttaaaatctagaacagctaagttcttttctactaataatcataaacatgttctcttctatcagataaagtagatgtcagatgcttcctctgcttaactctcaggagttgtggagaaagccaaggctctgctctcacagatccagggccagtggtgcccaatcttggatgcacgtgaaaatcacctggaaactttaaacatcctggtgcctgggttacacatgccccgaaaggttcagatttaattggtctggatgtagttgggcatcaagattttaaaaagctctccagggattctaatgtgcagccaacattgagaatactgatctaggtcaatggttctcaaagcagagttccagaccagcagcttcagcaccacttggaatctgtcagaaatacaaattcttgagcccccacctcagatctattgagttagaaattctgcaggaggagttcggaaatcagtattttgttttgttttgctttgtttctcgctctgtcacccaggctgcagtgcagtgatataatcatagctcactgcagcctcaaactgggctcaggtgatcctcccacctcagcctcctgagtagctgggattacaggtgtgcgccaccatgcctggctggaaatcagtgttttaacaagcaatgtaggtgattctgatgcatgctatggtttgaagactactgctgtaggctttcttcctccttggaagaagcttatctgtcaaatgttattgaccctaaggacgtctggtctgaggccagtgaaagttctctacagccataggtaagttacacaggaagctttgggtgctcacttttccactcagccagtgagctggccctgcagaaggtgctaggaatgcttccatctagtgtctgcacactactatgctatccttcgtggaggctgctcatcaacctttgctgcctactccactgtgccttcccttcctgccatttattttattctctgacaagtggttttgacccataatggctgacaccaggtctgctgcgatggtgctagattgctgcaaagaaacaaaaggaagaatcccactgtgggcattaaaacacaagttttacagccatttgaggcactttgagaaaaagaaggtaaacatcagtatgcaattagaagtgagtggaaggtctttggcatcacatccgaggggtgggttgtggggaggcagttcggagaaactctgacccagacttgtagtgtttgtggctgcagagtcacatgtcttagcaaaagaaggcagccacaatggccaggtgggcactgaaggaagctgtcaccatttttgactcttctttctggcagtgtgaacttcaatggcccacataatttttttgacctaatgtgtaaacattttacctcatgtgtagaaatagggacaatggtactacctcgtggggttgttgttagaatcaactgagatcctatatgtgaaaatacccagcacagcaatagtaaggggtggttatttgataagcctcccatgtaccctccatgaaattataatgttgtctgtagtgaatttttcagaactagggattagtataaaactagggggcaggtggtttkttcacagatgctcattacatcccggttccagaaaatccttttcctcatggcatctttcctccctttcaagctaggatcttgacctctctttaccctcccgaaactcatcctcgcttattggtcagtcagaagagggctaaggtattaatcaagattagggtgaacatgacttacaactatttcatgtgttagtgtttcagagtgagatgcaatgtaacagttgttaaacatcttttaaccccaaggagggaagggagcccatgtatattgagtgccttcctcataacaggaagtttgctttcgtattcacagtcacttaatcctcagaagaggtgctactattatcctcattttaaagggaaggaaaccaatgagagtgaaatttaagaaacagatcagattattgggaaatggagtattcttcccagagctcctcaaaatatcatgtagctttcggactttgatttctcatagggttggcatagatcactagaagaatcagacagaaaaaagtttgttttcaaatgcaagttatttctttgcctaattgtgaagcattacagaatgattggcaatagccca

SEQ ID NO: 710403 - DNA, 2353 bp, Homo sapiens
ttacaggataacaggggcctggatacagacgctatctactacactcatatgttctaaccaccaatttaagctaattgcgctcccaaagcaattcaatttgtttatcacaatatgttctgctgaccctcagtgttttaaggttctgagagctattgtctttgagatatccattttgttttaaaatctagaacagctaagttcttttctactaataatcataaacatgttctcttctatcagataaagtagatgtcagatgcttcctctgcttaactctcaggagttgtggagaaagccaaggctctgctctcacagatccagggccagtggtgcccaatcttggatgcacgtgaaaatcacctggaaactttaaacatcctggtgcctgggttacacatgccccgaaaggttcagatttaattggtctggatgtagttgggcatcaagattttaaaaagctctccagggattctaatgtgcagccaacattgagaatactgatctaggtcaatggttctcaaagcagagttccagaccagcagcttcagcaccacttggaatctgtcagaaatacaaattcttgagcccccacctcagatctattgagttagaaattctgcaggaggagttcggaaatcagtattttgttttgttttgctttgtttctcgctctgtcacccaggctgcagtgcagtgatataatcatagctcactgcagcctcaaactgggctcaggtgatcctcccacctcagcctcctgagtagctgggattacaggtgtgcgccaccatgcctggctggaaatcagtgttttaacaagcaatgtaggtgattctgatgcatgctatggtttgaagactactgctgtaggctttcttcctccttggaagaagcttatctgtcaaatgttattgaccctaaggacgtctggtctgaggccagtgaaagttctctacagccataggtaagttacacaggaagctttgggtgctcacttttccactcagccagtgagctggccctgcagaaggtgctaggaatgcttccatctagtgtctgcacactactatgctatccttcgtggaggctgctcatcaacctttgctgcctactccactgtgccttcccttcctgccatttattttattctctgacaagtggttttgacccataatggctgacaccaggtctgctgcgatggtgctagattgctgcaaagaaacaaaaggaagaatcccactgtgggcattaaaacacaagttttacagccatttgaggcactttgagaaaaagaaggtaaacatcagtatgcaattagaagtgagtggaaggtctttggcatcacatccgaggggtgggttgtggggaggcagttcggagaaactctgacccagacttgtagtgtttgtggctgcagagtcacatgtcttagcaaaagaaggcagccacaatggccaggtgggcactgaaggaagctgtcaccatttttgactcttctttctggcagtgtgaacttcaatggcccacataatttttttgacctaatgtgtaaacattttacctcatgtgtagaaatagggacaatggtactacctcgtggggttgttgttagaatcaactgagatcctatatgtgaaaatacccagcacagcaatagtaaggggtggttatttgataagcctcccatgtaccctccatgaaattataatgttgtctgtagtgaatttttcagaactagggattagtataaaactagggggcaggtggtttgttcacagatgctcattacatcccggttccagaaaatccttttcctcatggcatctttcctycctttcaagctaggatcttgacctctctttaccctcccgaaactcatcctcgcttattggtcagtcagaagagggctaaggtattaatcaagattagggtgaacatgacttacaactatttcatgtgttagtgtttcagagtgagatgcaatgtaacagttgttaaacatcttttaaccccaaggagggaagggagcccatgtatattgagtgccttcctcataacaggaagtttgctttcgtattcacagtcacttaatcctcagaagaggtgctactattatcctcattttaaagggaaggaaaccaatgagagtgaaatttaagaaacagatcagattattgggaaatggagtattcttcccagagctcctcaaaatatcatgtagctttcggactttgatttctcatagggttggcatagatcactagaagaatcagacagaaaaaagtttgttttcaaatgcaagttatttctttgcctaattgtgaagcattacagaatgattggcaatagccca

SEQ ID NO: 710404 - DNA, 695 bp, Homo sapiens
caaatctacttccagactgtaaactgctggttggcaatggctaagctctactcaactctgtctctgtattgagcatcctgcatggtgccttgtatgtaatatcttttcagtaaatgtttgcggaaatgtctgcatctatgaaatagttttttgaaatatcacattccagagaggttaagatgcactatttcagtggttctgaaactttatcatgcatcagaatcactcagagggcttcttataccagactggtgggttctacatccagaacttctgattcagtaggtctggggtgaacaggctggataatttgcatggctaacaakctccctggtgatactagtgatgctggtccagagaccacacttggaggaatgataaactatctttttttttccacattttaatatctcatatctatctaaatctgaaacttgttgacatgtcagtttagttgacaactttttgctttcatactagtatataaaataatggctttacaatcaacagcatcttagattaaatgaaacgtggcaggcttcctgttacatatttgaatctgtattataaaacatcaattacctcataaatgaattaatgcccttataaaagggctcaagggaactaactagctcctctttgctcttctgcttttccatcatgtgaagacagagacatcttagaagcagagacca

SEQ ID NO: 710405 - DNA, 695 bp, Homo sapiens
caaatctacttccagactgtaaactgctggttggcaatggctaagctctactcaactctgtctctgtattgagcatcctgcatggtgccttgtatgtaatatcttttcagtaaatgtttgcggaaatgtctgcatctatgaaatagttttttgaaatatcacattccagagaggttaagatgcactatttcagtggttctgaaactttatcatgcatcagaatcactcagagggcttcttataccagactggtgggttctacatccagaacttctgattcagtaggtctggggtgaacaggctggataatttgcatggctaacaagctccctggtgatactagtgatgctggtccagagaccacacttggaggaatgataaactatcttttttttyccacattttaatatctcatatctatctaaatctgaaacttgttgacatgtcagtttagttgacaactttttgctttcatactagtatataaaataatggctttacaatcaacagcatcttagattaaatgaaacgtggcaggcttcctgttacatatttgaatctgtattataaaacatcaattacctcataaatgaattaatgcccttataaaagggctcaagggaactaactagctcctctttgctcttctgcttttccatcatgtgaagacagagacatcttagaagcagagacca

SEQ ID NO: 710406 - DNA, 643 bp, Homo sapiens
ttctcggatgagcatattaagcacttcttcatcctttgttagatctgagtagtatttatttgkaaggatacgcttaactgaaccagtcctccataggtggacaattaggttgtttccaactcttgactgttataaactgtgctggtttgaacagccttgttatttctctgtgagttgggtaaatccctataagtgcaatctgaggtcagagggcatatgatttgcagttttgatagatattgccccactgcctctactgagtttggacctgttcatacttcaactgtcagtgtatgcagggcctgtttcccatcctcatcagcccagcacattgccacacatttgtgttttaaacaggctttggaatgcacccctttcataattagggagcagacagaattcccagggagggtgctcattaaatatcatgtcaagacctcaaagctcagagcccagccatgtggcttcgtgcttggtagccatgcagccttggcagagtggctggatatcagttcgtcagtagtgatccatttgtaaaatgaggatagtcacagtaacagcctcatggcttcctcagctagtccatgtcaagggttggaacaatgctcggtacatagagaagccctcaacaaataccgacttg

SEQ ID NO: 710407 - DNA, 643 bp, Homo sapiens
ttctcggatgagcatattaagcacttcttcatcctttgttagatctgagtagtatttatttggaaggatacgcttaactgaaccagtcctccataggtggacaattaggttgtttccaactcttgactgttataaactgtgctggtttgaacagccttgttatttytctgtgagttgggtaaatccctataagtgcaatctgaggtcagagggcatatgatttgcagttttgatagatattgccccactgcctctactgagtttggacctgttcatacttcaactgtcagtgtatgcagggcctgtttcccatcctcatcagcccagcacattgccacacatttgtgttttaaacaggctttggaatgcacccctttcataattagggagcagacagaattcccagggagggtgctcattaaatatcatgtcaagacctcaaagctcagagcccagccatgtggcttcgtgcttggtagccatgcagccttggcagagtggctggatatcagttcgtcagtagtgatccatttgtaaaatgaggatagtcacagtaacagcctcatggcttcctcagctagtccatgtcaagggttggaacaatgctcggtacatagagaagccctcaacaaataccgacttg

SEQ ID NO: 710408 - DNA, 643 bp, Homo sapiens
ttctcggatgagcatattaagcacttcttcatcctttgttagatctgagtagtatttatttggaaggatacgcttaactgaaccagtcctccataggtggacaattaggttgtttccaactcttgactgttataaactgtgctggtttgaacagccttgttatttctytgtgagttgggtaaatccctataagtgcaatctgaggtcagagggcatatgatttgcagttttgatagatattgccccactgcctctactgagtttggacctgttcatacttcaactgtcagtgtatgcagggcctgtttcccatcctcatcagcccagcacattgccacacatttgtgttttaaacaggctttggaatgcacccctttcataattagggagcagacagaattcccagggagggtgctcattaaatatcatgtcaagacctcaaagctcagagcccagccatgtggcttcgtgcttggtagccatgcagccttggcagagtggctggatatcagttcgtcagtagtgatccatttgtaaaatgaggatagtcacagtaacagcctcatggcttcctcagctagtccatgtcaagggttggaacaatgctcggtacatagagaagccctcaacaaataccgacttg

SEQ ID NO: 710409 - DNA, 866 bp, Homo sapiens
tctcccacctctaagacaccaagaccaacctctcttcttcctcctcctccttaggctactcaacatgaagacaacaaggatgaaaagacatttatgctgacacacttttacttaatgaatagtaaatatagtttctctttcttatgatttttttattaacattttcttttttctagcttactttattgtaagaatgcagtatataatacacataaaatataaaatatgtgttaatcaattgtttatcagtaaagctttcagtcaacagtaggctattagtagttaagttttgggggagtcaaaaattatatgcaaatttttgacaacatgggggaagagttagtgcccttaacctctgcattctccaaaggtcaactgcattttgtaatattgmctttattgaatgaatacaacttttctttgtcccgaattttttatcagccaggattattgatgccatgatttgtgtatgatcaatctcctttaggaatgggatgaatatgtagtagtattaacctaagtatggaccagcatcacctgggagtttattggcaatgtagaatctgggacccaccctagaccttctgagtcagagcctgcattttaacaagaccccagaatgcacccatcttctgaatcttttcctttcttttatgcatgggaaaacagacaaggaaagttaaagaactcatccaatataggaaaacagtatctagcaggggaaaaagacagaaccaggcctccctgtctaagactttctgttctatcagactatatttctgaatggttgtctaagcttttgttttattttgtttgaatataaggaggcacttcctctttatagagcaatttcttcggacaatagg

SEQ ID NO: 710410 - DNA, 1697 bp, Homo sapiens
caagataggccaaggtctgaggaagttaaaagaagttgacaggctgcctttgacttctcttaaatgtgtttatatatatatatatatctgtgtgtgtgtgtgtgtgtgtgtatttatgtatatatgtatatacacacatatatacgtagacacacacacacatatatatatatatactgcagtgaaccatgatcacataataaaatatatatatttcatttgatttggggcacataaccttgttattttacaaacaggttcttcttaccttatttcacatcatttctatagatgactcttaagaaattatattttaagattctttggttcttgggtaatgttattggatttttttttttttgctttgtttttaattgaggaatgggaatgacctctaaagcaaaaacagaagtttcagaattactaatgatttgttcacaactgctgaagatacaggaaacttggagaaacaatggtgatgtccctgttagtgtgtgccattgcaaatagaaccattaaaatgcacttgtgagatttgtattagcttttcttctatttttataaagactgttcttccctaacatctttgtgctaagcagggtctgtgattcttctcatatatggcaattcctttttacctcttctacattgtaatttttaggtcttttctgagttggttttcaattcattaatttaaaacaccaagatgtctcttactgcctttccagaaatgcatattttatttggccacatacctctcaagacagattcaatgaaacttggaactgctgaaaacatttactaatctttgattgctatttgcagttggaggtaactgtctcctacatccttttcccactcaactcagagaaaattaaaatggacagaaacaatttctagaaagaaagtggaaaaatgaacaaaggagttgaaaacgtatatcctctttttttacattaagactttttcacattgctttaagtaactttctgtgttaacaatagttcaaatgtataatatgtacacattcaaattatacaaagaaaatcgtataaagtcccttaatttgactgataagaaaaaaagctgttttgggtactcattatgtacccaatatatatgagtcaattgctttttaaaactatagtgatcagaggtaaaattaatggatacaaattgaaaaagagttttaagatcacaatacactaaaacctacaaaacatcttgttttgccatgggtttgtcaataggtaaaatgtgtaaaccattataatataactgataatgcagtattattctttttcacatctgtgcaatgaacattttgttttaactctaagtaaaagctacctgaaaacaaaattcaggggcatatctcacactttagggttctatgttcagatattattttcttccattaaaaacttagagactgcggtgtgacaccccatggatagtctataataaggtttgtttgtttgtcacacacaatgtattaaaatttaggaaattgtaccactttatttacatattctgygttacttgaaaactaagtgacagtaatactggattctcatttcgccaaggcagtatttgctgagaccaactgggtcttgctttccttagctagaatatacattactaaatttgccataagccgctccattccttactgtttttacagttgactgagttcg

SEQ ID NO: 710411 - DNA, 2174 bp, Homo sapiens
tattatatggttctgaaataatctgttttgtgattccttaatcttcaataaaaatataaatttcagaaatttatatatttgtatatatctatagtttgaaaatttacgagtataaattttatttataaaactatgttaatttttcaagtgaattttttctagtttacgtttatcaatttatgaattttctgaagatgggaccatttaaccattcttttaatagcgattacacttgattacatttttttctggcttattaatttgtgttttgtatctatttttaaaaatttgagctgaaaactaatgaattttaaaacttgtgaaatgcagctatgcttaaaagaaaacataaatttaagcttgtgtattagaagaaagtacatgctgaaaatacagaaattatctaactctaagaaagaaactaaataaaaatgtgaaataaaaaattaaagaaatagataacaactaatgatattgaaaaatatacaaacaatggacaagatcaattaaacagttgattctttaaaattactaacaaaactgatgaggaaaataaaactactaaaaagattaaaagtatcaagaactttaaaaggtgtaattgctgtttatagtctgtattactataaaaattttaaaaaggtataaatttatgccataactataaaaatataycatgtaaatatttctagaaaaaaatgcattttactgaaactaactcaagaagatttgaaatctcatattattataactattaaaaagtgtagtgcataatatcaaaccttctcacaaaggaactattgaatcaggtggcattactagtgaataaataatgttaatcctacaaatactactacagaaaataaagctttgacaagaccagcataaacttgttatctaaacacaattcaatttatacaagtgtaaatactcctaaagttacattgtagattcaatgtaatcataatgattcaaagttttttgcgtttttatgtgcaacttgacaaatgattttaaatttatatgaaatttcaaaggccaagagtagagatttttaaaatatgagaataatgagggaaatgtgctttactgacaaattgaatttaaataaagtaggtgaacaataaaagcaaacaagactgcagaatattgacttatcctttctcatagaagaatagagaaaatatttttcacactctgaatgataattttacaaatcaagtcattcttgtcatactcaattaatcagaatcgaaagtcagttggggcatatagcactgctccaagaactgaattctctgccagctgcagaaacagtctgctgcaaccttaagaccagttttacctagtagcgggttaaaccacctgccatgactctaaaattagtatcacctatcaccgtcactcaccaatcagagtttactgactccaaaaagattcgttagtgcccatgagctttctttcaaaaccatatgcaatatttatcttcctaataaaaccctaactttttctttgctcttcagacatatcaaagaccaccagatctacgtgtatgctctgaattgcaatttttgcttctccaaataaaatgttaaatttagacattaatccctacaatgtatgttgagtttgacaatactatttctacatacttaaatttatttatttcaatttttttacaagaacaccaaacatcctttattagcacaaaaaagtagctgtaacaaggcacatcaagcagaaacatgcattactagtcaaagggttagtggtgtattcaaatacagctatgctttttttttgtagccttggcaatagccatagggatgtaaaaacacattttgtagcagctagtgtagaaaccatggagcactcaccagtagtacagagcacagtcacaaaaagacataagaatggatttggctattttactgccaaatatctagaactgtacattcagttctcttacttagaagtgaacactagaacttgaaataacttcaagaacagctcactccagtaatgatacatattattctaaatgataaaaaggagctaagcaatttatggatataatgtttatgcagtaccttttaaatctaaattttagatttcagatttcccactaagaattaactgcactgagattctaaaaattatacttaattcagcta

SEQ ID NO: 710412 - DNA, 2174 bp, Homo sapiens
tattatatggttctgaaataatctgttttgtgattccttaatcttcaataaaaatataaatttcagaaatttatatatttgtatatatctatagtttgaaaatttacgagtataaattttatttataaaactatgttaatttttcaagtgaattttttctagtttacgtttatcaatttatgaattttctgaagatgggaccatttaaccattcttttaatagcgattacacttgattacatttttttctggcttattaatttgtgttttgtatctatttttaaaaatttgagctgaaaactaatgaattttaaaacttgtgaaatgcagctatgcttaaaagaaaacataaatttaagcttgtgtattagaagaaagtacatgctgaaaatacagaaattatctaactctaagaaagaaactaaataaaaatgtgaaataaaaaattaaagaaatagataacaactaatgatattgaaaaatatacaaacaatggacaagatcaattaaacagttgattctttaaaattactaacaaaactgatgaggaaaataaaactactaaaaagattaaaagtatcaagaactttaaaaggtgtaattgctgtttatagtctgtattactataaaaattttaaaaaggtataaatttatgccataactataaaaatatatcatgtaaatatttctagaaaaaaatgcattttactgaaactaactcaagaasatttgaaatctcatattattataactattaaaaagtgtagtgcataatatcaaaccttctcacaaaggaactattgaatcaggtggcattactagtgaataaataatgttaatcctacaaatactactacagaaaataaagctttgacaagaccagcataaacttgttatctaaacacaattcaatttatacaagtgtaaatactcctaaagttacattgtagattcaatgtaatcataatgattcaaagttttttgcgtttttatgtgcaacttgacaaatgattttaaatttatatgaaatttcaaaggccaagagtagagatttttaaaatatgagaataatgagggaaatgtgctttactgacaaattgaatttaaataaagtaggtgaacaataaaagcaaacaagactgcagaatattgacttatcctttctcatagaagaatagagaaaatatttttcacactctgaatgataattttacaaatcaagtcattcttgtcatactcaattaatcagaatcgaaagtcagttggggcatatagcactgctccaagaactgaattctctgccagctgcagaaacagtctgctgcaaccttaagaccagttttacctagtagcgggttaaaccacctgccatgactctaaaattagtatcacctatcaccgtcactcaccaatcagagtttactgactccaaaaagattcgttagtgcccatgagctttctttcaaaaccatatgcaatatttatcttcctaataaaaccctaactttttctttgctcttcagacatatcaaagaccaccagatctacgtgtatgctctgaattgcaatttttgcttctccaaataaaatgttaaatttagacattaatccctacaatgtatgttgagtttgacaatactatttctacatacttaaatttatttatttcaatttttttacaagaacaccaaacatcctttattagcacaaaaaagtagctgtaacaaggcacatcaagcagaaacatgcattactagtcaaagggttagtggtgtattcaaatacagctatgctttttttttgtagccttggcaatagccatagggatgtaaaaacacattttgtagcagctagtgtagaaaccatggagcactcaccagtagtacagagcacagtcacaaaaagacataagaatggatttggctattttactgccaaatatctagaactgtacattcagttctcttacttagaagtgaacactagaacttgaaataacttcaagaacagctcactccagtaatgatacatattattctaaatgataaaaaggagctaagcaatttatggatataatgtttatgcagtaccttttaaatctaaattttagatttcagatttcccactaagaattaactgcactgagattctaaaaattatacttaattcagcta

SEQ ID NO: 710413 - DNA, 3027 bp, Homo sapiens
gatcaaaacacattggataagcacccatacataagaaggatttgctgtatgtttttatgttctaagctaaacagacccaattctagctctttaaccgtgacatcataagttaaataaatatactaacaactccacgaaagcgaccaactcaaacattttattttatgtattggtacccgtagttctatctacaaaccatctgctgggctgaagccaaggctcatgctctgtcaaccagcacttcatatatttgcattggcagggacaacaccaagagcctatttatttctctgtaaggtatctgtcttccaacagctgttgggtagaacaatgcttctcaaactttatgtgtataggaatcaccgagggattttgttagaatgcagattctgggtcagtaggtctggggtgacgcttaatagcttacatttctatcaggctcccaggtgatgcaaattctgctctcctgggactacactttgataagcaaggtgggagatgactaagttttgattatggcttcgtagaccaatagcttgggtctctataagcataaaatggaagcctcctcttctgttcaattttgctttccctactactaatataattattaatttcatcaataaggataaaatttgaagtcaagttttayacaagtcttcatttagagtaagaacgagaatgcaaaaatctagacaaatacttgcataacattggtgtaggggcaaagcaccctactaaggacctggatttcaatcttattctacccttccataaaataaaaccatgaggccataagtatgggactgaacctctcttagcctcagtaccttgatctgtaaaatgggaactgaaaatactcaccacacagtattagcacaggatgaaataaaacatgcaaaaagcaccttagcacaacaggccctcaacaaatatgagtttcttctcttgctttctttgttatccaacattagtagcatgggttggatctagtaggacgacctcaatctgaggtaaaagagccagctgggtttgaatcgttgctctgctccttcttacctatttatctgtaggcagtcactcagctggcggttctcagatgcagacggtcagacccataccaagttgtctgtgtaatgatcacttgacaaaaattcagattcttctgcctgccaccctgtaattctcacacaacaggcttgagatttcagtttagaatccgtgttttcaaatgcctccctagcaaggattgaaaccactgccttcacctttagaacctcagatgccttgagcacagtgatgcccatgacaacagtgatgcccaaccacttactgcaatggggctctgacaacacggctcggtaaatggaaaaaggctaacactgtgttgccattgagacccctacacacaggatgagaggattaactcagtgacagcccttagctggagacactgctttccctgaatttatcctccattttacaactcaagcaataactggatccaaagcaactgcaagctccagttcctgatttgtttttctcttttaatcaccacaaataatcagtttgcttttcccaggcctctgggttgtaaaggagatggcttcattgactcttcctaccaggtcaatgaatgagtccatttctggttgcctccagatcctagctttctctgatacttcgttgcaaaatagaagagcaagtgcccagtcactacctggaaactcagtgcatagctagtgcagtaacttcatcaatcactatgaacagccttctcaatcagaagggaaacatttttttcttagatcaccactttatcttgcatcttttaccacttcccatctggtttaccttggatatgtatagaatccaagtaacaattgtctcaaaaagaaacatatatccctgccctttggttttagaggataaagatcccatttgcaattataaattttagatcaaacagaatagggattatgaaacatattcatgcaaaaggcagccacatttttatgcagagatctaggagcttttctcaaaagcatagaaggcattcccttcactgtttcctttattctcctctttcctttctgccctccctccctgccttcctctttgtcttctttccttccagtagcatttgtaattctataaactcattgaaatatttcttaacgaacaaaactattatttattcatcctcagtttcaaagcaacatgtgtcccttaactcctgtggtataatgagagagggacggaggaggcaggaggagaaaggggaagagggagagggacaggaaaagggagagaaagggtattatcagtgctctggtttccaatcctggagtctcacagttaatgaaaattagagaggagccctggtgtaagatgataaatggcaaatgatacttggctttcatggctggagagtaagagtggggggtgacaggaagtggccagaactgtggcaaacaaaagaagtgcatgctccctttgaaggtagagttgctgttcaattctaggctagagtggcaaataaaaaagggggattaacactgtcagactgtcaaaggtttcaaaaaaggccacacctgagagggccacatcttatgcaaaatgtcctgatcttttggggcttgctacagttttaaaattctataagcactgtgctggccaaaggaactataccagcaaggcaaatgtgggttgtgggtcaaccacttgcaaaccctcacctacatagtttctgtggctgggatgctggctggtcaccagagtctgcttctcttttttgtgggcactcatctgggccacaatttctccacctactttgtaattaggtatgaaatgatgactgagttctagccaatggaatgtgagcagaaagaacatctgcctcttatcagcaaaatctttaaggaagtagctgtgcctcctcatgctatctttccacttgtgccaactaggtgcagtcaatgaggccacaggggcagtggaaccacagtggggaagaagcctggatcc

SEQ ID NO: 710414 - DNA, 1491 bp, Homo sapiens
tcacaaagagcattgataaggagttgtctggagagccagacagccctcagcccacctggaatgctgcagacacccgtccttgcattctcagggcaggcagaactttcactgcagaacgtgcaagtcccagcgcttctcagagaccagaagcttggcgcaaagtgatgcctgggggacagtgacagcaagaaaaggaaactctgcctttctggaaagttctgagtttacttttttaaagaaaacatagaaaagtctttaaataaattattttttaaaactaccacatgagagataggaaaagatcatttgttgagtggtgatttgaacagccactgagggatgtggcggagcaagttaatgaggaaactcgtaggcttgtcaggcagtttcatgggtctagttgaagctggtgactatgaatttagaggctcgtcaaagttctcaatccatgtctgttcacctcccccactagactgtgttcctggagggcttaattcatcttgcgtcatcagcacctagctcggctctgatacaaagcagatgcccccagtgttagctaaactcagtggcaacgtctgcaatgtctgatgggttatttcctgggtctgccagaaatgaagtttattttctcacagttctggaggctagaaatccaagctcaaggtgttggcaggccagggctagggaaaaacctgttctgggcctctctcagagctcctggcagttactggcctgtagctgtgtaactccaatcttcacatgatggcattctccctgggtgcacgcctgtgcccaaatttccactttttataaagatacccaccatatcggatcaaggtcgctccctactccaatatgacctcatcttaacttaattatatcttcagttactctatttccaaatatgctcacattctgaggtactgagggttaagacttcaattctgaggggtcacgatacagcctataacatcggagcataaacactttaaataaatactacatttttcttttcttttcttttcttttctcttttcttttcttctcttttttttttgagacagagtctcactctgtctcccaggctggagtgcagtgttgcgatctcagctcactgcagcctccacctcccgggttcaagctattctcctgcctcagcctcccaagtagctgggactacaggcatgtgccaccacacctggctaatttttgtatttttagtagagatggggtttyaccacattggccaggcaggtgtcaaacttctgacctcaggtgatccacccatctcagcctcccgaagtgctgggattacaagtgtgagccaccatggccagccacatttttctatgagaacaaagtcatgtgaaaagagtaaagaatctccacatgtgaaaatcaccattttggctaaagtttagaagtattaataattaatttcatagcttaggcaaaatgtccattgttccaaaagtcatcatcaaatattca

SEQ ID NO: 710415 - DNA, 1491 bp, Homo sapiens
tcacaaagagcattgataaggagttgtctggagagccagacagccctcagcccacctggaatgctgcagacacccgtccttgcattctcagggcaggcagaactttcactgcagaacgtgcaagtcccagcgcttctcagagaccagaagcttggcgcaaagtgatgcctgggggacagtgacagcaagaaaaggaaactctgcctttctggaaagttctgagtttacttttttaaagaaaacatagaaaagtctttaaataaattattttttaaaactaccacatgagagataggaaaagatcatttgttgagtggtgatttgaacagccactgagggatgtggcggagcaagttaatgaggaaactcgtaggcttgtcaggcagtttcatgggtctagttgaagctggtgactatgaatttagaggctcgtcaaagttctcaatccatgtctgttcacctcccccactagactgtgttcctggagggcttaattcatcttgcgtcatcagcacctagctcggctctgatacaaagcagatgcccccagtgttagctaaactcagtggcaacgtctgcaatgtctgatgggttatttcctgggtctgccagaaatgaagtttattttctcacagttctggaggctagaaatccaagctcaaggtgttggcaggccagggctagggaaaaacctgttctgggcctctctcagagctcctggcagttactggcctgtagctgtgtaactccaatcttcacatgatggcattctccctgggtgcacgcctgtgcccaaatttccactttttataaagatacccaccatatcggatcaaggtcgctccctactccaatatgacctcatcttaacttaattatatcttcagttactctatttccaaatatgctcacattctgaggtactgagggttaagacttcaattctgaggggtcacgatacagcctataacatcggagcataaacactttaaataaatactacatttttcttttcttttcttttcttttctcttttcttttcttctcttttttttttgagacagagtctcactctgtctcccaggctggagtgcagtgttgcgatctcagctcactgcagcctccacctcccgggttcaagctattctcctgcctcagcctcccaagtagctgggactacaggcatgtgccaccacacctggctaatttttgtatttttagtagagatggggttttaccacattggccaggcaggtgtcaaacttctgacctcaggtgatccacccatctcagcctcccgaagtgctgggattacaagtgtgagccaccatggccagccacatttttctatgagaacaaagtcatgtgaaaagagtaaagaatctccacatgygaaaatcaccattttggctaaagtttagaagtattaataattaatttcatagcttaggcaaaatgtccattgttccaaaagtcatcatcaaatattca

SEQ ID NO: 710416 - DNA, 658 bp, Homo sapiens
acccaattatggatggctttctatggagctaatctcacagagaaggagcacctgctatccaggcagctttggcatggtttgcaaatcaggcctggtcctcttttcactccacatcctatctttcattgtgttctggttttatgtatttgttttcaatataaactgaaattcagtaagcatcagcaagactacaaagtatatgaaaatgaggaccctgaagacaaagtgttaataggccactctgtgtgtaactgagatgcatgactttttgaaggccacaaaaagtagttaaatccttccactttttaaagagtgactgatgaattgaaatggaaactttcttgccacatcttggaataattcaggaaastatttaagtgcctgccccttgacccaagactttttatacctcacaaggtaaagctgtgagaactttaaatcctgaagtgcaaatacatggtatatgaattcacagaaatgtatttactctataggagcatacaatcatgtttcagcaacttcatttagaaaaatgggagacggacttaaaacaatgtggccttatttatggtaccatgctgctcccaaaggtaagtgcagatgctgtatataggtcttaaaaccatgtgatttaaagataattggttttagaagaaga

SEQ ID NO: 710417 - DNA, 608 bp, Homo sapiens
tgaagaaagtgagatccacatcatatttttggatggaaaagcttaccattttaaagatataaatttctyctcaaattaaattctaaactatggatttgttgcaaaatttgagaacttattatataatttaacatagaaggctaaacttttaaacatagccaagtaatttctaaacaaaaaggaattcaaaagagaagtaattttatgtcttgtcctaccatctataaaaatataaattttaaaaataaaaacaatacagcactattgtcaatattgagaaaacaatctgatagaataaatagaatttccaggaaaaaatactaagtcacaggataggacttatatatgataaatttatttcataacagtaaaaaagtctgaattattgaacaaatagtatataacgtttgtcaagtatagctgtaaaaataattaatgcatttttaacaacttaccccaaaatattttccaaatggaaaagatttaaagatttaaatgtagaaaagtaaactcatacaaatacttaaaataaatgtaagatatatattgtatttatataatttgtgagtggaaaaggtttctctaagcatggcatcaaagcttgaaag

SEQ ID NO: 710418 - DNA, 2355 bp, Homo sapiens
caagagtatataaattagagctscatattcagagtatttaatgcttttttcctgcacaatacaaccaccatcaatactaggtttagtttcgtgtgatttgaatatgtctgttcatcacaaagaagaatgattaaaagcaagagctattcagagatacaacaccacaagctatttaaatgtggctttcaaaatatttgaatgtgctttgaacttgaattggacatatgaatgaggagttaaaaaaagtgttaacaacctgtgacccagtaattgtatatctggaaatttgtccagtggagatattcagaaatgtgacaaagcgttatgtacaaagagctccattgctgctatttacaactgcaaaaaataaaataaaagcgtataagttaattgcccaacagcagagaggtggttaagtaaattgcgctagagccacagaataaaatattatgctgctattgaaattatattaatggagaagttaaaaaaacactcacaagaaaatgcttacaatccaatgttgtgtgaacaaaccataattcaaaattaactatactatatggccttaactgtgtaaaaatgcatagcgaaagatcataagaaaataaagtatctacaatgattaattgttggatggggtattacaagtgattttaagtttcctattatactgtcgatactttccaaattgagtaaattctatttttactttaagaaaaaaattaaaaatatgtttcagtgaatggcaagcatggctgctttggagaaacatcacagtcgccttcatcagagcaataataccatgcgaaacgatacaccaggaggccctgatgaaggggtggtatttgtgtaatattcagtatcaccactagagggttctctctctgaggccggtttgaaggcatcaggctggatgccataaaggatgtaaaccacttttatccccacaaaggggagtaatgaatgactacacagagtccctgactcatgatggcccaacttaaatttttggacttcatgatgatgcacaagcaatacacactcagaagaaaccgtatataacctttctgtttttcactttcagaacagtattcaataaattacatgagctattcaacactttattataaaataggctttgtgttaggcgattttgcccaactctgggataatgtgttctgagcatgcttaaggcaggatagcctaagctatgattcaaacacagctggtaggttaggcatattaaatgcattttcgacttacagttttttcaacctacaatgagtttattgggacgtgaccccatggtaagtcaaggaacatctgcattccctagtcagactccttatgttcatggcttgagcaggaaaatattgccaaatatacccctttcaagagtaggagaaagaaaaagtttgcaattcagaaagctagcatcacagggctgtaaaaccatatcattgtaccctgaagaaaattaaacatatggaatccagcttaattccatgaatgctgagatttcttatgcctctgataagcttctgataacccatttacttcatccctcacagtcaaaaaaggtgaaatgaaacgtgatatagtcatactctgtgtatgtctttcagcatgcaggcaaaggcacttggtgcctgggtattatgagacgtttaagggaatacaaaagagacagatggttgactgagtttggacagctctatatctgagacagaacatggacaacaatgggaaacattcaaagaaagaaaaaaaagtcttttcatttttccaattccaattaagaggttaactcattgtttttatttggtaatcagaagaacatacaagtacttatgcattactagatgctgggggaaaattatacattgaaggactgtcaggctcatctgtgcaataaagatttacaataaacacatcattaatttttctgagaacagctcagtatactctgttttacatgaatccttatgatttaatcttgtatttggagatatgatgctatggcatttggataacattggttaagcagcatcttagagaacagaacactcttcctcagaatggatggccattcttttaccctgtgatgtacaaatgcaaattacaacctgcattttatctgccagaagtgtatttcacatcatggaagtacattctatcacaaccatgaaatcaaaacaagtccattattaccatcttcccttttggaagagcattctcagaatacatccagaaataccttccttattcctccaaagaattgtttattcagctagtcattggttgaggtttgggttttggttctgcttgcctctctcttttgagtcttgctaaatg

SEQ ID NO: 710419 - DNA, 2355 bp, Homo sapiens
caagagtatataaattagagctgcatattcagagtatttaatgcttttttcctgcacaatacaaccaccatcaatactaggtttagtttcgtgtgatttgaatatgtctgttcatcacaaagaagaatgattaaaagcaagagctattcagagatacaacaccacaagctatttaaatgtggctttcaaaatatttgaatgtgctttgaacttgaattggacatatgaatgaggagttaaaaaaagtgttaacaacctgtgacccagtaattgtatatctggaaatttgtccagtggagatattcagaaatgtgacaaagcgttatgtacaaagagctccattgctgctatttacaactgcaaaaaataaaataaaagcgtataagttaattgcccaacagcagagaggtggttaagtaaattgcrctagagccacagaataaaatattatgctgctattgaaattatattaatggagaagttaaaaaaacactcacaagaaaatgcttacaatccaatgttgtgtgaacaaaccataattcaaaattaactatactatatggccttaactgtgtaaaaatgcatagcgaaagatcataagaaaataaagtatctacaatgattaattgttggatggggtattacaagtgattttaagtttcctattatactgtcgatactttccaaattgagtaaattctatttttactttaagaaaaaaattaaaaatatgtttcagtgaatggcaagcatggctgctttggagaaacatcacagtcgccttcatcagagcaataataccatgcgaaacgatacaccaggaggccctgatgaaggggtggtatttgtgtaatattcagtatcaccactagagggttctctctctgaggccggtttgaaggcatcaggctggatgccataaaggatgtaaaccacttttatccccacaaaggggagtaatgaatgactacacagagtccctgactcatgatggcccaacttaaatttttggacttcatgatgatgcacaagcaatacacactcagaagaaaccgtatataacctttctgtttttcactttcagaacagtattcaataaattacatgagctattcaacactttattataaaataggctttgtgttaggcgattttgcccaactctgggataatgtgttctgagcatgcttaaggcaggatagcctaagctatgattcaaacacagctggtaggttaggcatattaaatgcattttcgacttacagttttttcaacctacaatgagtttattgggacgtgaccccatggtaagtcaaggaacatctgcattccctagtcagactccttatgttcatggcttgagcaggaaaatattgccaaatatacccctttcaagagtaggagaaagaaaaagtttgcaattcagaaagctagcatcacagggctgtaaaaccatatcattgtaccctgaagaaaattaaacatatggaatccagcttaattccatgaatgctgagatttcttatgcctctgataagcttctgataacccatttacttcatccctcacagtcaaaaaaggtgaaatgaaacgtgatatagtcatactctgtgtatgtctttcagcatgcaggcaaaggcacttggtgcctgggtattatgagacgtttaagggaatacaaaagagacagatggttgactgagtttggacagctctatatctgagacagaacatggacaacaatgggaaacattcaaagaaagaaaaaaaagtcttttcatttttccaattccaattaagaggttaactcattgtttttatttggtaatcagaagaacatacaagtacttatgcattactagatgctgggggaaaattatacattgaaggactgtcaggctcatctgtgcaataaagatttacaataaacacatcattaatttttctgagaacagctcagtatactctgttttacatgaatccttatgatttaatcttgtatttggagatatgatgctatggcatttggataacattggttaagcagcatcttagagaacagaacactcttcctcagaatggatggccattcttttaccctgtgatgtacaaatgcaaattacaacctgcattttatctgccagaagtgtatttcacatcatggaagtacattctatcacaaccatgaaatcaaaacaagtccattattaccatcttcccttttggaagagcattctcagaatacatccagaaataccttccttattcctccaaagaattgtttattcagctagtcattggttgaggtttgggttttggttctgcttgcctctctcttttgagtcttgctaaatg

SEQ ID NO: 710420 - DNA, 2355 bp, Homo sapiens
caagagtatataaattagagctgcatattcagagtatttaatgcttttttcctgcacaatacaaccaccatcaatactaggtttagtttcgtgtgatttgaatatgtctgttcatcacaaagaagaatgattaaaagcaagagctattcagagatacaacaccacaagctatttaaatgtggctttcaaaatatttgaatgtgctttgaacttgaattggacatatgaatgaggagttaaaaaaagtgttaacaacctgtgacccagtaattgtatatctggaaatttgtccagtggagatattcagaaatgtgacaaagcgttatgtacaaagagctccattgctgctatttacaactgcaaaaaataaaataaaagcgtataagttaattgcccaacagcagagaggtggttaagtaaattgcgctagagccacagaataaaatattatgctgctattgaaattatattaatggagaagttaaaaaaacactcacaagaaaatgcttacaatccaatgttgtgtgaacaaaccataattcaaaattaaytatactatatggccttaactgtgtaaaaatgcatagcgaaagatcataagaaaataaagtatctacaatgattaattgttggatggggtattacaagtgattttaagtttcctattatactgtcgatactttccaaattgagtaaattctatttttactttaagaaaaaaattaaaaatatgtttcagtgaatggcaagcatggctgctttggagaaacatcacagtcgccttcatcagagcaataataccatgcgaaacgatacaccaggaggccctgatgaaggggtggtatttgtgtaatattcagtatcaccactagagggttctctctctgaggccggtttgaaggcatcaggctggatgccataaaggatgtaaaccacttttatccccacaaaggggagtaatgaatgactacacagagtccctgactcatgatggcccaacttaaatttttggacttcatgatgatgcacaagcaatacacactcagaagaaaccgtatataacctttctgtttttcactttcagaacagtattcaataaattacatgagctattcaacactttattataaaataggctttgtgttaggcgattttgcccaactctgggataatgtgttctgagcatgcttaaggcaggatagcctaagctatgattcaaacacagctggtaggttaggcatattaaatgcattttcgacttacagttttttcaacctacaatgagtttattgggacgtgaccccatggtaagtcaaggaacatctgcattccctagtcagactccttatgttcatggcttgagcaggaaaatattgccaaatatacccctttcaagagtaggagaaagaaaaagtttgcaattcagaaagctagcatcacagggctgtaaaaccatatcattgtaccctgaagaaaattaaacatatggaatccagcttaattccatgaatgctgagatttcttatgcctctgataagcttctgataacccatttacttcatccctcacagtcaaaaaaggtgaaatgaaacgtgatatagtcatactctgtgtatgtctttcagcatgcaggcaaaggcacttggtgcctgggtattatgagacgtttaagggaatacaaaagagacagatggttgactgagtttggacagctctatatctgagacagaacatggacaacaatgggaaacattcaaagaaagaaaaaaaagtcttttcatttttccaattccaattaagaggttaactcattgtttttatttggtaatcagaagaacatacaagtacttatgcattactagatgctgggggaaaattatacattgaaggactgtcaggctcatctgtgcaataaagatttacaataaacacatcattaatttttctgagaacagctcagtatactctgttttacatgaatccttatgatttaatcttgtatttggagatatgatgctatggcatttggataacattggttaagcagcatcttagagaacagaacactcttcctcagaatggatggccattcttttaccctgtgatgtacaaatgcaaattacaacctgcattttatctgccagaagtgtatttcacatcatggaagtacattctatcacaaccatgaaatcaaaacaagtccattattaccatcttcccttttggaagagcattctcagaatacatccagaaataccttccttattcctccaaagaattgtttattcagctagtcattggttgaggtttgggttttggttctgcttgcctctctcttttgagtcttgctaaatg

SEQ ID NO: 710421 - DNA, 636 bp, Homo sapiens
actagaaaacacaagagactaaaatgaaaatttattaaaactgattttttaagttcagtaaaatggcacaatgccagagacacaggaatcaacagctttttgcagactaaattaggcagatttctaatttaaaattctctttacaaaagtaagcatctccaaaaatctctctagtgttttccaataaaaatgtaatgtgagtcacatatgtaattttagatamgcccagttgccacattaaaaaaaatacaaaaatatactttatgtaacataataacccaaattattatttcaatatatctaattgatattttttaaatgatttttttcatactgagtcttcaaattctagtggtttttggtagttagttaacctgtttgtgtgtttgcacactaaacagtattatttcacatcttcactaaccacctgtggccagcagctattgtatcagacagagcagctctcataggcctagatgtgtgcctaagaacatctgtgcagaacgtacaaactcgaaaatggcaaagtgctacataacacaggagatttcagaaagaggacaaacatattacatattcatagatgagaataggaatatgtgtctttgaatactgatatcactgtaaagatatcga

SEQ ID NO: 710422 - DNA, 636 bp, Homo sapiens
actagaaaacacaagagactaaaatgaaaatttattaaaactgattttttaagttcagtaaaatggcacaatgccagagacacaggaatcaacagctttttgcagactaaattaggcagatttctaatttaaaattctctttacaaaagtaagcatctccaaaaatctctctagtgttttccaataaaaatgtaatgtgagtcacatatgtaattttagatacgcccagttgccacattaaaaaaaatacaaaaatatactttatgtaacataataaccsaaattattatttcaatatatctaattgatattttttaaatgatttttttcatactgagtcttcaaattctagtggtttttggtagttagttaacctgtttgtgtgtttgcacactaaacagtattatttcacatcttcactaaccacctgtggccagcagctattgtatcagacagagcagctctcataggcctagatgtgtgcctaagaacatctgtgcagaacgtacaaactcgaaaatggcaaagtgctacataacacaggagatttcagaaagaggacaaacatattacatattcatagatgagaataggaatatgtgtctttgaatactgatatcactgtaaagatatcga

SEQ ID NO: 710423 - DNA, 887 bp, Homo sapiens
tccttttattttaaatatattaatttattgattacttagggatgccctggatagaggcaagaatacttccatcactatagaggtgtatatcttaaatcaccccattttttaatgcattactaaaataccaccggtaatactgatattttataacaaatatgttcacaatatatgattttaaaaaaacaatcagtggaaataaaaatgtaatacatttggtaacacaaacatttcaccacatgaatctggcattatttrgtggagtggggcaaggtaagacaggaggaggtaaaggacttggaggaggagaatggtagagggagactgtgagagcttgggctgaggatatcagggtcgtgagggggagggtttgggaggcagagaaagataaggatgggaagttgaagagagaaccaaaaaaagtgaacaaaactgaaaatgaatgcctgaaacaatggcattacacatacaaaaatactaccagtttgattcttaaaattagcacagagtatcagaatgccagtatcatatttactaaggaagtctggagaaatactggtgtttgccttttgctttcctttgttcaagacttatgatagaccacccagataactcctttgtattcacagtctataattactaggtttcatctttacttattgcttctaatgaataaaaacatatgttaacatggtccagtctcaataccactgttcagcactaatgatttaattaccacggcatacaatctatgtacgcatttattctattcatttcctgcattagggaaatcttccatgacccaggcttacttggaaagtggcagtgaaatgcgtgaaatgaatccaaaatattgaaaatttcatctgggagaaccggaccatata

SEQ ID NO: 710424 - DNA, 1081 bp, Homo sapiens
caacatatgtacttttgctcagtttcctttctcagtagtaggtaacctttaccaaagaaccttygcctgctgccataagaattttcccagtatcgaaaagaaacttgaaaataacactttaaaacaaatatatattttaatttatgtattcagtaaatatactgagtatatatttactttggaaaatatatatataaccaacacacacacacacacacacacacacacacacacatatatatatatataacagttgccttccagtatgggaccatatttcccaaatactgctttaagcatcttttcattggtttctaaacggaggccaccaatgaaaagcttgccaggctgatctgattccaccattttgctgtaaatggtaaaaaataaaaaataaaaaaataaaaaactctagataacaataaataagccaaaagataaaattttattacatactgtgttgaaaactctagggaaattcccttacggaggctgacatctttctactatttcttaatttaagtagttaaaatttgtaacatgcagagcgaaaggggcagtgacttcatggacaaatgctgcattttaatacgtacctgacaaaaacttgtttgtaaaaatgagatgagaaaagctattgtaattttcttaagctgtaatacgcagaatgccccatttaaataattctatttgaaaactatatatttatacagtacaatgtgatgttttgtgttttttttttcttgagatgtcaatttcctattgccaatgtgcactgctcactgcagcctcctctaccgagcctcaagtgatcctcccacgtttcagcttcccaaatagctaggactacaggagatcactatcacagcttgtaggcattttttttgtgtgtttctttaacagacacggtttccccatggtacccaagctggtctcgaactcctgggctcaagcgatcttctggcctggtgccaccaaggtgatgagacttgaagggtgaatgtccacgcccagcttgatattttaataaatgattaaatcaagttaaataaaatacatgctttcttcggggagaatattt

SEQ ID NO: 710425 - DNA, 978 bp, Homo sapiens
ccatattgaaagacccaccataaactagactctccaactcaaacaaatagcttctttcaccttctcttcctaagtcactactacagcactgtcgatattagtgacctatcatagagcaataagaaataaacttggttttcctttataaatgggttggtctggtagatggcaatggacaatctgttttatatttagatcattctcttttcaataaataggtctctgtcttgaaaaactaaggattacatgtgcttgatatgatcttttctgcacatgttagcaacaaaatgttctgggcctttcatgaaaaggagaaattttggtattcaatctatcattaaattccataaaattagggttgccatattaagcaaataaaaawacagaacagccagttaaatttaaatttcaaggaaacaataagtaatttcaaattataagtgtgtcccaaatattgcatggggtcctgtgtcttatcaagcaaccctacataaaacctgtgctgcaggacttgtggctccatgttaacatcaaagatttttccatttgcttattattcttaatctgaaagatggcaatcactttacaaaactgaatacagtggttactttagcttccttagtttgataggcaaattatagatgaagtggaaaaaaaagcaaaattccaaatagatttaaaaattctgactctatcaaagaattctaaaacttctgatatttttaattctctagcaccatattgtaaggcttcagctataactgcaggctaaaagctatctgtcatggtaaaatgacagctggaatcaaactatatatagaaagagacatggaattgcagacactacacacagtatgtaagaaaacagctgtgagattggggttgagagttggtgccaaagatgagattattatagttataataaaaaagtcagagtttttcatatcttataggcccatgtattgacatgatatgaat

SEQ ID NO: 710426 - DNA, 978 bp, Homo sapiens
ccatattgaaagacccaccataaactagactctccaactcaaacaaatagcttctttcaccttctcttcctaagtcactactacagcactgtcgatattagtgacctatcatagagcaataagaaataaacttggttttcctttataaatgggttggtctggtagatggcaatggacaatctgttttatatttagatcattctcttttcaataaataggtctctgtcttgaaaaactaaggattacatgtgcttgatatgatcttttctgcacatgttagcaacaaaatgttctgggcctttcatgaaaaggagaaattttggtattcaatctatcattaaattccataaaattagggttgccatattaagcaaataaaaatacagaacagccagttaaatttaaatttcaaggaaacaataagtaatttcaaattataagtgtgtcccaaatattgcatggggtcctgtgtcttatcaagcaaccctacataaaacctgtgctgcaggacttgtggctccatgttaacawcaaagatttttccatttgcttattattcttaatctgaaagatggcaatcactttacaaaactgaatacagtggttactttagcttccttagtttgataggcaaattatagatgaagtggaaaaaaaagcaaaattccaaatagatttaaaaattctgactctatcaaagaattctaaaacttctgatatttttaattctctagcaccatattgtaaggcttcagctataactgcaggctaaaagctatctgtcatggtaaaatgacagctggaatcaaactatatatagaaagagacatggaattgcagacactacacacagtatgtaagaaaacagctgtgagattggggttgagagttggtgccaaagatgagattattatagttataataaaaaagtcagagtttttcatatcttataggcccatgtattgacatgatatgaat

SEQ ID NO: 710427 - DNA, 978 bp, Homo sapiens
ccatattgaaagacccaccataaactagactctccaactcaaacaaatagcttctttcaccttctcttcctaagtcactactacagcactgtcgatattagtgacctatcatagagcaataagaaataaacttggttttcctttataaatgggttggtctggtagatggcaatggacaatctgttttatatttagatcattctcttttcaataaataggtctctgtcttgaaaaactaaggattacatgtgcttgatatgatcttttctgcacatgttagcaacaaaatgttctgggcctttcatgaaaaggagaaattttggtattcaatctatcattaaattccataaaattagggttgccatattaagcaaataaaaatacagaacagccagttaaatttaaatttcaaggaaacaataagtaatttcaaattataagtgtgtcccaaatattgcatggggtcctgtgtcttatcaagcaaccctacataaaacctgtgctgcaggacttgtggctccatgttaacatcaaagatttttccatttgcttattattcttaatctgaaagatggcaatcactttacaaaactgaatacagtrgttactttagcttccttagtttgataggcaaattatagatgaagtggaaaaaaaagcaaaattccaaatagatttaaaaattctgactctatcaaagaattctaaaacttctgatatttttaattctctagcaccatattgtaaggcttcagctataactgcaggctaaaagctatctgtcatggtaaaatgacagctggaatcaaactatatatagaaagagacatggaattgcagacactacacacagtatgtaagaaaacagctgtgagattggggttgagagttggtgccaaagatgagattattatagttataataaaaaagtcagagtttttcatatcttataggcccatgtattgacatgatatgaat

SEQ ID NO: 710428 - DNA, 910 bp, Homo sapiens
tagcctaatcacctccaaaaggcccctcttaatactgctgggttgggaagtgagtttcaacataaactttggaggagatgcattcaaaccctagcagttaagaagcttgaaaattattatgcttctaagtggctaagtaggaatttgaatctactatatcattttcattctgttactaagattatcaatggaaatagtaaatatattaaggaggcatacaatatggagaatttttctcttataatgtttgtacaygacagaaaaaataatttaaaaactttaataataactcattaaatagacacattttctgaagatttaaaacttaaaaatcaggaggcaaagatataataatagaatatgtgtcagagagtgaatgtacaaatagacaatggccagaccatgtatgaaagtagaactctgacccacagcctctgcagccatcagcccagaatggtcagtgactgccagtattttgcctcactccaaccagaaccaaccagagaaaaccaaatagatcctcaaaccaatcacataagttgccccatttctagtcagccaacaacccccaatcagagcaaaccagaagccttttctttttttcaccattaaagttttttcattttcctttttgcctttgagtctctgtcagatgcaagtaatgatggctgactcccttgctatgcaaactctgaaaaaataggttctggttattctcatttgggttatctttatgtgaacaggttccctagaccaacagcaagatttggtctataccgcctattactgcagaccccatctttcaaccagtggttcccgtggagactccttgcaccttgcttttcatggcttgttgggtctttgctgatgtgactaagtcagcacaagtctgcattatgctttatgtgtg

SEQ ID NO: 710429 - DNA, 910 bp, Homo sapiens
tagcctaatcacctccaaaaggcccctcttaatactgctgggttgggaagtgagtttcaacataaactttggaggagatgcattcaaaccctagcagttaagaagcttgaaaattattatgcttctaagtggctaagtaggaatttgaatctactatatcattttcattctgttactaagattatcaatggaaatagtaaatatattaaggaggcatacaatatggagaatttttctcttataatgtttgtacatgacagaaaaaataatttaaaaactttaataataactcattaaatagacacattttctgaagatttaaaacttaaaaatcaggaggcaaagatataataatagaatatgtgtcagagagtgaatgtacaaatagacaatggccagaccatgtatgaaagtagaactctgacccacagcctctgcagccatcagcccagaatggtcagtgactgccagtattttgcctcactccaaccagaaccaaccagagaaaaccaaatagatcctcaaaccaatcacatargttgccccatttctagtcagccaacaacccccaatcagagcaaaccagaagccttttctttttttcaccattaaagttttttcattttcctttttgcctttgagtctctgtcagatgcaagtaatgatggctgactcccttgctatgcaaactctgaaaaaataggttctggttattctcatttgggttatctttatgtgaacaggttccctagaccaacagcaagatttggtctataccgcctattactgcagaccccatctttcaaccagtggttcccgtggagactccttgcaccttgcttttcatggcttgttgggtctttgctgatgtgactaagtcagcacaagtctgcattatgctttatgtgtg

SEQ ID NO: 710430 - DNA, 1212 bp, Homo sapiens
caactatttcttattagccacagctttaggcagtttatcctgggcctgcacccaggacacatctggacacagcaagctgaaactctcattcttctctcttcacctctgagagtgggagattgctggagtgtgaactgccctgatattttgtccttgttcttggaacatattaagatattgcctcctcgttttagagtcagaataagactaggaggggaaaaaacaaaatttacaataaaaaggccattttaattgtccttaaccccaagtagtagcagtagttatagtaatggcctctggattctcattgctactggatagttagtggaaaatttaagtccttcaaaactttgaaaccagtatatacaagattcagtgaaaacaaagcaaaacaaaatcttcaatttattcaaagccaaatgactcctacttagccaggacaaaccaaaggttttcaatgtttggtaaaaaagaataaaatgaagtcctatcactgtaacaggtacagtatttgtactgtagatctttgtggatctaagaaaatctgcatctgacctctgtgtagagctgaacattagagggagttaagcgaaagggaaggtatgagggtctgtcaaactctccacccctcacttctgtgcaaggaacagtaaggtctttgccttgaccctgggaaggcacacccatcttcacaccccattagagacctcattctttgtttctcctctgtttcctgccccacctgcatattttgcatggcttaattcttgaccttgcattttaaactcattaacctcaaggactaagttctatttttgatatgacctctcttaataggtatgttttttttactgctctgctagctggatttctgcttttcactttacctaccagctatttgattttcagcaaagtttctactttttgtcttcccttcctagcaataaaataaacatggcaacagtgcctgtctcatagagttttggggaggattaaatgagatagaagacacaccattcttagaacagtgcctgatatgaaggaagtgctatatgggtcagatgttataatttttataaraaatttcacttttttcactttctgatttttaactttcacgtattttcttgaattttaattttagcattatcttgcatctttttctttctcttctcaggttgctaagtctattattttaaatcattatattcg

SEQ ID NO: 710431 - DNA, 1140 bp, Homo sapiens
ctgtttaacggagaacatgtaaatgcagacacatgggttagtcatatatggtcccatatactctgacacaatgaaatctggtttagaaagaaacagagacaaaaatgggtcacgtcagatatcagattaattttaaatattcactgtttgcttaagctagttgagtggtatgttacttatcaccaaaaaaaaaaaaccacctagatttttaaaggagacaggaaatctgtaaaagcagactcccacagtttctagatcaaattcacgaaaatatttagtattatcaaatgaaatacatgaatattttaaatacagtgctttagattcagtctcaaaacactagaagtgtgaatatactacacaagagctaataatttacgttgcataagaggtaaaaccagtactaagcagagttgtaatagggactaaatttgaaaaacatagtaataatttgacttaggtattcatatttctttaaatcttttactagtgatattttatcttgttaaaaattcgtggtaatagtcaatgtttaggcttattttaataaaaatattttgttgataaaagacttctaatattttcttcttagtcggggcttaacctaattttagtaaaaacacttaggaaacaaaaatcaataatattttcaagtatgatcktgcatcttaaatttgtaaagctagtatggcaggcaaaataatggcccttcaaagatggccacatccaaatccccagaacctgtaaatacgtgagctttcatagcaaagggaaattaagtttgctaatcaatggacctttgggtccctattttaaaatacagagataattcaattattcaggtgggctcaatgtaatcacagggtctttaaaaggggaaagaggtggcagaaaaaaaagagtcagagaaaaagatgagatggcaacacagtgttagagagatgttttgttgccaactttgaagatggaagagggagaccatgaactacaaaaagcaggcaaggagttagaaaaggcaagaaaacaaattctcccctagagcctccagaaaggaactcaaccttactgacactttaatttagcccactgagacctttgttggacctctgaactacagaactataacataataaacatttg

SEQ ID NO: 710432 - DNA, 1012 bp, Homo sapiens
ttgaggctgctgtgatctataattccccacggtacaccagcctgggccacagaatgagaccgtttcaaaacaaacaccaacaacaaaaagagacaaactactgttgtggtgtatatcctttgtgtttttctttgtatttcttttcatggcataaattatactttataattttgtatcccaaattttgttcataattctatgataagcattttcccttgtcatcaaactctycataaacataattttaattacttcatcatattctacgatgtaagtatacataatttacttaacctttcttctaaagttaaatgtttatgttgaactagttttgggccattataataatgttataatgataatccttgtgcataaatctttgatcatatttctgataatttgtttaggataaatgcccagaattggaactactggctcaaagatatgaacatttcttaggttcttgatatataatgccaaattgctttccagaaaaactgaggcagtttatagccctaccaaattttacctacattgaaaaatccttttccccttaagatatatgctgatttgattgataaaaaaagttactcatttttgaaattataagaaaggttgaatttaagaaatggttatcagccacttgtacttctcctttgtaaagttctctctttcttttctttgtctctactgtcctgttaccttacttttgccatctctgagtagatcagtgtcttcagtgggtgtgccacttggccaaagactccttacttctcttgttaccctcttcactttcccccttatttaatctttttccactctttaaaaaatttattttttaatttttgagacagagccttgctctgtcactcaggttggagtgcagtagtgcagtcatggctcactgcagtcttgaagttctgagcttaagcaatcctcccacctcaacctccccagtagctaggactacagatgtgctctactgcacctggctaatttttattttttattt

SEQ ID NO: 710433 - DNA, 616 bp, Homo sapiens
tgtttattarcactgtgagaacgaactaatacagctttgaatagtcaacatgttgaaatgatgttcatcagacattgaagtaagtatgtcaaagtcctgaattttgtcactaatcagacctttttactggagaatcatatgtgcttgaatgaatgaagtgcactgccttaatggctagtattcctgattataaaaacaatgttggctatacatcctaacaccttgtgagtcagaggacctcagagtaaacattttgtccttgacctcttccagacctgaactctttcagcagcatggggttaataaaccaagggtgggagggaacagcttgtgatctctggcggccttcacagcccaccctgtcattagaatgttccctctcaaattctgggtcctctgatttgcccttaattgttgaaaatgcacaggaaattaatttggtaagtggcaaaaattagtgccctcttaagtcagaccttttcattctgcaaacagctgggtttgaaatttttctttgtgttacctacaaaaaagcagttacttatctgtattagaaatgtaaataagtatcattttctgatttcaaacaatttagagacacctatttatatcctaa

SEQ ID NO: 710434 - DNA, 616 bp, Homo sapiens
tgtttattaacactgtgagaacgaactaatacagctttgaatagtcaacatgttgaaatgatgttcatcagacattgaagtaagtatgtcaaagtcctgaattttgtcactaatcagacctttttactggagaatcatatgtgcttgaatgaatgaagtgcactgccttaatggctagtattcctgattataaaaacaatgttggctatacatcctaacaccttgtgagtcagaggacctcagagtaaacattttgtccttgacctcttccagacctgaactctttcagcagcatggggttaataaaccaagggtgggagggaacagcttgtgatctytggcggccttcacagcccaccctgtcattagaatgttccctctcaaattctgggtcctctgatttgcccttaattgttgaaaatgcacaggaaattaatttggtaagtggcaaaaattagtgccctcttaagtcagaccttttcattctgcaaacagctgggtttgaaatttttctttgtgttacctacaaaaaagcagttacttatctgtattagaaatgtaaataagtatcattttctgatttcaaacaatttagagacacctatttatatcctaa

SEQ ID NO: 710435 - DNA, 624 bp, Homo sapiens
taggtttctttatacaaggtattggatgaaggaggaaagaagttgactatttccttcagctaactgtgtgtttggaaagggascccccttagagtcacgagaccagatggttatgcgatagctgcatttatcaggtctatcagctacctccttttgcatcatccattccttgtgttattgcacaaccaccagagacatcagttattagagagtgggtagagaggagtaaatatttggatgcaaaaaggacagatcaagaacaagatatgactatatgaaatataactttaggaatatcccttgcttctgcctctccaacccccaaatcttttatatggtgttctgtgtcattttaactgtgcacagtcaaatgaaactgaaatttactttagcaacaaaatgaacttaacagtcctgaatcctgcctcctgtctgtcattttcctcttccttttaactagtgttgcctatgactatctcccagacatttgtgtagttcactcatcttaacttggttgtctccttaaacaattaggagtccatgaactttattgtgagaatgaatactgacctcttacgagcatttcctaatccagtgtgtcctgtcctgtcttccataaattga

SEQ ID NO: 710436 - DNA, 624 bp, Homo sapiens
taggtttctttatacaaggtattggatgaaggaggaaagaagttgactatttccttcagctaactgtgtgtttggaaagggaccccccttagagtcacgagaccagatggttatgcgatagctgcatttatcaggtctatcagctacctccttttgcatcatccattccttgtgttattgcacaaccaccagagacatcagttattagagagtgggtagagaggagtaaatatttggatgcaaaaaggacagatcaagaacaagatatgactatatgaaatataactttaggaatatcccttgcttctgcctctccaacccccaaatcttttatatggtgttctgtgtcaytttaactgtgcacagtcaaatgaaactgaaatttactttagcaacaaaatgaacttaacagtcctgaatcctgcctcctgtctgtcattttcctcttccttttaactagtgttgcctatgactatctcccagacatttgtgtagttcactcatcttaacttggttgtctccttaaacaattaggagtccatgaactttattgtgagaatgaatactgacctcttacgagcatttcctaatccagtgtgtcctgtcctgtcttccataaattga

SEQ ID NO: 710437 - DNA, 1313 bp, Homo sapiens
cactatgttggccaggctggtcttgaattcctgacctcgtgatccacccacctcggactcccaaagtgctgggattacaggcatgagccaccgtgcccagccaaattaatttttaaagaactgactctattacaattttaggtcattccacccatkaacataatggcattttcatatattcaagtctttgtctatttcctttaataaagctttaaattatgatctgtaaagctcttatattttgttaagtaaattcttaaatatgctagagatttattgctgttgtaaatgttatgttattttccattatatgttctagtttgatgttgctggtatagagaaacactattatcatttgatacagtctctgcaaatattactgatatgtcttattaattctagttcatgacggtttgagttttgtgtagattatcatatcatcttcaattatgttactcttctcatcctttccagtctttaaattttatttctcttggctgacagtagcacccaagacctccaaagccaaaaccacattcacagtagcagtaataaaaggttgcattctattttcctgatctaatgagaatgatcaaagattttaccattaaagatcatcctacagtaaggtttaggtatggatattttatcaagtttaagaaattccctgctagtctgaatttgctaagaggttttaacataaatatattttgaattttatcagatattttaatctactaatcatacaattattcttatttagaccatttatttggatacctagttaattttcattaatatttctcatgtgctaaaagaaaatgtcatcagttaggatttttttgcttatatatctgttatcaagttgtcttctgcatgaaagtcattcattctactttcaaagtgtttacccttaactattaagacctatacttgtgtttatttttctatatgggtctctaaaacttagcattaactctacgtttctccaaacagtacaaagaccctaattatcttcattccttctcctttttttttttttttttggtttgataagagtccactgtttccattatagacttctcacatcctaattttcaagttggttattctttgcaagtgcttgttctggcctttattacaaattcccttgactactcctttgagatatttactatatctatttagatatttttaatatgctccattcattctactgcatctagtaaatatgaatggcttcaccatatcatctctaccaggagaggcaaaagttcagctcctggtttccctcctgtaagtctgaggagaat

SEQ ID NO: 710438 - DNA, 1371 bp, Homo sapiens
ttttagttatgaatgtcttctatgcggcaaagcatccaaatttatcataggcctaagagtttttttttttctartgcctaaaatagaggcttacatttgtgaagataattttcagggtatactaatgaccctgacaattcctagcatcttagttcaggaatagattttggaaatctaatctatggattgggaggtggctagggtgagccacacttaagttgaaaatgtttactcacttattgtttagagagaaacagaatactaggccacggctttacttagaacagtggttcttaatctgaaattcatggctgaacttcaggagagatgtgaatgcctgcaattgtgtgaataactcttttttgtgtgcatatgtgtattctccctagggagaaacccaatcctgtttttcaaagctgtctatgaatgaaaaacagtttgaacagcatgaatttaaagggtggtaataaactaaatgttatctcggggtttcatccagtcttagaatctcaagtgactctgactctacagtctattgaatgtgcattcagctgcctgaaatcagaaatgacgggaatccatacagtgaaattgagcccagcttcaaagaacatcccaacaacatacgcagtgagtgaaatgtcctcttcatctccaccctgaaaacaaaggaacaatgagtcattcgggacagcagagcacaaaatagcaagtattcttttgaagtaaaactaggtatgaaaaaaatactggaacaaataccattattcataaaaacacccgaacatgtgtagtttttaaattagatggttaataatcatactatctaagcaagaattcattcagactctatgcaataattaaatcataattattaagttgttataacaattaatttcaatcgtatttatgtggcctggtgttaagcatgcattctaaggaattcacaggactctatttgtctccgcttggtataaatctgaaaaaagccaacaaagaatttctaatgaggtgaagcagaaagttgccgtgaagattcctggaaattcctggaaaagcaccctaggagatcaccagaatcaagtctcagattcttacagtgtaaaatgagaaactcatttataaatcatgtggtttgcaaactgactgtgcataaaagtcccctggggtatttaaatcaaccagtgtctacacagagattctggttcaaaaaacttgggaatacgacagcgaaatgcattttaatgggtgctctagtgactctgatgcaaatagcattcagaatggcatctgggatctactgatcttgtagaagcttcccattttatctatttaagcaaaggacaactcctgtcttcttcagaaaagaaa

SEQ ID NO: 710439 - DNA, 653 bp, Homo sapiens
gcctcagcctcccgagtagctgggattacaggcattcaccatcatgcccggctaattttttgtatttttgtagagacagggtttcaccatgctggccaggctgattttgaactcctgacctcaggtgatccacctgccttggcctcccaaagtgctgggattacaggcgtgagccaccgtgcccggcctcttctttcattcttttaacaaatacttattgaacactcactttgtgcaatcttgtaaatttttcagtaataatttttgcayttgcaactattcccagttgtattaaattagaaataatctgaattttgtacttagtgctaactcaacaagcttctcccagtaagttgccatacatatatccccaggtcgtccaaaaaatacagtaattacctgtcccagattctgtaacaattacagcgacatgaaatgtcatgaacaatcccgaacggtagagttggaagacttttgtatttacaatttgagaaacacaaccattttccaactgaaaaataaagagaaggtataattaaaatgttagcgatccaagaggtttttttaagtgtcttttaaaatatggtttttgcacaaatatattaacatccccaccccgtgccacggctctacctcataaacttgttgaaatg

SEQ ID NO: 710440 - DNA, 653 bp, Homo sapiens
gcctcagcctcccgagtagctgggattacaggcattcaccatcatgcccggctaattttttgtatttttgtagagacagggtttcaccatgctggccaggctgattttgaactcctgacctcaggtgatccacctgccttggcctcccaaagtgctgggattacaggcgtgagccaccgtgcccggcctcttctttcattcttttaacaaatacttattgaacactcactttgtgcaatcttgtaaatttttcagtaataatttttgcacttgcaactattcccagttgtattaaattagaaataatctgaattttgtacttagtgctaactcaacaagcttctcccagtaagttgccatacatatatccccaggtcgtccaaaaaatacagtaattacctgtcccagattctgtaacaattacagcgacatgaaatgtcatgaacaatcccgaacggtagagttggaagacttttgtatttacaatttgagaaacacaaccattttccaactgaaaaataaagagaaggtataattaaaatgttagmgatccaagaggtttttttaagtgtcttttaaaatatggtttttgcacaaatatattaacatccccaccccgtgccacggctctacctcataaacttgttgaaatg

SEQ ID NO: 710441 - DNA, 892 bp, Homo sapiens
tggacaaaatgctttgacttacttcatacattaagacatgcacttaatttttgtatagcacttggcaattttcaaaacatctttctatctatctcatttggttcttacaccaatcctttgtatacacacatgcataagcgttcatattttatcaatgagcaaactctgttggatctgagaacccatcttgcaggactctacttttagaatgatggatagaggttgttccctgcccccatcccccaagctgaatctaattgtccctatgttatcccaagtacatttttgtgccagatgtactccactgagttaaccaaggttttttgtttcgtttgtttgtttgtttttgtgtttttctttttaacttttcagatgtctgtcagggttcaccttggcatcaatttgccctgaaacttagctgtgctgggattattctccttgtcttggttgttactgggttgagtgtttcaggtaagtggggcaccatcatctgtttcataatacttactctacttccattacgtatcttagagcatctctgtaggggtgggttgcccctacacacctgtgggtgtttctcgtaaggtgggacgagagatttggaaaagaaaaagacacagagacaaagtatagagaaagaaataaggggacccggggaaccagcgttcagcatatggaggatcccgccagcctctgagttcccttagtatttattgatcatttgtgggtgtttctcgagagggggatgtgtcagggtcacaagacaattgtggggagagkgtcagcagacaaacacgtgaacaaaggtctttgcatcatagacaatgtaaaggattaagtgctgtgcttttagatatgcatacacataaacatctcaatgctttacaaagca

SEQ ID NO: 710442 - DNA, 652 bp, Homo sapiens
acacaattaagaaaaaagcttaaaagactgagtatcaaattacttactgaaagcctgagaatcaaattaattcaggctctatccattcattctaaaatatgatattgagggttctctctgtgatgtgtaccctgctaggcagaattaaagtccacccagcctattatgaaagaatatgtagaagactggaattgtctaggagattagaaagtttcatttaagccaagagatgaacgctgaggaggaatcagcttggaaaatcaggtgcaggcaggttgggaaccgyggtagcaaatgggaacgaagattattatgggcagaagggaaaacctgtgggaggcttcggagccagaaaagcacatggcttgtccaagaaaatgaaagccctctgtgtctgcaatgaagaaggctgaagtgtagaatgatgcaaaatgaagcgggcgagcttcacaggtgcagagcagatacagagttgcaggcaaaagaaaggagtctggtatttgttttaatagaaataggcagtcattaactgtatttcaattaggggactgaaataaataatcctaattgctttttaaaaaaatcactctagatttccagaataaagaaagaaagaagaaaaggagggaggaaggaagtagggagagaggaa

SEQ ID NO: 710443 - DNA, 1071 bp, Homo sapiens
tgtgaacataaatatgtgtaaagtggatggaggaaattcagttgaacttttcattttattctgaggagaaagatgatgctttaagataatagtgatcaggtaaacctggaaggtatcacgttatagtagaaaaagcaccagttagactctgcttttatttgcaaggcaaggaaagaaagggaagaatcataatttttttacaggattattttgggggctacaggagacaatgttcaagagctagccagatgtctcatcaaggaaggcctgtaaaaccactgagggccttttggaaaaggaattgttgacttggccagattggcatttaaaaaaattaccctgataattgaagaaacaattaaaagggtggaagagataaaatatagggaacttttgcaatagcccagttgaaagaagttcttggtttgactagaaggttgggcagtaggaagaaatcagacaagcagccccaagaggctacatgagaaaatggaacaaaggactaaagaaaagctgtgatggagcccagcaygctgccaccacctcatccgtttgagacaaataggagagtcttgaactcacaccgtccttgcaactcaaccccaatacagcctgtccctttgtttgaattatatcatcacctcctacctgcagtgagccacaggactcatgtctgtttgaaactaatattatgtttctgcagacacctgttcacctctgtttggaatgagaatgaaaggaacctctgactacataaccatgaactgagccactttttctcactgcttccaaattctatagaccctgaatatccatcatgcctctagatatttatcatatttactcagcacatatttttgaagtattgccacattttcatatttcatctccatgcctcccctaaatattaggtggctatagcctaaatatttaataaaactgtggctcagtaaagttaggaaacatttttaatgtgacctgttagtagaacaataagaagactgaatccccagtttccaaagtttctttctttttttaatgtaattgtgaagtttcttgttagagggattc

SEQ ID NO: 710444 - DNA, 613 bp, Homo sapiens
tattggtactacctaatagtgccacatttagtggcacaaagtgaacaattctgagaattgacaactgttatgaatcttacagaagttcatgtttatcatattcattctattaaatgaggaaacagagayatagagaaaaacgtgcatcgttttaaagaaacagtgatattctatggtgaaggagtgaaggatgtccccgaatatgccagattggtatatgattgttttgtgtttaaaacagtggagaaattgtagattcagaaagggagagctgacctgtctcttcccgcacgcggcaagccgtgaagattcctctgggagggctatccgagtcatacaagggcaagaaaatagctcttatcgccagagacctggaattggatgctgcaatgaacctgaataaagatacttaataaacacctatctttcacctattttacagccccccgcaaccaatatatctcctagtgactcctctagaaaatttattgcccctagccagcttttcttcatcctgtcatttcttttcaaatttatcattcttggtctaaaaagcataaaagcatcttgcttaggccacttctatggatttcactctcttgcgagttcctca

SEQ ID NO: 710445 - DNA, 613 bp, Homo sapiens
tattggtactacctaatagtgccacatttagtggcacaaagtgaacaattctgagaattgacaactgttatgaatcttacagaagttcatgtttatcatattcattctattaaatgaggaaacagagacatagagaaaaacgtgcatcgttttaaagaaacagtgatattctatggtgaaggagtgaaggatgtccccgaatatgccagattggtatatgattgttttgtgtttaaaacagtggagawattgtagattcagaaagggagagctgacctgtctcttcccgcacgcggcaagccgtgaagattcctctgggagggctatccgagtcatacaagggcaagaaaatagctcttatcgccagagacctggaattggatgctgcaatgaacctgaataaagatacttaataaacacctatctttcacctattttacagccccccgcaaccaatatatctcctagtgactcctctagaaaatttattgcccctagccagcttttcttcatcctgtcatttcttttcaaatttatcattcttggtctaaaaagcataaaagcatcttgcttaggccacttctatggatttcactctcttgcgagttcctca

SEQ ID NO: 710446 - DNA, 613 bp, Homo sapiens
tattggtactacctaatagtgccacatttagtggcacaaagtgaacaattctgagaattgacaactgttatgaatcttacagaagttcatgtttatcatattcattctattaaatgaggaaacagagacatagagaaaaacgtgcatcgttttaaagaaacagtgatattctatggtgaaggagtgaaggatgtccccgaatatgccagattggtatatgattgttttgtgtttaaaacagtggagaaattgtagattcagaaagggagagctgacctgtctcttcccgcaygcggcaagccgtgaagattcctctgggagggctatccgagtcatacaagggcaagaaaatagctcttatcgccagagacctggaattggatgctgcaatgaacctgaataaagatacttaataaacacctatctttcacctattttacagccccccgcaaccaatatatctcctagtgactcctctagaaaatttattgcccctagccagcttttcttcatcctgtcatttcttttcaaatttatcattcttggtctaaaaagcataaaagcatcttgcttaggccacttctatggatttcactctcttgcgagttcctca

SEQ ID NO: 710447 - DNA, 613 bp, Homo sapiens
tattggtactacctaatagtgccacatttagtggcacaaagtgaacaattctgagaattgacaactgttatgaatcttacagaagttcatgtttatcatattcattctattaaatgaggaaacagagacatagagaaaaacgtgcatcgttttaaagaaacagtgatattctatggtgaaggagtgaaggatgtccccgaatatgccagattggtatatgattgttttgtgtttaaaacagtggagaaattgtagattcagaaagggagagctgacctgtctcttcccgcacgcggcaagccgtgaagattcctctgggagggctatccgagtcatacragggcaagaaaatagctcttatcgccagagacctggaattggatgctgcaatgaacctgaataaagatacttaataaacacctatctttcacctattttacagccccccgcaaccaatatatctcctagtgactcctctagaaaatttattgcccctagccagcttttcttcatcctgtcatttcttttcaaatttatcattcttggtctaaaaagcataaaagcatcttgcttaggccacttctatggatttcactctcttgcgagttcctca

SEQ ID NO: 710448 - DNA, 1494 bp, Homo sapiens
gcgggaagaagcagccgtgcacagcagggagctgaaatggggaaacgtggtccaggggagaggggactctgcgccgtgtttcactgtaaaccaaggtggtgtccacggcacgaaacgaccaaaacacgcgtctcagctcaacagaatggaaggggtgggacaagtgggtgctttgctaggtggcagactccccatccccaagaggtacagggaaagactgacgggcaaggtggctggaggctcagggcgagacagagtgcccctgaggaccacggtggggcttggagcaacatggccatggctggatggccaccccatgctgcccacagccccgctgacaaaggcaggtctgtgtacgcagaatgaccggcccccagggtacacctgtgcctggaactccagtgtggttactgtgggtccacatgctctgcgaaagaggaagtaagtcctggggtccatactgatgaacgtcttagagctattagggtcactcattaagtgacttcagtaaaaccacacgttctcccatgtggaaacttctgacaagaacaggccgccagcagcaaagtccacgccaccacgactgtgacgtggtccatccagacctcgcctcccaggaggggatcccgccgcagccctggacccaggccatgttttacagctcttttgccagaaactggcccccatctctctgagctgtccacaagtcagcaacttggctcaactgctgcagggacatgagttacaagggtccccagacacatgtaaataaaatgaagaaatgccggctttacagttgctgccctcgcactctttctcccagctcaggaaggatctcaagggcttcaaagcagcctgggttccaattaagcccgtgtgaccaccccagggatgccagaacattcctgattaacaagaggcgctgtttgaactgttcragctaaaaaaaagccctcagaacctttcaaacaaatgccataattttctctccctgtttcctcactctttggaaaagctgatcttttgaatgctttaaacgttcaaaaagaaagctagataatggccccaaacacaacttcggcaagaagctcagaacaggggcagcaagtggagagcttgggatgcaaccacacacaagcaggcccgcttccgggaggcgtggcccggccggcctgaggctgtgacagcgtgtgtccactgtccacagcagctgggccgggagaatgacctgggcggaaccacgcctggcagggagctgcagggcctccatcatcatgccaggcgaacccagtgacaagggcctcaaacagaagaggcccagggaagggcagcccatgggcctgagaagcaccactacacacctgggcggcgcactccgctcacaaagcactcttccaggaagggccccgggctgctggagactgaaccggaatctgcctaactggtggaatccccttttacaaagaagtgcctgtagctcacggggctagaacc

SEQ ID NO: 710449 - DNA, 601 bp, Homo sapiens
aaatttatttgccgtctcaccctcaaataagaatgagtcaatcattaagtaatgcaattatacaagcatagttgtaaacaactatattgcaagtatgctgacatgcaaagatgtgttttacctttaattaccagaagaaaatagacaacttgagtttgagcacctaacttgaagaagaaattaggaaataatagtccctccccaccacatccatcattcccaacccgttctgcctaaaaatcgtttacattgtggattttatttgtaatttttaaagtcttattttaaattaggtcccaaagaaagaagctggcatttcttattcttttcagagtggtctaagaaaaaaaataggaaagcaaactctttctttttttcttttcttttttttttggaatcaatacccgagataacagcagaagcaaaaatccaccggtgcgtcagcaagcagggcactcggccattcakctccatccttccttctgagctgttctccagcaggctccggccgcagctccaggccactagagcagatagataatgtaggacagaatgaccaggcctatgatggcaaagaacatcaggatgaaaatatccagca

SEQ ID NO: 710450 - DNA, 633 bp, Homo sapiens
tcccagcactttgggaggctgaggtgggcagatcacttgaggtcaggagtttgaaacaagcctgggcaacatgacgaaaccctgtctctactaaaaatacaaaaattagccgggcatggtgatgcacgcctgtagtcccagctattcaggaggtggaggcgagaaaatcgcttgagtctgggaagtcaaggctgcaatgagccaagatcacgccactgcattccagcctgggagacagagagagaccctgtctcaaaaaaatacaaattwaaaaaaaaaattagacacacacagatggagaggagagctgatggaaagggccggggctggaagtcatggtcaaaaggttgctgtgtgtatttcccagcttcttcatgtccaagttccatttcctctcctttccgggagaacagtagtagcaaacactgaatgctgactccacgtcaggaatctttaaatgcttaacatatcctcctatctcacaccaccctctggagagaggtaatccacattattcagacgaaggcactgtgcacagaggttaagcaacttgcccaaggtcacacagctggtggcagcagatgcgagattcaatctcaggccagctagttcgggtaagagtgatactctacc

SEQ ID NO: 710451 - DNA, 510 bp, Homo sapiens
cacacacacacacggatggatgtggctatattttacaaccatgaatgatatgggtaattgcaatggctaaatctgtctcctatacagacagggccaggaaaagggaggttcaattctacatatgtttctggctcgctctctgcattgctcaagaaaaaaaacctacatcacattcatatgttataatgctgtgagttattttccccttagcattcaagggtaaagagtccattaagctgtcattggccacataaccagcaggagaagtcrgggcagacagtttggctttagctgccctggagcacacgtgctctgcctcaagaagaacactcgatggtgtctgtgtgcatttgccctagaagcagaaatcaattactccaacggctattagagggatgatctggttgggcaggcttgctgtgatcgcagccactgttcattctggagttccttatatgtattgtatcttttttactaccagagtcttagagagagaaggaggctgtcaca

SEQ ID NO: 710452 - DNA, 1728 bp, Homo sapiens
tttttttttttttttgagacggagtctggctctgtcgcccagcctggagtgcggtggtgtgatcttggctcactgcaagctccgcttcctgggttcacgccattctcctgcctcagcctcccaagtagctgggactataggcacctgccaccatgctcagctaattttttgtatttttgtagagagggagtttcactgtgttagccgggatgatctcaatctcctgacctcatgatccacccatctcagcctcccagagtgctgcgattataggcatgagccactctgcacagcctagacttcaagcttttagaatagcgtctctctctctctctctctctctctctctctttctctgtctccctcccatcgtataaccagtgagtaaaacaacatctgggacatgtcagtacttgctagatatttactgaataaaagaatgaatgactgaaattcaaacccgtgtctccaaaatccaagttcttgtctgacatcatgacttgttgttctccaggagaacaggagacgtctctctctgtctcctaggctgagattgcagtggcgcaatctcagttcactgtaccctctgcctcctgggcccaagtgatcctcccacctcagtctcccaagtagctgagatcataggcatggaccaccatgcctggctaatttttgtatttttagtagagacagggtttcgccatgttggccaggctggtcttgagctcctggcctcaagtgatccacctgccttggcctccccaagtgctaagattacaggcacgagccaccatgcacagccatgcatatctcctttatgtaacttaacaacatctgcaacrtttgtttgtgtgagtttttttattctgcctgcatttgtgtatgtgagtcttttcctatggatttttcccaccatggctgtaagcaccatgagagtgaggaaaatagctgttttgctttatcatattttctctggtgcctaacaaagtacctggaacacaagagagtcactaatgggataaatacatgcattaatgggatttgtcaatgaagggaaaaatttagtgcattagcttgaatgaggaggtgggtcctactggcctcttgggtagaggccagggctgccactaaacattctacaatatacaggacagcctcccacaccaaaaactatacagcttaaaatgtcgatagtgctgaggttgagaaatcctggtttgacatattattcctgtgttaaaattaatatatgtaaaataatttcctcagttgttaacatggcatttttatcaagcaattttgttttctctgaaatatacctcagattgtttttagtttttccagaggaaactttattcatcttttactagagaaaagaatatggcaaacagtgaatctgtgtttcaggaagggtaacgtcgtttttcttttaatttcccttttgaagctctcggggtgctaccaacatcttggaaatctggataatttgagtattactaagggaatagtttcattctacatgctacaaatgtttaatcattttatttatctaaagctcctttcttggccaggtgcggtggctcatgcctgtaatcccagcactttgggaggctgaggcgggtggatcacctgaggtcaggagttggagaccagcctagccaaaatggcaaaaccctgtctctactaaaaaaatataaaaattaaccgtgtgtggtggtgcgtgcctgt

SEQ ID NO: 710453 - DNA, 1459 bp, Homo sapiens
tgctctttgaacccagccaccatgctgtgaggaagcccagatcacagggagaggccacattttgatgttccaatcaacagtcccagcacaggtttcagatgacagccaacatcagtttccagacatgggactgaagaaggctttgcgaagactccagcccagccactacgacagcatgagagacccctactgacmatcacctacctgaacccatcaactcccagaaccatgaaaaaaaaaacttttttttttttttttgagagggagtctttctctgtcccccaggctggagtgcagtggcgcaatctgggctcactgcaagctccacctcccaggttcttgccattctcctgcctcagcctcctgagtagctgggactacaggagccgaccactacccagctaaatttgtagttttagtagacacagggtttcaccgtgttagccaggatggtttcgatctgacctcgtgatctgcccacctcgccctcccaaagtgctgggattacaggcgtgagccactgtgcctggccttttaaaaaaaaaaaaaaatgagtttcactcttgttgtccaggttggggtgcaatggtgtgatctcggctcatggcaatctctgcctccaaggttcaagtgattctcctgcctcagcctcctgagtagctgcaattacaggcgtctgccaccacacccggctaattttgtatttttaatagagacaggatttcttcatgttggtcatgctggtctcgaactcccgacctcaggtgatccacctgccttggtctcccaaagtgctgagattacaggtgtgagccactgcgcccagcaagattgctattttaagtgcctaaagttttggggttatatattatgcagtaagagtaacttaaacatcctcctttccttctagctttttgaatctcttagtcatcaaacctagtctctctctgaagacctggtctgctttaatcaatgttttccccatagacccagcgagaggtaggtggagttatcttcctactcttcatggctgctcagaacccacctcccgggttctcgccattctcctgcctcagcctcctgagtagctgggactacaggcgcacctacctgaacccatcaactcccagaaccatgaaaaaaaaacttttttttttttttgagagggagtctttctctgtcccccaggctggagtgcagtggcgcaatctgggctcactgcaagctccacctcccaggttcttgccattctcctgcctcagcctcctgagtagctgggactacaggagccgaccactacccagctaaatttgtagttttagtagagacagggtttcaccgtgttagccaggatgcccggctaatattttgtatttttagtagagattgggttttgccatgttggccaggctggtctcgaactcctgatcttgagtgatctgcccccctcagccttcca

SEQ ID NO: 710454 - DNA, 1459 bp, Homo sapiens
tgctctttgaacccagccaccatgctgtgaggaagcccagatcacagggagaggccacattttgatgttccaatcaacagtcccagcacaggtttcagatgacagccaacatcagtttccagacatgggactgaagaaggctttgcgaagactccagcccagccactacgacagcatgagagacccctactgaccatcacctacctgaacccatcaactcccagaaccatgaaaaaaaaaacttttttttttttttttgagagggagtctttctctgtcccccaggctggagtgcagtggcgcaatctgggctcactgcaagctccacctcccaggttcttgccattctcctgcctcagcctcctgagtagctgggactacaggagccgaccactacccagctaaatttgtagttttagtagacacagggtttcaccgtgttagccaggatggtttcgatctgacctcgtgatctgcccrcctcgccctcccaaagtgctgggattacaggcgtgagccactgtgcctggccttttaaaaaaaaaaaaaaatgagtttcactcttgttgtccaggttggggtgcaatggtgtgatctcggctcatggcaatctctgcctccaaggttcaagtgattctcctgcctcagcctcctgagtagctgcaattacaggcgtctgccaccacacccggctaattttgtatttttaatagagacaggatttcttcatgttggtcatgctggtctcgaactcccgacctcaggtgatccacctgccttggtctcccaaagtgctgagattacaggtgtgagccactgcgcccagcaagattgctattttaagtgcctaaagttttggggttatatattatgcagtaagagtaacttaaacatcctcctttccttctagctttttgaatctcttagtcatcaaacctagtctctctctgaagacctggtctgctttaatcaatgttttccccatagacccagcgagaggtaggtggagttatcttcctactcttcatggctgctcagaacccacctcccgggttctcgccattctcctgcctcagcctcctgagtagctgggactacaggcgcacctacctgaacccatcaactcccagaaccatgaaaaaaaaacttttttttttttttgagagggagtctttctctgtcccccaggctggagtgcagtggcgcaatctgggctcactgcaagctccacctcccaggttcttgccattctcctgcctcagcctcctgagtagctgggactacaggagccgaccactacccagctaaatttgtagttttagtagagacagggtttcaccgtgttagccaggatgcccggctaatattttgtatttttagtagagattgggttttgccatgttggccaggctggtctcgaactcctgatcttgagtgatctgcccccctcagccttcca

SEQ ID NO: 710455 - DNA, 961 bp, Homo sapiens
tgaatggcaaatctcatgtccttaatcatactatacttcccagactctgagcagatgaaaggaacatgcttcttgacctctttgtcctgacccacttagtcttttttttttttttttttttgagaagggtctcactctgtcgcccaggttgaagtaagtggcacaatcacagcttactgcaacttctgcctgctgggctcaagtgatcctcccacctcagcctcccaagtagctgagactacaggtgcatgccaccatgtccagctaatacgtttctaagagatgaggtctcactatgttgtccaggctggtctcaaactcatggattcaagcaatcctcccgcctcagcctcccaaagtgctgggattacatgtgtgagcaccagggccactgcttttactgcactacccacaatgagtttcaaatggaaaagtaaaggataaagcaattcaaaatttagaagaggaagaagagagaaactaagttcaatagcctttaatcttgtcagactgagtacttctacctacccctggtatcaagtcccacatctgtcctgaaactaaatcctaacctctttagcaggctgagaaagagggaaaaaagaaccttttacaagatatgataatagatctatgtcctttcaagaataacactgattcagtgaatattcttctaaagtacagtcaaaacccattgagcaagctcatacagatgagatatttgtaggttattgtattgtcttaatgattctagtgtcataacacagaggttaccaaaatgtcattcaaataagcctgataaaatgcagtttatttcccataagcaaagtcaccttactcaaatcacygtgactgtatgacattgctatgggagctctaaaagcaaactattgtgtaatgagtgagaagtccttttacttggtagcagaggaaaatacagcacctgagaaatatgaaaata

SEQ ID NO: 710456 - DNA, 1166 bp, Homo sapiens
tgctgtttcctgactttaatgattgccattctaactgatgtgagatggtatctcgttgtggttttcatttgcatttccctgatgaccagtgatgatgagcattttttcatgtgtctgttggctgcataggtgtcttcttttgaaaagtgtctgttcatatcctttgcctacwttttgatggagttgtttttttcttgtaaatttgtttgagttctttgtagatactggatattagccctttgtcaggtgggtagattgcaaaaattttctcccattctgtaggttgcctgttcactctgatggtagtttcttttgctgtgcagaagctctttagtttaattagatcccatttgtcaattttggcttttgttgccattgctttcggtgtttgtcatgaagtccttgctatgggtcttaaaatctctatggaatctaaatttggtgtcaagttagcttattttttattggtctactttgagtgtaaatgaaaacagatgaatgctaccttccttaacaatagtcttttgttaattttaaatctgaaatttttgttttggtaaaattttgaatttatattaaagcttttttagctttatgccccctagctattaatagaagcaaactcttgctgtttatttatgacagaacacacatgcaggacttgaaagatgttactaacaatgtccactacgagaactatggaagcagaaaactggcagctgtgacttacaatggagttgataacaacaagaataaagggcagctgactaagtaagtatatattttttctccaaaaaaggtattctttctgtagtcaataatcatattgtttcattttcattaaatttctcctggctcctcagtagaaaatttggataatgttctctatgcacaacagcataaatgtatattgttatgctttgttaatagtagacacttttttgaatgaaccattttgatggagttttcacttacagattatgtggaaacaaaggacaggctttaataaaaggaatatgtagatgaatttattcttgcttaccttctctaatcctattccagggagtaaattagctggagttttggtttctttttttggttattagagtggtgtaagtgactatgaattgtgtagctttgtcctattgagcttgtatctcaagctg

SEQ ID NO: 710457 - DNA, 843 bp, Homo sapiens
actcaggaggctgaggcaggaggaaggagaatcacttgaacccatgaagcagaggttgcagtgagccaagatcacaccactgccactccagcctgggtggcagaatgagactccgtctccaaaaaaaaaaaaaaaaaagtggtaaaatgatgagatgcatagagaaaaaataggtgcccaaaatactaaaggtcgttgtttttgtttaaagtaaaaacaatagtaaactggctatacaagatattgaaatagaaaacaaggagacttcatcaaaagagtgtggcacttattagagtgaaaaactagactgatagaatgaaattatagacagaaatccagatgtatgtgtaattatgcccgatttgtcagatattatttatcgggggaagaagtcatcaatattattgggcaaactgagtattaaagaataagaaaaagaaacagatattactctatatgctataataaayttcagacaagttaaagatacaataaatcactgaagaataagaaaatggattgaggagaaaagactgttttcttttcttttttttttttttgagacggagtctcatgctgtctcccaggctggggtgcagtggcatgatctcagctcactgtaacctccacctcccgggttcaaggattctcctgcttcagcctcccaagtagctgggactataggcattcaccaccacactggggtaatttttgtatttagagtacagatagggtttcaccatgttggacaggctggtcttgaactcctgacctcaagtgatccacccaccttggcctcccaaagtgccagaattacaggcatgagccaccatgcccgacctg

SEQ ID NO: 710458 - DNA, 843 bp, Homo sapiens
actcaggaggctgaggcaggaggaaggagaatcacttgaacccatgaagcagaggttgcagtgagccaagatcacaccactgccactccagcctgggtggcagaatgagactccgtctccaaaaaaaaaaaaaaaaaagtggtaaaatgatgagatgcatagagaaaaaataggtgcccaaaatactaaaggtcgttgtttttgtttaaagtaaaaacaatagtaaactggctatacaagatattgaaatagaaaacaaggagacttcatcaaaagagtgtggcacttattagagtgaaaaactagactgatagaatgaaattatagacagaaatccagatgtatgtgtaattatgcccgatttgtcagatattatttatcgggggaagaagtcatcaatattattgggcaaactgagtattaaagaataagaaaaagaaacagatattactctatatgctataataaatttcagacaagttaaagatacaataaatcactgaagaataagaaaatggattgaggagaaaagactgttttcttttcttttttttttttttgagacggagtctcatgctgtctcccaggctggggtgcagtggcatgatctcagctcactgtaacctccacctcccgggttcaaggattctcctgcttcagcctcccaagtagctgggaytataggcattcaccaccacactggggtaatttttgtatttagagtacagatagggtttcaccatgttggacaggctggtcttgaactcctgacctcaagtgatccacccaccttggcctcccaaagtgccagaattacaggcatgagccaccatgcccgacctg

SEQ ID NO: 710459 - DNA, 538 bp, Homo sapiens
aagatgatgggaaacaaaacctttcacctggctctccctgctgtggcatgctaakatggatgagtaggtcttgcagtgcagataatgatttttacaaattcatcgtggaaagtgacagaattctttcgagtggggagagaccttaagcaaggggaggtaagcagacctttttcaaatgtgccaggtgatgccaggtgccttgcaggtcctgtgccaggcactggcatgacattctttgtttctgaaacagaatctccctctgttgcccaggctggagtgcagtggcgctatctgggctcactgcaacatccacctcccgggttcaagtgattctcctgcctcagcctcctgagtagctggaattacaggcacccgccaccacatttggcagatttttgtatttttaatagagacggggtttcaccatactggccaggctggtctcgaactcaagacctcaagtgatccacccacctcagcctcccaaaatgctgggattacgggcgaggtatggcattctttcatttcacttatgaaa

SEQ ID NO: 710460 - DNA, 1948 bp, Homo sapiens
tttcatcaacaaacacatataaataaatgattttaagactcattgttgccaaggtattctttttataatatggcaccattgttgccttttgtgttgaaataacaaaaattttctcaaccttagaacttaacgagtaatacgtaaataaatcttcagaaaaaaattatctagtatatgttgacagttctccaagatcttttgacattgagagcaagcttattaaattcactctaatagaagataccaagggaaatacgttccaaattaatgactgtctcctttcaaagatcaggtaataatacttcacttagctagtctagataaagaagtctaaatcatcccataacaaaattcatagattaaaattgagggattactgtagaattattgctaagaatagcttttctaaaattatctgcaactggattttatatttctatttaagcaatattcttaagtcaatattttaatgaaatcacatgttcattgttctataaaggcttttaaatattttattctgtggttgtaaatttaacttctaattattttttgagttttggaaatgtagtaaaaatagctttttttagaatccatctgatttcatgtttatttcccatatcttcaggaatttacggtgttttcttcacccctttctccattagtgacatgtttgttccctccctccttcaattcctgccatccatattcatataatttccctagttctgagccattgcttgtagtttggatatacaaccacaaggttcatattgaattttgtgtttatttcctcctctctgtttagagcatcagtcctgcctttcttgccctgaaccctgccagtgccacccaagtttgcctcttgttactagtgcttcctactctggcagacaccttcagaggagaaaacaggtggcaccaatccaaacgagtgtgataatagacgtgcttggtttcccaggtagacaaagaagcagcagctgtggttatatctccatacagctggagagaagaaagaaagaaaaggaaragatgaatttaatgaaattgaacaaactcttcaatttcccaaagtcaccagtacaatagaagatatgctgggtgaattacttttctaaaacaaattttaatttatttttttattagtagtcacttatcagtgcctataaaactgttgtttatatgcttgctatggactttgtgataattcatttgaatgcgtaatttgtcttagttctttacataaagcttagctctctaattgaagacaagattatttcttattgtttataaataattttggaatcagtgatactcaactaaaatatatataaagtaaaagtatataagtatatatatctgtatgtgtatgtgcatatgtagaaaaaagaaagttacccattacatctaatctatgccccagaaataatcatttgaaacagtttaaaatgtaccttaaaaccaagtgtaatctaaaatcttatgaatatgctttaagaacattagcatgtagtagaaatagacaatcagcacttaaattagcatgaggaaagcctgtttattaagagcttgctgtagctagggagtcagccaatgtcactttgctatagctagggagtcagccaatgtcgctcacatttggcagatactcaaaggcagtcagggttgtcaagagctttatagtgaaaaaaggaaaggcttcaggtttctcctaattggaggctgtttgaatgcgggtggtggtgggcttactagaagtggggcatcctatgtgattagttgggaagcatgtttggctttcactggttgatcctgagttgtgggcaggtaagagagggggaaaggacaggtgagctgaagtcttggaccaagtcaatcatcaaagtatgattgctacataagtgtggtttgacttctgaaattagttgctgcagaagttgttgctcgg

SEQ ID NO: 710461 - DNA, 2023 bp, Homo sapiens
atgaagaagattcgttacttacatagatcaaaacagaaaaaagaaataaatatcaaatatgtaaactagaaataaccaccattcattcctgattacaaacaaacaaaattcttagcaaaatatcagtagaacaatattccttaatgtaatataatttagcatcaaatgacaaaatagttctggctgatgagaagagagacatttctattaatttgaacacaatacaataacttctgttaggaatacttttgtttacctgaaagtgttagctagtatagattagagaacaaamtaagtgctaacatattttaagcaatgtaaaaattattagtctcacaaagtaaatcattaattctgaggcttttcatgagtcaatatcctttgagaatttgataattattattcatctctgaggaaaaatgtcagatagattttcaaagtcacaaaatttagcatgaaatatagtttatccttttgaaatttagttattcatttagttatttatttatgtagttatttgttattattgtcatataatatagaaacagtacttcaaagatatattccttatataccttccttattatcagttgattaccatttcaggaaaaaggggaaattaatacaagttgtataataaagcaaaagtattctctaattattctcagaagtgattttcaaaatacctgatgctaaaatgaagtttaagcatttggaaatgtggaagtgtttgagaaatgacaaggcacatgtaattgttactatataaccacttttttatagctatacgtgcagaaaattcaaactcatagatacatgagggaataaaataaaaatcaaggttttcttagctcacttcaacaaatatatctaaactgtgtttctcaaggaacaccataattcactgacaattttccaggtgaatttatgctggagttgcttttgtatttatgccaattagataacattgacttaggtttgtgtcaaaaatgctatcgttatctgcaaaataacaatcgagaaactaccctccagtttgaagtaatctgatgaggtaaccttccaaaaagttttgcaacgtttgcaggtgactgaatattttatctttcacagcaaataaaaactattgtcattctttattcccatctcctatagcaattcttcagctttgaggaatttacatggttgaatacttccaatatatgtaaaggagactaaaaatattttaaagcaaaactatgtcaatttataagttaattaactagaaattataataagttaatatttttctaaatatatatacagatgaagttgactcaagaaagggaaaatatgaatacatagataattgcagaaaatgtaataaaaattcaagaattacatttaaaagtaaagctctcggataatataacttaccagaaaatgtaataaaaattcaataattacatttaaaagtaaagctctcggataatataacttaccagtgagttccctcaagctttcaaagaatggataactcaatgctgtataatctttcaatgtttcccttaggttgccaagatatctaaagtttaattccggacttaggaatttagcacatggatatctgaggaggctaaaagaaattgaaacagcggaacaatcaaacctcacgaaagaataagagctggaagaatacacagcataaaactattagtattagctcaattggccaattaattttatcccatcactggtagacatatattgatacgtaatctagaacttcttatctaaaggaactcaactactttaggttttttaaaaaatctacttttgtcttattcttcactttttggaagctataaagtcaatgcctcatggagggagaaggcaaaaaaaaaaaaaaaggaggacataactaatttgctaagtcagcatctattattgctcacttagattgaatagcattaatgttttctcatataggctcatatgcacaaagcatagattaaatcagtagtaaaagtttagccatatacat

SEQ ID NO: 710462 - DNA, 2365 bp, Homo sapiens
tgcagatggtactggataacctccagtctgtgcctccatcttgctatataaactcttctaaaattagtggaattctcataagaaaaaaaaggcaagtccaaagtgaagtcatgttacttgcttgcctgatacttcaggatgtgcaaaattgaaacaatatgtggtgttcatagctagtgtcaatatgtctaccacataagagatgcctatttaattttagacactgttcaagcggatttaagggctttatgatgaaagctgttatgtgccacccagttctcccctcagcttctgggtgtgttaccagatgactgtcctcaggtacagtctgtttttgggaatgcacaattccaagctcacaatttctttcacaagcagcctacattcagtgtctgatcaacacgtgagatcaagaamcagatgcttcacctactccagaccactcacctgtggctcactcagcactccccatgggtgtgtcctgggtcattttccactgcaccacaatgcactatctccccatgccaaagcctcctgtctctcacaaggcagtgatcccaatcatgcttcctcataagcatactgcacactaattttaatctcagattttgctacctgaaggacctaacccatgacacttggtgccaagaacggtccaaataaaggagaggctaaaatggaattctggagttggaccagctgccaaccagctggcgataaaaactccactggtggcaggtggagcacagagaggccctggcaggagctaacagcacaattactaaaacattcactggctgtggatcaatgttataccactggcaaaaactgcattagctggtacaacctggtgttgaagagagatgtagtaaacagtaaccatagggcagtgggattgagtgcctattgctaagcttgagagtgattgattgattgataattaaaaactaaatgtggagaccagaaggcctcactgattgcatataaagagactctactctcttaaaactggaaggcagagaaagctgaggaccagacctagagcttagtgggaaaagtagctgcgcttcaaagaagaaaaatcctcaccacggcagctatgccatgccaagtgcaggagccttgttgggaaacaatgaccctgacatgtagaatgagcctatctgggttgatgctctaaatattttgaatccccaggttttccttaatcctctgactttgcaaaagtggcatgctccttcttaggaaaagagtgcttcctagtggggccaggaactctccattgcttgatagagaagtctttgttttgaaagacaccatgaacatatcacaggtccctacttcttctcctggcagccaggagggttaatttacaacaaaaccaagctgtttgtatcaaataacagcagctgtcatctggtaacatgattgaatggtctgtttaaaggcacagttcatgctccagcaaggagacaatgttttaccagaatggggcactatctttgagaatgtagcatgtcctttaaatcagtggcagctatatggcactgctccctgaacaagtagaatgcatggatccaacaaacaagagatcaaaataaaagtctccctactcaccatcacttcaagtgatttatttggggacttatgcattttatctttgcagctctgtattccgtagacttagagctttttgttaccaaagcgggtttgcctctaccagggagaccttaagagtccccttgacctaaaagctaaagtcatggtctaagcatttcagacttttcgtgccagagaaccagtaggcaaaaagagtcagtaatatgatggggtgtagttgatcttgactctcaggaggagacagctactggagggcaggtaggagtacacccgacacctaggtggtttactttggcttctcttggcaagtccttatctaactgaagaatacatggtgaccaggggcttggatgcctaggggaataggggttaaaatctagatcacatcaccagatgaaccaccaagataaacagagatgctggtggaaggtgaaggtagtctagattggatattagaggaggaagaccctgaggatccagtgcagccttgacaccaaatacagaggcagggcctggagctctttccagtgaccttcctctgataaatgaccaagagaaagaaaggcttgcagaattcttgggagtgtgctcccaggtcttacacaaagaagtgagtaagaaggtgcacattgtccactgtgatggggactatggtccatcagacagatccctctgcaggacttcctcatccaggttcagggagtgctagcaaaaggcagccttcagctgtaagccctccacagaa

SEQ ID NO: 710463 - DNA, 1605 bp, Homo sapiens
attattttaaaataatagctcattccttttttccagaagatgaaatgttaataccaaatgaaatactaaagaatatttcattacatgcaaaaatttgccacattattgctgttgttttatatatatacatatatatatcttcatgtttatatatatctcatatatatagcagggggcagtgatattcacagtaagcacagtgaacttgttctttattaccgcagtttttttccagtggatctaactaagagcaaaatcccaagatatatatatatatatatatatatcttagagatatatgtatcttagagtagagatatatgtatcttagtgtgtgtgtatatatatatataatctctatagcctagagaatatgcatatatattctctaagtatatatataagtatatatatatacttatatatatataagtatatatatacttatatatatatacgctaaatatatatacatatatacacatatatacatatgtgtgtgtatatatacatatatacacacatatacatgtgtgtatatgtacatatatacacacacatgtacatatgtgtgtatacatgtacatgtatacacacacatgtacatrtgtgtatatatgtacatgtatacacacatgtacatatgtgtatatatgtacatatgtgtgtatatatgtacatgtatacacacatgtacatgtgtgtatatatatacttagcgtatatatatacttatgtatatacatatatgtgtatatatatacttaatatatatgcatattctctaggttatagaagtcccacggtttttatgtatgaggttaaacttcttatgttcttgcctttgaacattttgatccattatttaatatagtttagttcagttcacatagggtaattttatatctaattaactcattcatcttttccctgttctaagttttcaaaggaaaatgtgatttgggaaatgcatttttaagacccttataactgttctacaagaatccatgaaaaactgctatttgtgagtcagattttttaatgcataatttagaaggtagctataagagagttctttaaaagctttgtatctggcagacagaatggtacctgattctttcatacataacttcacacagggaatgtgttgctcttgagagtttgggaatgacttcatttccttatgttctttttgttgtatgaaattacaaaaagaacattagttaccttatagttgttagctaattctcaatgattaagaaaaaggaccagtttttatttttgtttttgagggggctgcctcttggaaaatgggtcaacacagaggggatattggagtccaagaacctttcaaatacaggtggaattactctgttttggaataaaattaacgcaagtcgttcaccattagaagtgaatttgtgttatttctatcattagggtaaggtgaaatatataaagctcataaatacctgaaaagttgcacagtaagacaactatgaaggctgtgtcatcagatagtacctgctttgttgttaagtaattggtttgtcatcttccaagaagatttggagattgacctggacaatgaaggtagtgaaaaaa

SEQ ID NO: 710464 - DNA, 1605 bp, Homo sapiens
attattttaaaataatagctcattccttttttccagaagatgaaatgttaataccaaatgaaatactaaagaatatttcattacatgcaaaaatttgccacattattgctgttgttttatatatatacatatatatatcttcatgtttatatatatctcatatatatagcagggggcagtgatattcacagtaagcacagtgaacttgttctttattaccgcagtttttttccagtggatctaactaagagcaaaatcccaagatatatatatatatatatatatatcttagagatatatgtatcttagagtagagatatatgtatcttagtgtgtgtgtatatatatatataatctctatagcctagagaatatgcatatatattctctaagtatatatataagtatatatatatacttatatatatataagtatatatatacttatatatatatacgctaaatatatatacatatatacacatatatacatatgtgtgtgtatatatacatatatacacacatatacatgtgtgtatatgtacatatatacacacacatgtacatatgtgtgtatacatgtacatgtatacacacacatgtacatgtgtgtrtatatgtacatgtatacacacatgtacatatgtgtatatatgtacatatgtgtgtatatatgtacatgtatacacacatgtacatgtgtgtatatatatacttagcgtatatatatacttatgtatatacatatatgtgtatatatatacttaatatatatgcatattctctaggttatagaagtcccacggtttttatgtatgaggttaaacttcttatgttcttgcctttgaacattttgatccattatttaatatagtttagttcagttcacatagggtaattttatatctaattaactcattcatcttttccctgttctaagttttcaaaggaaaatgtgatttgggaaatgcatttttaagacccttataactgttctacaagaatccatgaaaaactgctatttgtgagtcagattttttaatgcataatttagaaggtagctataagagagttctttaaaagctttgtatctggcagacagaatggtacctgattctttcatacataacttcacacagggaatgtgttgctcttgagagtttgggaatgacttcatttccttatgttctttttgttgtatgaaattacaaaaagaacattagttaccttatagttgttagctaattctcaatgattaagaaaaaggaccagtttttatttttgtttttgagggggctgcctcttggaaaatgggtcaacacagaggggatattggagtccaagaacctttcaaatacaggtggaattactctgttttggaataaaattaacgcaagtcgttcaccattagaagtgaatttgtgttatttctatcattagggtaaggtgaaatatataaagctcataaatacctgaaaagttgcacagtaagacaactatgaaggctgtgtcatcagatagtacctgctttgttgttaagtaattggtttgtcatcttccaagaagatttggagattgacctggacaatgaaggtagtgaaaaaa

SEQ ID NO: 710465 - DNA, 1605 bp, Homo sapiens
attattttaaaataatagctcattccttttttccagaagatgaaatgttaataccaaatgaaatactaaagaatatttcattacatgcaaaaatttgccacattattgctgttgttttatatatatacatatatatatcttcatgtttatatatatctcatatatatagcagggggcagtgatattcacagtaagcacagtgaacttgttctttattaccgcagtttttttccagtggatctaactaagagcaaaatcccaagatatatatatatatatatatatatcttagagatatatgtatcttagagtagagatatatgtatcttagtgtgtgtgtatatatatatataatctctatagcctagagaatatgcatatatattctctaagtatatatataagtatatatatatacttatatatatataagtatatatatacttatatatatatacgctaaatatatatacatatatacacatatatacatatgtgtgtgtatatatacatatatacacacatatacatgtgtgtatatgtacatatatacacacacatgtacatatgtgtgtatacatgtacatgtatacacacacatgtacatgtgtgtatatatgtacatgtatacacacatgtacrtatgtgtatatatgtacatatgtgtgtatatatgtacatgtatacacacatgtacatgtgtgtatatatatacttagcgtatatatatacttatgtatatacatatatgtgtatatatatacttaatatatatgcatattctctaggttatagaagtcccacggtttttatgtatgaggttaaacttcttatgttcttgcctttgaacattttgatccattatttaatatagtttagttcagttcacatagggtaattttatatctaattaactcattcatcttttccctgttctaagttttcaaaggaaaatgtgatttgggaaatgcatttttaagacccttataactgttctacaagaatccatgaaaaactgctatttgtgagtcagattttttaatgcataatttagaaggtagctataagagagttctttaaaagctttgtatctggcagacagaatggtacctgattctttcatacataacttcacacagggaatgtgttgctcttgagagtttgggaatgacttcatttccttatgttctttttgttgtatgaaattacaaaaagaacattagttaccttatagttgttagctaattctcaatgattaagaaaaaggaccagtttttatttttgtttttgagggggctgcctcttggaaaatgggtcaacacagaggggatattggagtccaagaacctttcaaatacaggtggaattactctgttttggaataaaattaacgcaagtcgttcaccattagaagtgaatttgtgttatttctatcattagggtaaggtgaaatatataaagctcataaatacctgaaaagttgcacagtaagacaactatgaaggctgtgtcatcagatagtacctgctttgttgttaagtaattggtttgtcatcttccaagaagatttggagattgacctggacaatgaaggtagtgaaaaaa

SEQ ID NO: 710466 - DNA, 802 bp, Homo sapiens
gtgaggttattgtgctgtttttttcttttgcattcttggcatgaacattttacaaaatcttattattcttattcttgataaatagttctgttcaagcagttagtacattttttttgtgatatgcatctgtatagtgaaattttaaaataaaatactagcactctttaagtgaacagcaactattttagtgtccagtgttacttacaataattgttacatattcataatacatagaacgactttgatacttagtcatggcaaatttacttcccatgtgtttctccccactccccaatttgttttcttaaataaaatgtttaatctatgccagactattcttgaaataagtgatacaatatagaaattattattattatgatatggtcatgtttcttttgttcactatattctcagggtccagcagagttcctggcactcgagtatttttgaatgaatgaataagtgaatgataaatatctttgttgtaatgcaactattatgtgttaatttgaaaaacttgactgtttttcccaattatacaaaataacagaaaattttgaartttttcactctaaattactttgaaaaaatattaaattataattttagcccagaatttattattacagttcagcatgcataattttaatgagcagctttgaactctaaggctaacactgggatttgaattgctgcgcagccttggagggtgacctagtgaagaggaatcttgtgagttgctcagtgttaacaatactgcaattcagacacaggtagaagggcagtagttagctataactgc

SEQ ID NO: 710467 - DNA, 540 bp, Homo sapiens
aacattaaagacagaagctacatattcatacacaaacacattacttaatatattaattctatattcgtctatattaatttctagttgtaaaagcattaaaatccacataattatggacatcatccatccctaaatgtggattaaaagaaaatgtactaacagttcttttaccatataaaacagaaaatataaggataaactgccctgccaaatatacagttaaacttatgcatattgcaaaataagraaaataatgtattctaaaatcataccaatcttagataatgtataaaaaatatgcctgtatataacaagtatcacaaagtatatgaatcttttcattttttgaaggtttgatcattcctatctactattctgactcatatgttctttcttttacagtcaagcttatcataccaacctttgataatatatataaatatgcctgtatttaacaagtatcacaaagtatatgaaccatttgtttttcctttttttttttgagacagtttcactctgtcaccaaggctagagagcaat

SEQ ID NO: 710468 - DNA, 540 bp, Homo sapiens
aacattaaagacagaagctacatattcatacacaaacacattacttaatatattaattctatattcgtctatattaatttctagttgtaaaagcattaaaatccacataattatggacatcatccatccctaaatgtggattaaaagaaaatgtactaacagttcttttaccatataaaacagaaaatataaggataaactgccctgccaaatatacagttaaacttatgcatattgcaaaataagaaaaataatgtattctaaaatcataccaatcttagataatgtataaaaaatatgcctgtatataacaagtatcacaaagtatatgaatcttttcattttttgaaggtttgatcattcctatctactattctgactcatatgttctttcttttmcagtcaagcttatcataccaacctttgataatatatataaatatgcctgtatttaacaagtatcacaaagtatatgaaccatttgtttttcctttttttttttgagacagtttcactctgtcaccaaggctagagagcaat

SEQ ID NO: 710469 - DNA, 615 bp, Homo sapiens
tgctcgtgactgaaccagcaccaggcactgactttgggctccaagtcctctgttttcatgcaggacaagtaagtggcttaaatttcagaattaaggaaattatattgatgtaaaaagaaaaactttgttaaagtgtaaaagacattaataatacctgacgttcctggaatatgcacagcaatgacttcttttaggacattttagcaatgaaagcagcattaaccgtgataaaacccgttactttccaaggacccgctccgcaaagcgcccaccctcgagggaggaaagccgagctgcgcctccgcgcaaggccagggagtgtggctcgagccccgctgcagaccgggcgtcgccggttaatcaatgacactgtcgggtcagcagcgcagcctcccagctgcggaggggccgcggmtcgatccagacctgcctcggctgcgacgcgcacgaaaaccgcgcgcaccgcaaacccgcttcagtctccaagaggaaagcaagaaacaaggctcgggtttttttctttcttttttctttcctttttttttaaggttcacagagggaataattcagaactccatgtgcgaaggcacttaatcaacaaacttatgagcagtt

SEQ ID NO: 710470 - DNA, 581 bp, Homo sapiens
ccatccagcggtcccatggtgtaattctccgtccaggggtcccatggtgaaattctccgtccaggggtcccatggtgtaattctccgtccaggggtcccatggtataattctccatcgagcggtcccatggtgtaattctccgtccaggggtcccatggtgaaattctccgtccaggggtcccatggtgtaattctccgtccaggggtcccatggtgaaattctccgtccagcggtcccatggtgtaattctccgtccaggggtcccatggtataattctccatcgagcggtcccatggtgtaattctccgtccaggggtcccaaggtgaaattctccgtccagggttcccatggtgtaattctccgtccagggttcccatggtgtaattctccgtccaggggtcccatggtgaaattctccgtccaggggtcccatggtgtaattctccgtccaggggtcccatggtgwaattctccgtccaggggtcccatggtgtaattctccgtccaggggtcccatggtgtaattctccgtccaggggtcccatggtgtaattctccgtccaggggtcccatggtg

SEQ ID NO: 710471 - DNA, 623 bp, Homo sapiens
gagagttcaagtgttaagtataatctgcctgattctccttgcttggtccctacaaacaaacactttcccttctcttgctacaagccttcgtttagatatggtatagatacgtagtcttattacgctgggcgagtggacctccgtttggttcaataacaaaatctgaactgaggagagttgtgattacactattgcatttcatcayaaatattttccttgttgaatccaagcacacaaaatacagaatgatcctcttcctcagtacagtttttccctctgttataatagtaccatgatatcctcagctgaagaaaaggtgctagatgctttgtaccatctgatctttttgtcaggtgcttttctgatgcaaattattctctgaattcttatctctccctttcactctgagccataatcttgtctatgtcctggagctcattgcgtttttcccagaacacagttgagtattcaaggacctcccgtaagctttttccctcttcttctcttgctatattttcaatatcacaaccccattttaattagctttgataagctggttaaaatctctgagttcaattggtaaatccctgtgttaactctaactcttcatcaataaggggttc

SEQ ID NO: 710472 - DNA, 623 bp, Homo sapiens
gagagttcaagtgttaagtataatctgcctgattctccttgcttggtccctacaaacaaacactttcccttctcttgctacaagccttcgtttagatatggtatagatacgtagtcttattacgctgggcgagtggacctccgtttggttcaataacaaaatctgaactgaggagagttgtgattacactattgcatttcatcacaaatattttccttgttgaatccaagcacacaaartacagaatgatcctcttcctcagtacagtttttccctctgttataatagtaccatgatatcctcagctgaagaaaaggtgctagatgctttgtaccatctgatctttttgtcaggtgcttttctgatgcaaattattctctgaattcttatctctccctttcactctgagccataatcttgtctatgtcctggagctcattgcgtttttcccagaacacagttgagtattcaaggacctcccgtaagctttttccctcttcttctcttgctatattttcaatatcacaaccccattttaattagctttgataagctggttaaaatctctgagttcaattggtaaatccctgtgttaactctaactcttcatcaataaggggttc

SEQ ID NO: 710473 - DNA, 988 bp, Homo sapiens
attttcaatggaaaatgccatagcgtttgaaaactaggaatgttttggtgccgatttttatcaaagttgtacaccaagccattaagttggaacaaattccaacttcacaattacttgcatcacctcagtttactaatccaataaatgacaaaaaaaagacaaataaatgaaacagcattgcagagcacagcagctttgtttggctccttatggataaaatctccagtttgyccatagttttacctagaaatccagttgtagaatcaaattgtgaatccattacagctaataatttattttgggttttaacttcatggcctatttcaatggaaaaagattttatagcagttactttgcttctcagattttcagtgagtgtctcattttcttcttcacgggcactatacccattattagcatagccatcattcccggagttgtcaggaggtattccttcacccaggcctgcatgcttcattgtgctagaggagagagggaaaaggtgggcgcgggagagttgggtgggtaggaaagagctaggggtgacccggaccacatcttcagtaccaacgccccgtggaacaccaacttcttcccctaaagcaccatgacatcagtccaaaaagtattttttcaattgacctggcataggctctgcaattctgcaattagagactcactttttagcattaatgccttgagcctgttacaaggcaactcactgaaactttgcacacagcaaggtcctcatgttgctctggaatgggttgtatgggtttttcatagtagcgaagcctgagaagttattcttctgtggggcctgggtggattttctacccgagcactggacgtaggaggtagaaggaaaggtatggagggaacaatgcaaggaggtgagggggcttgatgagaagtgcccctggggtagcgaggtccgagtctgtttgaggtaggaatagggaagcacccatcctcctctgcagcataa

SEQ ID NO: 710474 - DNA, 988 bp, Homo sapiens
attttcaatggaaaatgccatagcgtttgaaaactaggaatgttttggtgccgatttttatcaaagttgtacaccaagccattaagttggaacaaattccaacttcacaattacttgcatcacctcagtttactaatccaataaatgacaaaaaaaagacaaataaatgaaacagcattgcagagcacagcagctttgtttggctccttatggataaaatctccagtttgcccatagttttacctagaaatccagttgtagaatcaaattgtgaatccattacagctaataatttattttgggttttaacttcatggcctatttcaatggaaaaagattttatagcagttactttgcttctcagaytttcagtgagtgtctcattttcttcttcacgggcactatacccattattagcatagccatcattcccggagttgtcaggaggtattccttcacccaggcctgcatgcttcattgtgctagaggagagagggaaaaggtgggcgcgggagagttgggtgggtaggaaagagctaggggtgacccggaccacatcttcagtaccaacgccccgtggaacaccaacttcttcccctaaagcaccatgacatcagtccaaaaagtattttttcaattgacctggcataggctctgcaattctgcaattagagactcactttttagcattaatgccttgagcctgttacaaggcaactcactgaaactttgcacacagcaaggtcctcatgttgctctggaatgggttgtatgggtttttcatagtagcgaagcctgagaagttattcttctgtggggcctgggtggattttctacccgagcactggacgtaggaggtagaaggaaaggtatggagggaacaatgcaaggaggtgagggggcttgatgagaagtgcccctggggtagcgaggtccgagtctgtttgaggtaggaatagggaagcacccatcctcctctgcagcataa

SEQ ID NO: 710475 - DNA, 988 bp, Homo sapiens
attttcaatggaaaatgccatagcgtttgaaaactaggaatgttttggtgccgatttttatcaaagttgtacaccaagccattaagttggaacaaattccaacttcacaattacttgcatcacctcagtttactaatccaataaatgacaaaaaaaagacaaataaatgaaacagcattgcagagcacagcagctttgtttggctccttatggataaaatctccagtttgcccatagttttacctagaaatccagttgtagaatcaaattgtgaatccattacagctaataatttattttgggttttaacttcatggcctatttcaatggaaaaagattttatagcagttactttgcttctcagattttcagtgagtgtctcattttcttcttcacgggcactatacccattattagcatagccatcattcccggagttgtcaggaggtattccttcacccaggcctgcatgcttcattgtrctagaggagagagggaaaaggtgggcgcgggagagttgggtgggtaggaaagagctaggggtgacccggaccacatcttcagtaccaacgccccgtggaacaccaacttcttcccctaaagcaccatgacatcagtccaaaaagtattttttcaattgacctggcataggctctgcaattctgcaattagagactcactttttagcattaatgccttgagcctgttacaaggcaactcactgaaactttgcacacagcaaggtcctcatgttgctctggaatgggttgtatgggtttttcatagtagcgaagcctgagaagttattcttctgtggggcctgggtggattttctacccgagcactggacgtaggaggtagaaggaaaggtatggagggaacaatgcaaggaggtgagggggcttgatgagaagtgcccctggggtagcgaggtccgagtctgtttgaggtaggaatagggaagcacccatcctcctctgcagcataa

SEQ ID NO: 710476 - DNA, 988 bp, Homo sapiens
attttcaatggaaaatgccatagcgtttgaaaactaggaatgttttggtgccgatttttatcaaagttgtacaccaagccattaagttggaacaaattccaacttcacaattacttgcatcacctcagtttactaatccaataaatgacaaaaaaaagacaaataaatgaaacagcattgcagagcacagcagctttgtttggctccttatggataaaatctccagtttgcccatagttttacctagaaatccagttgtagaatcaaattgtgaatccattacagctaataatttattttgggttttaacttcatggcctatttcaatggaaaaagattttatagcagttactttgcttctcagattttcagtgagtgtctcattttcttcttcacgggcactatacccattattagcatagccatcattcccggagttgtcaggaggtattccttcacccaggcctgcatgcttcattgtgctagaggagagagggaaaaggtgggcgygggagagttgggtgggtaggaaagagctaggggtgacccggaccacatcttcagtaccaacgccccgtggaacaccaacttcttcccctaaagcaccatgacatcagtccaaaaagtattttttcaattgacctggcataggctctgcaattctgcaattagagactcactttttagcattaatgccttgagcctgttacaaggcaactcactgaaactttgcacacagcaaggtcctcatgttgctctggaatgggttgtatgggtttttcatagtagcgaagcctgagaagttattcttctgtggggcctgggtggattttctacccgagcactggacgtaggaggtagaaggaaaggtatggagggaacaatgcaaggaggtgagggggcttgatgagaagtgcccctggggtagcgaggtccgagtctgtttgaggtaggaatagggaagcacccatcctcctctgcagcataa

SEQ ID NO: 710477 - DNA, 988 bp, Homo sapiens
attttcaatggaaaatgccatagcgtttgaaaactaggaatgttttggtgccgatttttatcaaagttgtacaccaagccattaagttggaacaaattccaacttcacaattacttgcatcacctcagtttactaatccaataaatgacaaaaaaaagacaaataaatgaaacagcattgcagagcacagcagctttgtttggctccttatggataaaatctccagtttgcccatagttttacctagaaatccagttgtagaatcaaattgtgaatccattacagctaataatttattttgggttttaacttcatggcctatttcaatggaaaaagattttatagcagttactttgcttctcagattttcagtgagtgtctcattttcttcttcacgggcactatacccattattagcatagccatcattcccggagttgtcaggaggtattccttcacccaggcctgcatgcttcattgtgctagaggagagagggaaaaggtgggcgcgggagagttgggtgggtaggaaagagctaggggtgacccggaccacatcttcagtaccaacgccccgtggaacaccaacttcttccccwaaagcaccatgacatcagtccaaaaagtattttttcaattgacctggcataggctctgcaattctgcaattagagactcactttttagcattaatgccttgagcctgttacaaggcaactcactgaaactttgcacacagcaaggtcctcatgttgctctggaatgggttgtatgggtttttcatagtagcgaagcctgagaagttattcttctgtggggcctgggtggattttctacccgagcactggacgtaggaggtagaaggaaaggtatggagggaacaatgcaaggaggtgagggggcttgatgagaagtgcccctggggtagcgaggtccgagtctgtttgaggtaggaatagggaagcacccatcctcctctgcagcataa

SEQ ID NO: 710478 - DNA, 1219 bp, Homo sapiens
gtttcaagtagctccacaggtgtttctgatatccacccggggccaggtcatagtagttccagctgagtgcttagtaattgacccacaagtgtgtcaggccatgaggagtcaaagaagccatactaacaacaagagatttagggtgatctgcagattaaaccacaaagcaaaaagttttcctttacatgccaaattccgcagcccctgcagatccaataattcataataatttctttgtagatacagttacaaactgacaactggagccaggggttcccagttgtgacagcacccagaataatctggaagcaaacataggtacactgacccactgaactggaaactctgggaatgggaactggagatctacatttttcaaatctccaggtgattgcttaaagcagaaaggattggaaatctctttttaggtcattccaaattagtacctatattccctctaagctactcagatattgtctttaaagaactgcctggtcagtaagtctcaacccaattccactagagcttcctcatatgagatcttcccaacagcattccagaaatccacatttggagctctaagacataaggaaatgataaaggattcctatgaaagaagacaaaaacttggtttgcgttagctgatactctcatctttccaatggtcatcacaataattgcttaactaagtcagtgttatggcacgagtgtttgtatattgttctaaaatctttccattggytgtgactctagtgtattaaccattcttcttgcctagagataacctaatatctttgccatacagaagatgaaaagcagctgaaacctttaggcttctttgtgtaaatatattagctggggattcatatcatgaactatccactctttaaatacccttggaaactgttttgtctcaattgcaaaaatcactattatgaagcatcactttttattataacacagtagatagtttaatgtacagcaaccaagaaaaaaaaggaatatgtttgccagttggtattttgcccttattatataaaattggaaatggaaaaggcagccttgatgaaaacactgaaattccagtaagtaggattagtcatactttttgtgttccagggttagatttcaaacggcaagtaaaaattccctgagctaccagtggaggcaaacactctcaaattaaaataaaaaggactacacatatttacaagagcca

SEQ ID NO: 710479 - DNA, 630 bp, Homo sapiens
ggccgagatggtgccactgcactccagcccgggtgaaagagcgagactccatctcaaaagaaagaatcatcgtcctatgaattggaatcttataaaaatagcgcatcaaccaaattgggacagaattattatatatatacatacgaagagaaaaatgggagactgccatgtgggtcagtgccctcaggagtccccagccagaatccctcccccagcaccayatccaactcctaactgtccacaccttggccaaactctgggcatatctggacactgggaacatgtcccttccctgccccctacaaaccatcggccacatttccacaatatgggcatggttctgcctgtccctggctgctggagacatcctggtgtcagagctcctgttggcagtgcacagtgttgacggggagccatgagtgctgatgtagctaacagtgctcaccaactggtattgtgcaggcctcaccctgctaggtttgccctctgaggcaccctgagcaagccagctaacagccaaaggtgctgttcctgggagtctcagccacccagtttctgaatgaccccaagggttagagagatccacagtttgaagcaccaccacaatgcatttgcaacactgtggttggt

SEQ ID NO: 710480 - DNA, 1303 bp, Homo sapiens
tattaatttctttgctcctctgttctgtatctttgctggaaagcaactgagctagaaacctaggagtctttttctaatgttttatctctctcttagcctctgtaggcaatctatcatcaaattccattgactctgcttttcctatatatccctggaatctcttcccccattccactcccattgccatcattctaattcaggctcaagtcatttcttaccaggcctatttaattaatctcttggcctcagggcttgttaaacaacaatccctatcttgctaccaaactgatctataaaagcaaaactactcaccttaaaaacaccccaggggctccctgctgctacaaggtaaagcccaaatgcctcaataacacattaatctttcagccctttgtgagctggtctttgcccacatcttcagcttcacgtgccactaatccccaccttctaccacagcaccccatgaccccgaaacgttttccaggaagtccatcttacagggctgtgaatttcttgagataaggagttgtagcttcttaatcattatgtgtacaatttggcaattagggcattcaacaagcttttgtgaaatgagaaaatgtcatttttcatgttctatagagtcttcatattcataattttgaatggctgtgtgatagttgaccaaattgattgccatagtttgataaaacattttgcaatttttagttatttgttttgttttgttttgttttgttttgttttgtttctggagacagagtcacactcttgttgcccaggctgtagtgcagtggcatgatcttggctcactgcaacctcagcctcttaggttcaagtgattctgctgcctcagccttctgagtagctgagattacagacatgtgccaccacgcctggctaatttttgtatttttagtagagacggggtttcaccatgttggccaagctggtctcgaactcccgacctcaagtgatccgcccacctcagtctcccaaagtgctgggattacaagcatgagccactgtgcctggccacaatttttagttatttaagtataytgatagtgatagttgactttatgtgtcatcttagctagaccgtggtacctagatgtttggtcaaactttattctagaagtttctatgaacatatttttagatgaaattaatatttaaattagtaggctgagttaagcaaattaccctccataatgtgggtggacctcatccaatcagttgaagccttaatagaataataccaacctcctatggagaaaaaggaacacttatacactgttggtgg

SEQ ID NO: 710481 - DNA, 1057 bp, Homo sapiens
gacctgatatgggtcctgttgcataaagcgggcacagggagagcctctattatggggctctctacatacgcagggctaactgcattttatcttgatttatgttgagaggccaggcattcaagggctgaactgcccagactcaagtctccccctgtattccaattcatatttgtaccaccaattctctcggcagcacctacctccagggcccttggcyactcgcttttgcatcagcttccatggcaaaagccagccatgcctcacgtcatgcgtgcagctccacacctctgctctcctcccggcttctccattgctgctggagcatgagaagccagggatcctcctaatggttcattatgtgtaccatggaagtatggcattaatatcccgtaaagagctcataccctgtagggtaaatctttgaccagtgggaaatggaggctgtcaaataaattcttctcctttttctccccagacaggctttcctaaataatttggtagctcatgcggcttctcagaaagtggtcttgtgaggtagagcaatcggtgcactcagtatcagatggcagccagctccatagtgcacaccctcgtacttgccctccctccttctctgcctcattcctatttccctcaaccctgcttccctggggctgcactccctaataatgtattccaatacaagcttttgtgggctctagtttctatagaagctggtctaaaatgaccctgatatttaaaaatatatcccttatttccaaccatcctcttagatttcagccttagcccctaatttttccctaaattaaaaaatgttgtactgcatgttctcacccataagtgggagttgaacagtgagtacatatgggcacagggaggggaacacacacgccagggcctgtcgggaggtgggggttggggagggatagcatcaggagaaatacctaatgtagatgacaggttgatgggtgcagcaaaccaccatggcacatgtatagctatgcagcaacccttcacgttctgcacatgtatcccagaacttaaagtgtaataataa

SEQ ID NO: 710482 - DNA, 1742 bp, Homo sapiens
ccagaggtcggggcctggattggcttcagtggggactcagaggccgcaccttctggccatggtactcacctggccatcccccctactcacccggtggccgatgctggtcctgctccaaacccaagtgcgttctgcaaagtgaggccgcagcggcaagtgcttggcaagtgcctggctaattaagaggacattagcgccctgggcagagcccggctcctgccaagatgtccctgccaggagaggggctgccggctgctgccaggccttggcctccctgcttggccgccacctcatcctgctttcactgagggccggggcccggcatgccagggctctccccggccccggcaccagtgcccaagacacctcagtcttgaacggtcctcctgcctctggcctcaggccccacctgccactcactcctccctgagcctgcaccatctgccactcactcctccctgaaccacctctgctgtaaacacccaccgggccaggcgtggtggctcatagtgacgtcaccgtcagccgggaggacccaggcacctgttcttctccaattcagcaaggtgaattggagcactggttttggtttgttcttttttgtttgttttgagacagagtctcactctgttacccaggctggaggggyggtggtacaatcttggctcactgcactccgcctcccagggaggcctcagcctctggagtagctggattacaggcatgcaccactacacccagctaatttttgtgtttttagtagagacggggttttgccatgttggccaggctggtctcaaactcctgacctcaggtgatccgcccgcctcggcctcccaaagtgctgggattccaggcgtgagccaccacgcccagcccgagcactgttctgaccgatttctgaggctcacgggggcaaaaatcagaataagcatcgctctcagtgacaatgctacgacctccaccttcatcacctccatcccacccacccgggcagccaaggtaggttcctgaaggtggtcaaatccagggcgcccctctccaccccacacttctcccgtggctccccagtgccccaagagggcccaaagccctgaaggctctgggctcctggggggcctctgcccatctctcctgccaccctcccttctcttctccccgccagtccacctctccaacctcgatgccattgcacctgctgtgcctgttgcctgcccaacaaagctgcctgccaaagccctgctcatcccaaagactctggctcagacatcacccacctcctctggggtggcgcctgcctccacgcttgtaatcccagctcccggccccttccgtgagcacccccagatgggagcttggcactttcaccaggtttgggtgtcccagggcttggggcaggcatctggcccagcgccgtccaatagaacattctgcaataatggaaatgttcttttttctttatttgattttttttgagacagagtctccctctgttgcccaggctgaaatgcagtggtgcgatcacagctcactgcaacctccgcctcccaggctcaagcgattctcccacctcagcctcccgagtagctgggaccacaagtgtgcaccaccgagcccagctaatttaaaaaaaaaatgtttttgtagaaactgggttcttgccatgtggcctatgctggtctcaaactcctggcctcaagtgatcctcccacctcaatctcccaaagtgctgggacttacag

SEQ ID NO: 710483 - DNA, 1230 bp, Homo sapiens
ccaaaagggtatgatctaacactagtagactgagtagggaaacccagcaaggcctgtatgttcagattcttcttggcctctctgtgccacattccttcctccagggtatggggcaggacctcatctggaatgaggtcttatgacccacaatcagaaaggctgtgaaagattagagtcctgctgtggggtaggtgaaaggaggacaggggaaggttagattctattttctaaggaaagtgccccaacattataacaaaagactataacaagggctgttggagtgatatgccaggaactgtggacaaaaaccaatatataatttagatcagaatatcacacatctttctccttggaagaagaataatactttgtctgagatataattcttatattgtaagagtctagcttcaattctactgccttgaagattttattgttgcagtttaatgtccaaatctactctcatttttttcctttgtgggtaatttattctttgtaaatttttttagtggygctcacattttattgggattttgtagatatatttgtgtcttatcagttcaacctggattttagctgttttagtcagcagactaaatttcttccttatacagttttctggaaaatgtcttcattaattattgcctctccatctgtttctgtccttctgaggaatatttttctgattcagttctccagttttgtttttgttttgttttgtttttgtttttgtttttgagatggagtctcgttctgtcgcccaggctggagtgcagtggcacaatcttggctcacagcaacttccacctcctgggttcaagcgattcttgtgcctcagcttcctgagtagccggaactataggcgcctgccaccacaccgggctaatttttgtatttttagtagaaacgaggtttcaccatgttggccaggctggtcttgaactcctgacctcaagtgatccacctcagcctcccaaagtgttgggattacaggcatgagccatcacagctggcccaaattttttatctttatgatttcacctcacatttttagctatgctttgcatattacttgattttctaagtcaactctcaaagcgactgtactctctttgagtttctctattggattttttagttgagtaatcatgtttttgttttaacttcagaaaatctttttgtgctgaacttgaatctccttaaagagctcttatttctttcatcaaagtc

SEQ ID NO: 710484 - DNA, 1120 bp, Homo sapiens
gagggaaagaggctctctggtagagagctttaatgtattttccaggattattttgcaagtgggggctcggggttgactgggatgtgctttgcagaagctgtctcaaatgctgtggccacacgtccatctaaacttcttcccgtgttaaattaagggacagctttagtagtatatagataatagacttttaaagaaaaatctgagtatctaatgttgagaaatctgcaacagtaacttcctttagtgtaagtgtgactattttgtggctttgagaactttaatgctttccaccacgttacaggtaagcttggtagcaagctgcaacagtaattggaagaactgtgaagacatcctttagtattaaaacagtgggttaatgaatggtctctgttagaagcaaagtcctctagcacctcctctagaagaggagaaggcatgagggcccagggtttwatgctgccctgctggtagagattttactgggcttgtatttttattaggcttgtttttactagtgcctgggcttcaaagttccatagggtttacttgaatgatctgcccataaccctatttttctcacaagccctttttatttaaggttttctgtgcagttttgtggtaaatatatgataccagttatgcctgtacttttgccaggtatcaaaaccttttgctcctagctactctgtgggcatcacagggaagtggagattctggctggctggccatgcttttctgagtgtgatttctaattaattactccgatgatgaccctaaagcctactcactgtggttttttgtatttattgataaaggcccttggagtgctcttacttcttagtatttgtgctactatttctccactagtctgaccccatctgctttctgcctttcagggtttgcaaactttctgatgtgctgctaacacacattcttgttttctagcatcattagggctttgttcgttttttgttctgttttgttttgttttgagacacagtctcactctgttgcccaggctggagtgcaggggtgtgatctcagctcactgcaacctctgcctcccaggttcaagcgattctcttgctgagttcagcctcccaagtagctgggattacag

SEQ ID NO: 710485 - DNA, 648 bp, Homo sapiens
ggtcctccaccctctagccaaagagggggcagtgtgtgtgcatgtgtgtttgtgtgtatgtgtatgtgtatgtgtatgtgtgtgtgygcatgcatgtgtgtccatctggaaagtggggcatgttcaggcagaacaaccagcttttgtgggagggagtgcaggcttcaaatgcaggttctgggtaggagtttccaagagccctgagaaagatccaaggggaatgcagagtggcaggggcagggtggcacctgccttcaccacaaaggtccctccggttgccgggtcctggaccagctgcacctgccaaagtccaagaggcactggttaaggcaggtactagctcctggggctccgtgaccccagcctgaccccctcccaggttcctccactgaggctgactcactccagtggcagggcagggagggcgggctttggtggcactcctgaagcagacatcgatcctatcctgctcacccacccctgctagacctgtggtctcagatgctgcctcctccaggaagccttcccaagattacaggggctggggtccctaatctgcctccaatgctctcttagttcacccttaggagagcctcttcacactgtctaatctgtctcccactggactgtgagctcagtattcccgga

SEQ ID NO: 710486 - DNA, 1218 bp, Homo sapiens
gcaaggtgaagatggtggagccacaatgtggaaggaggttggatccctgaatcaccactgggaagagagtcacctgctaatcaaaaacatggttttggattttacctgaaaacttataaacttctatcatatttgacccattgtccatttcagggtttgtttgttgtagcaacaaacattatcctaattaatactgtgttcaagaaatgtgacttcttcctcccactttcctctttctcatccctcttgacccagctcaaaatgccagctccctggtaagtctttctcccaccccttcaggtaaaagtcatcatgcagtctttggtgctctcagagcacttagtgctagccctttctcgatcacaaactgggttgtgaattctttgtttacacatctttctggccattagtgcagtgaggtgtctggtccagagccagttctcagaaggggttagtgggctggatgagggatgagtatgtcgtgtgcagatgtattaagcacatgttctgcttaaaaattgatgtgtacaaaatctctgcaaaagggtgtagcagtaatacattaaccatctcttccaaccttaagttcaaagcgaactctcgacgtagttacaatgttgggtcactgccagggacagctcttcgtaaaggctcctggaacaaatgacgtggattgtatttcatgggccctttatttcctaccatgttaggttcaagtcttggctctgtctggaactagctatgaggcctttggcgtgttacctccctgagggttcatacagttgtgatctggtggggagggagaccactccttacctcaggtgggcctagggaggccaagctgcagggagctgaggctggaggaggcagccctggagaagggctggaggagggcttctttgaggttccatgtggcattcatgtccgcagacctctgaaatgccagattgtgggcctaggcttcagctctccctgctcaagagcttggccccagctatcaagctgctccaaactcctggaaggcagggccacatcaagasttcctaaggccctgcattccagagagattctggtgctcaccaccaccccacaagtcagacaaaactaaaacaatactataatggaaataccatagtgcaaccgagttctgatttttttcatgattattactttgatagtgcttttgcaacattacatatcactatctttctaaaatat

SEQ ID NO: 710487 - DNA, 1130 bp, Homo sapiens
ttattttttatttttattttttgagacagagtcttgtactgttgcccaggctggagtgcagtggtgcgatctctgctgactgcaacatctgcctcccaggttcaagcgattctcctgccttagtctyctgaatagctgggattacaggtgcctgccaccacgcccagcttattttttgtatttttagtagagacagggtttcactatgttggccaggctggtcttgaactcctgacctcatgatccacatgcctcagcctcccaaggtgctgggattacaggtgtcagccaccatgccgagcaagtaattgttatttttaaactatttccatttctccatttgcattctccatttctccatcttcaatatatgtatatgtgtgtatacatatatatgacagaggttatatatgtatatgttataatcatataacctcagacacagggtttcacagctagaaggaatttctacatcaagtacaaaactcttgttacatctgtgtcctttctgtcagattcagagggttagagtgatttggttagtgacggaaatgatacttaaacatgagattcctggcttgaggctgcatcgtttttacttttcttccatttacttttatcttatttaaataacttcctatagaacaatttcctttaaatatgaaatgttccataggtttttggttctcagtaaattatgatattacaataatgcggtttattctcctgattgctgatctcttcataaattaggacgtgtattcacttaaagcagtctatttgataatgaaaacccagtgatttctaaataggcagtcagaagaatctgctttatgaaacagacaaacccctaacattgggcctttaaaatgttcggatatcaagaccacgaatatattatctaaattagagcccctgagcaaggactcaagctctattttatgccccatccctgactcacagtaagatcctgggcaagtcacttgaccttcttatatttcagagtgtcaaactgtgaaaagcatgtccataaaactgtgcaagcatgacctcattataaacccgatgaacttgaaagcaaagatgtgctttgatacattaaagaattaccaaaatagaactctagtttg

SEQ ID NO: 710488 - DNA, 1283 bp, Homo sapiens
ccctaccctcattaatgccatctctctttctctctccctctcaccctttctctctctctcccccccctcctctttcttccccagttccccaatctttcatatatgtgctcttttgcccttccacctctgacgcagcaagaaggccctcaccagatgccagcacctcgacattggacttcccagtccctagaaccgttaagaaacaaatctctattatttataaattatccagtctatggcattccattatagcagcacaaaataaagacaggtgtgtagtcaaacattaccttttcctaaaagccagcaattggatttttcattttcttgtttttccaatatctatcaacctgataattgggagagatgcaaaagcccagatggataaggtacattcactgagggcaaatcagaagaatgaccaggccaagaaaatgattcattttggcattttgcaaattatcaagatatgcatgccagcaccagtttttaaaactgaacaaatccactggcttttatctatttcctactaaagcaacgtggcttgatcttgacactattaaaytggggcttgattattctctggggtggggccgttctgggcactgcacagtgctgagtagcatccctggtctccacctactccaggccaggagcacccccaagtcacggtacccacaaatgtccccagacattaccagtgtcccccagggggcaggcttgcccccagttgagacccaatgctctaaggcatgtccctcaagggcaggacagccagggacctgacatttgatgacaggcctatcctccaccgccccccaggcccggctgcacttcctcctctgggaactgagtgggcaggacgggctgtcagagcccccttcccttcccacgctgacattctgccagcacgtggcaggggcgtcttgtctcgttggaggctggatatagaaacacagccctgtcctttgtgccatcgctgaagttgtcaacctcagccttcactcatcaccacagcaaccatctaaatatgtcaccagcaaagtgctgattgcaaaggaagggggcagagaggcctggacgggctctcacccaggtgcaggcgcaggggaggtgccgggactgggggagtgacgtggctgcttcagagccacgagactgatgacggccaggccgggcgtgacctggaacaggctccactgcaccctggggcacacagaacaaaggggcaggcctgcttgaccctgagggttcaaggtctctgtgagccgaggtcaaggagg

SEQ ID NO: 710489 - DNA, 1467 bp, Homo sapiens
ttatcttctggaagtcaataggaataataaataataaatgttaatattttttaagtcagatattctcaagaagaactggattcaaagcctggccaagctagttgaccacctgtgaggccatggacaagttccttatatctcaaatcactaattttcttacctacaaattggtggtagtaatgcattggtttgtacaaaggattcaatgagttaatatatgttgtattagtttgctactgctgccataacaaagtaccacagactgggtggcttaaaaaacaaaattcccttttctcatggttctggaggctggaatctgagatcaaagtgttggcaggattggtttcttctgaggcctctctccttggcttgtagacagccgccttctccctgtgttttcttatggtctcctctctgcgtgtatgtgtgtcctaatcttctcttcatatagggaaaccaagcatatttggattcagacccacccatacgacttcattttaccttaattacctctttaaataaagtcacattctgaggtactaggcattaggacttcaacataggaattttgggaagggacacaacatatgaatcttgggaattcatcccatagcctacaagaaatacctagaacatgctatacttttagtaaatgctgagtcccttctcttctccacttccaaggtttagtgtcaataagatatgaagcatgtacacaggctctttgaatttttcaggttccttgacaaaggtactaaattgcaggataatcccattaaaatgggatgtccattgttgctcacacaagggccagcagtttaaaaatggaggcaaactcggctgggtgtggtggctcacacctgtaatcccagcactttgggaggccaaggtgggtggatcatgaggtcaggagattgagaccatcctggctatggtgaaaccccatctctactaaaaatacaaaaaattagctgggcatggtggcgggcgcctgtagtaccagctactcgggaggctgaggcaggagaatggtgtgaacccgggagatggagcttgcagtgagccaagatggcgccactgcactccagcctgggcgacagagcgagactgtgtctcaaaaaataaataaataattgaggcaaactcatcttcactttacacctcaaaaagtgtaagtcaaaatataaagaggaaatttttaactccagacctctcagatctcattgatttttctcttgttcaaaggcaagcaaaaaaagtattgagcaatacacacaacaatgatgacaactacaatgacgtgacaagggtgatcrtagcagctaacatttactgaggacaaacacagtcctttttgccttttaaaggaaagtcctttaagtgcattctcccatttgatctatcaacaactctacaaatggtagctgtgtgtgctttaaaacaagctgaaaatttttttagaaaaaa

SEQ ID NO: 710490 - DNA, 2219 bp, Homo sapiens
tgttgcctgggccctgggggcaaaggcagtagataacttctctgtcgtgttctccagaagggcccattccagcctcacaggccgagaagtctgttcggttcccaagtactagagatgctgctataagggactcccgaatttccttcctgaaccagaggctgcccagccttttcttcctgttttattttttcccaggaagaaacttgcctgtacaattacaaggttctacggttctaaattccattctagtcttccacatcattttgaaggtataatattatttgtcaaagtgggatgatagaagatatgtgtggacttaaaattaaattgttgacaaggaaaaaaactaaaataagaaaataagagagaaaaaatatatgcatgtacagtggttagctagaaatatgccttttaaatatttggcatgtggtatgtgggcctcaatgtgtactattgcactagcttcccaaatattaaaggatgtcttttaaaagaaaaacctcttgctaaaaggttaacagttaaaataaccagagtggcacaggtaccagtcattaagtgaaacctttcatcttcccagaatagtacctgttcccaagccagcttctttgaaaatcacttttctctcctttactatttagtttacagattgtatagtaacaatatagaaaccacaatagtagcaaaaaaaataaagaatatttttaaatgaaaactcacatcctaactctaacaaaacatgaaaattaaacctgaatgcctcccattcctgatatatttttcacctaaatattcagctctgggattgcattgtttttggattgagtggaaattattgcctggtcttgaaatcttccacaatgtgtgtgtgtgtgcgtgtgtgcatgtgtgcgtgtgtgtgtatgtgtgtatgtgtggtgaatatatttctttttgttcagaggaaacattttttcaatatgtatatttattttaggcagattatgctagtaattttctacaaatgtgctttttaaaaaataacctttaatttaaaaaaaattattctttctcagtggcccacaattgttaaaaatgctactaatggagctgggtatggtgacacacatctgtcatcccagctacttgggagactgaggcagggatattgcttaaacttgggaatgtgaaaccagcctgggcaacatagtgagatcccaatctcaaaactcaatcattaaaaaataaaataaaataaaacactactaatagctttttaaaaaatagttcttaaccaattttcctagcaccttcctttcctcagtgaagtatagaaatatgtggtcaggcactgtggctcacacctataatcccaataatttgggaagccaaggcatgaggatcagttcattccaggagttcaagactagccagggtgacataatgagacttggtctctaacaaaaatttttttttctttaattaccagggcatgatggtgcatgcttgtagcccagctacttggaggctgaggtaggagaatcacttgagcccaggaggtcaaggctgcagtgagccatggttgcaccactgcactccatacctgggtgacagagtgagacacagtatcaaaaacaaacaaacaacaacaaaaagtatttgttttagaaaaaacatttggtgaggtttgggcttaaaaatatattattctaaaatattcataaatattctctagtaatgataagattaaagtgacaaagacaaacttttttcctgtgcagttccatctctcgccttcccrtaatttgtctgtcccatccagcttccaaaggaaattatttacaaaatactgtctgcatcctgggtctatatatctatcgcctatgaggagagcgtttaagatctgagccatcttcaagtcttatactttgtgtatagctctcatgtttttgcaggtgaagtaagtttgtataccctttcttttatgaatctgtgtctggtcagttcatttcgggtaatcttcagagggtgaaaggggaagctttgcacttcactcctactgtgacaactaactaccttcttacttattcaatgttttagtctatatcaacactttcatatacatttacttttaaacacaattttgcatcattacacttaatattttatttaccttttaaaaaggaaattaaaaataaaattaaaaattataaaattttacataataaaaataaaataaa

SEQ ID NO: 710491 - DNA, 2219 bp, Homo sapiens
tgttgcctgggccctgggggcaaaggcagtagataacttctctgtcgtgttctccagaagggcccattccagcctcacaggccgagaagtctgttcggttcccaagtactagagatgctgctataagggactcccgaatttccttcctgaaccagaggctgcccagccttttcttcctgttttattttttcccaggaagaaacttgcctgtacaattacaaggttctacggttctaaattccattctagtcttccacatcattttgaaggtataatattatttgtcaaagtgggatgatagaagatatgtgtggacttaaaattaaattgttgacaaggaaaaaaactaaaataagaaaataagagagaaaaaatatatgcatgtacagtggttagctagaaatatgccttttaaatatttggcatgtggtatgtgggcctcaatgtgtactattgcactagcttcccaaatattaaaggatgtcttttaaaagaaaaacctcttgctaaaaggttaacagttaaaataaccagagtggcacaggtaccagtcattaagtgaaacctttcatcttcccagaatagtacctgttcccaagccagcttctttgaaaatcacttttctctcctttactatttagtttacagattgtatagtaacaatatagaaaccacaatagtagcaaaaaaaataaagaatatttttaaatgaaaactcacatcctaactctaacaaaacatgaaaattaaacctgaatgcctcccattcctgatatatttttcacctaaatattcagctctgggattgcattgtttttggattgagtggaaattattgcctggtcttgaaatcttccacaatgtgtgtgtgtgtgcgtgtgtgcatgtgtgcgtgtgtgtgtatgtgtgtatgtgtggtgaatatatttctttttgttcagaggaaacattttttcaatatgtatatttattttaggcagattatgctagtaattttctacaaatgtgctttttaaaaaataacctttaatttaaaaaaaattattctttctcagtggcccacaattgttaaaaatgctactaatggagctgggtatggtgacacacatctgtcatcccagctacttgggagactgaggcagggatattgcttaaacttgggaatgtgaaaccagcctgggcaacatagtgagatcccaatctcaaaactcaatcattaaaaaataaaataaaataaaacactactaatagctttttaaaaaatagttcttaaccaattttcctagcaccttcctttcctcagtgaagtatagaaatatgtggtcaggcactgtggctcacacctataatcccaataatttgggaagccaaggcatgaggatcagttcattccaggagttcaagactagccagggtgacataatgagacttggtctctaacaaaaatttttttttctttaattaccagggcatgatggtgcatgcttgtagcccagctacttggaggctgaggtaggagaatcacttgagcccaggaggtcaaggctgcagtgagccatggttgcaccactgcactccatacctgggtgacagagtgagacacagtatcaaaaacaaacaaacaacaacaaaaagtatttgttttagaaaaaacatttggtgaggtttgggcttaaaaatatattattctaaaatattcataaatattctctagtaatgataagattaaagtgacaaagacaaacttttttcctgtgcagttccatctctcgccttcccgtaatttgtctgtcccatccagcttccaaaggaaattatttacaaaatactgtctgcatcctgggtctatatatctatcgcctatgaggagagcgttyaagatctgagccatcttcaagtcttatactttgtgtatagctctcatgtttttgcaggtgaagtaagtttgtataccctttcttttatgaatctgtgtctggtcagttcatttcgggtaatcttcagagggtgaaaggggaagctttgcacttcactcctactgtgacaactaactaccttcttacttattcaatgttttagtctatatcaacactttcatatacatttacttttaaacacaattttgcatcattacacttaatattttatttaccttttaaaaaggaaattaaaaataaaattaaaaattataaaattttacataataaaaataaaataaa

SEQ ID NO: 710492 - DNA, 2219 bp, Homo sapiens
tgttgcctgggccctgggggcaaaggcagtagataacttctctgtcgtgttctccagaagggcccattccagcctcacaggccgagaagtctgttcggttcccaagtactagagatgctgctataagggactcccgaatttccttcctgaaccagaggctgcccagccttttcttcctgttttattttttcccaggaagaaacttgcctgtacaattacaaggttctacggttctaaattccattctagtcttccacatcattttgaaggtataatattatttgtcaaagtgggatgatagaagatatgtgtggacttaaaattaaattgttgacaaggaaaaaaactaaaataagaaaataagagagaaaaaatatatgcatgtacagtggttagctagaaatatgccttttaaatatttggcatgtggtatgtgggcctcaatgtgtactattgcactagcttcccaaatattaaaggatgtcttttaaaagaaaaacctcttgctaaaaggttaacagttaaaataaccagagtggcacaggtaccagtcattaagtgaaacctttcatcttcccagaatagtacctgttcccaagccagcttctttgaaaatcacttttctctcctttactatttagtttacagattgtatagtaacaatatagaaaccacaatagtagcaaaaaaaataaagaatatttttaaatgaaaactcacatcctaactctaacaaaacatgaaaattaaacctgaatgcctcccattcctgatatatttttcacctaaatattcagctctgggattgcattgtttttggattgagtggaaattattgcctggtcttgaaatcttccacaatgtgtgtgtgtgtgcgtgtgtgcatgtgtgcgtgtgtgtgtatgtgtgtatgtgtggtgaatatatttctttttgttcagaggaaacattttttcaatatgtatatttattttaggcagattatgctagtaattttctacaaatgtgctttttaaaaaataacctttaatttaaaaaaaattattctttctcagtggcccacaattgttaaaaatgctactaatggagctgggtatggtgacacacatctgtcatcccagctacttgggagactgaggcagggatattgcttaaacttgggaatgtgaaaccagcctgggcaacatagtgagatcccaatctcaaaactcaatcattaaaaaataaaataaaataaaacactactaatagctttttaaaaaatagttcttaaccaattttcctagcaccttcctttcctcagtgaagtatagaaatatgtggtcaggcactgtggctcacacctataatcccaataatttgggaagccaaggcatgaggatcagttcattccaggagttcaagactagccagggtgacataatgagacttggtctctaacaaaaatttttttttctttaattaccagggcatgatggtgcatgcttgtagcccagctacttggaggctgaggtaggagaatcacttgagcccaggaggtcaaggctgcagtgagccatggttgcaccactgcactccatacctgggtgacagagtgagacacagtatcaaaaacaaacaaacaacaacaaaaagtatttgttttagaaaaaacatttggtgaggtttgggcttaaaaatatattattctaaaatattcataaatattctctagtaatgataagattaaagtgacaaagacaaacttttttcctgtgcagttccatctctcgccttcccgtaatttgtctgtcccatccagcttccaaaggaaattatttacaaaatactgtctgcatcctgggtctatatatctatcgcctatgaggagagcgtttaagatctgagccatcttcaagtcwtatactttgtgtatagctctcatgtttttgcaggtgaagtaagtttgtataccctttcttttatgaatctgtgtctggtcagttcatttcgggtaatcttcagagggtgaaaggggaagctttgcacttcactcctactgtgacaactaactaccttcttacttattcaatgttttagtctatatcaacactttcatatacatttacttttaaacacaattttgcatcattacacttaatattttatttaccttttaaaaaggaaattaaaaataaaattaaaaattataaaattttacataataaaaataaaataaa

SEQ ID NO: 710493 - DNA, 2642 bp, Homo sapiens
cactttaggaagcccagacaggcagatggcttgagctcaagagttcgagaccagcctggacaacatggcaaaaacctgtctcttccaaaaaaaaaaaaaaattagccgggcatggtgatgtagtcccagttacttggttgggaggctgaggtgggagtatggcttgagcccaggaggccgaggctgcagtgagctgagatcatgctactgtactccaacttgggcaacagagccagaccctacctcggaaaaagaaaaagttttgaattattaaaacgtaagttttgggagataaggcaagtagtaaaaagagaatcaatgaatgaggagggagctgtggcagtttccagcgctgccaccgataagctctgtgtgccttcctgatcaccccagacacgacccagcgtcacagtgatttccaagggtccatcttgctctgcaactctacagccttcggctttatgagagtggttttggaactgggttctacgttctgtgtgggcgctctaggaaattgcaggatgtagttctgagcaagtatggatctaggtcttcttccctatcttttatattattattcctcctaggatttaatgtggggaaaaaagtaagactggatccttatagcaggagttctcagcctcttgatggccacaggcatctttgaaaagctgagcaaaagctcttggggtgtctccccagaatgaggcatgtctcacacacatgcacatttgcatgcggtttctaggggtcacagccctctgagaccaatccatggaactgcctcactggtatgctctcagcctgtggggagctgttccttggggacatggccacagctggcccagaagcttagaaaaatgaagggaagcaggtgtgcaggccaggctacctcctctgccaacatgggccaccgagcttcacagccttccttcctgggcctctgcattccttctccctttctattcctctccacacacaagaccaagccaacagcatgggcctccataactgaacacgtctctagagcatgctgtgcttcaccagcagacaggagagcaggggaagatgcaggatcctcgtgtttrtatttgtctttggtgcctttcacttggtcttttggagttttcagctctctggtggatatgccacctggatttgctcctgtgatgtttgctcacgccccactttccatctgggccaggcacagtggacacagacgccacctgccctgcaggacaggcgtcacagcagtggaggaggtgtcacgaacacacaccaccacaatcaggtgggatgagcacacggctgcagacagatctggatgagccctccctggtggtggtcaagagtgccaggaaagccttatgcaaagccttccatctgagtgagcccggaaggatctgcagcagcaggccagacaaaagttgagacaagggaaaagctgttccacttggaaacagcaagatgcagaacacagcctggcagttcaaggggctgcaagctgctcaggttgagagatgacagtggaggggccaggccagcactgaagggatcaagagcttcggaaggatgtcaaggtggggatggggtgggggaaagcacctcaggtgtcctgcggtaatctcacgcatattcagaatatgcccatcatcttcctcctgaaatctacttctcctgactgttctgtcttgggattggctccagcctctcaagcccaaaacattggagttacccacactctcactcaatcaccagccagccttagtgagcccaccctactcatttcctcctgatccttcctctggaccacaaaaggtctcataacacgtcttcctcacatcttcccagggcctctccagctctctccatcctgctattaccttcctaacctcccagcttaaacatctccaccactgtcacagtgcttttaggatgaaaaacccccagctttattccatcccatctctccagtcttttcttcctagttacccttcccacctaggatccactcaaaccagacgtcactgtgtccccagcgtgctcctctcagtgacacttctgggctttgtcctgttgtcagctgtccctggatggcttctgaggtccctctggcaagctcctactccacttatccttcaaattcagctcaaaaggcacatttttaaaagcctgtcttagatcctctatctccaagcataaccaatcacctgcataactgttcttggagcagcagcaaattgctatctgagtcacactccattgttatttatcttctccaccagactatgatttccctgaggaaggaaaccctgtcttattcatctttctttcctcagcacccaggttagtgcttgtcacatagcaaataatgaataaatgtttgctgaaggaacaagcagatgaatgaaaaagtaaataaagaaaagtggggtgctgccatcctttttcctgagcttggcccaaacactttggaccagcagatccaaactcttcctccttaaaccccactttcttatgtcccaacatctgcctgccccaggtcccttactccagctcagatactcacccctgagtacgtcccacatggtctaaaccccatccctgggtgtatatgcctcaccttgccctggaatgcttct

SEQ ID NO: 710494 - DNA, 2642 bp, Homo sapiens
cactttaggaagcccagacaggcagatggcttgagctcaagagttcgagaccagcctggacaacatggcaaaaacctgtctcttccaaaaaaaaaaaaaaattagccgggcatggtgatgtagtcccagttacttggttgggaggctgaggtgggagtatggcttgagcccaggaggccgaggctgcagtgagctgagatcatgctactgtactccaacttgggcaacagagccagaccctacctcggaaaaagaaaaagttttgaattattaaaacgtaagttttgggagataaggcaagtagtaaaaagagaatcaatgaatgaggagggagctgtggcagtttccagcgctgccaccgataagctctgtgtgccttcctgatcaccccagacacgacccagcgtcacagtgatttccaagggtccatcttgctctgcaactctacagccttcggctttatgagagtggttttggaactgggttctacgttctgtgtgggcgctctaggaaattgcaggatgtagttctgagcaagtatggatctaggtcttcttccctatcttttatattattattcctcctaggatttaatgtggggaaaaaagtaagactggatccttatagcaggagttctcagcctcttgatggccacaggcatctttgaaaagctgagcaaaagctcttggggtgtctccccagaatgaggcatgtctcacacacatgcacatttgcatgcggtttctaggggtcacagccctctgagaccaatccatggaactgcctcactggtatgctctcagcctgtggggagctgttccttggggacatggccacagctggcccagaagcttagaaaaatgaagggaagcaggtgtgcaggccaggctacctcctctgccaacatgggccaccgagcttcacagccttccttcctgggcctctgcattccttctccctttctattcctctccacacacaagaccaagccaacagcatgggcctccataactgaacacgtctctagagcatgctgtgcttcaccagcagacaggagagcaggggaagatgcaggatcctcgtgtttgtatttgtctttggtgcctttcacttggtcttttggagtttycagctctctggtggatatgccacctggatttgctcctgtgatgtttgctcacgccccactttccatctgggccaggcacagtggacacagacgccacctgccctgcaggacaggcgtcacagcagtggaggaggtgtcacgaacacacaccaccacaatcaggtgggatgagcacacggctgcagacagatctggatgagccctccctggtggtggtcaagagtgccaggaaagccttatgcaaagccttccatctgagtgagcccggaaggatctgcagcagcaggccagacaaaagttgagacaagggaaaagctgttccacttggaaacagcaagatgcagaacacagcctggcagttcaaggggctgcaagctgctcaggttgagagatgacagtggaggggccaggccagcactgaagggatcaagagcttcggaaggatgtcaaggtggggatggggtgggggaaagcacctcaggtgtcctgcggtaatctcacgcatattcagaatatgcccatcatcttcctcctgaaatctacttctcctgactgttctgtcttgggattggctccagcctctcaagcccaaaacattggagttacccacactctcactcaatcaccagccagccttagtgagcccaccctactcatttcctcctgatccttcctctggaccacaaaaggtctcataacacgtcttcctcacatcttcccagggcctctccagctctctccatcctgctattaccttcctaacctcccagcttaaacatctccaccactgtcacagtgcttttaggatgaaaaacccccagctttattccatcccatctctccagtcttttcttcctagttacccttcccacctaggatccactcaaaccagacgtcactgtgtccccagcgtgctcctctcagtgacacttctgggctttgtcctgttgtcagctgtccctggatggcttctgaggtccctctggcaagctcctactccacttatccttcaaattcagctcaaaaggcacatttttaaaagcctgtcttagatcctctatctccaagcataaccaatcacctgcataactgttcttggagcagcagcaaattgctatctgagtcacactccattgttatttatcttctccaccagactatgatttccctgaggaaggaaaccctgtcttattcatctttctttcctcagcacccaggttagtgcttgtcacatagcaaataatgaataaatgtttgctgaaggaacaagcagatgaatgaaaaagtaaataaagaaaagtggggtgctgccatcctttttcctgagcttggcccaaacactttggaccagcagatccaaactcttcctccttaaaccccactttcttatgtcccaacatctgcctgccccaggtcccttactccagctcagatactcacccctgagtacgtcccacatggtctaaaccccatccctgggtgtatatgcctcaccttgccctggaatgcttct

SEQ ID NO: 710495 - DNA, 2642 bp, Homo sapiens
cactttaggaagcccagacaggcagatggcttgagctcaagagttcgagaccagcctggacaacatggcaaaaacctgtctcttccaaaaaaaaaaaaaaattagccgggcatggtgatgtagtcccagttacttggttgggaggctgaggtgggagtatggcttgagcccaggaggccgaggctgcagtgagctgagatcatgctactgtactccaacttgggcaacagagccagaccctacctcggaaaaagaaaaagttttgaattattaaaacgtaagttttgggagataaggcaagtagtaaaaagagaatcaatgaatgaggagggagctgtggcagtttccagcgctgccaccgataagctctgtgtgccttcctgatcaccccagacacgacccagcgtcacagtgatttccaagggtccatcttgctctgcaactctacagccttcggctttatgagagtggttttggaactgggttctacgttctgtgtgggcgctctaggaaattgcaggatgtagttctgagcaagtatggatctaggtcttcttccctatcttttatattattattcctcctaggatttaatgtggggaaaaaagtaagactggatccttatagcaggagttctcagcctcttgatggccacaggcatctttgaaaagctgagcaaaagctcttggggtgtctccccagaatgaggcatgtctcacacacatgcacatttgcatgcggtttctaggggtcacagccctctgagaccaatccatggaactgcctcactggtatgctctcagcctgtggggagctgttccttggggacatggccacagctggcccagaagcttagaaaaatgaagggaagcaggtgtgcaggccaggctacctcctctgccaacatgggccaccgagcttcacagccttccttcctgggcctctgcattccttctccctttctattcctctccacacacaagaccaagccaacagcatgggcctccataactgaacacgtctctagagcatgctgtgcttcaccagcagacaggagagcaggggaagatgcaggatcctcgtgtttgtatttgtctttggtgcctttcacttggtcttttggagttttcagctctctggtggatatgccacctggatttgctcctgtgatgtttgctcacgccccactttccatctgggccaggcacagtggacacagacgccacctgccctgcaggacaggcgtcacagcagtggaggaggtgtcacgaacacacaccaccacaatcaggtgggatgagcacacggctgcagacagatctggatgagccctccctggtggtggtcaagagtgccaggaaagccttatgcaaagccttccatctgagtgagcccggaaggatctgcagcagcaggccagacaaaagttgagacaagggaaaagctgttccacttggaaacagcaagatgcagaacacagcctggcagttcaaggggctgcaagctgctcaggttgagagatgacagtggaggggccaggccagcactgaagggatcaagagcttcggaaggatgtcaaggtggggatggggtgggggaaagcacctcaggtgtcctgcggtaatctcacgcatattcagaatatgcccatcatcttcctcctgaaatctacttctcctgactgttctgtcttgggattggctccagcctctcaagcccaaaacattggagttacccacactctcactcamtcaccagccagccttagtgagcccaccctactcatttcctcctgatccttcctctggaccacaaaaggtctcataacacgtcttcctcacatcttcccagggcctctccagctctctccatcctgctattaccttcctaacctcccagcttaaacatctccaccactgtcacagtgcttttaggatgaaaaacccccagctttattccatcccatctctccagtcttttcttcctagttacccttcccacctaggatccactcaaaccagacgtcactgtgtccccagcgtgctcctctcagtgacacttctgggctttgtcctgttgtcagctgtccctggatggcttctgaggtccctctggcaagctcctactccacttatccttcaaattcagctcaaaaggcacatttttaaaagcctgtcttagatcctctatctccaagcataaccaatcacctgcataactgttcttggagcagcagcaaattgctatctgagtcacactccattgttatttatcttctccaccagactatgatttccctgaggaaggaaaccctgtcttattcatctttctttcctcagcacccaggttagtgcttgtcacatagcaaataatgaataaatgtttgctgaaggaacaagcagatgaatgaaaaagtaaataaagaaaagtggggtgctgccatcctttttcctgagcttggcccaaacactttggaccagcagatccaaactcttcctccttaaaccccactttcttatgtcccaacatctgcctgccccaggtcccttactccagctcagatactcacccctgagtacgtcccacatggtctaaaccccatccctgggtgtatatgcctcaccttgccctggaatgcttct

SEQ ID NO: 710496 - DNA, 671 bp, Homo sapiens
cctccctcggaactttcccttattctgataggagaaagtaactattgatttctcttgatgttagtattattactaataataacagcagtaccattagcagtagtagcggtagcaaacagcgagtgctagactcagctgtagccattttaccattaggccacatattccgatagccacattatactgcagatactactactctcttttgacatataaggaaactgaagcactgaggaattcattgacaggctcagagtcacactgctgacctcagagttcgcacgcggaaccacttttctatctatgtcccttctctttttatagattatcgtaaacattgtaattttaagttctccctgttaggaagataaaaggatgtctcgtcaatttgttttcccagcaccctcagtatttgccccgtaattccggatcattacacggttagsggaatggctgaatgagtgtatctttttggcaagtgatacctagctgtataggacaatacgataagtgagcgtgtatacaggacacagcaggcttaatcctagaggtaccaggtctcaaagtttccgaaggtcctcttggtatgaattaaagggccttgtccagggaatcacctggtcacagtcacggtaagttggctgccaaatcatctcaaatctcacttttca

SEQ ID NO: 710497 - DNA, 662 bp, Homo sapiens
tatatttgtgagttccccccattttctgcattcatttatttttaatttccttttactaaagtcagggaaaatactttggattattttgatcctgttaattttattgacgttttcctgctgtatggcctagcatatggtctatcctggagaatgatttatgtgtacttctaattttgagtggaaaattctataaatttgagaattctatcagttcatatttgtttacagtgttcaagtgttatgttttcctgttgatcttcccactttttctgcccattatttacattggagtatagaagtttctatacttctgataaactccaaataatggatttgattatttaatctatttatagcctgtaatattatcagtatagttgaatttgcatcattttgctttctatttttatgtctcacgtatttttctttattcttcctttactgctttcttattactttccatrtaatcttttaatttatataattgttcatgtttttgaagttacttccttgttttctctagcccttatataccttatcagaatctgctttatatttatattaattccaatgagatataaaatattaccactatatagcttttttcccccaatttggattgaatttttaaaatattgtcttaatttagttttattgtttta

SEQ ID NO: 710498 - DNA, 1048 bp, Homo sapiens
gtgtagtaatagtaacgcaaagctctgaacaccacgagacaattcgttgcttccgaaacgcagccggcagcaggtactcgagatgagtagtgtgagctcccgagcacccgtaggtcggattmtctggtaaggcaccggaagtgaccgcctcgcggctgcttcctctcctggagtccagagtcccgttgctccgccgcgatattcagtaaaccactgggagtccggcagcatggaggcagcgcgccctcccccgacggcagggaagttcgtggtggtcggcggcggcatcgcgggcgtcacttgtgcggagcaggtagggcggtgctcaggcggttccgcctctttccccgaccccaaaggggatagcactggaggccttcctcccaccccctccctttttcttcttccgggttccttttttgctgcgcccttttccgcacttattgctcccagattttagaaactgcttggtggtcctcagatgacctcactagctttctcttaggcgcagggaggagtgggaggcaaattatagccgagaaaccaaagctggctgatccgtgctcagatccttgtaatgtcagagcagacatgaggactttgtatttagacaaaaaattcagccccctttctttttatttttttttctttttctttgagacggagtctcactctgtcgcccagactggagggcagtggtgcgatcttggcttaatgcaagctttgcctcccgggttcaagcgattcttctgttgcgtcagcctgtagctgggattacaggcgccagccaccacgccccgctaatgtttgtatttttagtagagacgggctttcaccatgttggccaggctggtctcgaactcctgggctcaagcagtctgcccgcttccgcctaccgaagtgctggcattacaggcctgagccacagcacccggccctcagccccctttgttaattatcgtaggtgattgagtttagtttccagatagttgccaagtctttagtgcatcttaactaattaataaagaatcccatatgtaagttttct

SEQ ID NO: 710499 - DNA, 1048 bp, Homo sapiens
gtgtagtaatagtaacgcaaagctctgaacaccacgagacaattcgttgcttccgaaacgcagccggcagcaggtactcgagatgagtagtgtgagctcccgagcacccgtaggtcggattatctggtaaggcaccggaagtgaccgcctcgcggctgcttcctctcctggagtccagagtcccgytgctccgccgcgatattcagtaaaccactgggagtccggcagcatggaggcagcgcgccctcccccgacggcagggaagttcgtggtggtcggcggcggcatcgcgggcgtcacttgtgcggagcaggtagggcggtgctcaggcggttccgcctctttccccgaccccaaaggggatagcactggaggccttcctcccaccccctccctttttcttcttccgggttccttttttgctgcgcccttttccgcacttattgctcccagattttagaaactgcttggtggtcctcagatgacctcactagctttctcttaggcgcagggaggagtgggaggcaaattatagccgagaaaccaaagctggctgatccgtgctcagatccttgtaatgtcagagcagacatgaggactttgtatttagacaaaaaattcagccccctttctttttatttttttttctttttctttgagacggagtctcactctgtcgcccagactggagggcagtggtgcgatcttggcttaatgcaagctttgcctcccgggttcaagcgattcttctgttgcgtcagcctgtagctgggattacaggcgccagccaccacgccccgctaatgtttgtatttttagtagagacgggctttcaccatgttggccaggctggtctcgaactcctgggctcaagcagtctgcccgcttccgcctaccgaagtgctggcattacaggcctgagccacagcacccggccctcagccccctttgttaattatcgtaggtgattgagtttagtttccagatagttgccaagtctttagtgcatcttaactaattaataaagaatcccatatgtaagttttct

SEQ ID NO: 710500 - DNA, 1048 bp, Homo sapiens
gtgtagtaatagtaacgcaaagctctgaacaccacgagacaattcgttgcttccgaaacgcagccggcagcaggtactcgagatgagtagtgtgagctcccgagcacccgtaggtcggattatctggtaaggcaccggaagtgaccgcctcgcggctgcttcctctcctggagtccagagtcccgttgctccgccgcgatattcagtaaaccactgggagtccggcagcatggaggcagcgcgccctcccccgacggcagggaagttcgtggtggtcggcggcggcatcgcgggcgtcacttgtgcggagcaggtagggcggtgctcaggcggttccgcctctttccccgaccccaaaggggatagcactggaggccttcctcccaccccctccctttttcttcttccgggttccttttttgctgcgcccttttccgcacttattgctcccagattttagaaactgcttggtggtcctcagatgacctcactagctttctcttaggcgcagggaggagtgggaggcaaattatagccgagaaaccaaagctggctgatccgtgctcagatccttgtaatgtcagagcagacatgaggactttgtatttagacaaaaaattcagccccctttctttttmtttttttttctttttctttgagacggagtctcactctgtcgcccagactggagggcagtggtgcgatcttggcttaatgcaagctttgcctcccgggttcaagcgattcttctgttgcgtcagcctgtagctgggattacaggcgccagccaccacgccccgctaatgtttgtatttttagtagagacgggctttcaccatgttggccaggctggtctcgaactcctgggctcaagcagtctgcccgcttccgcctaccgaagtgctggcattacaggcctgagccacagcacccggccctcagccccctttgttaattatcgtaggtgattgagtttagtttccagatagttgccaagtctttagtgcatcttaactaattaataaagaatcccatatgtaagttttct

SEQ ID NO: 710501 - DNA, 946 bp, Homo sapiens
tcattgttctatccccagtgacccagcataatatctgccgtataatggaaactcaaaatattttctgctaagcaagtgagtgaaggatggcattttgttgacctcagggaacttgctcaatttcaagacaagaccagatgactgtctcttagcctacctcctcagtttcaaaactaaacaaaatccttaatttctaaaagaatctaggtgatctagaattcagctgagttggctacaatccttttggctctaggtcagacccatatcagaagtattcatatccttctttggattggtttcatagatccaactctgtcctaaataactaggataaactagctttataggaaaacttaaaagactacaagttccagttaggttcagggaagttaatcaactttctaaagttgttcrcagatttttatagatgtttctagagagaaagttcatagcattttattgaatgctcaaagagctaaagaatggcttacctatggaagaataagtaccactataagcctaatcccatttccatccccagggtaattttagggtcagaaccttacagccaagacaatctaaatatttcaagttacctttggagagagaatattgtgctttctctccacttaaatttaccttaaaattctaataaatccatgaattctttgagagcaacttttagtttcagtggccagccacctgtttgtgataatataacaaaatgttggaatgtaggcttataggggtatactctgatttcatttgcattaatctgcaaattcatacagtggtcagtgttatttatacctagaatggcttttgaatgtactgaaacttctagttacagagttgtaatcattatttgtgcccttaatttaaggattctcaagaatttgcataaatggacacccaatacaatagaatatgtttcttatcgttattc

SEQ ID NO: 710502 - DNA, 777 bp, Homo sapiens
gctccaccttctatgggagttgggagttggagagtatctcttattttcttttttaaaaaattttactttaagtctgggacacatgtgctgaacgtgcaggttcgttacataggtatacatgtgctatggtggtttgctgcacctatcaacccatcgtctaggttttaagccctgcatgcattaggtatttgtcctaatgctctccctcacctcgccccrcaacccgacaggccccgatgtgtgatgttcccctccctgtgtccatgtgttctcattgttcaactcccacttatgagtgagaacatgcggtgtttggttttctgttcctgtgttagtttgctgaggatgatgaagagaaatattcttatacacatatgtatacaaaattttgtctacaatgccgtgaaagttcacagatccttcatgtttattaaatggccatcaattcactatgtagtaatattccaggcacccatgaagtttagtatatgttcattgaattaatttaatgaaataaatgcttatatttatttggctctctgaaaacacatttggatgaatgctttctagagtgagttaagtctagtaacacgtaaaaagattattctaaaaacattagcaagttatctaatatgctaatgttaaatgtataccaccagaagtcgcattcttcctgtaactataggttaggggaagagtgaccagctccctttggttaatgtaaaacacagcatgactcattcactatggactattccacaaactcccttatttgtc

SEQ ID NO: 710503 - DNA, 777 bp, Homo sapiens
gctccaccttctatgggagttgggagttggagagtatctcttattttcttttttaaaaaattttactttaagtctgggacacatgtgctgaacgtgcaggttcgttacataggtatacatgtgctatggtggtttgctgcacctatcaacccatcgtctaggttttaagccctgcatgcattaggtatttgtcctaatgctctccctcacctcgccccacaacccgacaggccccgatgtgtgatgttcccctccctgtgtccatgtgttctcattgttcaactcccacttatgagtgagaacatgcggtgtttggttttctgttcctgtgttagtttgctgaggatgatgaagagaaatattcttatacacatatgtatacaaaattttgtctacaatgccgtgaaagttcacagatccttcatgtttattaaatggccatcaattcactatgtagtaatattccaggcacccatgaagtttagtatatgttcattgaattaatttaatgaaataaatgcttatatttatttggctctctgaaaacacatttggatgaatgctttctagagtgagttaagtctagtaacacgtaaaaagattattctaaaaacattagcaagttatctaatatgctaatgttaaatgtataccaccagaagtcgcattcttcctgtaactataggttaggggaagagtgaccagctccctttggttaatgtaaaacacagcatgactcattcactatggactmttccacaaactcccttatttgtc

SEQ ID NO: 710504 - DNA, 583 bp, Homo sapiens
taaaatagaatgtcaaaactaggaggaagaaaatagaacacatatgcaaaccataatgtcttctagtttctacagttgaactgcaaatttaaccttgaaccaaagtgaaagggggaatatggtcaggggtgtagctcttgctgcctacagcaatatctttctgtacagaaatctttctaaagtctatcacacaatttcctgcttgcttatrtagaacatgtctacatatattctccacataaaggcgtcttatgtagaacatgtctacatatattctccacataaaggcgtatgacaaattttctggattattcaagatcatcattaagaacataatgattttcatgttctctcaagaattatcaaagcattattaggattgtttgccccacactgctctgatttcttgaattcttgactctggtaacctccctccccgagttttgctatctcagtttcactttgcagtgtgggagatggaaaaacaagctcattagaattttgggtaaagagagtgtaaaatgcatggcaggaggtctgaaggattctgctgtggaaaagggacatcgcattagaaagtagg

SEQ ID NO: 710505 - DNA, 583 bp, Homo sapiens
taaaatagaatgtcaaaactaggaggaagaaaatagaacacatatgcaaaccataatgtcttctagtttctacagttgaactgcaaatttaaccttgaaccaaagtgaaagggggaatatggtcaggggtgtagctcttgctgcctacagcaatatctttctgtacagaaatctttctaaagtctatcacacaatttcctgcttgcttatgtagaacatgtctacatatattctccacataaaggcgtcttatgtagaacatgtctacatatattctccacataaaggcgtatgacaaattttctggattattcaagatcatcattaagaacataatgattttcatgttctctcaagaattatcaaagcattattaggattgtttgccccacactgctctgatttcttgaattcttgactctggtaacctccctccccgagttttgctatctcagtttcrctttgcagtgtgggagatggaaaaacaagctcattagaattttgggtaaagagagtgtaaaatgcatggcaggaggtctgaaggattctgctgtggaaaagggacatcgcattagaaagtagg

SEQ ID NO: 710506 - DNA, 624 bp, Homo sapiens
atgtgacattcatgttgtggacctggggaatggagtagtgaatccaacagacacaaattcctgcccttaaggggcttactttctagttacggaagacagaaaataaaccaagaagtaaatacaatggataggatgtcgtgtagggataagggtcaggagaaagaatagagcaaataaaggagatgaaaatgaagtgggagtgggaaggtattttaaatagagtagtcggagaaggtsttcctgatgtaatatttgaggaaaacagggagcaagccacatggctgtgagaagacagatacatgcaaggaaagcaaataacacagaagacatggtggtggcaattccagataaccagttagggtcccaataggaacaaatagcacaccccaattagggtaattcaaggtgggcatatgtatagagaaaccatttacaaagggattggcagggagttggggaatgccagggacggcgttgtaacctggaattaacaatagtagagctcttatcatccctagacctgcagaaagatagagaggtcactgcaacgtggaattgggtagaggaggtgaccttgagcaggtgactatttaggcagaaggccaggggtctcaatactgctga

SEQ ID NO: 710507 - DNA, 653 bp, Homo sapiens
ttttttttctttaaacagaattgatargaacatgactcccaacttcttgattctctctctctacttgtggttagcattttccctagaagtcagaactcccatgtaccagtcagtctccaaatgattcatgtggccctactgtgtgctatttccttatccataggcctggataaataaagccgtcctttgaagatctcatagtactttggaacatgaagtttacattactcagagggttttcatctttgtttacagaaggcaaatgtgaaaagcatttggcaagagacttccagctcctgtttaaccactgcctccattctttgaggtctccccatcccaactgacattaacaagcctgtttatatgaaacaatctattaaatcaaatattcttttggaaatgtgggggtgggggatgcaaactaattctcagtgcttggtaaactatttacaagaggcttaagtgttcttggtcatctctgccctgcatcactgacaagagggagaccttagtgtcaggcctcaggcctctttctctttgtagatctgaatacaccattagtgtctctgagctgctcttgcagcagccagggcctgtcccctctctccacagcaatcacctcttaccaattggcccagctttctggaagcaaa

SEQ ID NO: 710508 - DNA, 1190 bp, Homo sapiens
aggaaacataggctaaccagtccacacaggaatgagtgcaaagtttcacagcatttgcttctaactgacagtaacaactaataatatattgaaatccacacccgaggcagttcctttccttccctctctctcattcctttttccatttccctacggcttcccttttaattgagggcctcctgtgtgaaggtcgaaaacatgtrgctggaagataaaccactcatcagccatcacctctgggcttgaactgaactgagagagcctggggaagagctgctgcagaggtttaagtagggaaacacagtaacaaaacacatgcggtacttctagaatagcaaatgcgtagtagtgtcaccagtggctactacctaccaggaaacctgacattttggaattgagaaggtcttcagagatcatctagttgagttttctcaacttacaaaagaggaaactagggccagagaagttcagaatcacaaagtcagttaaaatacagatctaggaattccacatctaagttcagtgttcttctaaccaaacaatgtggtgattacctatcaataacaccccaacaatttttctatgattaatgttatgctttaacttttctgcttaaaaacactacctttcaaatttagacttgaaatttggtaaaaagtcctggacaattagacgttttaagaatttctatggaatatgatagtttgtacaagactgctcaagtctaaagataatagcaagttttgtatttctgagcatggtatactggctaattcatctgacagagaatatactctatttttcagaaaaagcaaatcccaaagtggcacatgctgtgaagacaacccttttaagattattatctagtaaataatcatgtaaatctgacatgacttgttggcatttagtctaaagttgcattaaggccacgtgttaccaaaggcatctcttcaatgcataatttataacataacctcaacgactaccagagagacccaggtagaatcatgaattaatattgcagaaatagacccttggaggattagttgacatttagctagggtcacaagggcaactggattagtagttgcaggctattcctcacagagaacttgccagatgacaaaatatatccaccatattcccggaattaaaaataaacctcttcaaaatgtttagtttggatgtcc

SEQ ID NO: 710509 - DNA, 1190 bp, Homo sapiens
aggaaacataggctaaccagtccacacaggaatgagtgcaaagtttcacagcatttgcttctaactgacagtaacaactaataatatattgaaatccacacccgaggcagttcctttccttccctctctctcattcctttttccatttccctacggcttcccttttaattgagggcctcctgtgtgaaggtcgaaaacatgtagctggaagataaaccactcatcagccatcacctctgggcttgaactgaactgagagagcctggggaagagctgctgcagaggtttaagtagggaaacacagtaacaaaacacatgcggtacttctagaatagcaaatgygtagtagtgtcaccagtggctactacctaccaggaaacctgacattttggaattgagaaggtcttcagagatcatctagttgagttttctcaacttacaaaagaggaaactagggccagagaagttcagaatcacaaagtcagttaaaatacagatctaggaattccacatctaagttcagtgttcttctaaccaaacaatgtggtgattacctatcaataacaccccaacaatttttctatgattaatgttatgctttaacttttctgcttaaaaacactacctttcaaatttagacttgaaatttggtaaaaagtcctggacaattagacgttttaagaatttctatggaatatgatagtttgtacaagactgctcaagtctaaagataatagcaagttttgtatttctgagcatggtatactggctaattcatctgacagagaatatactctatttttcagaaaaagcaaatcccaaagtggcacatgctgtgaagacaacccttttaagattattatctagtaaataatcatgtaaatctgacatgacttgttggcatttagtctaaagttgcattaaggccacgtgttaccaaaggcatctcttcaatgcataatttataacataacctcaacgactaccagagagacccaggtagaatcatgaattaatattgcagaaatagacccttggaggattagttgacatttagctagggtcacaagggcaactggattagtagttgcaggctattcctcacagagaacttgccagatgacaaaatatatccaccatattcccggaattaaaaataaacctcttcaaaatgtttagtttggatgtcc

SEQ ID NO: 710510 - DNA, 1190 bp, Homo sapiens
aggaaacataggctaaccagtccacacaggaatgagtgcaaagtttcacagcatttgcttctaactgacagtaacaactaataatatattgaaatccacacccgaggcagttcctttccttccctctctctcattcctttttccatttccctacggcttcccttttaattgagggcctcctgtgtgaaggtcgaaaacatgtagctggaagataaaccactcatcagccatcacctctgggcttgaactgaactgagagagcctggggaagagctgctgcagaggtttaagtagggaaacacagtaacaaaacacatgcggtacttctagaatagcaaatgcgtagtagtgtcaccagtggctrctacctaccaggaaacctgacattttggaattgagaaggtcttcagagatcatctagttgagttttctcaacttacaaaagaggaaactagggccagagaagttcagaatcacaaagtcagttaaaatacagatctaggaattccacatctaagttcagtgttcttctaaccaaacaatgtggtgattacctatcaataacaccccaacaatttttctatgattaatgttatgctttaacttttctgcttaaaaacactacctttcaaatttagacttgaaatttggtaaaaagtcctggacaattagacgttttaagaatttctatggaatatgatagtttgtacaagactgctcaagtctaaagataatagcaagttttgtatttctgagcatggtatactggctaattcatctgacagagaatatactctatttttcagaaaaagcaaatcccaaagtggcacatgctgtgaagacaacccttttaagattattatctagtaaataatcatgtaaatctgacatgacttgttggcatttagtctaaagttgcattaaggccacgtgttaccaaaggcatctcttcaatgcataatttataacataacctcaacgactaccagagagacccaggtagaatcatgaattaatattgcagaaatagacccttggaggattagttgacatttagctagggtcacaagggcaactggattagtagttgcaggctattcctcacagagaacttgccagatgacaaaatatatccaccatattcccggaattaaaaataaacctcttcaaaatgtttagtttggatgtcc

SEQ ID NO: 710511 - DNA, 810 bp, Homo sapiens
tgcctatttttttgagattagaggctacttatatataaatgtagaacatttacagttattccaattaaagtcaagtgttgtttggcacaaaaaaaatgctgattcatatgggaggccygggttctgacttaagactaataaatgattaaattgtgcaatttggacaaatcattgaacctctttaggtcacatttgcctcattcctaaaatgaagttggattaagttgattttttgttttttggaaatagggtcttgctctgtcatccgggctggagtgcagtggggctagcattgcacactgcagcctcaacctcccaggtttaagtgatctctcacctcaaccttctgagtagctgggaccataggtatgcaccagcatgccagctaatttatttttaagttttgtagtgatagggtctcactatgtttcccaggctggtctcaatctcgtgggctcaagtggtcccctcctgtgttggcctcccaaagtactgggattataggcatgagttactatacccagccaagttaattttaacattgaaaccctaaatagcacataaatatgaaaataattgttagtcctatgttgaagaaatttatatacgactacattgaagcaacaaaaaacattagaaatgacaacactggtgagttctaagaacactggaattccaagctctgagactaaaatgttcatcataattagaagttgaactaaaacaggccatgcctgagaaaactcgactaagtctcttcctcttaaccttgaaagtgtttatgatgatgacatcatcagttttctcaca

SEQ ID NO: 710512 - DNA, 810 bp, Homo sapiens
tgcctatttttttgagattagaggctacttatatataaatgtagaacatttacagttattccaattaaagtcaagtgttgtttggcacaaaaaaaatgctgattcatatgggaggcctgggttctgacttaagactaataaatgattaaattgtgcaatttggacaaatcattgaacctctttaggtcacatttgcctcattcctaaaatgaagttggattaagttgattttttgttttttggaaatagggtcttgctctgtcatccgggctggagtgcagtggggctagcattgcacactgcagcctcaacctcccaggtttaagtgatctctcacctcaaccttctgagtagctgggaccataggtatgcaccagcatgccagctaatttatttttaakttttgtagtgatagggtctcactatgtttcccaggctggtctcaatctcgtgggctcaagtggtcccctcctgtgttggcctcccaaagtactgggattataggcatgagttactatacccagccaagttaattttaacattgaaaccctaaatagcacataaatatgaaaataattgttagtcctatgttgaagaaatttatatacgactacattgaagcaacaaaaaacattagaaatgacaacactggtgagttctaagaacactggaattccaagctctgagactaaaatgttcatcataattagaagttgaactaaaacaggccatgcctgagaaaactcgactaagtctcttcctcttaaccttgaaagtgtttatgatgatgacatcatcagttttctcaca

SEQ ID NO: 710513 - DNA, 810 bp, Homo sapiens
tgcctatttttttgagattagaggctacttatatataaatgtagaacatttacagttattccaattaaagtcaagtgttgtttggcacaaaaaaaatgctgattcatatgggaggcctgggttctgacttaagactaataaatgattaaattgtgcaatttggacaaatcattgaacctctttaggtcacatttgcctcattcctaaaatgaagttggattaagttgattttttgttttttggaaatagggtcttgctctgtcatccgggctggagtgcagtggggctagcattgcacactgcagcctcaacctcccaggtttaagtgatctctcacctcaaccttctgagtagctgggaccataggtatgcaccagcatgccagctaatttatttttaagttttgtagtgatagggtctcactatgtttcccaggctggtctcaatctcstgggctcaagtggtcccctcctgtgttggcctcccaaagtactgggattataggcatgagttactatacccagccaagttaattttaacattgaaaccctaaatagcacataaatatgaaaataattgttagtcctatgttgaagaaatttatatacgactacattgaagcaacaaaaaacattagaaatgacaacactggtgagttctaagaacactggaattccaagctctgagactaaaatgttcatcataattagaagttgaactaaaacaggccatgcctgagaaaactcgactaagtctcttcctcttaaccttgaaagtgtttatgatgatgacatcatcagttttctcaca

SEQ ID NO: 710514 - DNA, 2233 bp, Homo sapiens
tacaagaagtagccgagcgtggtggtgcatgcctgtggtcccagctacttgggaggctgaggcatgagaattgcttgaaccctggaggtggaggttgcagtgagctgagatcgtgccactgcactccagcttgggcgacagagcgagactccatcttaaaaagaaaaaaaaattacttcttatatttacccgctgctctttgaagtgggttctgctattgctaacggggccgcaatggtctttgtgattctggcatctttcattagactttgcttcttgattggtaaagtaagaacttggagctaagggacctgaaaagtttcttttagtctcaacatgttacagttctgttgttctccttgggctgagtttcatgacaccccagaggttggatgttgtaatagaaggtttcacagtgaaattttaatgggttatttagagagtgagacagacccattctcataatcagttactaaatgcttttctaaaaatgtcaagagctgcaattacattgcaaggagtgagtgtgtgtgagtgtgaatgagtgagtgtgtgtgtaagaagtggggggtgtaagatataacattaattgagagttcatggaagtcacttttctttttttctggatagctgtttttagtaatcatgctccgatgaactttggccttgtaaacagaatgatggcagtgattctattgaagtaaattggtttgttctgagaccccaaaggataacattcaagtaatgtgaaagaaattgttttaacagttaattaaaaaacaaactaagctaaacaaaacaccaaaaaacctccacctacattggaagatcagtgacttttgtatttcttttctattaagggtcttttaaaatagattttgcatttagaaaattaacgagacttacaggaacatgttaaaaccctaccagtaacagttatgcccattataataacgctattttaraatgatgttggggtattatgttaatattaggttaatttcaaatggctgtagtatcctcttccctgaagaagtcatgccagcaccccaaattactgccgctgattacaaaatgagagcagattattaaaatttttgtgacaagaaagctatacatcaatgaatggaattaacattaacattttgtattgctgccaagaattaagccttggcagcaatacaaaaaagtaaattcacttaaaagtacacacacgacttctttcctgtgttcataatagagaagtagaagaactcaatggggaatccaagagtttcttcacactcttttgcctaaagactgattcctctctgatctgattggactaaagtagggtgaggaactgccctcgatgggatgcaggtgtcagggatatcatccccataattgtctactggagggatgaggagattgaaagccagggagtcagcctgaagctgtggggatcaaaagtgggaacccaggagtcaggaaggtggacagacggtgtgaaatcagggacatagcatacaaggttgaaaaacagaaagtggttcttgggcactttcaggtataaactatttagatatacctgccaacactaggctttctgattctgtttttctaagtcccaaggtgtctcttccccagcccctctccatggctcactcatttgttagagaaactagcacagtctgtgtttaatgaggggccagacagactcaacctgccgtgtttctccatatggatctccatggtagctgtgaaacattgcaaaagttgcttcctctcccttcccttcaactcccccttcccttcaactccccccattcatagtactgaaccagcagtcccttccatgggcagagaagctatgaggcttacctgatttttctagagtgctatgatatccttgggtggtagccagtgtcaccagtgggcactatgatgacttacgggtgtgcaccttgaatggccctgaaactcaggatgttttgtggagttgtgtgctgacagataaccccttcctgttactggggtgtgtcaggtacagagtgattttggagaccacagtgggatgggaagtgccgatttgctcatcctcctgacagatgcaggcatgagagacaatgtgcttagatttttatccctgtgtgcaactcctagaatggttttgagagggaataggcagcttgcctttaggtaaccattttgaagattttctattgttgcttaaaattttttagttagaagt

SEQ ID NO: 710515 - DNA, 653 bp, Homo sapiens
ttttttttctatttgtttacaacaaaaaaactttatttataaatgcaagcattattttgtttgattctgacaataatcatatgagtaggtgcaataatcatatccaatatacctataaggagactgaagctcagaaatgttaaggaacttaacccaaatcctgtagtatgaagagaagctagagtttaaacccaagtgatgggtgaaagatcaaataacatataaacattttaaagcatcttgcatagtccttgacacatagaaagcacgtagcaacattaattaattctgaatgtttttgttggtcaaaaagtgactacctacgatgagggggaaaaataattaatgcacccagtgtgggaaactgtaaaacaaagctgtgatccagtggcttattattttatatagatactgttcatcatccttgcttatttctctaaattgagctttttragggcaaggtctctgctctggaatctctttgcatttccagagaatgctagaaaatgagtactcttgctgtattgaaaagagcctattaggaacacgccacaaagcctgggttaagatttttttttttgtggcttagtgtggtccagatcttgacacagccagtgccaccacaaacatcctgttgatgatgctttagtttt

SEQ ID NO: 710516 - DNA, 1579 bp, Homo sapiens
tttatctgtgattagagagactctgtacatatacatgaattggggttaaaccttaatgtgagatactatttgataggcttttctagttttcttttaaaattttgctacagaatgatagcattctcaaagacagcaagggaataaagagcaaatgtgactgcttagaaatggggagcycactgctaactctctgtgtgcttctcttacagcacttagctcctcccaggccaggctccctctccataatatatgtgggtagattagatgatgtttaaaggtctaactctgtaattctattatgctgcatgtgtcacagtgccctttaagctacttcctccttaaaaggctcagtgagcaaccagtgaaatataccaggaagtatgatgtatcctgaagcttgacacaaaaatctcttggcacaagtatcctggacaacatgcaactgatgggcacacctggccggtctcagctccagatgttttccttaatccctggcctttcatcaggaatgtggatttctactgccatttaatccctatctaaacatacacccacctgaatggtgtggaggactggatagtagatggaatcagttcaaagtgtagatggtggcatggtgtttttcacagacagcctatcctgggggtctgtactagatattttctccctatacctatgtacaggaaattctccagcccatgaggaaaggaccctatgctggtctagtacaggggcatgttcagttccctagaggagtcccctatcttctctgccaccagctgctgctgattggattaggggtggtgtctgtcagcacagccagactatgaactggttcaaaacctgtggcctgacctcatgcaaaagacatcagctgcaaccagactcttgaattgagaaatactgagagaatgggaccattaactccattaattccagaggaggaaatggtagctgtgaagatgcaagagagaaactcaggtaaagttagaaccatgaagtgtcatggtaacctgaagttatgaagaagcagaaactggaatttttaagaattcagaggttgcacttccacgtgggagtccccgaggtgtgaaccatacaatctggagtaaagaataaatcagttagatagaagagaactgagtggatgagcagagacagatcacaggggtcccaccacataaccctgctgctgctggcagagaattgtctctggacctgcacaatcttcttgtccaatttcatgctcagaaaggtctggccctaccacagtgcttgttcttatttctgtgaggttctctctccagtgtgtattcttacaaccaccactcctccctcatttcttgcagtaactggaagaacctaacacagacacctgtagggcaggactccttattttctgactccctggctctgaccacaggtaggacattcaggtgtctaagtatctgggttgctctttctccacattcatgtaacattttcatttgcagagcaatgtctttagatagtcagcaatcaaatccctacaccttaatacttaaggaaatatttaaataggagtgccataatttagggc

SEQ ID NO: 710517 - DNA, 1579 bp, Homo sapiens
tttatctgtgattagagagactctgtacatatacatgaattggggttaaaccttaatgtgagatactatttgataggcttttctagttttcttttaaaattttgctacagaatgatagcattctcaaagacagcaagggaataaagagcaaatgtgactgcttagaaatggggagctcactgctaactctctgtgtgcttctcttacagcacttagctcctcccaggccaggctccctctccataatatatgtgggtagattagatgatgtttaaaggtctaactctgtaattctattatgctgcatgtgtcacagtgccctttaagctacttcctccttaaaaggctcagtgagcaaccagtgaaatataccaggaagtatgatgtatcctgaagcttgacacaaaaatctcttggcacaagtatcctggacaacatgcaactgatgggcacacctggccggtctcagctccagatgttttccttaatccctggcctttcatcaggaatgtggatttctactgccatttaatccctatctaaacatacacccacctgaayggtgtggaggactggatagtagatggaatcagttcaaagtgtagatggtggcatggtgtttttcacagacagcctatcctgggggtctgtactagatattttctccctatacctatgtacaggaaattctccagcccatgaggaaaggaccctatgctggtctagtacaggggcatgttcagttccctagaggagtcccctatcttctctgccaccagctgctgctgattggattaggggtggtgtctgtcagcacagccagactatgaactggttcaaaacctgtggcctgacctcatgcaaaagacatcagctgcaaccagactcttgaattgagaaatactgagagaatgggaccattaactccattaattccagaggaggaaatggtagctgtgaagatgcaagagagaaactcaggtaaagttagaaccatgaagtgtcatggtaacctgaagttatgaagaagcagaaactggaatttttaagaattcagaggttgcacttccacgtgggagtccccgaggtgtgaaccatacaatctggagtaaagaataaatcagttagatagaagagaactgagtggatgagcagagacagatcacaggggtcccaccacataaccctgctgctgctggcagagaattgtctctggacctgcacaatcttcttgtccaatttcatgctcagaaaggtctggccctaccacagtgcttgttcttatttctgtgaggttctctctccagtgtgtattcttacaaccaccactcctccctcatttcttgcagtaactggaagaacctaacacagacacctgtagggcaggactccttattttctgactccctggctctgaccacaggtaggacattcaggtgtctaagtatctgggttgctctttctccacattcatgtaacattttcatttgcagagcaatgtctttagatagtcagcaatcaaatccctacaccttaatacttaaggaaatatttaaataggagtgccataatttagggc

SEQ ID NO: 710518 - DNA, 1935 bp, Homo sapiens
ggatcctctagacctgtttcttcttctggaaggtgggaactctaccttataggatcagtctgaggagttcacaaaataataagggcaaagtgcccggcacattgtaggagactagtaatgtctataaaatgaggggcttgaagtaaatgatccctctagttctctctactgctaacattctaagacctcctttacattaattgttctcaagccacatctccctcccctacaggacttctatttatttctgatcaatttcacgagtacaaataagtttctccgattatatgattttcttttagttccttggactgtcccctgatctatctgctctcccttcaatatctgcatcactgcaaattgtacaagcctgtgctttaggtcttcatctgtacaagcaataaacacactggacaggactgggacaaaggcactaatgatttcctgccatgctaaccgtaattccatcagctctgaattcacggacttataccattattcagcccactattcacagagcagcctgcaaggctagcatgaaaacctctagcaaacaacctgctgaactcaaggtgcccagtgtgtggtcttctctatatctagcagcctcaaaatcttattgaaaatgaaaatgggttgctttggcrtgaccttttcttcagtatatctccatagtccccagtaatcaccccattcttgtattaatcctgtcaaacctgtgtttagtaatttacagtagattcttctaggaagcaaatcctattctccagaggtaaccctttccacttttttggagtatccaatcggtccttacccacctcctttcacacaccctgtgcctgagaacagagacacctttcagcaccttcaacgtggtgccccctggggctagggttgggccctggagacatccccctggtgggacacataccacactcatactcggggcagcactggtctgcattctggcggaggcgggctacttcacacaggccacacgtgggagctagaggagaggaacggccacaaaagtcagagaaattagtggtgggacagcctcagagggatttgaaatgttcttgctcactgaaaactagtaggagttctgtacggtcatcccacaaggatccaggccacgggacctctgacagatgagtgtccccatgttcctgttgacaccctcacatttaccctccaggggactcttaagtctgaccgttgctggggaccagaggcgagggttaatctgagaatgtcgaccccaggtgcagaatggggctcccaggcccagtgatgggaaatgcaggctgggcaaggaagcccacccactctaggactctaggtgccagtgtttgagtctgctctgccagaggtgaagatgggtggctggggggccttgcaggggcccttgttcctccatgaaggcaccagggaggggaggactctcacctttggccgtggggcagggctgcgttgtgcagttgaccttccgcccgctgaggcatgtgcagatctgacagggctggtggtccgggacccaggcttccaggaactgagggcaaagcaaggttcagaaagggcacaggacattctaggtacgaagcccagaattcacagaggtcagctctccctgcctccggcaagggccagtccctgacccagccctctgacagagcctcacaggcaaacaaaagcaggctgaaaggaggttgtgaggttctaatggctttcagaaaggtggttgccacattgctttgtaaactaacatgcggaaattttcactacagccttctctgttggcagtgctaaaaccaagcaaagaaagaaaaatgagagttcttggatcgcactgctagtcatttctcaagccaaaggagaaattgggttgttgcttggggaaaaaaatccatttatttctgaaattgacttcagaca

SEQ ID NO: 710519 - DNA, 2417 bp, Homo sapiens
ttatttacagctaccagtagaaatagcttaaagagttcaaagtcattgcctctgagtaaaagaatttagtaatagaaaagataaaacatagtgttttatatttataaacccttcaaacattttaattttttaatcatgtgcatctactactccaataaagaaatttattttaaataaattctgtttaattcaacaaatcatgactaccctcctctctgtttctactacttatctctacagttctggaactggggaggggaatatccttaacccaagtccctgactgcccccaccctttaaccctatctgaggtctggttaggactgaggttcctagagggaatcaggagagaattctgcaggtaaagtactcattctactagtttatgataagccaagatggcgtaaatgaagaagaaaatcacagcaggtgacaaaatgcattgacatgagacaccatcacaacgtgccatgcaaataaaaaacgtgtttttaaacagcaaaagactgagccactttaacacctactttatgacactcctgactacttagtggacctttatatttaaaaatgcaccatattcaccaaaaaggggtcacagtaaaaggaaaaacaaaaaataaataaaagaaaaatgcaccataaactctgtaactgatgtaaaaagatgtcagtgatacattttcaacgtggttttatttttaaattttctttttagtttgtaaatgtgccatgtgatcttaaaatgaatgtgcaatcaccatgcaatactatgcagccataaaaaaggatgagttcatgtcctttgtagggacatggataaagctggaaaccatcattctcagcaaactatcgcaaggacggaaaaccaaacaccacatgttctcactcataggtgggaattgaacaatgagaacacctggacacagggtggggaacatcacacaccggggcctgtcgtggggtggagggagggaggagggatagtattaggagatacacctaatgtaaatgacaagttaacgggtgcagcacaccaacatggcacatgtatacatatgtaacaaacctgcacattgtgcacaagtaccctagaacttaaagtataataaaaaaaaaaaagaaaaaaaatgaatgtgcagtcagtggttcttagatgaaatttcccataaatgtcaattaggtcatccttattaatcatggttttctcawcttttctgtcatgattgggccaccgagatgatgtgagactgagggctagattatttctggttcatctttactcctgaagggcagtcattgaaggtcccaacccaactccaggtgattcatcaatgtttctactgttagcaagtcctagactccaattcttattcctctagctcagcaaagctgtctgaagtctgacttacctctcatcttccagcaacacatagaatcagtagtgcttccaggagaaaactgccctgcctggcgatctcacttctgaatttctgtcttccccatggaccttggcctggtaattcttcactgtctcgttaattctgcaatggtttcataaggatttttttttttcatatttgcctttcttctgtagatgttcagacagagaattgatccaaatgacctcatccgtcattgctggaagtaatagcccttgatgagcgatgattattatttgcttttttactgtgtttcatgttgtctaaatcttttacgatgacaatgtattgcttttttatttctttataattagaaaaaaaggccctgtttcattaactaagaatactttagtaaaaaagagtccacaaaatccctaaattctggcattctattctgtacctattccatgctatatgtttagtccacattgaaagcccagtcaggatttcaatgtgattagctgttgcttgtgtgatggaaaggcccttgtagtaaaactatagccttttacaactttttaaataaaaaattgcttaattgggaaagaaagaaaggatgattttagttctaataattttccatttgtaaccttgtagagtccactttctcttgaaacctcagtcatctttctccttctttctttctttcctctttctctctctctcttttctttctttctctcttttctttctctttctttttcttctttcttctttctcctctctttctttctctctctctctttctgcctccctccctttctccctcctttctttcttttcttttcttttctttccttctttctttccttccttctttctttctttctttctttctttctttctttctttctttctttctttctttctttctttctttctttctttcttctctttctttctgttttttgagacaggattttgctctgttgcccaagctggagtgcagtgctgtgagcctgggctcaactgatc

SEQ ID NO: 710520 - DNA, 2417 bp, Homo sapiens
ttatttacagctaccagtagaaatagcttaaagagttcaaagtcattgcctctgagtaaaagaatttagtaatagaaaagataaaacatagtgttttatatttataaacccttcaaacattttaattttttaatcatgtgcatctactactccaataaagaaatttattttaaataaattctgtttaattcaacaaatcatgactaccctcctctctgtttctactacttatctctacagttctggaactggggaggggaatatccttaacccaagtccctgactgcccccaccctttaaccctatctgaggtctggttaggactgaggttcctagagggaatcaggagagaattctgcaggtaaagtactcattctactagtttatgataagccaagatggcgtaaatgaagaagaaaatcacagcaggtgacaaaatgcattgacatgagacaccatcacaacgtgccatgcaaataaaaaacgtgtttttaaacagcaaaagactgagccactttaacacctactttatgacactcctgactacttagtggacctttatatttaaaaatgcaccatattcaccaaaaaggggtcacagtaaaaggaaaaacaaaaaataaataaaagaaaaatgcaccataaactctgtaactgatgtaaaaagatgtcagtgatacattttcaacgtggttttatttttaaattttctttttagtttgtaaatgtgccatgtgatcttaaaatgaatgtgcaatcaccatgcaatactatgcagccataaaaaaggatgagttcatgtcctttgtagggacatggataaagctggaaaccatcattctcagcaaactatcgcaaggacggaaaaccaaacaccacatgttctcactcataggtgggaattgaacaatgagaacacctggacacagggtggggaacatcacacaccggggcctgtcgtggggtggagggagggaggagggatagtattaggagatacacctaatgtaaatgacaagttaacgggtgcagcacaccaacatggcacatgtatacatatgtaacaaacctgcacattgtgcacaagtaccctagaacttaaagtataataaaaaaaaaaaagaaaaaaaatgaatgtgcagtcagtggttcttagatgaaatttcccataaatgtcaattaggtcatccttattaatcatggttttctcaacttttctgtcatgattgggccaccgagatgatgtgagactgagggctagattatttctggttcatctttactcctgaagggcagtcattgaaggtcccaayccaactccaggtgattcatcaatgtttctactgttagcaagtcctagactccaattcttattcctctagctcagcaaagctgtctgaagtctgacttacctctcatcttccagcaacacatagaatcagtagtgcttccaggagaaaactgccctgcctggcgatctcacttctgaatttctgtcttccccatggaccttggcctggtaattcttcactgtctcgttaattctgcaatggtttcataaggatttttttttttcatatttgcctttcttctgtagatgttcagacagagaattgatccaaatgacctcatccgtcattgctggaagtaatagcccttgatgagcgatgattattatttgcttttttactgtgtttcatgttgtctaaatcttttacgatgacaatgtattgcttttttatttctttataattagaaaaaaaggccctgtttcattaactaagaatactttagtaaaaaagagtccacaaaatccctaaattctggcattctattctgtacctattccatgctatatgtttagtccacattgaaagcccagtcaggatttcaatgtgattagctgttgcttgtgtgatggaaaggcccttgtagtaaaactatagccttttacaactttttaaataaaaaattgcttaattgggaaagaaagaaaggatgattttagttctaataattttccatttgtaaccttgtagagtccactttctcttgaaacctcagtcatctttctccttctttctttctttcctctttctctctctctcttttctttctttctctcttttctttctctttctttttcttctttcttctttctcctctctttctttctctctctctctttctgcctccctccctttctccctcctttctttcttttcttttcttttctttccttctttctttccttccttctttctttctttctttctttctttctttctttctttctttctttctttctttctttctttctttctttctttcttctctttctttctgttttttgagacaggattttgctctgttgcccaagctggagtgcagtgctgtgagcctgggctcaactgatc

SEQ ID NO: 710521 - DNA, 2417 bp, Homo sapiens
ttatttacagctaccagtagaaatagcttaaagagttcaaagtcattgcctctgagtaaaagaatttagtaatagaaaagataaaacatagtgttttatatttataaacccttcaaacattttaattttttaatcatgtgcatctactactccaataaagaaatttattttaaataaattctgtttaattcaacaaatcatgactaccctcctctctgtttctactacttatctctacagttctggaactggggaggggaatatccttaacccaagtccctgactgcccccaccctttaaccctatctgaggtctggttaggactgaggttcctagagggaatcaggagagaattctgcaggtaaagtactcattctactagtttatgataagccaagatggcgtaaatgaagaagaaaatcacagcaggtgacaaaatgcattgacatgagacaccatcacaacgtgccatgcaaataaaaaacgtgtttttaaacagcaaaagactgagccactttaacacctactttatgacactcctgactacttagtggacctttatatttaaaaatgcaccatattcaccaaaaaggggtcacagtaaaaggaaaaacaaaaaataaataaaagaaaaatgcaccataaactctgtaactgatgtaaaaagatgtcagtgatacattttcaacgtggttttatttttaaattttctttttagtttgtaaatgtgccatgtgatcttaaaatgaatgtgcaatcaccatgcaatactatgcagccataaaaaaggatgagttcatgtcctttgtagggacatggataaagctggaaaccatcattctcagcaaactatcgcaaggacggaaaaccaaacaccacatgttctcactcataggtgggaattgaacaatgagaacacctggacacagggtggggaacatcacacaccggggcctgtcgtggggtggagggagggaggagggatagtattaggagatacacctaatgtaaatgacaagttaacgggtgcagcacaccaacatggcacatgtatacatatgtaacaaacctgcacattgtgcacaagtaccctagaacttaaagtataataaaaaaaaaaaagaaaaaaaatgaatgtgcagtcagtggttcttagatgaaatttcccataaatgtcaattaggtcatccttattaatcatggttttctcaacttttctgtcatgattgggccaccgagatgatgtgagactgagggctagattatttctggttcatctttactcctgaagggcagtcattgaaggtcccaacccaactccaggtgattcatcaatgtttctactgttagcaagtcctagactccaattcttattcctctagctcagcaaagctgtctgaagtctgacttacctctcatcttccagcaacacatagaatcagtagtgcttccaggagaaaactgccctgcctggcgatctcacttctgaatttctgtcttccccatggaccttggcctggtaattcttcactgtctygttaattctgcaatggtttcataaggatttttttttttcatatttgcctttcttctgtagatgttcagacagagaattgatccaaatgacctcatccgtcattgctggaagtaatagcccttgatgagcgatgattattatttgcttttttactgtgtttcatgttgtctaaatcttttacgatgacaatgtattgcttttttatttctttataattagaaaaaaaggccctgtttcattaactaagaatactttagtaaaaaagagtccacaaaatccctaaattctggcattctattctgtacctattccatgctatatgtttagtccacattgaaagcccagtcaggatttcaatgtgattagctgttgcttgtgtgatggaaaggcccttgtagtaaaactatagccttttacaactttttaaataaaaaattgcttaattgggaaagaaagaaaggatgattttagttctaataattttccatttgtaaccttgtagagtccactttctcttgaaacctcagtcatctttctccttctttctttctttcctctttctctctctctcttttctttctttctctcttttctttctctttctttttcttctttcttctttctcctctctttctttctctctctctctttctgcctccctccctttctccctcctttctttcttttcttttcttttctttccttctttctttccttccttctttctttctttctttctttctttctttctttctttctttctttctttctttctttctttctttctttctttcttctctttctttctgttttttgagacaggattttgctctgttgcccaagctggagtgcagtgctgtgagcctgggctcaactgatc

SEQ ID NO: 710522 - DNA, 587 bp, Homo sapiens
ggtagtcaaaaggtagaaaccactcaaatgtttgtccaaggatgaatgaatacacaaaatrtggtatatttatacaatggaatagtattcagtcacaaaaagtaatgaagtactgatgcatgctacaacatggataaaccttaaaatattatattagtgaaagtagccagtcacaaatgaccacatggtatataattccactacatgaaatgtccaggatagacaaatcaatggagagagaaagaagtggttgcctagggaagggggagaactggggggtaatagctaagggatgtagggcttctttttgaggcaataaaaatgttctgaaattgattgtgatgattgttgcacaattctgtgactatatagaaagccattgaattgtgcattttaaataagtaaatagtatggtatgtgaatagttctcaataaagctgtcaccaaaaacaaaaaatcttaatgaactaggagaaaaatcttaatctgataaaagataaccatcagagaacaataaatatcaaattaagttcccattaaaagaataaaattggaatgctagcttccgctgcttcatgtatagccaa

SEQ ID NO: 710523 - DNA, 572 bp, Homo sapiens
gcaccaagattcaacaaactggaactgaaataacaccagatgcatctgaaaatactgagtgggattaatctactcttggagattctgtggctaaattgatgatagaaaaccaagcaaatacaaagaaaaaccataacattaactttagaggaaactaatagttctgagggagatgatcctagaatgcaacctggctccactgtgtgagtagtgtttagagggtcctaatgacacaagcaggctggaattacactgttcctttattaggaggatataagagtggaaaataagtatgtgtgtggcagggacaaaggatgaaaaacagctaaatcctcatcttccataaaaggatgtcaatatagaatgcctgaagcagaacaatcaagatgcaacataagtatkttatacagagatacaaggacagtacacaagaatcagctaaaagtatttaacagaaatggtcaggggcgaggtcagaggagccagggcaggggactgctgtgttcataacaagctttgtaaaaaactatatgactccttaaactatgtgtccttaaaaaaatgttttaaga

SEQ ID NO: 710524 - DNA, 1461 bp, Homo sapiens
ttttttaaattttttattttttgagatggagttttgctcttgttgctcaggctggagtgcaatggtgggatcttggctcactgcaacctctgcctcctgggttcaagtgattctcctgcctcagcctcctgagtagctgggattacaggcatgtgccaccacgcctggttaattttgcatttttagtacagacgggatttctccatgttggtcagggtggtcttgaactcccgacctcaggtaatctgcccacctcagcctcccaaagtgctgggattacaggtgtgagccaccatgcccagcctgctgatgtttttgacagtgatgattctgccctgcctacatcccgaagattatctgacaactttcagttattcagtgttattaaaatgggtccttggatactttcagatgagaagagcttacctttctttcaaccaaccaccacatgtgagaagcagaaagataggtggggcaaggccatgccctcaagatattatagtaagggataagccacagactcagaagatagagacctgtggacaccctagttgggtgattttcttatcctttgaaattaatactttaaaatttgtgttcagtctgtctacagaggagagactgagcagtgtctgggcaaaggcattggacaaagactttactggaatatcagcctttcctctgtggtccaggaaattttatttcggacctgactccttacactgcttagcacaagcagaaccctgcatctaataggacctactcctgttggaaaacagttgagtcaccttctattgttagtgaacttgtcctttggattggttctccatcagtcctgcctccagcccccaaaccaactggtatttccaaaagctctttccaatcccatataaaactctctccagagttttggtagataaaactcttcatcttgttagctttccaggaatgttttggggcttgttggaggtgagtagcataggcagttgcccagacaaatcacgccttgatctgtctctgcagtctaaggccttaagggagtgatatcaggtgccayggagcaaaagcctagggaggcatgggagtgggggatgtggaatggggagaagaagcattattgagcacattctccaaaagacaggactttcaaccatttaaaaaaatattgtaggactatggtgaattgaaaacaagtatttgttttttctccctcctgaaaccccactaaattgttaaaaggcatacggagaggaagaacacgagagaaggcaacagcaacaaaagcctggaagctggaaagctattagaaaagtgggaaatgggccgggcacaatggctcatgactgtaattccagcattttgggaggcagaggcagacagatgacttgaggccagaagttcgagatcagcctggccaacatggtgaaaccccatctctactaaaaatacaaaaattagaac

SEQ ID NO: 710525 - DNA, 660 bp, Homo sapiens
agggggtagggggctaggggagggatagcattaggagaaatacctaatgtaaataagttaatgggtgcagcaaaccaacatggcacacgtatacctaggtatcaaaactgcacgttgtgcacgtgtaccctagaacttaaagtataataaaaaaatacatacatatatatatatatatatatatacatatatatatatatatatatayacacacacactaaaaccgaaacaatatcctaaaacagattggatacagaagcagctatgagaatctaactacactccagtaagtcagacattgaagaggtttgcaaaaatgcaagacaatgttagccttctcattttttttattttggaaaatataatctattttaaataaaaagattacttttatatttaaaaaagacttagacaaactgctcaaattttaaaatgaaactttgtactaaaagagaagatacactatactgtaatttcaagccactcaacaaagcatgttgaacaatcagttatgcagaggaatttattaagcgtttagttttgtcataaattcagcctcccatacttaatatactgcagttccactagaatctagagtgattactctttggggcatccttgaaaaccactcacagaatccagacacagtcctaaagcata

SEQ ID NO: 710526 - DNA, 660 bp, Homo sapiens
agggggtagggggctaggggagggatagcattaggagaaatacctaatgtaaataagttaatgggtgcagcaaaccaacatggcacacgtatacctaggtatcaaaactgcacgttgtgcacgtgtaccctagaacttaaagtataataaaaaaatacatacatatatatatatatatatatatacatatatatatatatatatatatacacacacactaaaaccgaaacaatatcctaaaacagattggatacagaagcagctatgagaatctaactacactccagtaagtcagacattgaagaggtttgcaaaaatgcaagacaatgttagccttctcattttttttattttggaaaatataatctattttaaataaaaagattacttttatatttaaaaaagactyagacaaactgctcaaattttaaaatgaaactttgtactaaaagagaagatacactatactgtaatttcaagccactcaacaaagcatgttgaacaatcagttatgcagaggaatttattaagcgtttagttttgtcataaattcagcctcccatacttaatatactgcagttccactagaatctagagtgattactctttggggcatccttgaaaaccactcacagaatccagacacagtcctaaagcata

SEQ ID NO: 710527 - DNA, 644 bp, Homo sapiens
tggtcacgcgggatgtaaacgctgaatgggccaggtgcagtggctcatgcttgtaatcccagcactttgggaaggcgaggcaggtggattgcttgagctcaggagttcaagaccagcctgggcgacatagtgagacctcatctctacctaaatttttttttagtcagtcatggtggcacatgcctgtagtcccagctactcgggaggctgatgccagatgatcacttgagcccaggaggtagaggctgcagtgagctataatggtaccattgcaatccagcctgggcagcagagtgagaccctgtctcaaaaaaaataaaaaagtagaaagatggagtggaagcctgcccagggttgtgagcatgcacgggaaaggcacccaggtcaggggggatccccgaggagatgcctgagctgaaggattgtggttggggaaagcgtagtcccagcaaggaagcagtttgtgggtaagtgctgggaggtgagtggagtgagcttgtcagggagctgctggtggagcctggaggggaaggagggaggcagtgagagagatcggggtgggggktggggggatgtcgccagagctcaggggtggggacagccttgtgcgcatcagtcctgaggcctggggcacctttcgtctg

SEQ ID NO: 710528 - DNA, 1501 bp, Homo sapiens
tcccctctctctcttacatggagaaactccctctataactatgacctgttttgttacctcgatgtcgacatcattaaataaagagcccttcggatcatgaacacctcagacaaggtgcctcacacttgaagaaaactgagtcttttttttgtttttcctttgcatctggccattatgtgtcctataatgactgcaggtcactgcctctgcccccagccctcatttctcaaggcagaatccatttgagttgacgacacctggagcggctaagcagcacttgaaaaacgatttacccaccaagaagtcatcaatgagaagacactctctttagcaaatcagaccttgtttccaatcagctcaatcttcatgcttgagttttcaacattttactcagcgaagctggctgcaatcacatgaatgtcaatgggctacttaattcttcctttctacttcttccccaacccataatcacaaataccatttctctgcctctgccctccttccctctacctgactgccctcagaataccacacacgcatacacactccacttacacatgcacacacacacgtccattcatcaattccaagarcgaattggtgggaacaatctagcgacaaacatatatgggaataggtttgcatttacttccacttgtcttcaccacccactttctagttcctagttaagtatcaggcatgtagtgagtgtttgataaatatctctccaatgtcctgtagttcctcagacaaatttgcaagacctcatgtgtgctattagcatcaaacagctgttttggagtgacatgagtgcttaccaaggatgtagaatctcaccacgccttgcagacaggttgagacaggtgttcaccaaacaaggaaacagggatgcaaaaagatgctgaagccatctgggcaaagggcagtttggagaggcaagaggaaaatcctgttgcaagatcccaagcctctaaaaccctggtgtgcctacctccacagtggctatatctcatccagtgatcatgacaattattcaataaattactatgtgttcaataagcattagctacatatcagacacttgacatcatgaacaaatgtaattctcgcagcaactctataaggctcactgaggaatcttaggataaagagcttgcccaaggagcttatcaagttaatctcagaggttcccaagggggaacttggaggaataaggtgagggaacatttggggttgtcacaacacacaggtgactgctgaaatgtagtaggcagggggcaggaaagccggagatctacatcattcaggtcttttcccacccaaatgccatcatcagcccagttgaaaaacactgctttttaagcaagggcagagccaggatctgcacctgcctacaagcaagtctgcctcaacagcccctgtccttccttaccattccattctgaggcttcaaagccattaatgtcacataagctgcttcctggtagaacaactaactgcc

SEQ ID NO: 710529 - DNA, 654 bp, Homo sapiens
ttggggcctttgctgcaaaagttatgggttagagctctattgtcataaatggtctttgtccacttgtatattcagtctcaagagaatgagacaaaaagaagagagacagtatgtgtgggagaaagagaactcctttggggacaaaaaccagggcttgccttccagctctgcatcttgcaaccccaggcctcacataaatacctgggtctcagcttcctcacacctaactgtgtgcgtgtgtgtgtctgtgtgtctgtgtgtctgtgtgtggcctcatctttgttttcttagattaatttgggtaagtgtgatgggacaggcctgtgacttgcatttcttcccattttgggaacaaacrcggtgcagctccggagcttaagcgggtgggatggggagagagtggtggaggaaggctggctgcaaagagaaagaccagaaactaggccctcggcaccccctcccacaaccccacagtcccccaccaggctgttacccagcaactgcacaacccagccccttggaactaaatggcctttgctaattaggtgcctggtttagcttcccagagaaggcgtgtgaaaaatgtcacatacaagtataataaccgaatctgagaatcacaggctcaggcgaggtcgaaaggtctttattcta

SEQ ID NO: 710530 - DNA, 654 bp, Homo sapiens
ttggggcctttgctgcaaaagttatgggttagagctctattgtcataaatggtctttgtccacttgtatattcagtctcaagagaatgagacaaaaagaagagagacagtatgtgtgggagaaagagaactcctttggggacaaaaaccagggcttgccttccagctctgcatcttgcaaccccaggcctcacataaatacctgggtctcagcttcctcacacctaactgtgtgcgtgtgtgtgtctgtgtgtctgtgtgtctgtgtgtggcctcatctttgttttcttagattaatttgggtaagtgtgatgggacaggcctgtgacttgcatttcttcccattttgggaacaaacgcggtgcagctccggagcttaagcgggtgggatggggagagagtggtggaggaaggctggctgcaaagagaaagaccagamactaggccctcggcaccccctcccacaaccccacagtcccccaccaggctgttacccagcaactgcacaacccagccccttggaactaaatggcctttgctaattaggtgcctggtttagcttcccagagaaggcgtgtgaaaaatgtcacatacaagtataataaccgaatctgagaatcacaggctcaggcgaggtcgaaaggtctttattcta

SEQ ID NO: 710531 - DNA, 666 bp, Homo sapiens
caaaggtaaaaatggagactttttagttgagaaatctggaagacattgattctcacaaaaacccaatgagggaggtagaattctgactgctttgtcaaaccccagctatgaggactactagatggatgatcttcagcacattgtctttctatgcctccattttctctccttgaaaatgagaacataaatggtgcctacccaacgagggttatattgcaaattgatgcattagcccacataaaacatttcagacgttgcatagcacakagtaaactctcaatgagtcttagctattataaatattataatgaggaaattcagctcagagcagtgaaaatggtgctcaaacccacatccaccaaactctaaatcaccactctcagttgttgcccagaaatcagtaagtctcagttgtcaagcacctgacagtttcccaaagtgctatttcattcacgttttccttgaaagtgacaaaagtccatacaggtgaacagaagttagatttctcataggccctattttgcagaggaggaaggatcttggctcacccaaaatgacagcactaataaaccataggaggaattggagcccatacatctgattctaaggccctgttgctttcagggcctgatctgactgcaggagttccagcctcattgccacagg

SEQ ID NO: 710532 - DNA, 666 bp, Homo sapiens
caaaggtaaaaatggagactttttagttgagaaatctggaagacattgattctcacaaaaacccaatgagggaggtagaattctgactgctttgtcaaaccccagctatgaggactactagatggatgatcttcagcacattgtctttctatgcctccattttctctccttgaaaatgagaacataaatggtgcctacccaacgagggttatattgcaaattgatgcattagcccacataaaacatttcagacgttgcatagcacagwgtaaactctcaatgagtcttagctattataaatattataatgaggaaattcagctcagagcagtgaaaatggtgctcaaacccacatccaccaaactctaaatcaccactctcagttgttgcccagaaatcagtaagtctcagttgtcaagcacctgacagtttcccaaagtgctatttcattcacgttttccttgaaagtgacaaaagtccatacaggtgaacagaagttagatttctcataggccctattttgcagaggaggaaggatcttggctcacccaaaatgacagcactaataaaccataggaggaattggagcccatacatctgattctaaggccctgttgctttcagggcctgatctgactgcaggagttccagcctcattgccacagg

SEQ ID NO: 710533 - DNA, 621 bp, Homo sapiens
agaaaagaagactcttgtgggttgaattgtgtccccacaaaaagatctcttgaagtcctaaccccagatatctgtgaatatgaccttttttgaaaataagttatttgcagatgtaattaagctaagatgacatacttagttatgctgggtcctgatccaatgtgactggtgaccttataagaagagaaaatggaggcacagggaggagaatgccatatgaagacagagacacatagacacagagggaagacagcacaggaagacgagattgagattggagttgtgcaaacacaagccagggaagcctggcgccattagaagctcaaagaggcaaggatcttcctctcgaagtcttggagggagtgttgccctgccaacatcttgattttgtatttccagcctccagaactgtgtgtaaaataaatttctgtttacttaagacatccgatttgtgccactctgttatggaagccctggggaacaaatacaagaaaccagcaaaagggggtgagtctgagaggggtacaagagctgaaggaaccaacaggtagagagcagayaaccaacattttaaggatggggatgcctggagtccactttaaagtctttggatccctgtga

SEQ ID NO: 710534 - DNA, 656 bp, Homo sapiens
tgcacacacacacaccctccacatgcacataaacatacatgcacccatggatcgctgtaatgataggattgatgctccctttttgtgctcatctcaagctgtgtccctgctgcctgtctaggttctgaagtttccaggaggaaaaattgaggaatggaatccattgtgtctgagctgatcacaaagcaggaactcaccagtactggagcacaaaggccccagctgacagcttcccagaagggagtctgtgaacaagaagatggcattggaccatgggattctctcctcccactcctcaaatttttgggacgggttgacaagatgcgcttcttttcctaaatgggtttatctcagcttgtcagcttcagatgtgaaccacccccatttaaggactatttccagccaattacatcccctttaccataaagcactagagaaattaacagagactaayggacttaagcagcccccaatggcaagaccaatgcaaatgacaaggaagatccagaactacccgccttttctccctattttctcccctgtcagtaatttcttctgttagctgaaaatccctatttagccagcctgcaattcctattttagcagggccagccaagagcaccccagggaaaatcaccagtgggagaaaagggcct

SEQ ID NO: 710535 - DNA, 625 bp, Homo sapiens
gaaaaccttaagactagaatttcagtgcatgtagttgatgtaggaggcaatcccaggaagtacccatgggaggatggggaaataatacagagacagaaagacaggaagggtgcactgatgggcaggtttccactgtgggccaccagagctcaaagccctggggacttcgggaggtagagtcgggcatgcaccagmgtggccccacatgatgcatgaggcggctgaaatatatattcaccatctcccacctgccactggttgattcccagcattgccagcccatgacacataatagccagagaaagccctcaggtagaacttcacaggtgctggcagtagaaagcagttgcggatgggagtagtgacagccacagtgggtagagtatctgctacaccttactgatctctaaagccctgatgcccacccagttcctggccccgtgcttgctttatgaaatggaatgaacaaatgaatgaatgaggagtagtcatctgggtcagagctcttgcacattggtgaagggcagattctgaaactcctacttcaaaagcttagaagcagcaggctgtcccagcaactcgagagtgtgctttcctctgcctggactggacctcccctggtgta

SEQ ID NO: 710536 - DNA, 625 bp, Homo sapiens
gaaaaccttaagactagaatttcagtgcatgtagttgatgtaggaggcaatcccaggaagtacccatgggaggatggggaaataatacagagacagaaagacaggaagggtgcactgatgggcaggtttccactgtgggccaccagagctcaaagccctggggacttcgggaggtagagtcgggcatgcaccagagtggccccacatgatgcatgaggcggctgaaatatatattcaccatctcccacctgccactggttgattcccagcattgccagcccatgacacataatagccagagaaagccctcaggtagaacttcacaggtgctggcagtagaaagcagttgcggatgggagtagtgacagccacagtgggtrgagtatctgctacaccttactgatctctaaagccctgatgcccacccagttcctggccccgtgcttgctttatgaaatggaatgaacaaatgaatgaatgaggagtagtcatctgggtcagagctcttgcacattggtgaagggcagattctgaaactcctacttcaaaagcttagaagcagcaggctgtcccagcaactcgagagtgtgctttcctctgcctggactggacctcccctggtgta

SEQ ID NO: 710537 - DNA, 625 bp, Homo sapiens
gaaaaccttaagactagaatttcagtgcatgtagttgatgtaggaggcaatcccaggaagtacccatgggaggatggggaaataatacagagacagaaagacaggaagggtgcactgatgggcaggtttccactgtgggccaccagagctcaaagccctggggacttcgggaggtagagtcgggcatgcaccagagtggccccacatgatgcatgaggcggctgaaatatatattcaccatctcccacctgccactggttgattcccagcattgccagcccatgacacataatagccagagaaagccctcaggtagaacttcacaggtgctggcagtagaaagcagttgcggatgggagtagtgacagccacagtgggtagagtatctgctacaccttactgatctctaaagccctgatgcccacccagtkcctggccccgtgcttgctttatgaaatggaatgaacaaatgaatgaatgaggagtagtcatctgggtcagagctcttgcacattggtgaagggcagattctgaaactcctacttcaaaagcttagaagcagcaggctgtcccagcaactcgagagtgtgctttcctctgcctggactggacctcccctggtgta

SEQ ID NO: 710538 - DNA, 625 bp, Homo sapiens
gaaaaccttaagactagaatttcagtgcatgtagttgatgtaggaggcaatcccaggaagtacccatgggaggatggggaaataatacagagacagaaagacaggaagggtgcactgatgggcaggtttccactgtgggccaccagagctcaaagccctggggacttcgggaggtagagtcgggcatgcaccagagtggccccacatgatgcatgaggcggctgaaatatatattcaccatctcccacctgccactggttgattcccagcattgccagcccatgacacataatagccagagaaagccctcaggtagaacttcacaggtgctggcagtagaaagcagttgcggatgggagtagtgacagccacagtgggtagagtatctgctacaccttactgatctctaaagccctgatgcccacccagttcctggccccgtgcttgctttatgaaatggaatgaacraatgaatgaatgaggagtagtcatctgggtcagagctcttgcacattggtgaagggcagattctgaaactcctacttcaaaagcttagaagcagcaggctgtcccagcaactcgagagtgtgctttcctctgcctggactggacctcccctggtgta

SEQ ID NO: 710539 - DNA, 622 bp, Homo sapiens
ataataaattatgaaccccaaaggttgtgcttttacatttaygaggtgatcatttccttttacaataaatacctgcaaaaagcaatattaggttaaaaatagcagctgtggtgcttatgtatggaaactcatgatcccagaaatctcatacctgaagtttgggaaactctgattttgtacaactttgttattttgaggaagagaaacagatgctcagagaggctccatgacttgctcaatgttatagagtcagttagtggctgaattttgtcatataaaaatgtatttcatttcccccaaatcctaagataagaggaaaagtgatacattgagtttcaggaggcgtttgataaatgacttgcagttctgccagcagcctgattctctgattaggatctggctgatgctttcctgttctttcaaattaatttctccttccagtctttatctgtctcccagttcccctgcagtggtgagacactcaactttggagggagagtttgtggctgatgtccttttgctctactggcccctcgatcaagaggttaagttctgaacgtcagtgcccttaccttctgctgaggaggacagatgctgggctttgagtctcatgggctctgct

SEQ ID NO: 710540 - DNA, 1711 bp, Homo sapiens
aagtgctttgtattcataattgattcatcattcaataagtattatggtgtactaatggctggaatccaagctctgacacttayaggctgtgatcttgatcaaatttctatcttattcataagtttctttatctgtaaaataagaataatactaatgccatcttaaaagggttattaggatgttggagtgaattagtttatataaagcacataaaaacatatctgcacacagtaagtgctccataaatagtagcaattcctattctccacagactttattacagattgggacaagtgttctataaaagccaacaggatgctttgacacagacacacatagtgggccagggaaacaacttagaagtgcaggtaagggaaaggctcactgagctggtaatattaatttgaacactgaaggatgagaaagagagggaaaaaagaaataataaggaacagtatgtatgaaaactttgaggcctcaaataacttggcatattcatgagattaaaaaaaggctcatgtggctggagcaaagggaaggaaacaatagcagtagttaacacttacaaagtactcaccatatgtcaaatgctgtctgggtggtttatttatgtttacttacgcgatcctcaatgacaaccataggaggaggcactatcatagcctagactgggtcatgtcatgaccattcacacttcataccttcttgctgcttatagaattaagtgcaaactcttatcttggtacatcagatgcctcgaaatgtagtttcaacataactttcccattctatgtctttttttttgttttgctatctaccttgaaattaatttttacttacataagtaatacataaatatacttttcttgtaaaaactttaaacaatatagtaaagttagggttctcctactccacttctatcttaggtacctgacaaaggaaataatgcaattagtttgccataaatccttccagatatttctgtaaatgtatcaatttatatataaacctaaagattatataaaactatagaatacatatgcaattggtttattatttttaaagaataaacattaatcaaacactacaggacatactggtctgcaactttcttttttccatcagtacatattccatgttgcagatttatgtcaacttaaaaaattgctgcagagtattctgtactatttctcaaatagtgaacatctgagatatttcttttcttttttttttttttacgaaaatagaatctttattaaaatagcaaggcataacaatcactgctactcaggaaacactgtgtttattctttttaatcatcaaaatcaatgactttgggcaagacctctgaactctcagagcctgtttctccatctggagaacaggcaggtagggcattgccagctccctgtgagtgggggccactggtgggaggagatggccctggtcgcccatgggatgagaaacttactcctgcttctgtccctggagaaggtctgggagatgccagtgtggacttaaggcaatgctaacacttgcttatctccttttgtaacagagaagggagagctctcagccttggccacaccagcatggagcccccctccccagcgaatttatttttcatggtcactttctttttttttttccttttttttttattatactttaagttttagggtacatgtgcacattgtgcaggttagttaca

SEQ ID NO: 710541 - DNA, 1711 bp, Homo sapiens
aagtgctttgtattcataattgattcatcattcaataagtattatggtgtactaatggctggaatccaagctctgacacttataggctgtgatcttgatcaaatttctatcttattcataagtttctttatctgtaaaataagaataatactaatgccatcttaaaasggttattaggatgttggagtgaattagtttatataaagcacataaaaacatatctgcacacagtaagtgctccataaatagtagcaattcctattctccacagactttattacagattgggacaagtgttctataaaagccaacaggatgctttgacacagacacacatagtgggccagggaaacaacttagaagtgcaggtaagggaaaggctcactgagctggtaatattaatttgaacactgaaggatgagaaagagagggaaaaaagaaataataaggaacagtatgtatgaaaactttgaggcctcaaataacttggcatattcatgagattaaaaaaaggctcatgtggctggagcaaagggaaggaaacaatagcagtagttaacacttacaaagtactcaccatatgtcaaatgctgtctgggtggtttatttatgtttacttacgcgatcctcaatgacaaccataggaggaggcactatcatagcctagactgggtcatgtcatgaccattcacacttcataccttcttgctgcttatagaattaagtgcaaactcttatcttggtacatcagatgcctcgaaatgtagtttcaacataactttcccattctatgtctttttttttgttttgctatctaccttgaaattaatttttacttacataagtaatacataaatatacttttcttgtaaaaactttaaacaatatagtaaagttagggttctcctactccacttctatcttaggtacctgacaaaggaaataatgcaattagtttgccataaatccttccagatatttctgtaaatgtatcaatttatatataaacctaaagattatataaaactatagaatacatatgcaattggtttattatttttaaagaataaacattaatcaaacactacaggacatactggtctgcaactttcttttttccatcagtacatattccatgttgcagatttatgtcaacttaaaaaattgctgcagagtattctgtactatttctcaaatagtgaacatctgagatatttcttttcttttttttttttttacgaaaatagaatctttattaaaatagcaaggcataacaatcactgctactcaggaaacactgtgtttattctttttaatcatcaaaatcaatgactttgggcaagacctctgaactctcagagcctgtttctccatctggagaacaggcaggtagggcattgccagctccctgtgagtgggggccactggtgggaggagatggccctggtcgcccatgggatgagaaacttactcctgcttctgtccctggagaaggtctgggagatgccagtgtggacttaaggcaatgctaacacttgcttatctccttttgtaacagagaagggagagctctcagccttggccacaccagcatggagcccccctccccagcgaatttatttttcatggtcactttctttttttttttccttttttttttattatactttaagttttagggtacatgtgcacattgtgcaggttagttaca

SEQ ID NO: 710542 - DNA, 946 bp, Homo sapiens
atgttccccaaatttaaattagttgctaatattaaaaaacaaagaggttttactttttaaaaaattcagatacccaagaattggaaaatctgacatcagacaggttgcatccccaaagggtacaatgaaccaaagctaagtactggctagcactgactttagacagggcagaatcttaccagtttaccacagtctccaccactctctrttgtcaaccctattttacattcatcattatctaaatgtaacttaagtattttatttgatttttcatatgtcaaaattataaggtttccttccagatttcctgtttgtaaaatttcacatagttcattaaagctgagcttagaggatgttctcgctttgcagatactttgtgtgtatgttagtttgttgactggataatcctggttcttataaacttttgggtttggagtttttaccataactccagaggtagctggccagcctgagaagtggcagagtactaagagaagagaggatacagagggaatgtatggcccatactccactcagccttaagattaagatctaggctgggtgtggtggctcacacctgtcatcccagcactttgggagggaggccaaggtggttggatcacctgaggtcaggagttcgagaccagcctggccaacatgatgaaaccccatctgtactaaaactacaaaaaatccgccaggtgtggtggtgcacgcctgtaatcccagctacttgggaggctgagactagagaatcacttgaacccgggaggcagaggttgcagtaagccaagatcatgccattgcactccagcctaggcaacaagagtgaaactctgtctaaaaaaaaaaaaaaaaaattccacagtcacatgagacctggactagacttaagtggatggggatggaaaggaggtagtctttgccacacttaaggttttttttg

SEQ ID NO: 710543 - DNA, 630 bp, Homo sapiens
ctgtagtcccagctactctggaggctgaggcaggagaatggcgtgaaccttggaggtggagcttgcagtgagccaagattgcaccactgcactccagcctgggcaacagagccagactctgtctcaaaaaaaaaaaaaaaagaaaagaaaagaaaagaaaaagaaacagcaggaccaacaactgaaacagaagcactctaacttagagtatagaaatgattaccttagaagctcctgtaggggctgaattgtgtgctctcaaaaaattcatgttgaattcttaatccaagtacctcagaatgtctctttatttgagacaggttctttacagagatgattcagttgaaatgagctcattagggtggtccctaatccaatatgactgactggtgtcctaacaagaggaagtttgaacacaggcaagtacaagacaagggtggamatgatgggaaacacagggagaagaggacagccatctataagccaaggagagaggcctggagcagatccttcccttacagcccacagaaggaaccaaacttgctgacaccttcatcttagatttctgtcccctagaactgtgagaccatgagtgtataaatttgtttaagccatccaatcatggcactt

SEQ ID NO: 710544 - DNA, 949 bp, Homo sapiens
tattaagcagtgaggctgaccttccaggcagtggtatatgatagaaatcactcaagtctagaagtcagtagagctggactccagttctgatcttaccacacacaagcttcttaaataaatcagttttgaagttcttgctacacaagattagccctaatcaaaagctgaaaaggtcaagaggctgctgccctygctccccgtgtgctgttttatatcttcagcagggtccgcatgctctcctccatgcccatgccctctcctgcttcactctcccagttgatggtaaggctgcctgagcctctgagatggtgaatttatgtgtcagcctgactgggctaggggctgcccagatgggtggtaaaacattgcttccggatgtgtctgtgagggtgtttctggaagagattggcatttgaattgggagactgagtaaataaaatcacccttaccaatgtggatgaacattatccaattactgagggctcacagaaccaaaaggcagaggaagggcgcattcactctcttcttgagctgagacatccatcctctcctcccttcagacattggaactcctggttcttcggccttcagacacgaactgaattatgcttgcagatggcagacagtgacatttctcagcctccataatcacatgagccggttcccatgtcaatcaatcaatcagtcaatcaatcaatcttctattgattttgctgctctgcagagccctgactaaaacagcctgtatgggttgcactctgcccatctccaggggatacagattcatatccttgcacttacgaccttcctcatttgcatctcatggaaatacactttcaaggtagtatccaaaaaactcacatagattgtcctataccctacctgcttactcgtaagtgcaaaataattttgttatctgcaaaacagaatctctggggcagaatcactg

SEQ ID NO: 710545 - DNA, 624 bp, Homo sapiens
aagtactgctttaggaccagcccctgggataagtcctaatcagaagtgtccagtggaaagaggagaaggtggtacccctggttcagaggagtctttcaaatacaggcaccagccacctggcctgcaatgagggggctctcatgaggctcatggtccacatcatctcatgactttttagaacttcacaaaagagatgtttcctccccagtccctctgggcttcaatactgatttatataacaactgttacactgtgcacagagtgccctgctccacaccaggcactgttctgggggcttaggactcatctaggaggcagtaaactcccgtgctcaggagcttgcrttctagtgtgggggaagaaaggaaaaagaaaaaaatcttaaagcagagcaatgtaagaaggatctggaagctttgttacagctgtttcctctccctggaatattttctccagataccagctgggccagctcccctgcctccttcaagtcctgctgaaatctcaccctcatgatgaggcctgcttagaccacagactattaatcattactactactgcaaataacagtaatgcaaagaaaaataaggggaggagacctaccaaccaccaagtgcttcttcc

SEQ ID NO: 710546 - DNA, 1177 bp, Homo sapiens
gaaattaagtaatgtattctgtagttcctcataaccaagcatgtgacaagcaatatgttataaaattctcaacactaaacactcaaggcaatggtgctaatgygtctctgttgtgatacatgtaccggtcatcacatgccaccatccaccatacagactgagtgagagtgctgtggtcagtccatgtattacatattagcaaagctcaatttttttttgtttttaaagaaaaatgtttaagatagaagttctattttttttcctgcaccacaatagaagaaactctctggagcccaatatgctgaataagacaactcttcacataggcggatgaaccgatagtgaatacgtccctcaaatgttaattattagcatatctctcagtggcttgctaaccccgtgactaaatccacatctaagacgcatctgaggatcacatgtaatccaagctgtgcaggcacgagccatcacctgttttattgcaaggaaggggcctcctggcccttcctgcgtgtctcccaggtgcctttgcatgggttcttaggaacaggtcctacgtgtgtgttctgctccaaccattttgcctggccactgctaccagcaacctcaggagattgctgggcttggcagcctgctgctggtgaaggctcctactaggaacatcctggtcttggggatgggagaagccaacttcattcacagcccagcagaaaccagatttgaacttttaatgaaactttcttgaaaatttgaggacagttaatgtgttagtttcctatagctgccataacaaagtgccgcaaactgggtggcttaaaacaagataaatttgttcacagttctggaagccggaagccggaaatcagtgtcagaagggccgtgttccctctgaagtcactaggaatggacatttccttgcctcttccaggttcaggtagccccaggagttccttagcttaagacgtcactccagtctccaccttggtcttcacgttgaccatctcttgcatgtctgtgtctcttcttatgaagatactagtcatactggattggcctaccctactccaatatgatctcatctcaactaattacatctgcaatggcctatttccaaataaggtcacattctgaaagggtaggacttcaacatatcttttggcgggggacaaattcaacc

SEQ ID NO: 710547 - DNA, 663 bp, Homo sapiens
ggagaacagggaaggcactgttgaggaagaaagaatagtgtgtgcagaggcacagaacagaagcatgaggaacgcattctcaaaactggatttcccaaagttcaaacccttcctttgaaaaggatatgttgaaatgatcctagagatgagattcctaggggatgtgataggagatgaggctggaaaggtaggttagagttcgagttctagaaccttgaatgatacagggtatattgtgtaggtagggaggacacgagcagccaggcacagtgactcatgcttayaaccacagtgctttggaaggctgaggcttgaggccaaaagtgcaagaccagcctggtcaacatagtgagaccccatcactacaaaaaaaaaaatacagaataaaaaagttagccagatgtaatggcaggcatctgtagtctcagctgctaggattgcttgagcctgagagttcaaggctgcagtgagccatgatcgcaccactgcagtccatcctgggtggcagagtgagaccctgtctcaaaaaaacaaacaaaggtaccaaacaagcatattatgtaatcagatttgtttttaataggagaaatacttccaatatttcaatttagtgtttataattgcttgcatttaaacttagatgttgcatttgtaaaagtttgt

SEQ ID NO: 710548 - DNA, 493 bp, Homo sapiens
caaaataaataaataagtaaatatttaacatgttactttgtttggtcgagtgctttatatttttaaaawatgtcgtagatcctcccccaaacctggaacccagttacagaggttctaatcttgagaaaagcatgagacctcttccagccaatgggcatcctccaaagtgcctcatcagaacttcaaagcttccaaggccatcacaacaaggagggtctgagaaactgtcgcagccaggaggagcccgaggagatgctcccgaccatcatgtggaatcctggacgggatcgtgagacagacacagggcattaaggaaaaaataaggaaatctgaataatgtggagacttttgttaatacattgttggggtgtgtgtgtatgtgtgtgtgtatgtgtgtgtgacagagtcttgctctgtcacccaggctggagggcagtagcacaatcacagctcactgcagcctcaacctcctggctcaagagaccctcccacc

SEQ ID NO: 710549 - DNA, 493 bp, Homo sapiens
caaaataaataaataagtaaatatttaacatgttactttgtttggtcgagtgctttatatttttaaaaaatgtcgtagatcctcccccaaacctggaacccagttacagaggttctaatcttgagaaaagcatgagacctcttccagccaatgggcatcctccaaagtgcctcatcagaacttcaaagcttccaaggccatcacaacaaggagggtctgagaaactgtcgcagccaggaggagcccgaggagatgctcccgaccatcatgtggaatcctggacgggatcgtgagacagacacagggcattaaggaaaaaataaggaaatctgaataatgtggagacttttgttaatacattgttggggkgtgtgtgtatgtgtgtgtgtatgtgtgtgtgacagagtcttgctctgtcacccaggctggagggcagtagcacaatcacagctcactgcagcctcaacctcctggctcaagagaccctcccacc

SEQ ID NO: 710550 - DNA, 493 bp, Homo sapiens
caaaataaataaataagtaaatatttaacatgttactttgtttggtcgagtgctttatatttttaaaaaatgtcgtagatcctcccccaaacctggaacccagttacagaggttctaatcttgagaaaagcatgagacctcttccagccaatgggcatcctccaaagtgcctcatcagaacttcaaagcttccaaggccatcacaacaaggagggtctgagaaactgtcgcagccaggaggagcccgaggagatgctcccgaccatcatgtggaatcctggacgggatcgtgagacagacacagggcattaaggaaaaaataaggaaatctgaataatgtggagacttttgttaatacattgttggggtgkgtgtgtatgtgtgtgtgtatgtgtgtgtgacagagtcttgctctgtcacccaggctggagggcagtagcacaatcacagctcactgcagcctcaacctcctggctcaagagaccctcccacc

SEQ ID NO: 710551 - DNA, 493 bp, Homo sapiens
caaaataaataaataagtaaatatttaacatgttactttgtttggtcgagtgctttatatttttaaaaaatgtcgtagatcctcccccaaacctggaacccagttacagaggttctaatcttgagaaaagcatgagacctcttccagccaatgggcatcctccaaagtgcctcatcagaacttcaaagcttccaaggccatcacaacaaggagggtctgagaaactgtcgcagccaggaggagcccgaggagatgctcccgaccatcatgtggaatcctggacgggatcgtgagacagacacagggcattaaggaaaaaataaggaaatctgaataatgtggagacttttgttaatacattgttggggtgtgtgtgtrtgtgtgtgtgtatgtgtgtgtgacagagtcttgctctgtcacccaggctggagggcagtagcacaatcacagctcactgcagcctcaacctcctggctcaagagaccctcccacc

SEQ ID NO: 710552 - DNA, 621 bp, Homo sapiens
tctctcttctggaaactaatcctttctaaaatacttagaggatacacttgctagtctcctcatcacaatgattttttttttaactctggaaatatattagttgtcaaaggcatctttttgttgtgtccaatatagygcttataatattgtgtttgattttatgttaatttatctatctctcctattaaattatgtgcttcttcaaggtggagaggggatcataatatttattttttatttgtttccctgagacctaatataaaccttggaacataaaaaacctttaatattgcatgttaaattagtacactaaaatattaattgaatttaaccctaagcagcatccccaaaattgatacttaattatagaaattcaatttatagagtgaaacaggccacagttcaacttgatcatttctttagtcaaggctatgatgtaataacgggctcttaatttgcagaaaggaggtagacactgtcctccaaagctaatggtagaatctaaaaagacttcacaagagaagtgacaggccattttatctggaattggaagaaaaattatgcttttatgtaaagcaaaagcagtaagagtttaattctacaaaatacattgggactata

SEQ ID NO: 710553 - DNA, 594 bp, Homo sapiens
tggctaatttcttcacaacaaaaatcttttcttttgcaaaatttaaggataatgtcactttcttgaacctatgagtagcttagaaaaatttagggagctcaaaactcatcacagatactattatgtctcattgatctttacaacctcttgttgggcagaaagagggtagacattaggacaggaaagcctgatccctagtatgggtttaggccattcatggagagaatggtttagaatttctctgttgagtaacataacattttcattaacccttaaaggctatggagccagaagcatagcaagtaaacacccatgaccagccacttgaggtgaagagaycagatttatttagattttgtagccatgttgtatagttcattcaggatctcaagcttccgtacatacgatttctcttaaatttaattctgaaaattaaaatagtcaacccagtaaacatctactaagtgtctactataatcagtgttagaaacaataaggtgactgtttcttgtccttaaagaacaatcatagataaaattaattatgggtgctgtggtactgttccatagatctcctacatgaagagtgcagagt

SEQ ID NO: 710554 - DNA, 1323 bp, Homo sapiens
ctgccgaggaaagggaagctcagagagagtaagtaatttgctcgagttaaagagctggccaggacagccaggggcttgcaccccggagccttcatccactacactgtcagctggtatctcaaccagccattacaggctgtaaaaaaattatataagatagtctatggtaatgcagaaaagtgaggttattttgctccctttccctttgaagaaaaaagccctggaaagacatatcacttgagtatgggaaaaaatgaagctgtggcttttctgtgagtcaattctttcctggcagcttcttggaataagaccaagtatagcagcagagttttctgttttaatttgagctgcagggtgactttttttcttctatgctttcatctctctgtggcttcttttgcctcgttaatttcatgccctgcccaggcgggctactgtgctgcccagtcacccgggtctggggcggccaccgctggccagcaggcaggccctccagaggcagaggtggccacgcttaggtcgctcccgctgtggaggcggcacacttgggtggcagcacagctgtgatgtggcggcagctggcagccccatgggaaagatgtgtgaagtgtggggtttgacgacccatgggagaacagactttcttcctcttcttgttttcccttcaaagccgtgagtcaacctcaaattctctgtcttttttctccaccccctcgtgcctctctccctcacgctctgcatctctcattgcaagcttgcatttttttgcacacaacactatcttaatatttctcttttctgcaggcaggaaatgagaagtcatttttcagggtcattcaggaagtcatccagagttataatggcccattatctamtggtcagagtttacttaggctttcactacttccactgcccacttgaaacagggaaaaatattttccccccgcgctgtgagtgtgctatttagagctgaccacaagcggggggaagagaggatggctcggatgctgcatttccactgagaacacaaggctggcaaagcttgtctgctgcccagcaagcacttcaggctcacaccattttaggttcactttaagtagtttctcaattgttaaaaaaaaaacaaaaaaaaaaaaacctgtactctgaggatatgcttataatcccatagctaacccagaatttcttagagaactgatcaacatcagcagtggcacttactgaaaatgcacattctcaggccctgcgtagggcctactgagttagaatattagagagcaggtctcagaaacattctatccggcagtcttattctatgcaccc

SEQ ID NO: 710555 - DNA, 1135 bp, Homo sapiens
tgagcagcacagtcccataggaagaagaatttattgcctccttaggcaaataaattcccaaaccttgaacatcagaaaggaaatagattaatgtgcacagaggattaaattatgtgatctgcaaagtcatttaaaatctatttccacataaaacatattaatgcaacctaaacaaaaggggtctggataccctcatcttcttcccaagcatcaagtctttctatagttaaactgagatgcttttattcttggaaaattttaaggactatctacagcaatggaagaatcgggtgttgggatgtgttcccaggtaataatgactgcaggctgatttggcccttgaggtgtggcctcatggccctctccaaaaaaaatcaaggacctgctacaaagcacaaagccgactgcaatgcttgctgcttactggttagggcagctcctctttgccagcgaccaagcagaaagcaagacaagacaggttctgaagcagtaattcaaagccttcctcgctttcccatgtgagtcattgctagtcagaatattacctttgcagagaggcttaattccaaatttgctcttaaagggatatcctctcctggtttaggtataaacttttgactcacaggacaaattctatcattcctttgggcctaggattgcatttatttccatgacaaaagggcctgtctggtgtttcagcaaatgaaaacaaaaatataaagcccatctccttttgaatgagctctaaaacagttctccactggacttcagaacaagagggagctctgggctgctggctggttgtgcatttgctgtgggttccctccggcaggcgacctctccgcgctgagaaggttatccggataaccaagtaagaaagtacatgaggaggcacagaaagaaaaatgtgagagataacagcataaacacacagtgtatgttgttatgaggcatcacatgatgagatactgctggggagggaagaagtgaggagattcctaggaatcttatgagaatttccagagacaacaagttttgagcttttttttaatttagaaaatttaccttatttttaaaagaatatgtaayatatcccatgctataaaattctagacatagtagatttaaaacagca

SEQ ID NO: 710556 - DNA, 723 bp, Homo sapiens
ctctgccttatttgtcacagctagttaaacatattgcacattaatcctgtgatatgttggggaaatgccaaataaaccacatttgcttaacattccatcaaaaaagtcagagactaatgatagattatgtattcaataactcttttgttctaggtcaaaaagtgcmacattactttagcctgaccctaccataactactaactaccagaaagcagcaatatgtagaaattatgccttctataattttcctctactttcctaccctaatcaaattaaatgtttaattttgtttttaacttgtaaagaatatgttaaacttagatcaaataccccaaaaattaatgtgctttttttcaaaagtggccattttatttaaaaagacattttacctcctgctttccattctaaacattattcatgaaaattaactttgttatataatatccaggcatattatcaaattttacttttaaagttatttactactgtcacataaatacacataatattatttggatattatcagaacttaataaaatatctcacctacctatacatccatataaaacatatgtcctataaaaatgcaaaggatctagtgtaagacctgagctatggaagtcgctgatgggctctgcccaagctcaaaagtgtctttggaccattaaaccaatgatacagggttgcctgtgagaggaaggctaggtgcaattcaggctaatc

SEQ ID NO: 710557 - DNA, 723 bp, Homo sapiens
ctctgccttatttgtcacagctagttaaacatattgcacattaatcctgtgatatgttggggaaatgccaaataaaccacatttgcttaacattccatcaaaaaagtcagagactaatgatagattatgtattcaataactcttttgttctaggtcaaaaagtgccacattactttagcctgaccctaccataactactaactaccaraaagcagcaatatgtagaaattatgccttctataattttcctctactttcctaccctaatcaaattaaatgtttaattttgtttttaacttgtaaagaatatgttaaacttagatcaaataccccaaaaattaatgtgctttttttcaaaagtggccattttatttaaaaagacattttacctcctgctttccattctaaacattattcatgaaaattaactttgttatataatatccaggcatattatcaaattttacttttaaagttatttactactgtcacataaatacacataatattatttggatattatcagaacttaataaaatatctcacctacctatacatccatataaaacatatgtcctataaaaatgcaaaggatctagtgtaagacctgagctatggaagtcgctgatgggctctgcccaagctcaaaagtgtctttggaccattaaaccaatgatacagggttgcctgtgagaggaaggctaggtgcaattcaggctaatc

SEQ ID NO: 710558 - DNA, 644 bp, Homo sapiens
caaaccctaaaaccagggcctatttgatcattctggctatattactatgactcttcattctctaaatctcagttatctttgaatgggataattatttatctccctatcaatatatccaggctttagttctcatcaatttgggtccgtaaatttttttttattttttgtatttatcctgtcctttaaaaatcctcctgcctgctggtttttttgaaaatcttatcaaaataggtaaaccgctaaccagaataataaagagaaaagaatcaaatagacacaaaaaaaaatgataaaggagagatcaccactgatcccacagaaatataaactaccatcagagaatactataaacacatctacacaaataaactagaaaatccagaagaaatggataaattcctggacacatacaccctcccaagactaaaccagggagaagttgaatccctgaacagaccaaaaacaagttctgaaattgaggcagtaatagcctaccrgccaaaaaaagcccaggagcagacggattcacagccgaattctaccagaggtataaagaggagctggtaccattccttctaaaactattccaacaaaagaaaaagagggactcctccctaactcactttatgaggccagcatcatcg

SEQ ID NO: 710559 - DNA, 3784 bp, Homo sapiens
ggtgttagcaaattggtttcagctttccccaccttttttttttccccactgtgaagcagctcattacaaaatagacacatttctaaatcaaatacttgagttattattgatgcgtgaagagaatagagatgatttggttaagaaatgcctaaaagttactttcttgttcccatgattttctagttgattgaatgatttatatcctcaattccaaatttaaatgtatggtttttaatcatcatgatatagttagtggaaggcttttaacctttacatttaagaagcccttagtacaactcaagcttattgacttctaaagcttaacatacaatatttttaaatgattcaagtctatatattttataggtctatagtttgagcaatagtagaagaatgtttaaagagccaattgttttccaattactgtagtcatggctccaagataggcatgaatccccaccctaaaaacaaaacgtgaaaaattggcatactttgagtagactacctctgtaaagtattaaaatctccaaacccaaagcgactctaagactcagtataattcatttattcgatggcactataatgggatttcttgcacaatgagaagcaagcaaatattatcttctttaagttcttaaatgttttatttagtattcctaaattaggaaggcaaactaaacattcacataatcaaatatataggggggatctgtatattctgtattttttgaagttttttctactggcagatagcatctcattttgctgtgacgggcattaagactgtgattttgagatatggtcaaccaaaacttcatgcaactaattccagggtttatagcagaaaagaaattgttgtgtacctctcattacaactcttaattatttttaaggtagcttatatggttggcttagggaaaaggatgaagatccagaagaaaaatagtgagacttcaggtgatagagaaaaagagttacaaaatgttctaaaaggataaagcccaaaggctgtagagcaacatagtaatattaaatcctggattaaagtgaaatgatttaggagactttgtaagacatatctgcaaagcaatgcctttagaaatatttatttagtgagcctaattatgtaaaatagtgagaattggtgagaaagtacaatattgtctcttcagatatatattttaaaaattagggagttttgagtttgagcatttatcatcctactaaagcctttagcacatagttaattccatggcatgtattatcctgtcttccagagacaagtacaatgggattaaggagtatgaatggactgtctcacttagcctgggagattcaggtgaagtttgtgcacagacttgaaagaaatgcagaatttcctagggtaggcaggagatggggcttgcggtgagggaagtaaatttcagaaaaaatatcatgtgcaaaaaaggtacactggtatgagacagcatggtgtctttaaaaactgtagagcagtattccgatagcatttagtttaactccatcattatatttttaagctattttttgtactatacttctaaaacatgtttctatcctaagagaacttacacaaacaccataacaaggcaaaatttggcactaaagtataagccataacattacaaaggcaacgcatacaggagatttgatatgagtgttttgtacatatttcaattattagcacagggttagatataattcatcactcaaaactgattgttttacttgtacagaagccagtatgactgaagctctcttttcagtcaattaatgtccacttgcctgccagtttttaccatacatacctgtgccctccatgaagctaattccccaactgtttaggaaattcaaatggaactcctaaatagttcacacacagcttttgttaataaattacccaacatatttcaaccaggtcaggcttcacagctatacattttttaaaaagtgtaaattaactcttgacaagggaaattcaaaaccattcaaaggcaaagcctgtgaatgagacaaaggatgaaaggaaaatagatgaagtaatgcaatagccagctgaggaggaaaggatgccaagtagctgtgatacaacagcatgaagcaaagtgacttcattaatactctgcaaagtaccagaatgctgcacaagacaacacttcgtttccaaaccaaacataaccagagtttaccactattgatattaagtagcagctgcctaattgctagaaagcagatatttgagcagttgttgagatatgcaaatgcaaataagcattgtcacaaatatatctgtaaacagcgagtatggcttttggtttagttagttacacaatgattgtgatatttagccatcagagtaactgaactttataaagtaatcagcagtagcaaacaggtatataaatagcagttacttagatgatagtcaaattacaattaaaaaatatataaagaactttattactgtgcttttatttcctaattttaaaatcattttaatctattccaacaataatttactttaaaatgataatctttgtcacaagaatatttattctatgaatatttactcagcatcttccatgttaggtgtttatgatgcaaaaaacaaaaattttcctacagttatttctgtgttgctgatgttaaaagaattcatagaataaacagcttagggaaaaatgataaatgtgtaatcacacaactccttagcattgttaaatatgtatctgaagagatcatattatattattcaactccctcaaatttaacaatctaaaatagtgatatattttggctggtgaaaattttagacttgacattctactgtggattatcaatttcaaagaattacattgccaagaatatgctacaaataatgttcatgttatactgaacctaatctagttttgcctccacaagttaagaagatacttccaatcctttgtcagcaaaagcatccattttaattgagcattctgttccatttactgtatatttaagttgttattacatagcaggaactgtactaggagaaggagccagaaaggtggtgacatacttttcctttcgtggggaaacagtctaatggagagaaggacaagtaagaaaccacaaagtgtattttggtaagtgttttgagaggagctctagaggctcaaaggaggagttgctggttgggtcccctgagaaagcaggccttgaaataaggatttgaatagaattagtttatttgggaaatgattacagggaacactagtagggagcgaggaagcaagacaggaaagagacagagtcaattaaaggtgcgttgtccagcaagttcccacctggctggctgaagcctaatccagctggggaagtttgggaaatggtgtaagacacagtctcagatttatcacacctaagggagagggatttggagtatttataactgccagcagtccttggttgcagtctattcagaaaggtattaattctcttacgcttatgatttgcaaaggaaaagaaactcctcagaccaaaacaataacagcaacaacaaaaaactgttttcgtttgggaggaggaccaaaaggaaggaataagggtcaggcactgactctacaggtactcactgatctctttgttatgactatggagttttctttactttattcccacattttttcactgcactgggacctgcattttttttttctgtttttgtcatttgtcacgtttgactttctgcttttcsttagttaggtcatgagaccaatca

SEQ ID NO: 710560 - DNA, 1136 bp, Homo sapiens
aacgtagaaatctcatttaagaacaaggccctagggagtgacaagaaataagtctaccccttaaatcagcacattcaactgggtcggtcattaacaacattggcactaatagcttttagcagcagggcagctgctgattacaattgggtttcctgcaactgtggctgcagaagaactgaagcctccattacaaaggcagaaaactgggggaatgcacatgaattcaaggtagaagggaaaagcaagtggagtgtgtagacttggatgaaaaggattcacaattttccatatagttaaacacaactttgcatatcagtcagtaaagggagtcaaatatatggtttggaaaactctggattattgcgaagcaagctttattatccagaatcagctcaagaaggtagtacctactgtagaagacaaggtttccttctgataaaatgatattttctgtaccaacccttgtctcttgcagagttgacaaatagcaaataagagtagagtaatacaaattataataagaaatttacatatcattgtttttctaggtaaaaaggcaaaaagctcacaccttaaacggcagccatatttttgactgaaaatgctgtcttagcgatgtcatatacatcgcaatgataatcatcagcatccaactttgaaacatccacttggcatcctattagtggcagtatgaatgatcagggcacggttccctatkgcagtattaatgatgcagtggaatcagtcaaggacagttaacacagctgaggtgggtaaatagggtggataaaggaacacgagataaactgttattacatatcaacattttgacataatctggcaggctgacaaaatagacaacactccaaaaatatatctagaagtcagattaaaaatttcagtggaaacttgcaatacttccaacagggtgggattttatataaaatagactctttttggatttattcatgggattttgtcactaaaaaagtgagaacatcttgttataaaggagcttttcatgtaagaatttttgatatgtatttgctaaaccaacacacagatatgccagcctggatatacacaacatctccatgtatctacggttacatagagcacttgaaagagtcatctaa

SEQ ID NO: 710561 - DNA, 1136 bp, Homo sapiens
aacgtagaaatctcatttaagaacaaggccctagggagtgacaagaaataagtctaccccttaaatcagcacattcaactgggtcggtcattaacaacattggcactaatagcttttagcagcagggcagctgctgattacaattgggtttcctgcaactgtggctgcagaagaactgaagcctccattacaaaggcagaaaactgggggaatgcacatgaattcaaggtagaagggaaaagcaagtggagtgtgtagacttggatgaaaaggattcacaattttccatatagttaaacacaactttgcatatcagtcagtaaagggagtcaaatatatggtttggaaaactctggattattgcgaagcaagctttattatccagaatcagctcaagaaggtagtacctactgtagaagacaaggtttccttctgataaaatgatattttctgtaccaacccttgtctcttgcagagttgacaaatagcaaataagagtagagtaatacaaattataataagaaatttacatatcattgtttttctaggtaaaaaggcaaaaagctcacaccttaaacggcagccatatttttgactgaaaatgctgtcttagcgatgtcatatacatcgcaatgataatcatcagcatccaactttgaaacatccacttggcatcctattagtggcagtatgaatgatcagggcacggttccctatggcagtattaatgatgcagtggaatcagtcaaggacagttaacacagctgaggtgggtaaatagggtggataaaggaacacgagataaactgttattacatatcaacattttgacataatctggcaggctgacaaaatagacaacactccaaaaatatatctagaagtcagattaaaaatttcagtggaaacttgcaatacttccaacagggtgggattttatataaaatagactctttttggatttattcatgggattttgtcactwaaaaagtgagaacatcttgttataaaggagcttttcatgtaagaatttttgatatgtatttgctaaaccaacacacagatatgccagcctggatatacacaacatctccatgtatctacggttacatagagcacttgaaagagtcatctaa

SEQ ID NO: 710562 - DNA, 2027 bp, Homo sapiens
ttagctgagtcctaggggtttcaaggcagtaaggtatgatggcttccagcttcaatgaaagcagttctcactcagcagcgtttcacagagatgttctgcataagcttttgtttgaagaaagagttccattgcttaaaaacggggttggagtacagtggtaaaaaccactgttctagggaatttggagcaaatggtagccgaaatgagtttacatgctaagttatatttacttttccctttaaaagtcaatgtgctatcttattaatgtttttatactatagcgacataaaattatttctgccttggtttgaagatttgaatgatttatgctttttagaattttagagataaatgaaacacctaggcaagattcagaaaaccgtttacctttggctacataaaaaactgtaagttaaaccttatattggaaaactagaattttggcttcaaagatttgtccttccactgtgttaatcttatatttatattttatttccttctctatagagagagcaggtaaaaacatgtttagtgtttcctcgctttccaagttacattttatcttgagcagatttaaaacgagattagctgtaataggactccaggatgtgggcagatgtctacttgtcaaagacaatctctcttgcaatcagctccttcattatttcatttgtaccaccatagattggctgaactctggcatccacataagctctggataaatcagatgattgaatgaataaataaaatatattagaaactgtaaattttgtcttaccaggtaactcataaactattcaattagtgaagtacaaacaataaaagtccttcataaattacttattttttcaatatggcattcatcctaaattggaataatagtaaaaaaaactattaagatgttaataatctgtatagctttgtattaatttgattaaagagattacaaattcaaaataaaaataatgagtatgtttcatctgatttaattttgtaaaattcagcacatatgataacactcttaaaaagtctgttttagattaggaaatgcacaggatgtcttagtttctttttatctttaatgtttcctaaaaagttgaaatccactggttttatagaaaacaaaagaaaaaagatacatattttctagcattcccacaaccactatcactatcaggaatataaactaatgctttagcaaatattatttcccagaaagttaacaagtaacttgttttttggaaatggttaatagtcacttcagcaatgtgtggagttaaaatactaagtggctgagtccattgctatacccacaccaaagaaaaaaaaaacccaaatatcataagttcacttttgatagtcatgataacaaccgtaccactgtacagttgtttttatcttttctcatctcattttatcctctcagctctgggattggggagggataaatgttaatactgtttccctggtaaaggaactaaagtagagagaagttaatatatttcctaattaatggttgctatttaatggtcacyaacaacacatcattggcagactggaatgaggatgtaggtattctgcctctttttcaaatatcttttttgtatattgcaacactttcattggccaaagcacttagagctagttattgaactttggactttcctggtagacacactcaaaggcttttcttttttttttctcaagtataatcttggtgttttgttttgtttaaatttgatttttaagacaaattaaatgtgccagctctctaggaacataccacttttggacttattcttctccatattcatcagggttccttacaaagaaatggacactcagtaaatatttactgatatgatttacggtgttacaaaggaaatttacaatctcagaactttctgctgaaagctttaaaagcttgagatatttatgttttcaaacatttttttctgaacggattttgctattctctacaaaatctagcacctgcattttgagcacttacctactgtaagcctact

SEQ ID NO: 710563 - DNA, 764 bp, Homo sapiens
aattaggtcaaatatctaccctttaatcagcacaaagtttcccactcccaacccacacattgaagtttactcttagacaatataaagatggaacaaaaaaagaaaaaaataggcaaataatctatatatcgaaaacagatgagtattccatgaaaatccctgaagatggtttctaagcctactcctagtttagttcaatgacactatgtatgacacttyatttggaaaataagggtggatccaacaagtctcaagatatttttttgcctacatgatgccacatttgggaatttatgcactgtctttacaatatgaaagagtaaagatatctaagcctgattctctcatacaagagtcattcctttgtaaatgctggaaacttctagaagctgaagtaaaacttcaaaccagaatggaatgatttagaattcttgcatcagtgcattcagtgaagtccagaggtctgagagaataatgtctccaagagtacataatttactctctgaggataaaaagattaaatatttacatattcttgccattgggttgagcgttactaaacagatttggtctttgcttttcactgcagacactgcattatgctttctgaaatcatcctctaatcaaaggcaactaaaaattagaccacacattactagtcaagtgctcttagtgaatgatcgacaaggtcatagcagtatttttaagtcatttatatttgttaataaataatactgcagctagcattaaaaattattctgaag

SEQ ID NO: 710564 - DNA, 787 bp, Homo sapiens
tccttcttatattttaggtggataaaaccttgtatgcatcaactacctctctttcaagatggaattttcagaacacatggtctgggattggagctggagcttggaaatattgagtgggtgagaaagacttcattgttttgtgacaggttattgtgaaaacagcccacttctgcctgaagatccaagcccaaggccttcctggccccagggattttgggattcttaagagcaaaagaaggaaagaaaacatgagagactttggtactgggtacgagcatgaaaagagaaggattggtaaaaaatatctcttgggagctcctgctgtgatgcgagggttagtcctgccatcccagggcaaacttcataaaagaggtcagatccaaagattgcagaagccagaagagacactgcatccttcctggttaggcctggttatgccagcttcctggactctgctggctggttgcctcaatccatgcctcagattgggtggagtctacagattgagggcaaatcccacctcctcccaacccccaccactaggcctatctggaagacagaaaagagcagcaagaaatctcagggattttctttgattactcagagggaaatagttttcatactcagagactgataggcagtcaataacatttgctttgtgaattttcacccagctacttctggatgagataatcacctttgctgctaaagaaaatcttagctcattttcttcttggggtgatggtataagagttgataaacratttgtaagtatttatcatctggc

SEQ ID NO: 710565 - DNA, 609 bp, Homo sapiens
cttttagatgccagaccttagattttgtgatgactcctcaaccgtttagatctcggttatctcagagggatcatcagctttttaagaaaattttgagagaaaagcaagtgaagaaaagagtagtcagtgcccaacatcatggatctctcactgaacacaccatgcctggtattctctcacagtgatgtcaccatttctacctgccacgtatcggcgaaggttgggactcractggtgtttttgatcacgatgggaaaatcatccagaaaaccccctacccccaccccagagggaccacagtcagcgtgaagcagttattttctacgctacctgtgcgccataaggaatttcaaaggaatattaagaaggtacagtaaattaatcctggttttcaagagtattggttaatgcacatgagcaaaagatttactaaagatgtttattcttcagttgattctcttcccataatttattgagaaatgctttatttgcatttctcattaaagacttaacttcaggatgatttacttttttctttttatcacataatgtttattaggactgggaaacatagtgagactctgtctctatgaaaaattaaaaaaaaaa

SEQ ID NO: 710566 - DNA, 653 bp, Homo sapiens
aattagccaggtgtcgtggctggcacctgtgttccaacaacttgagagactgaggtggcaggaggattgcttgagcctaggagttaggggctgcagtgagctgtgatcgtgacaccgcactccagtctgggcaacacagcaagaccttgtgtcaaaaaaatttttttaattaaatataaaagagtttcatgacattcagagaccatccaaagaacctgtgggttccggccaggcacagtggctcacgcctgtaatcccagmgctttgggaggccatagcaggtggatcgcttgaggtcaggagtttaagagcagcctggccaacatggtgaaaccgcatctctactaaaaatacaaaaaattagacggggccaggtgccatggctcatgcctgtaatcccagcactttgggaggccaaggagggtggatcacgagatcaggagatcgagaccatcctggctaacaccccatctctgctaaaaatacaaaaagtagccaggcatggttgcgggcacctgtattcccagctactcaggaggctgaggcaggagaatggcgtgaacccaggaggcggcacttgcagtgagccaagatcataccatttgcactgtagcctgggctacaagagtgagactccgtctcaaaaaaaaaaa

SEQ ID NO: 710567 - DNA, 954 bp, Homo sapiens
ggcatgaggatgtcaggaattagctgtaactttttttgaataaagtctgtgggcttccaaaatgtataagaagcagaactgcacacaagatagcttctgcaaaacaaaagcttctgcctcaaatcaaacagcaagtctcttctgtatagtgtttttaagaatattggacattaattggttttttgagcaccacttcatgcacacagatagtaatcaccatgagtaaaacaagaaataaaatattttttgattattgtttatcacatttcaaaactcatttcacatttctctctctctctgtgtgtgtgtgtgtgtgtgtgtgtgtgtgtgtgtgtaggtggggcaagggggcagtgaatgatgaattagtatgagaaaacttttcccttttatctcattatctagttttgtctctttctgatgggagggtaagggaaggagagacaaagasagaaccttcacaagatggataaaatattcacagaattagaggccgtgtgtattttctaaggaacaagaaaagccttggcagtctctgtgttagaggactgtcatatttttgctcacagtttcaggactggttgtaggaaatgctgctttcacatttgatttggaaaagaatattggactgtgtgtaaatatgaaacctttgagactgcaccatctggatccaatatttgaagtgatttacacatgaaataaaaaaaccagaatcttcatgaaaagtgtgcttaaaaatttttaaatacattaactggatttatttactacctccaaattgtacctaattatgaattaaaatgtattcccttacaatgttggcttttgtaataatcactaaacaaaaatcactcaggttttaagatatgtggctatcacttgagtcttgctttttggcattttttttttttttatcatttgactgtctcctacttcaatatatgcctttccaat

SEQ ID NO: 710568 - DNA, 1241 bp, Homo sapiens
ctaagaacagattgtcactcctttgattttgttgttgttgctgttgttgttgttgttcttgttgatgaacactgggatggctgggaagcaaatgtctcttatagaacaaacaaaaacaaggggaggcttggatcacccagagagcacactgagccaagcatctgggaaatttgtcttgaagggtgtggtgggtaagaaaaaagacagaatgtgctgaactcctgaggagacctggtagattgtcctaagcagggatttgagagaacaggctaagaaaatctctaactgagaactgcaatttgagagagaaggctaaaaagtttttctcaattgccattttttacagaattctttgagtgcacttatggtaaacagcctttcctggtttgtccaagactgagggctttcctgagacgtgggattttcagtgctaaaaccagggaagtttcaggcaaaccaagacaattggccaccataagtacaaaacactgaagtccctgttaaaagtaaaagtggcaaccgggaaagataacaccctgtcattatcaggctctttgtgccgcagcttaaataatcaccatattaaacctacggtaaggaagggacataagatatttttatagatgaagggaatcgtggaaagttcccagaatgggcaagacttaaagaaagtactagatgccaaaattgacagggagagatactgaggacaaacaggctgaggaccagacctaatgcagctcacgccactctgatgtggataattcttgcaagggtatctgtaagttccttactcaattaccagtttctctgactacaaaacattgtacttcattccatcaaaaaataaatacagcagtgaaaacaatttgtaactttacataaacctaacagctagtttatgggaaggacaaagtgtttcttttaatttatggaaactagtattargcttgtttatctgcacaataaatttaaaacatagagatagctttaacttgcaagagggagaggaagagagaaagctaaatgtttaacttttccatctttgcaaagggtctttggaaatcctcctccagattccccagagcatgacagtgacttcacgtggatacagattttgcagttatcaactaacccatcaattagcatttatggagcactaattggtgtcaacccaggtaccataagtgtaagcatgatccaaataaattaaatgagaattgattgttttaattacggca

SEQ ID NO: 710569 - DNA, 747 bp, Homo sapiens
ctcctttctagtttactctgacaaaaatgtactaaaatgaagactaatataattatagatgatgcattttcaattagcctttgttaatactattaataagattaataatatatactaaaatgtcaatatgcttatctaaataattttttaaatcaccctttcaagtcccaccatcaaacattaaagcacagcgtcttaattacatgtgctcatcaacaaagttaaacggataacattcctcaagtgtagtggagacagacataggcaggctccaagactgcctatgtattcacctttctcagcttcatttttcttttctgtaaaccagtagtgtttctggagagagcataaccagcacagggcattgcagacttcttacgttgtgagggctactcatggagtggcttattctctatacacatgcacgtataaatgacccctttctgaaccgaatgattaaatgtggcccttttccctttatarttttaataatatacagcacaactgtgactggtgttaatgtataaattaattgtcccagtgagacatttcttccaaaaaagcaataatagctggattctcttgagaatgtgaaaaccctctggtatactaataaaatgaaaaaggttcacaaaataatatcggaaataattgggttccctgtaccaaaggaccccatgttgtttctcttaagtgatctaaaaaattgtgattattcctttggacttaataaaacatgataaaaaa

SEQ ID NO: 710570 - DNA, 1451 bp, Homo sapiens
atcgggtgtagactgctttgctccttggtgaacagccccagagctatagatttcatttgatctttgcaaaggctaacatctgtctgctgtcattttagtaagattgatgacaggcaagaaagaggaaaggggagggagtggagggaagagagacgaggagaaggagctctgggcggccccagtggcagtggccaaggctgccaggggtcaccgctgcaaaccctttggccaatgaggtctgtggtggaaagcagccaggccccacactggcagtaattgcacttggtttttacagctgatagctagaactccaagacacaaaggcagcattttgcaccttatatatcttaatagattactcacattgcaagcagcaccaagctaaatgttatgacagccataagaatgtagtttactgttatcttaatgtagctggccagtgcagggtaaagccatcaaaaaatattatatttttttaaagtttccaagagaaactaactgatgcagacatagagctatttttacacaaagccctgaattttggcaaacgcccttcaaaccataattttaaatatatacacacatatttcacatatgcatatgtatatgcatggatatgcacatttgtgtatgcgttttctccatttgctaaatatcatttttctttcactactccctttaagttgttatgtgaaaaccatatagggaagattcaatttagatatttttaagagatgataccatattggaagtttgtctaggaaatagtaagcattatttctgaagatacaaatgacatgcttgggagatttggcatgaatgaatgaatgaatgatgacatagaccttctgctracagcatagtttcaatagactatttgcatccagtttcttcaggtacacacacctggcaggaagaagcatggcctggaatgtgaagcaaatggaatttgatagggttaagtaccacagaacaggggaaatccaggggtagtcataaggcctatctctgtgcatttgcttgtttttgtactggtgtggtgggatgtttgattggaacttgctaaagcagtggccacagggagttttagaccagttttggcctttatcagcaggaggcagattccatgaatagaatttaatccagacacatacaacactttttaagtttagttggaaagttaaacaactttgccttattcaatgggagccctcagggccttaggattccttgtgacatcatggtaatgacatgatagaggagctcagttccatgggccaatttatgtaaatcccaagatactccagaaagcagccttatagatcaaatcatctagtccaactcatcaactcatttattctaaaagtgagaaaattagtatttttttctaaaaagataatttctaaaggaagtgttatgccagaattttttttaatttggcaaataaaatg

SEQ ID NO: 710571 - DNA, 653 bp, Homo sapiens
ggctatatattaatctatccttttgttttgaataaatctgtttctttacatttaaggtgtgtgctatggacagcatagagctagatcttgcttttgaaaaaatccaatctataactcactttactccatttatatctatagagatgactatgagacttacaaaatataacaagaataaatagggttrgtctggtgttagatttaaaataaactcattctgctttgaaataatcacatgttttttctaagttgcttataaaccatctagaagtgatcagttctagatttggttaagaacacagtttaatttagtacattcaattttcaagttttaaaattctcttttaaaaataggacaatattttcttgttacgcaatttctggcacctctgatttctcaaatgtcactggcagtattactgtgcttgcatacatgagttctttctgagacataattcatcttagtctggtgactaaatgtatttaaatataactagcacacatttgctcctttcatagattgagcttcaatttttccctaaaatctttctatcatttccagtttaaatatcactgacaacggaggtgaaagtaaaataggggcttagttgctttgctttctttgctttccctattaagatttaatcatttaa

SEQ ID NO: 710572 - DNA, 598 bp, Homo sapiens
aatgtgcatataaagttgccccccacattatagtgtgagaatttcccccaagatggcaagaaaaaaaatgaaagctgggcgtggtggttcacgcctgtaatcccagcactttgggagtctgaggcaggtgggtcgcttgagctcaggagtttcagaccagcttgggcaacgtggcaaaaccgggtttctacaaaaaaataaaaaaatcagctgggtgtggtggtgagcacttatagtcccagctactcaggaggctgaggcgggaggatcacttgcactgtgctccagcctgggtgacacagccagactstatctcaaaaaaaaaaaaaaaaaaaaaaaacagagagagagacaaatgagacaattcatactctttaatgcgggaaacacaaacacgtccactcttggcagcatcattctaccattgcgctgaagagaattacacctgaatagtaggggaaagaaaccgaagaatgagtgagaaagactttaaaccaaggccagggagaaatacacgttccactgctaagagaaagagaggaatgggtggttaaacagggccttggagacaaaaattccaccatctggagggcaaaag

SEQ ID NO: 710573 - DNA, 598 bp, Homo sapiens
aatgtgcatataaagttgccccccacattatagtgtgagaatttcccccaagatggcaagaaaaaaaatgaaagctgggcgtggtggttcacgcctgtaatcccagcactttgggagtctgaggcaggtgggtcgcttgagctcaggagtttcagaccagcttgggcaacgtggcaaaaccgggtttctacaaaaaaataaaaaaatcagctgggtgtggtggtgagcacttatagtcccagctactcaggaggctgaggcgggaggatcacttgcactgtgctccagcctgggtgacacagccagactgtatctcaaaaaaaaaaaaaaaaaaaaaaaacagagagagagacaaatgagacaattcrtactctttaatgcgggaaacacaaacacgtccactcttggcagcatcattctaccattgcgctgaagagaattacacctgaatagtaggggaaagaaaccgaagaatgagtgagaaagactttaaaccaaggccagggagaaatacacgttccactgctaagagaaagagaggaatgggtggttaaacagggccttggagacaaaaattccaccatctggagggcaaaag

SEQ ID NO: 710574 - DNA, 598 bp, Homo sapiens
aatgtgcatataaagttgccccccacattatagtgtgagaatttcccccaagatggcaagaaaaaaaatgaaagctgggcgtggtggttcacgcctgtaatcccagcactttgggagtctgaggcaggtgggtcgcttgagctcaggagtttcagaccagcttgggcaacgtggcaaaaccgggtttctacaaaaaaataaaaaaatcagctgggtgtggtggtgagcacttatagtcccagctactcaggaggctgaggcgggaggatcacttgcactgtgctccagcctgggtgacacagccagactgtatctcaaaaaaaaaaaaaaaaaaaaaaaacagagagagagacaaatgagacaattcatactctttaatgcrggaaacacaaacacgtccactcttggcagcatcattctaccattgcgctgaagagaattacacctgaatagtaggggaaagaaaccgaagaatgagtgagaaagactttaaaccaaggccagggagaaatacacgttccactgctaagagaaagagaggaatgggtggttaaacagggccttggagacaaaaattccaccatctggagggcaaaag

SEQ ID NO: 710575 - DNA, 598 bp, Homo sapiens
aatgtgcatataaagttgccccccacattatagtgtgagaatttcccccaagatggcaagaaaaaaaatgaaagctgggcgtggtggttcacgcctgtaatcccagcactttgggagtctgaggcaggtgggtcgcttgagctcaggagtttcagaccagcttgggcaacgtggcaaaaccgggtttctacaaaaaaataaaaaaatcagctgggtgtggtggtgagcacttatagtcccagctactcaggaggctgaggcgggaggatcacttgcactgtgctccagcctgggtgacacagccagactgtatctcaaaaaaaaaaaaaaaaaaaaaaaacagagagagagacaaatgagacaattcatactctttaatgcgggaaacacaaacacgtccactcttggcagcatcattctaccattgcgctgaagagaattacacctgaatagtaggggaaagaaaccgaagaatgagtgagaaagactttaaaccaaggccagrgagaaatacacgttccactgctaagagaaagagaggaatgggtggttaaacagggccttggagacaaaaattccaccatctggagggcaaaag

SEQ ID NO: 710576 - DNA, 2530 bp, Homo sapiens
ttttaacgcttaaatgatcccatatttggcgaatgggagcctctttgggctggctccagcgtcattttgacaagtcccccttattctgyaggtactttcttcatttttggcatgacatgatgttccaggctctattctactttacctgcctcaaatttgaatttaaccatttctccaaaaagccctagttccttttagtggagggtatgtagaaacaaagatctggtttctagatatgctcactgctactagagtgaaactgcttcaaggtcatctcagaggactgagctgggaaatgtttatatgtatatgtaaacaaatgtgtgcatatccacaagtactctcagacacaacacacatacacatatatgtattataatccatgcacagctacattagtttacatatatctaaacacatacacacatgtatgtatgcatgcatgtatgtgtgtatgtatcagaaatcaggagtttacatccatatctccaatttgaatccaataccgcagagttctatctcatccttttaccacaactgtagctccgttctcctaaagtgcaaaacctggctcccactgtccacaacttatctgctcaatcctggaatgcacgaagaatagtttcagaactgctaacctatgcttctgcaaaaagagacgacgtctgctaactagagttgaaaattccaagggaccaggaatgacattaaatcaaagaggtcaatatattcattttcaaagtcagtcctgttgtcaaaatcagtaagaaaatggtggtggcaaaagcattctatccttcaaatccttccctctgtagattctgccattgcgtgatatcataccgaagttagagtttggccagatatgacatgaaaaaaactgtcttttgttccatttgcttatttattcatttattacattatactttgcctgctcccataacaaacctttgagtaataacatatctaagcagaagagctaacacagagagaccaaaaccaatataaagaaaagaggagatgattttatgtggaacagagatattctaagaaggtcacaggaaaggagcctgtgatagatggagtttctgtgtttgcctgtggtggctgcaaacaaattacctcaactgcctctgtcctaacagcattcttttcattttccaagttcactttcagtctctgtccatatgtggccaattaaaattatatggttatcttcatagataaaatgattttttaaaatctctgccccttaaactggtaacaggtttgatgatatttcatgcctggaacagaactattccagaactgttcctccaaagctggcttgctctggaatcctgtctgttatacacaaacacacatatacacatgtgtgtgaactctcctccccactatattataccctagatccctgaatcagaatctttggggcggtggggttggagagaccaaatgtaataaatgttaatatcagtgaaaatgacttacagaagcagccaaaaataaattactttttacaaaagttcatgtttatttataaaataaaagacgttaacatcttgttttcaattttctttttatgaagccaacagtttattaaatacaacttacttatttgtgagaaaaggctatctctccttttaaaattcttaccattttagcttaattaattttaccaaactggcaagagtctgacttaaaagtcccttgagccatcaaaagctataaaaatgttacttcttcttgaccaaattattttcttgaagcagattcctacaaattcaggggaattttctaaaatacgggcaaaggtttatgtacaaaaagtttcagacagcatttatttgctcacaaatgtaagcaacctaaaagtctaatgttagggcgttttatataataaaatattgggctattgtcgtcactttttttttataaagaattttttgacacacagggaaatgcttatgataaatggaagccctttaaatgtaggtattgggtctttttctgtattaaatctccaatctccatgcaatgctaagcacttaataggtgcttcaaaaaatttttttatgttgagttgaaataataaagcattaaaaattatatgtgtggaagaaaatatttacaaaagacatgtatgataaaggacatgctattcaaaatatacaaagaaactttaaaattcaacaataagaaaataacctggtttaaaaagtggcaaaatatatgaatagatacttcaccaaagatgacatacagatggctaataagcatatgaaaaaatgcccaatattgtatgtcattagggaactgcaaattaaaacaacaatgagataatacatagatactagaatggcaaaaatccaaaatactgacatcaaatgctggtgaggatgtgagaatacaaaatggggctgggtgcggtggcccacgcctgcaatcccagcactttgagaggatgaggtgggcagatccctggatctcttgaggtcaggagttcgagaccggcctggccatcatggtg

SEQ ID NO: 710577 - DNA, 2530 bp, Homo sapiens
ttttaacgcttaaatgatcccatatttggcgaatgggagcctctttgggctggctccagcgtcattttgacaagtcccccttattctgcaggtactttcttcatttttggcatgacatgatgttccaggctctattctactttacctgcctcaaatttgaatttaaccatttctccaaaaagccctagttccttttagtggagggtatgtagaaacaaagatctggtttctagatatgctcactgctactagagtgaaactgcttcaaggtcatctcagaggactgagctgggaaatgtttatatgtatatgtaaacaaatgtgtgcatatccacaagtactctcagacacaacacacatacacatatatgtattataatccatgcacagctacattagtttacatatatctaaacacatacacacatgtatgtatgcatgcatgtatgtgtgtatgtatcagaaatcaggagtttacatccatatctccaatttgaatccaataccgcagagttctatctcatccttttaccacaactgtagctccgttctcctaaagtgcaaaacctggctcccactgtccacaacttatctgctcaatcctggaatgcacgaagaatagtttcagaactgctaacctatgcttctgcaaaaagagacgacgtctgctaactagagttgaaaattccaagggaccaggaatgacattaaatcaaagaggtcaatatattcattttcaaagtcagtcctgttgtcaaaatcagtaagaaaatggtggtggcaaaagcattctatccttcaaatccttccctctgtagattctgccattgcgtgatatcataccgaagttagagtttggccagatatgacatgaaaaaaactgtcttttgttccatttgcttatttattcatttattacattatactttgcctgctcccataacaaacctttgagtaataacatatctaagcagaagagctaacacagagagaccaaaaccaatataaagaaaagaggagatgattttatgtggaacagagatattctaagaaggtcacaggaaaggagcctgtgatagatggagtttctgtgtttgcctgtggtggctgcaaacaaattacctcaactgcctctgtcctaacagcattcttttcattttccaagttcactttcagtctctgtccatatgtggccaattaaaattatatggttatcttcatagataaaatgattttttaaaatctctgccccttaaactggtaacaggtttgatgatatttcatgcctggaacagaactattccagaactgttcctccaaagctggcttgctctggaatcctgtctgttatacacaaacacacatatacacatgtgtgtgaactctcctccccactatattataccctagatccctgaatcagaatctttggggcggtggggttggagagaccaaatgtaataaatgttaatatcagtgaaaatgacttacagaagcagccaaaaataaattactttttacaaaagttcatgtttatttataaaataaaagacgttaacatcttgttttcaattttctttttatgaagccaacagtttattaaatacaacttacttatttgtgagaaaaggctatctctccttttaaaattcttaccattttagcttaattaattttaccaaactggcaagagtctgacttaaaagtcccttgagccatcaaaagctataaaaatgttacttcttcttgaccaarttattttcttgaagcagattcctacaaattcaggggaattttctaaaatacgggcaaaggtttatgtacaaaaagtttcagacagcatttatttgctcacaaatgtaagcaacctaaaagtctaatgttagggcgttttatataataaaatattgggctattgtcgtcactttttttttataaagaattttttgacacacagggaaatgcttatgataaatggaagccctttaaatgtaggtattgggtctttttctgtattaaatctccaatctccatgcaatgctaagcacttaataggtgcttcaaaaaatttttttatgttgagttgaaataataaagcattaaaaattatatgtgtggaagaaaatatttacaaaagacatgtatgataaaggacatgctattcaaaatatacaaagaaactttaaaattcaacaataagaaaataacctggtttaaaaagtggcaaaatatatgaatagatacttcaccaaagatgacatacagatggctaataagcatatgaaaaaatgcccaatattgtatgtcattagggaactgcaaattaaaacaacaatgagataatacatagatactagaatggcaaaaatccaaaatactgacatcaaatgctggtgaggatgtgagaatacaaaatggggctgggtgcggtggcccacgcctgcaatcccagcactttgagaggatgaggtgggcagatccctggatctcttgaggtcaggagttcgagaccggcctggccatcatggtg

SEQ ID NO: 710578 - DNA, 660 bp, Homo sapiens
ggaccccaactcacagtcaaggtgttttctcactgtagcactctgcttttacttcagaacctattaaggatctcatgtataaattaatatttaagcttttgtaaagtgttgagggtttctaaggtcagatggctccactggcagccaggcaccatgcaggcaccgtggcagaaaggctgagatgacagatccattcagcatgtttgccctgtactgcccaagttttcaaaaataaaaaccctatgcccctgggagaacattccctaggagaactgatcctgaaccaatgagcaatatctgtgtgaaaactcacatagagaggaagctcttttaagtttagacacggtgtgggaaattggtgacagctcactcaggtggtatttttgaactcatactgagtttcatgacctcagcataaattagaacacagaagatggaaggaaacataactacatagaccraaaacgagagcacagaaaagctggcagataaatgtcacttaatttaccttcatctgcgtgtgaaacaggaagactccatctctctggttttctccctcgtccccactctggacattatgactaatcgtaaaggccacacgcttgcagtacagatgaaaaaccccaaacaccaacactatcctcacatcgcccaaagaga

SEQ ID NO: 710579 - DNA, 1477 bp, Homo sapiens
ttttttttgagacagagtgttactctgttgcctagactggagtgcagtggtgcaatctcggttcactgcaacctccgcctcccgggttcaagcgattcttctgcctcagcctccagagtagctgggattacagatgcccatcaccaggcctggctaatttttggatttttagtagagacagggtttcattatgttggcaaggctggtctcgaactcttgacctcaagtgatccgcccatcttgtcctcccaaagtgctgggattacaagtgtgagccaccgcgcccggccagaatctttatagaaatctttataagggtaaatctatagagagcactacaggctacaggatgatcagctaagaacagtatttggttaaaaaaaaaaatgtaccaaagccagcagtacatcccaggatgctgaggaagacagagaggagggaaagttcatgagaaaagagaaggcgctttttagaacttgccacttcgtatgcgaggaagcagtcagatccctagtcagtaatatatggacaactgcaggagacaattctgagtgactcaggaggaactcagaggtaaacatgtatgactgctgtgggctaaaagttttcacccacacctatggtacctactgaatgagctattattctgacatgtgaccacaatttagaatcacaagtctagaagtagtaaccaaggaggtagcaggagataaacattttatttagaatatagacaattaaaattgttttaattggcttagtcttgtcctggagagggatcttttgggtaaggccaacttatgagacttaggtgagttgaattcattgaactgtcttctgctttgtaacaccacttttttgttcaggtatctgctattcatttttcttggcccaattttgggaaacacaaagatttctccatgttataattaacgaattgaggtcagattgccacatgtggtcataaggcagtttgagagccactttcacgtgtctcaaaatgtcactaacttttttacttaaaayagttttataaactgtggtcaaatattggttttccattatattagctatttagtaggagaaagccaatgtcattacgacactgaatgggggtgattttctgggcaatggctctttgagaatcgttgctgttgtcacgagcggtctgctttttgataacattgtaccacggcttagccattacttgtctaacagaattaccacagggagtgaaccggcccccaagcagcagggtgctagagcttatcgtccccaagtcctataaagtcagccatccctggattaagctctttttatttcttgactgtttaatgtcgtgcatattgtaatcagcattttaattcaggatttgggccttccagcagttttccaaagggcacacattttgaagtcaacaaattaatgagtgttcttttcttcagtcaccacaagttctctgtgcactgagagaata

SEQ ID NO: 710580 - DNA, 3279 bp, Homo sapiens
aaatttgaagagacaaaagaaagagttaagcgctcatggggaaagacagggcccagcccaggaagagataatgacaggattgatttgcgttatggcggccacaggagaacttcacaagaatggtcttacttaagaatctctagtttttgtagctaaaccatccattgtgttctcttaaaaatttgcacttgaagatcaatgcagactttcccacatcctcatatatcttagaaaaatggactggtttagatgtacaaatagattaccccccatatcttctgtgkacatcttaatgctgtattattttacataatgatatttacatgatctaattgtcaaattggagcacgagggaaagtaaaattttaagggaggtggaagaaatataagtggatttctggtttctagctcttaattcatgagtaacaaaatgcatattttatgatttccaaacagttgaaataactccaaattcacagacagtgtgcagtgggacaagagacaattctagttagtttaattactgaggaggataataagtttgatcagttaagacataagtacataccatagaccaatcaactctctggttggttccttaatagaacagatgttttaaaaaaagagacttttggtcttctggccacatcctacccttgattacaattgttcttctactgtctgggcagatctggtgtccctggagaaggctaaaggtgggccatgtagagatatggacttccaataccaaggttgggtcttctgttgatctggtttgctcagtatctgttttccttccttttttggacaacagcctgtttctttggggaaggatcatcccaaacttcatttgttcgccatggggttttcttccccttttaatccagaggtgagcaaataaccttggcttggtgctcccacatcatcattccatccaccaacacagaaaccagttccaggataagcctttgactcaagctgctccagtgagaatggaccatgtgatcacacaatggaaagcagatttataaggagatattagattctgtacatcatttagtttttggattccttaattcctgaagtcagtctcaccgtgggctgtttcctatgagccagtatatttcccttttatgttgaaggtagtttgaattgggtttctgttgcttgcacccaaaggatccctggctggtggaatacttaatatgacttcctctggcaagcttagtgaccaaagtcaagtaccatgactacagtgggtggaaaaggacttaagatgcagaaaatttaaaaacctggtccactactgcagctaccactacagtgaccactataccatatatacatattataatatataacatcatcaccaccaaggtagaggccctatttctctagtcaatccctgaatatcttcaagcaattcatatgatttttctttggctttccccagaagaaattctgaaggggaaggaataaataattttgcattggccaagcattagtttgaaatgtctaagcttttctttatggaagtttttaaatgcagtcacttttgatttggtacagaattataatcaactagaggctacaggcattttagcctgctggagtttatattgggggttttgcaagacagcaatctccatttcttaaacatgtgctttagtaagacaaaatactatttctcagtagagcacaaccttgaagaaaatcaatgtaaatgttattctacttctcacctctttttttctacaaaactaaacactccaaacacaggcacagcaaactgcatttcgaaaggttttgtaagttaaacaagccaaggaagttacatggaaaaaaaaaatctcctttgagatataaaactgttcatatctgaaggagactgtacagatagcagaagggaatatagtataatatttgatgaagagacgtaattatcatttatgaatgagaaagctcaatgttttcctaaattactcgaattaaacctcaaataaatatttgaagttctccatctaattcggctacaatgaaaaactgaatctcattacctctggatttacatcgactccaatttcaaagattatatttatttcagaggggatgaaaaagcatttttcactaggaagaaaatgaattgaggtttcaatataaaacaagactcactgcatattataaagaaagtgctagtctaaatttttttttccaaagaaaacttctaagaaaaagtcagagatatttcacttagtttggagataagtttaaataaatgacaattatgtgcctgtaatagtggtacaaacagatattgtatacctcaatttaagcatatttattatatcaactagagagtattattccttttatgaaataattcctcattctacaaaaacacgcagtataggatccatttagtaatgagctccccagtgtattctacctgtaatttaattcaattttcacagttttctagatacaacaattgcctcaagcaaggtaaacgtctttgccagtttaagtggatacgctgtagaaatcagatcagtgtgtgtatgtctgtacatctctttaaaagcttattgcaatgtggttataaaaggaacagtcagttgtccactattttcaccatatgcaatttcctcccatagattcacggccatatggagatgttcatcctgagccacctggatttccagcagggaaaacaaaaccaacaaacaaaacaggacatgacaatgaagatatcaaagaactgttatttacttttgctacaagaagtacagagaggattcatgattcttgaactatattttccaaaataagtgacagtcattcactttcttgacaaatatctatggagtactaacaataggccggacactatgatcgtcttttacaatatattctccctaaagaagattccaagtgaaaatatattgagagtgctcatcattctatatctcatacttgaaacattcataataggcgcgtcggccacttaagggctccaagaaatcttaaagaaacttgtttaatccaacagtgaccagatacatttaattatgtcattttcttttcctttcctttcccttcctttccttttttttttttttttttttttttgacagagtttctctcttactctcaggctggagtgaagcggcgcaatctcaggtaattgcaacctctacctgttgggttcaagcgattctcctgcctcagcctcctgagtacctattacaggcactcaccaccacgcccagctaatttttt

SEQ ID NO: 710581 - DNA, 774 bp, Homo sapiens
ttttgtcactcaggctggagtgcgctggtgcaattttggctcactgcagtctccacctccaaggatcaagtgattctcctgcctcagcctcccaagtagctgggattacaggcrtgtgccaccacacccggctaatttttctatttttagtagatacggggtttccccatgttggccaggttggtctctaactcctgacctcagatgatccacccacctctgcctcccaaagtgttgggattataggcatgagccaccacacctggccgtgagctctttttcaagtgtatgagtcagatatatagggacacaccctgggaagcctaatattatatattctataatgtaagtaataatataattaattatacatatgatacacacaatgaacgtcaacatcaatattcaagttcaatgtgacaagtgttaaagtattttcctgaaaagaagggtatgactgaaacagaaatcagcaccacattttttgtaaaaaattacaatatgcactcctcatgaagccatcagaagtaacacagattgtaaaggagtaaaatgacaagcatttttaagtctgattgtctttaaatatgtcatagaccgtgaatcacctaaaaaccatcatcgagaggggcatgccttaaacacctgggttcaattcacagagttcttgttttgtttgcaaccctaaaaatgaaaaatattgactcacctttctgtcttctatttccacgcaggtattgcagtctgctttgatatcctgagaagagaagaaaa

SEQ ID NO: 710582 - DNA, 774 bp, Homo sapiens
ttttgtcactcaggctggagtgcgctggtgcaattttggctcactgcagtctccacctccaaggatcaagtgattctcctgcctcagcctcccaagtagctgggattacaggcaygtgccaccacacccggctaatttttctatttttagtagatacggggtttccccatgttggccaggttggtctctaactcctgacctcagatgatccacccacctctgcctcccaaagtgttgggattataggcatgagccaccacacctggccgtgagctctttttcaagtgtatgagtcagatatatagggacacaccctgggaagcctaatattatatattctataatgtaagtaataatataattaattatacatatgatacacacaatgaacgtcaacatcaatattcaagttcaatgtgacaagtgttaaagtattttcctgaaaagaagggtatgactgaaacagaaatcagcaccacattttttgtaaaaaattacaatatgcactcctcatgaagccatcagaagtaacacagattgtaaaggagtaaaatgacaagcatttttaagtctgattgtctttaaatatgtcatagaccgtgaatcacctaaaaaccatcatcgagaggggcatgccttaaacacctgggttcaattcacagagttcttgttttgtttgcaaccctaaaaatgaaaaatattgactcacctttctgtcttctatttccacgcaggtattgcagtctgctttgatatcctgagaagagaagaaaa

SEQ ID NO: 710583 - DNA, 774 bp, Homo sapiens
ttttgtcactcaggctggagtgcgctggtgcaattttggctcactgcagtctccacctccaaggatcaagtgattctcctgcctcagcctcccaagtagctgggattacaggcatgtgccaccacacccggctaatttttctatttttagtagatacggggtttccccatgttggccaggttggtctctaactcctgacctcagatgatccacccacctctgcctcccaaagtgttgggattataggcatgagccaccacacctggccgtgagctctttttcaagtgtatgagtcagatatatagggacacaccctgggaagcctaatattatatattctataatgtaagtaataatataattaattatacatatgatacacacaatgaacgtcaacatcaatattcaagttcaatgtgacaagtgttaaagtattttcctgaaaagaagggtatgactgaaacagaaatcagcaccacattttttgtaaaaaattacaatatgcactcctcatgaagccatcagaagtaacacagattgtaaaggagtaaaatgacaagcatttttaagtctgattgtctttaaatatgtcatagaccgtgaatcacctamaaaccatcatcgagaggggcatgccttaaacacctgggttcaattcacagagttcttgttttgtttgcaaccctaaaaatgaaaaatattgactcacctttctgtcttctatttccacgcaggtattgcagtctgctttgatatcctgagaagagaagaaaa

SEQ ID NO: 710584 - DNA, 1526 bp, Homo sapiens
cagcttctcaaatgcattaagtttgtggccaccttggggtgtttgcatgcacccgctctacccccgccccctgcagagctgctgctctgagcctcccggtggctgctcctcctccctaccccaaggtcagttcagacaccagctcatcagtgagctcttcccccagccagcaatgctttatcctctctgttctgttttctttattgcacgtaccattatttgcattgataaccttgatttycttgtttatttttctatctccacatcaactagcttcttagctccatgaaagcagagactttcctttgtcttttttccatgctgtattctgacacccagaacaaaacctccacttaatatttgttcaggagcgaatggagtaactttaagaatgtgatgtctgctttttacacacgttgctacacagctcactctgtcactgggaactttcccttacaaaaaaaaaaatatgtttcataataaaaagtgttttctaaaaaatatttctacttcatcttctttataaggttctactttcctttttcttaaatatgcattaaaatgcatctctgtctctcgtacacacacacacactcaccccccatttttggttttattccatccctttacttgtccttatcttccttcttacctatcacttaacctccagttctttctcagattcacaatttccgaggctctatttcaattactctgcctttgaccttctaaattttctatctgccttttcatgttagtaattctttctgcttccctctgcaccaacccccctccaaatgccctctctctctactttcattcatattaaacatcatgtcttgcttatttccagctgggttgacaaccaaggagttaggtccaagtatagcctccttccctcccccaaatctaaatgcattcaataaggtactttaaaacatttttttaattgaagtctaatgtactcaaataaagcagcatttatcatagctgtttggccaaatgtcctggtccttggggtttgaggactactgccctagaggaagtcaagtttctttcttaactcctgtaacgagcaggtcgggtaacataggtcaactacaatttcaacctccttctcatggtattttcatcataaattccagcttaaattttaggaatttaaacttgactacaaacatggagatacttaacagaaatgctgtagggaatataagtattaccaatcagctagttctgggcccaaattgggtttctgattcctactagcaaggagacttgaacaaattagttgactagatcttagctttcttaacctgtaaagtggccttatgaatagtgcttacctcatcaggctgttttaagtacgaaataagaccatgttagaaggaaattttaacagtgcctggtgcaaactgatgttatatcaccattaagacctatgaccattaaccttaccatcatcaacttcactttcttttgagtatcattaaaaacatcaaacaatctgctgcagaaatggatgg

SEQ ID NO: 710585 - DNA, 1526 bp, Homo sapiens
cagcttctcaaatgcattaagtttgtggccaccttggggtgtttgcatgcacccgctctacccccgccccctgcagagctgctgctctgagcctcccggtggctgctcctcctccctaccccaaggtcagttcagacaccagctcatcagtgagctcttcccccagccagcaatgctttatcctctctgttctgttttctttattgcacgtaccattatttgcattgataaccttgatttccttgtttatttttctatctccacatcaactagcttcttagctccatgaaagcagagactttcctttgtcttttttccatgctgtattctgacmcccagaacaaaacctccacttaatatttgttcaggagcgaatggagtaactttaagaatgtgatgtctgctttttacacacgttgctacacagctcactctgtcactgggaactttcccttacaaaaaaaaaaatatgtttcataataaaaagtgttttctaaaaaatatttctacttcatcttctttataaggttctactttcctttttcttaaatatgcattaaaatgcatctctgtctctcgtacacacacacacactcaccccccatttttggttttattccatccctttacttgtccttatcttccttcttacctatcacttaacctccagttctttctcagattcacaatttccgaggctctatttcaattactctgcctttgaccttctaaattttctatctgccttttcatgttagtaattctttctgcttccctctgcaccaacccccctccaaatgccctctctctctactttcattcatattaaacatcatgtcttgcttatttccagctgggttgacaaccaaggagttaggtccaagtatagcctccttccctcccccaaatctaaatgcattcaataaggtactttaaaacatttttttaattgaagtctaatgtactcaaataaagcagcatttatcatagctgtttggccaaatgtcctggtccttggggtttgaggactactgccctagaggaagtcaagtttctttcttaactcctgtaacgagcaggtcgggtaacataggtcaactacaatttcaacctccttctcatggtattttcatcataaattccagcttaaattttaggaatttaaacttgactacaaacatggagatacttaacagaaatgctgtagggaatataagtattaccaatcagctagttctgggcccaaattgggtttctgattcctactagcaaggagacttgaacaaattagttgactagatcttagctttcttaacctgtaaagtggccttatgaatagtgcttacctcatcaggctgttttaagtacgaaataagaccatgttagaaggaaattttaacagtgcctggtgcaaactgatgttatatcaccattaagacctatgaccattaaccttaccatcatcaacttcactttcttttgagtatcattaaaaacatcaaacaatctgctgcagaaatggatgg

SEQ ID NO: 710586 - DNA, 1063 bp, Homo sapiens
agcagccactgtgagcccaaggcccaggaggagggctcacaggaagtgttccccacacccacagagactgcaaccagactgctgaggagatgccaagttcattccagaaagtgtggccagaccttcctgagaagagccccagctccacttctaccaagtatcaagctccccatcacttcccgctgcccccagccccagtgcccaggacgacgggcagagaccccagctgtgtggctgtgagcctggcccatgacacaagcaatagggcagttccattctgcttaatcccaagagtaaatgatctccaattcaagaaggttttagcatctcaacgagagggaggtgaaaaattgaccagaattcccaaaaagggcaaaaggaggaatgaatgattttgcttacagagcacatacgtactacacacgagtgcacctcattctaaacagacaggacttaaaaaaccttaacgtaagaattgagagaattatatttgatttttcagtattttaaaaatactaaacactttttttttttttttttttgtagagacaggatctcgtcatgttggtgaggctggtctcaagctcctgggctcaagtgatcctcccaccttggcttcccaaagtgctgggattaaggtgtgagccactgcactcggcctacaagcatatcatttcattaaacacaaatcctctttcttcccgcagtgcacaggatgcaaatcataaccccaggttattgggaataattatatcagtaataaggataaagataataataattccatgctgctcctactgtcataataatgacgaacacttytgcagcatcgaagcctttgcagcatttagaatgggccaggcactgtttggagcacattgcacatattcgctcatttaattcttgtatgaacactacaaagtaggtactatttgttaccctcctttaataggtgaggaaaactggccccaggtcacccatcccatgagggcgggacttgccctggacctgcatatgacatacacctacagcagcctccgagtggcagggctgtatagaatga

SEQ ID NO: 710587 - DNA, 630 bp, Homo sapiens
cctggtaaagaaaccaggatttcatctgacatggccaacctcttcctctaaaacctgctcaacgacggggtctactgcagccctgcagttcagactggctgtgccggacccactcctcattgagaaatgtcattcacccatgagggatctgtgagggtgactgggacggcaggtggtttccacctgagaaactgactttggaacttagagagatgtgactgctgtaccatgctaccaaagccagccttcctgatggcctctggctgattagcaggtgggcaaggagagttcctagagggaactagaattcatggaaagcagcaaagcagacactgagtgctgagttccagaacattcctcactctgtctaatcccatggttctcaacactggctatgcaatggaatcctttagggagcatttgaaaatatagatgtcagggccccaccccggagccagtgactcagaaccttctggagtgrggtctgggtacagattgttttcaaagtcctgctgggccagaaaccacagggccttcgcaccacccaccctcacgcttggtcacagctctgtcctggcctggcctaggagcaaatcagatgcccctagagcggttcccctgtggcaaaca

SEQ ID NO: 710588 - DNA, 1561 bp, Homo sapiens
tttgggaggctgaggcaagaggaccgcttgagcccaggagtttgagaccagccagggcaacatagcaagactccatctctataaaacatttaaaaattagctggacatggtagcacatgcctgtggtcccagctactctagaggctaaggtgggaggagcccttgagcccccggggttcaaggttgcagagagctatgattatgccacgcactccagccaaagcaacaaagtgacaccatgtctcaaaacacacacacacacacacacacayacacacacacacacagacacacacacacacacacacacacacacacacagacatatccaaggtcacagtgctgggctgggactcaaccgccagcaggacccctgcccctccctggaagccctctggtgcagctgcacccagaagctgtccacatcccaagggttgatgtgcctcggaagttactgctttttgagcaaatctaagccactaagtcccttcctttgtgagaaatcaaaaccatggtcccatttccaaatgtgtgggaaggactggtattttgaaaaagtatttcaactgtagagtgccttcagcagaaacaatatagatattttttcttgagatagggtcttgctcgattgcccaggccggagtgcagtggtgcaatcattactcactgctaatttttaaaaaaatttttgtagagacagggtctcactatgctgcccaggctggtctccaactcctgggctcaagcaatcctcccacctcagcctcccaaagtgctgggattataggcatgatccactgtgcctggcttaaaaacaataattttaataggcaaaaaaagctcaaacagtctccactactcaaatgcctcatttctctaatgcatagaattgaatctagaaatcctgctttgtaaaggaaaaaagaataatttgtgtgtgtgtgtttttcagaagaactgtcctagagccacttcaatacatcaacaacaaaagagggcacagtcattaggtgaccttgtgatctcagcagaacatgtctctctaatgtggctcaattatgattgtaagtttataaaacagggaaagattacaggaatatacattaaaccacatcaatgaatgccactgaggaaaaaaaaataggtccagcagacaggtaccaatcaaataatcaatacacaggaaacagctacatcaccctctcctttaaaagaaccaaataatactgcaattggatttacttaaaaattttccacttgaacaaaactgacagctctattacaatcccatttccagtcagtttataggatacaaatttcatttctccatatttctacttcatttctgaaaagtggccagcaacattattcatcaagtacacagggaagaagtttaattcatagagaggggaaacattgtgaattccatgttttccatttccttagagaattggtggtttaactgaaacttgatttttttcccaatctgtcaagttcagggtgcctgcctcaaagtggggtaaggaaaaagaaaaaagaaaaaaaagagaagaaaagagga

SEQ ID NO: 710589 - DNA, 1561 bp, Homo sapiens
tttgggaggctgaggcaagaggaccgcttgagcccaggagtttgagaccagccagggcaacatagcaagactccatctctataaaacatttaaaaattagctggacatggtagcacatgcctgtggtcccagctactctagaggctaaggtgggaggagcccttgagcccccggggttcaaggttgcagagagctatgattatgccacgcactccagccaaagcaacaaagtgacaccatgtctcaaaacacacacacacacacacacacatacacacacacacacasacacacacacacacacacacacacacacacacagacatatccaaggtcacagtgctgggctgggactcaaccgccagcaggacccctgcccctccctggaagccctctggtgcagctgcacccagaagctgtccacatcccaagggttgatgtgcctcggaagttactgctttttgagcaaatctaagccactaagtcccttcctttgtgagaaatcaaaaccatggtcccatttccaaatgtgtgggaaggactggtattttgaaaaagtatttcaactgtagagtgccttcagcagaaacaatatagatattttttcttgagatagggtcttgctcgattgcccaggccggagtgcagtggtgcaatcattactcactgctaatttttaaaaaaatttttgtagagacagggtctcactatgctgcccaggctggtctccaactcctgggctcaagcaatcctcccacctcagcctcccaaagtgctgggattataggcatgatccactgtgcctggcttaaaaacaataattttaataggcaaaaaaagctcaaacagtctccactactcaaatgcctcatttctctaatgcatagaattgaatctagaaatcctgctttgtaaaggaaaaaagaataatttgtgtgtgtgtgtttttcagaagaactgtcctagagccacttcaatacatcaacaacaaaagagggcacagtcattaggtgaccttgtgatctcagcagaacatgtctctctaatgtggctcaattatgattgtaagtttataaaacagggaaagattacaggaatatacattaaaccacatcaatgaatgccactgaggaaaaaaaaataggtccagcagacaggtaccaatcaaataatcaatacacaggaaacagctacatcaccctctcctttaaaagaaccaaataatactgcaattggatttacttaaaaattttccacttgaacaaaactgacagctctattacaatcccatttccagtcagtttataggatacaaatttcatttctccatatttctacttcatttctgaaaagtggccagcaacattattcatcaagtacacagggaagaagtttaattcatagagaggggaaacattgtgaattccatgttttccatttccttagagaattggtggtttaactgaaacttgatttttttcccaatctgtcaagttcagggtgcctgcctcaaagtggggtaaggaaaaagaaaaaagaaaaaaaagagaagaaaagagga

SEQ ID NO: 710590 - DNA, 1561 bp, Homo sapiens
tttgggaggctgaggcaagaggaccgcttgagcccaggagtttgagaccagccagggcaacatagcaagactccatctctataaaacatttaaaaattagctggacatggtagcacatgcctgtggtcccagctactctagaggctaaggtgggaggagcccttgagcccccggggttcaaggttgcagagagctatgattatgccacgcactccagccaaagcaacaaagtgacaccatgtctcaaaacacacacacacacacacacacatacacacacacacacagacacacasacacacacacacacacacacacacagacatatccaaggtcacagtgctgggctgggactcaaccgccagcaggacccctgcccctccctggaagccctctggtgcagctgcacccagaagctgtccacatcccaagggttgatgtgcctcggaagttactgctttttgagcaaatctaagccactaagtcccttcctttgtgagaaatcaaaaccatggtcccatttccaaatgtgtgggaaggactggtattttgaaaaagtatttcaactgtagagtgccttcagcagaaacaatatagatattttttcttgagatagggtcttgctcgattgcccaggccggagtgcagtggtgcaatcattactcactgctaatttttaaaaaaatttttgtagagacagggtctcactatgctgcccaggctggtctccaactcctgggctcaagcaatcctcccacctcagcctcccaaagtgctgggattataggcatgatccactgtgcctggcttaaaaacaataattttaataggcaaaaaaagctcaaacagtctccactactcaaatgcctcatttctctaatgcatagaattgaatctagaaatcctgctttgtaaaggaaaaaagaataatttgtgtgtgtgtgtttttcagaagaactgtcctagagccacttcaatacatcaacaacaaaagagggcacagtcattaggtgaccttgtgatctcagcagaacatgtctctctaatgtggctcaattatgattgtaagtttataaaacagggaaagattacaggaatatacattaaaccacatcaatgaatgccactgaggaaaaaaaaataggtccagcagacaggtaccaatcaaataatcaatacacaggaaacagctacatcaccctctcctttaaaagaaccaaataatactgcaattggatttacttaaaaattttccacttgaacaaaactgacagctctattacaatcccatttccagtcagtttataggatacaaatttcatttctccatatttctacttcatttctgaaaagtggccagcaacattattcatcaagtacacagggaagaagtttaattcatagagaggggaaacattgtgaattccatgttttccatttccttagagaattggtggtttaactgaaacttgatttttttcccaatctgtcaagttcagggtgcctgcctcaaagtggggtaaggaaaaagaaaaaagaaaaaaaagagaagaaaagagga

SEQ ID NO: 710591 - DNA, 1561 bp, Homo sapiens
tttgggaggctgaggcaagaggaccgcttgagcccaggagtttgagaccagccagggcaacatagcaagactccatctctataaaacatttaaaaattagctggacatggtagcacatgcctgtggtcccagctactctagaggctaaggtgggaggagcccttgagcccccggggttcaaggttgcagagagctatgattatgccacgcactccagccaaagcaacaaagtgacaccatgtctcaaaacacacacacacacacacacacatacacacacacacacagacacacacacacacacacacacacacacacacagacatatccaaggtcacagtgctgggctgggactcaaccgccagcaggacccctgcccctccctggaagccctctggtgcagctgcacccagaagctgtccacatcccaagggttgatgtgcctcggaagttactgctttttgagcaaatctaagccactaagtcccttcctttgtgagaaatcaaaaccatggtcccatttccaaatgtgtgggaaggactggtattttgaaaaagtatttcaactgtagagtgccttcagcagaaacaatatagatattttttcttgagatagggtcttgctcgattgcccaggccggagtgcagtggtgcaatcattactcactgctaatttttaaaaaaatttttgtagagacagggtctcactatgctgcccaggctggtctccaactcctgggctcaagcaatcctcccacctcagcctcccaaagtgctgggattataggcatgatccactgtgcctggcttaaaaacaataattttaataggcaaaaaaagctcaaacagtctccactactcaaatgcctcatttctytaatgcatagaattgaatctagaaatcctgctttgtaaaggaaaaaagaataatttgtgtgtgtgtgtttttcagaagaactgtcctagagccacttcaatacatcaacaacaaaagagggcacagtcattaggtgaccttgtgatctcagcagaacatgtctctctaatgtggctcaattatgattgtaagtttataaaacagggaaagattacaggaatatacattaaaccacatcaatgaatgccactgaggaaaaaaaaataggtccagcagacaggtaccaatcaaataatcaatacacaggaaacagctacatcaccctctcctttaaaagaaccaaataatactgcaattggatttacttaaaaattttccacttgaacaaaactgacagctctattacaatcccatttccagtcagtttataggatacaaatttcatttctccatatttctacttcatttctgaaaagtggccagcaacattattcatcaagtacacagggaagaagtttaattcatagagaggggaaacattgtgaattccatgttttccatttccttagagaattggtggtttaactgaaacttgatttttttcccaatctgtcaagttcagggtgcctgcctcaaagtggggtaaggaaaaagaaaaaagaaaaaaaagagaagaaaagagga

SEQ ID NO: 710592 - DNA, 1544 bp, Homo sapiens
gcattggccrataaaacaataaatccactgtttgtcattttaataatcttatctaaagtgtttactgctataaatatgtatttacttgttggaatgtaaataattgctggggttttttaaagtcactaattagagttactattaaaggaggcctccaactgcctgtggcagatattaaagtttattaccagtagtctcacacctttaactaagacaatatgcttcggaggcctggaatatgcctgatctcattagcattaagccagctgtcagttaattgtgcagagcgcattacagcttataaatgggaaattgcgattgctccttgcttttcgttaggttccacctggcttcccttctgcagaagaggcctataacttctttactttcaactttgatcccgaaccagaaggatcagaggaaaaaccaaaagcaagacatagagcgggaactaatcaagaggaggaggaaggggaagaagaagaaccacctgcacaaggaggaggaaaggaaatggtatttaatatcaggatggtaatgaggtgtgggtggagggctaggaggaaaaagctgatgtccctgcaagaaagaaagtggctgaggagaaacctgccaccaccaggagaatgacactccacgtctgagttgaaatcccaagtactgaattcacatggctccctgtagctctgggttagaccctacaatgtggtaggaagaaccttgattaaacctgtttatttttcttttgtggaaaaaagaattaaataatgtggcttgagggtttttcttgctagactccacgtaatgattagtatttattccatgtgcaaaatatgttcctctgcaaggcaaatgaaatcttggtctctctcttaccacaaccttacaaagtaagcagcattttgtgcccaaacaccacacccaggctacaactcaaattctgcaactgtgggtggtatgtgtgagataaaaggagaataagccatttaaaaatgggcaaaggtattgaatagacatttcttcaaagaagacatacaaatagacaataagcccataaaaagattcttaacaccaatcatcataagggaaatgcaaatcaaacccacaatgagatacccctgcacatccattagaatggcgcttatcaaaaaataagtgttatagaggatatggagaaattggactttggtgcgttgcttgtagccatgtaaaacagtgcagctgctgtgaaaaacagtatggtggtccttcaaaagttaaccacagatttacaatatgatccagcaattcaattccactctgtgtatatatccaaaaacactgaagacaagaatttgaacatatacttgtgcaccgatgttcatagcagcattattcacaaaagccaaaaggtagaagcaacccaagtgttcatcggaagataaatggataaacataaatatacaatggaatattatacaaccgcagaaagcatggaaattctgacacatgccacaacatagatataccttgaagacattacactaagaaaaataagccagtca

SEQ ID NO: 710593 - DNA, 1045 bp, Homo sapiens
gtatatgcactgtctccagcccctgaataagtatctactcacccctttggtgccagacaaaactgtttcatttatcaagcacaatttctaaaggacttgatctcttcctgtctgaatctaaaaatatacggctgcactcattaaatattgttaatattttaatctctggtctcttggtctttgtaatggaaaaaaaataccttccttttgcccctttttaatccttcagtttcttgagattaagccctggtcttgccttccaccattcctcmtacctccttgtcgtaagtaggtttgatctgttaaaaagaaatcagcggagcagggcatggtggctcacgctgtaatcccagcattttgggaggccaaggcaggcagattgtctgagctcaggagttcgcgaccagcctgggcaacacggtgaaaccctgtctttactaaaatacacgcatggcggcgtgcgcctgtagtcccagctactcgggaggctgaggcaggagaattgcttgaaccccggagtcggtggttgcagtgagccaagatcgtgccactgcactccagcctgggcgacagagtgagactccttctcaaaaaataaataaataaataagcggaaatagattctctgcttctcttcaattcaagcaacagttcacaaacatttcccttgggatttgagcatgaactgaacgacggtatctgtcttctccctcagccaggggagccatcttccacagctcagcacaactttctctctctctagctcactctccagcaacgccctcctcctttctagttccttctgctgcataacacagccccagaggttccagggttcccaggcgtcaactctgtcatgaagctcattgacctaatgcacagtacccagaagcctcggtgaagttcagctgacagccaatagagaaaaggagaaactccaaagcagaaagtagtaaatcgcaaaataaaatcaaataagccaggttgaagagaataaacccacaatttacagaaaatgaacaccattttctaaaaaagatttaaa

SEQ ID NO: 710594 - DNA, 1045 bp, Homo sapiens
gtatatgcactgtctccagcccctgaataagtatctactcacccctttggtgccagacaaaactgtttcatttatcaagcacaatttctaaaggacttgatctcttcctgtctgaatctaaaaatatacggctgcactcattaaatattgttaatattttaatctctggtctcttggtctttgtaatggaaaaaaaataccttccttttgcccctttttaatccttcagtttcttgagattaagccctggtcttgccttccaccattcctcctacctccttgtcgtaagtaggtttgatctgttaaaaagaaatcagcggagcagggcatggtggctcacgctgtaatcccagcattttgggaggccaaggcaggcagattgtctgagctcaggagttcgcgaccagcctgggcaacacggtgaaaccctgtctttactaaaatacacgcatggcggcgtgcgcctgtagtcccagctactcgggaggctgaggcaggagaattgcttgaaccccggagtcggtggttgcagtgagccaagatcgtgccactgcactccagcctgggcgacagagtgagactccttctcaaaaaataaataaataaataagcggaaatagattctctgcttctyttcaattcaagcaacagttcacaaacatttcccttgggatttgagcatgaactgaacgacggtatctgtcttctccctcagccaggggagccatcttccacagctcagcacaactttctctctctctagctcactctccagcaacgccctcctcctttctagttccttctgctgcataacacagccccagaggttccagggttcccaggcgtcaactctgtcatgaagctcattgacctaatgcacagtacccagaagcctcggtgaagttcagctgacagccaatagagaaaaggagaaactccaaagcagaaagtagtaaatcgcaaaataaaatcaaataagccaggttgaagagaataaacccacaatttacagaaaatgaacaccattttctaaaaaagatttaaa

SEQ ID NO: 710595 - DNA, 1045 bp, Homo sapiens
gtatatgcactgtctccagcccctgaataagtatctactcacccctttggtgccagacaaaactgtttcatttatcaagcacaatttctaaaggacttgatctcttcctgtctgaatctaaaaatatacggctgcactcattaaatattgttaatattttaatctctggtctcttggtctttgtaatggaaaaaaaataccttccttttgcccctttttaatccttcagtttcttgagattaagccctggtcttgccttccaccattcctcctacctccttgtcgtaagtaggtttgatctgttaaaaagaaatcagcggagcagggcatggtggctcacgctgtaatcccagcattttgggaggccaaggcaggcagattgtctgagctcaggagttcgcgaccagcctgggcaacacggtgaaaccctgtctttactaaaatacacgcatggcggcgtgcgcctgtagtcccagctactcgggaggctgaggcaggagaattgcttgaaccccggagtcggtggttgcagtgagccaagatcgtgccactgcactccagcctgggcgacagagtgagactccttctcaaaaaataaataaataaataagcggaaatagattctctgcttctcttcaattcaagcaacagttcacaarcatttcccttgggatttgagcatgaactgaacgacggtatctgtcttctccctcagccaggggagccatcttccacagctcagcacaactttctctctctctagctcactctccagcaacgccctcctcctttctagttccttctgctgcataacacagccccagaggttccagggttcccaggcgtcaactctgtcatgaagctcattgacctaatgcacagtacccagaagcctcggtgaagttcagctgacagccaatagagaaaaggagaaactccaaagcagaaagtagtaaatcgcaaaataaaatcaaataagccaggttgaagagaataaacccacaatttacagaaaatgaacaccattttctaaaaaagatttaaa

SEQ ID NO: 710596 - DNA, 2575 bp, Homo sapiens
aaacaaaacaaaacaaaaaaactttggtattaactttggtattcttgccactaataattacttctgatatctagctaggttttcagtagtataagactatctgaactgcctaatcttaaaagagtcaagattatagaaaagagttattggcctaaaattcamcttactgttttcaattctgaaattgtttaattcaaaaggttagagataaacttttccaacatgtataatgtgtttgggaactgttttccccctagaaatggcctttcaaataagaaagcacagaaattgggggatttttgttttaatatgcatttgcaactaagtccagagacacaggtagtttttaaaaataggtcttcaaggtaaaactggctaatataaaaatattctgattgctaccataattcaaaaggagtttccagttcattaacaactcctttactttgaattaatgactaaagtataacaaacaagattagcctccaaaaattaatgacttttctaaacttatttcaaaacttttagttcggccaggagtggtggctcacgcctgtaatcacagcactttggtgggccgagacaggtggatcacctgaggtcgagagttcaagaccagcctgaccaacatggagaaagcccgtcttcactaaaaacacaaaattagttgggtgtggtggtgcatgcctgtaatcccatctactcgggaggcagaggcaggagaattgcctgaaaccaggaggcggaggttgcgctgagttgagatcatgccattgcactccagcctggccaacaagagcgaaactcggtttccaaaaaaaaaaaaaaaccttttatttcagaaaacttttctcatacttagaacatcaaacacacaccaaattatatgatttaatgcatccaaattaacagatttgttaaaaattctaaaagaactcctaaaggagttaagagtaataagcagtgtttaaaatatactaggaaaagtaataccttttaagtacttattaagaatgtactgcaacccataaaatactgtttcctcatatttcaccttccttaatttggagttttctgtcttcttttcacggcattcaaagtaggaataaactttgcttgtgttgggtggatattgtttatagtgagtaacctatgtaaagaaatacacttctgttagaaaacaccgatgagtagactataaatcacaacagaaaaggcttgaagttatttcaaaaccagagaaactatatttcttgtttgctattaaccagtttcttttcctggctataccaaataaaaaataagtatctaagatattttcagagttcagtatcttaaaaccacaggagagcgttaaattttacatacaagcacactaaatctactacaaggcctctaggttggaaaagtatttcatttggttttggggaacagtccttcatccaggcgaagagagagagaagcagctgcctaatgggcacacacaacagaaaggaatgaactgaaagacagcagaatttggtactgctaatatctcaatgtggtatgttccaaaagtcaatgacttaacatgactactttacttgtacaatgaggtactgaggatgatcacttttagccttcacagtgacactatgaaaacctggatgacagcaacggcggtggcagcaaagtaaagcagcaaagtaaaaaaaaatcctgttttgtaatctccctttgtcaaatcacccacctaactggaaaataaattcttaaacatcaaatccttatgagtttaaaatacgaagaggtcttccttagcacaaatttcttttccatgaacttgggtaagagccaccatgtaaaaaatttatctgcttttaagaaagaaaaagtaaaaagtgagtgttcattatacttttaatatggttaaaacatggaaataaattcaaacattttaccaataaaaaataaagtggaagaataatgtgtatctgcccaatttcaagagtaggaataacagtgccttgaggtttaagatacagggtgaatcatggcaatggcggaataaatctttgcagaccatttttcatgagtgatcactgtgaacataaatcatttttcctgtttagctttgatctcaagttcaggaaagccaatgctgtctttgggtacacagtctcaatctcagtaaaacttggctctatcctcaagaatcttcatagcttagtacaagaatcctaagatgaatatatttccattgatgattctgaatgaatgtgctgtttccttgccaatggtagcatacttgcaactctataaaaatagcccctaatgcagcacacagacaaccttggaggtaaatctttatagtaacaagtgatctgagagtttaagtcaagcaggagacttggagctgttttccttaagtacaacagatagtgatatactaaaaggtacagggaagactcatcaaaagctagaagtatatgtcagggcttattaaggttagaatccagggactgatcccactttaataaaatttaagaagtagctaagcaagatagctaatacagaatctgcagcaatgaaattt

SEQ ID NO: 710597 - DNA, 2575 bp, Homo sapiens
aaacaaaacaaaacaaaaaaactttggtattaactttggtattcttgccactaataattacttctgatatctagctaggttttcagtagtataagactatctgaactgcctaatcttaaaagagtcaagattatagaaaagagttattggcctaaaattcaccttactgttttcaattctgaaattgtttaattcaaaaggttagagataaacttttccaacatgtataatgygtttgggaactgttttccccctagaaatggcctttcaaataagaaagcacagaaattgggggatttttgttttaatatgcatttgcaactaagtccagagacacaggtagtttttaaaaataggtcttcaaggtaaaactggctaatataaaaatattctgattgctaccataattcaaaaggagtttccagttcattaacaactcctttactttgaattaatgactaaagtataacaaacaagattagcctccaaaaattaatgacttttctaaacttatttcaaaacttttagttcggccaggagtggtggctcacgcctgtaatcacagcactttggtgggccgagacaggtggatcacctgaggtcgagagttcaagaccagcctgaccaacatggagaaagcccgtcttcactaaaaacacaaaattagttgggtgtggtggtgcatgcctgtaatcccatctactcgggaggcagaggcaggagaattgcctgaaaccaggaggcggaggttgcgctgagttgagatcatgccattgcactccagcctggccaacaagagcgaaactcggtttccaaaaaaaaaaaaaaaccttttatttcagaaaacttttctcatacttagaacatcaaacacacaccaaattatatgatttaatgcatccaaattaacagatttgttaaaaattctaaaagaactcctaaaggagttaagagtaataagcagtgtttaaaatatactaggaaaagtaataccttttaagtacttattaagaatgtactgcaacccataaaatactgtttcctcatatttcaccttccttaatttggagttttctgtcttcttttcacggcattcaaagtaggaataaactttgcttgtgttgggtggatattgtttatagtgagtaacctatgtaaagaaatacacttctgttagaaaacaccgatgagtagactataaatcacaacagaaaaggcttgaagttatttcaaaaccagagaaactatatttcttgtttgctattaaccagtttcttttcctggctataccaaataaaaaataagtatctaagatattttcagagttcagtatcttaaaaccacaggagagcgttaaattttacatacaagcacactaaatctactacaaggcctctaggttggaaaagtatttcatttggttttggggaacagtccttcatccaggcgaagagagagagaagcagctgcctaatgggcacacacaacagaaaggaatgaactgaaagacagcagaatttggtactgctaatatctcaatgtggtatgttccaaaagtcaatgacttaacatgactactttacttgtacaatgaggtactgaggatgatcacttttagccttcacagtgacactatgaaaacctggatgacagcaacggcggtggcagcaaagtaaagcagcaaagtaaaaaaaaatcctgttttgtaatctccctttgtcaaatcacccacctaactggaaaataaattcttaaacatcaaatccttatgagtttaaaatacgaagaggtcttccttagcacaaatttcttttccatgaacttgggtaagagccaccatgtaaaaaatttatctgcttttaagaaagaaaaagtaaaaagtgagtgttcattatacttttaatatggttaaaacatggaaataaattcaaacattttaccaataaaaaataaagtggaagaataatgtgtatctgcccaatttcaagagtaggaataacagtgccttgaggtttaagatacagggtgaatcatggcaatggcggaataaatctttgcagaccatttttcatgagtgatcactgtgaacataaatcatttttcctgtttagctttgatctcaagttcaggaaagccaatgctgtctttgggtacacagtctcaatctcagtaaaacttggctctatcctcaagaatcttcatagcttagtacaagaatcctaagatgaatatatttccattgatgattctgaatgaatgtgctgtttccttgccaatggtagcatacttgcaactctataaaaatagcccctaatgcagcacacagacaaccttggaggtaaatctttatagtaacaagtgatctgagagtttaagtcaagcaggagacttggagctgttttccttaagtacaacagatagtgatatactaaaaggtacagggaagactcatcaaaagctagaagtatatgtcagggcttattaaggttagaatccagggactgatcccactttaataaaatttaagaagtagctaagcaagatagctaatacagaatctgcagcaatgaaattt

SEQ ID NO: 710598 - DNA, 2575 bp, Homo sapiens
aaacaaaacaaaacaaaaaaactttggtattaactttggtattcttgccactaataattacttctgatatctagctaggttttcagtagtataagactatctgaactgcctaatcttaaaagagtcaagattatagaaaagagttattggcctaaaattcaccttactgttttcaattctgaaattgtttaattcaaaaggttagagataaacttttccaacatgtataatgtgtttgggaactgttttccccctagaaatggcctttcaaataagaaagcacagaaattgggggatttttgttttaatatgcatttgcaactaagtccagagacacaggtagtttttaaaaataggtcttcaaggtaaaactggctaatataaaaatattctgattgctaccataattcaaaaggagtttccagttcattaacaactcctttactttgaattaatgactaaagtataacaaacaagattagcctccaaaaattaatgacttttctaaacttatttcaaaacttttagttcggccaggagtggtggctcacgcctgtaatcacagcactttggtgggccgagacaggtggatcacctgaggtcgagagttcaagaccagcctgaccaacatggagaaagcccgtcttcactaaaaacacaaaattagttgggtgtggtggtgcatgcctgtaatcccatctactcgggaggcagaggcaggagaattgcctgaaaccaggaggcggaggttgcgctgagttgagatcatgccattgcactccagcctggccaacaagagcgaaactcggtttccaaaaaaaaaaamaaaccttttatttcagaaaacttttctcatacttagaacatcaaacacacaccaaattatatgatttaatgcatccaaattaacagatttgttaaaaattctaaaagaactcctaaaggagttaagagtaataagcagtgtttaaaatatactaggaaaagtaataccttttaagtacttattaagaatgtactgcaacccataaaatactgtttcctcatatttcaccttccttaatttggagttttctgtcttcttttcacggcattcaaagtaggaataaactttgcttgtgttgggtggatattgtttatagtgagtaacctatgtaaagaaatacacttctgttagaaaacaccgatgagtagactataaatcacaacagaaaaggcttgaagttatttcaaaaccagagaaactatatttcttgtttgctattaaccagtttcttttcctggctataccaaataaaaaataagtatctaagatattttcagagttcagtatcttaaaaccacaggagagcgttaaattttacatacaagcacactaaatctactacaaggcctctaggttggaaaagtatttcatttggttttggggaacagtccttcatccaggcgaagagagagagaagcagctgcctaatgggcacacacaacagaaaggaatgaactgaaagacagcagaatttggtactgctaatatctcaatgtggtatgttccaaaagtcaatgacttaacatgactactttacttgtacaatgaggtactgaggatgatcacttttagccttcacagtgacactatgaaaacctggatgacagcaacggcggtggcagcaaagtaaagcagcaaagtaaaaaaaaatcctgttttgtaatctccctttgtcaaatcacccacctaactggaaaataaattcttaaacatcaaatccttatgagtttaaaatacgaagaggtcttccttagcacaaatttcttttccatgaacttgggtaagagccaccatgtaaaaaatttatctgcttttaagaaagaaaaagtaaaaagtgagtgttcattatacttttaatatggttaaaacatggaaataaattcaaacattttaccaataaaaaataaagtggaagaataatgtgtatctgcccaatttcaagagtaggaataacagtgccttgaggtttaagatacagggtgaatcatggcaatggcggaataaatctttgcagaccatttttcatgagtgatcactgtgaacataaatcatttttcctgtttagctttgatctcaagttcaggaaagccaatgctgtctttgggtacacagtctcaatctcagtaaaacttggctctatcctcaagaatcttcatagcttagtacaagaatcctaagatgaatatatttccattgatgattctgaatgaatgtgctgtttccttgccaatggtagcatacttgcaactctataaaaatagcccctaatgcagcacacagacaaccttggaggtaaatctttatagtaacaagtgatctgagagtttaagtcaagcaggagacttggagctgttttccttaagtacaacagatagtgatatactaaaaggtacagggaagactcatcaaaagctagaagtatatgtcagggcttattaaggttagaatccagggactgatcccactttaataaaatttaagaagtagctaagcaagatagctaatacagaatctgcagcaatgaaattt

SEQ ID NO: 710599 - DNA, 1577 bp, Homo sapiens
ttgtgaattgagattcatagtggaacttgtgaattgagattcatctcgaaactggaggcatggctgagacttctaataaagacaacctcagtcaacactatgtcttgaagtcagtatatatttttgacaatcacctcatctacacgtagatacaatacagggcaaagatcatggaagtggaaggtatcaccaggcactcaccaatgtagtaaatactagtacacttacaattattttcagcaacgaggtttgaaacaagagggcttatgtatttattggttgatcttccctgtgttttaccggggaaaattatttgtaaacgcatttaaacaaattattatttctattttgagacggagtctcgctctgtcgcccaggctggagtgcagtggctggatctcggctcactgcaagctccgcctccctggttcacgccatcctcctgcctcagtctcccaagcagctgggactacaggcgcccgccaccacgcccggctaattttttgtatttttagtagagatggggtttcaccgtcttagccaggatggtctcgatctcctgacctcgtgatcctcccgcctcggcctcccaaagtgctgggattacagacgtgagccaccgcgcccggcctaaacaaattattttttaatatttgattttgggagtttttttatattatttcaaggagtgcaattcaaagaaggaaaaagataatttttgtccttaatttggtgttttttccttcatttaaaatttatataacctactttacttatagtacaaattcttatttgtttagcttcctggaattcatgtatctataaatgaccgttgttctatgctgctttatgcagaaaagaaagtaggattctgattataatgtgggctttgtttatggtagtatttttttaagatgcaaaatttgatcttgcaatctttgagttgaatttgcagttttaaaataaaaaggtcttatatctgtgcaaagaaaaaatattgtattgacattgcttgttaaattaaggagtgaggcctgcacaagtattagtaatgtgaatcctcacagtagtctccagagaaaaaaaatgacaatgaagtcatgttaccaataggacaatcaccatttgcctgagatagaaataggcacattctctatgtaactacatgcttaagctggagcaattcagaattaattggggtttagaactatgaaattatcactgaaaacagagccaagatttcattttaaaatggcctcccctgaaagacagtttaacagctagcattaaggttggacgtggtggctcacacctgtaatcccagcactttgggaggstgaggcgggctgatcacttgagcccaggattttgagaccagcctgggcaacatggtgaaaacccatctctacaaaaaatacaaaaattagctggacgtggtggcatgtgcctgtagtcccagcttctctgaaaggagactgacgtgggaggattgcctgagcccggggaggttgtagcatgtagaggacctgagaaactgtttttcataggtcacaacaacatgacaaataataacacat

SEQ ID NO: 710600 - DNA, 609 bp, Homo sapiens
gagaccccagtaaaaactgcagtgggaactactaagatgtgagctttctaaaacaggtcaacaacactatttcattgtacacatatgtatgtaagtttctcccctgacactaatgaagtcaccctagaggcacacacacatgttcatggattacaaacatgaagcgagtaaaaaaaagaaacacattcataaatatctacagggagcacacgcaggagagtcctgctamccagccaaagcaggaggcaccatggagctggcgggctgatggctgacaagatatcacctagttgaaggtagtctcctccacatgaccttgggcaagttattgatcctctttgagcctcagtttcctcatctgtgaaaatggggtgatccaggtacctgtgatccacagagtccacttcggggattaaatgagagtataggtgaaaaagtaattagaacagcgcctgacataaaaagcacttaacaaatgttagttgtgtggtttttgtttccagtattattaaacaaaaaccatagccagagaataaacacaacacacacacaccacccccatcccaataagaattatgtgccacctcttatgaaattttgcacagattt

SEQ ID NO: 710601 - DNA, 652 bp, Homo sapiens
aatgtagactccctttaatgagttcacttgctggaatcagttctttttctcacagattagggcaatggagcacccataaaggaattgacaagggaaactctagctcatttccaggaactatgatagaattctgtgagtgaagtaactactacttcaatatctctgcgartagatggtgagattgtgagctccaagagtgcattaatcacaaaccttattctgtttctgtatagtgcaatcacatttgtcctcagatgcaactgtgtggttcaagataaaacactgtatagtacaatgcttattgtctttaaatataagttccatccatcatggaagccagactcattcctcacctaaagccagtaatatgtcttttggataaagtacaaacttagggagttaattacttcattacattgcatggcccatccattataacaacatagctatgactggattcagctatggtagtcattcaatccaacctcatttacaaaacacagtttgtacctactgcctctacagagactgtagaaaaatggttttagaagccattcattcatgttctaggaactgtgtaatgagtgcctaccatatgtcacacactgtttcagatgctgtggctactgaaggaaagaagatagaaaaacat

SEQ ID NO: 710602 - DNA, 652 bp, Homo sapiens
aatgtagactccctttaatgagttcacttgctggaatcagttctttttctcacagattagggcaatggagcacccataaaggaattgacaagggaaactctagctcatttccaggaactatgatagaattctgtgagtgaagtaactactacttcaatatctctgcgaatagatggtgagattgtgagctccaagagtgcattaatcacaaaccttattctgtttctgtatagtgcaatcacatttgtcctcagatgcaactgtgtggttcaagataaaacactgtatagtacaatgcttattgtctttaaatataagttccatccatcatggaagccagactcattcctcacctaaagccagtaatatgtcttttggataaagtacaaacttagggagtyaattacttcattacattgcatggcccatccattataacaacatagctatgactggattcagctatggtagtcattcaatccaacctcatttacaaaacacagtttgtacctactgcctctacagagactgtagaaaaatggttttagaagccattcattcatgttctaggaactgtgtaatgagtgcctaccatatgtcacacactgtttcagatgctgtggctactgaaggaaagaagatagaaaaacat

SEQ ID NO: 710603 - DNA, 652 bp, Homo sapiens
aatgtagactccctttaatgagttcacttgctggaatcagttctttttctcacagattagggcaatggagcacccataaaggaattgacaagggaaactctagctcatttccaggaactatgatagaattctgtgagtgaagtaactactacttcaatatctctgcgaatagatggtgagattgtgagctccaagagtgcattaatcacaaaccttattctgtttctgtatagtgcaatcacatttgtcctcagatgcaactgtgtggttcaagataaaacactgtatagtacaatgcttattgtctttaaatataagttccatccatcatggaagccagactcattcctcacctaaagccagtaatatgtcttttggataaagtacaaacttagggagttaattacttcattacattgcatggcccatccattataacaacatagctatgactggattcagctatggtagtcattcaatccaacctcatttacaaaacacagtttgtacctactgcctctacagagactgtagaaaaatggttttagaagccattcattcatgttytaggaactgtgtaatgagtgcctaccatatgtcacacactgtttcagatgctgtggctactgaaggaaagaagatagaaaaacat

SEQ ID NO: 710604 - DNA, 966 bp, Homo sapiens
gcatagtcctcaagctatccctccacaagttaaaaaattaaaactcccatttgaatatttatcaaaactctttacgtggcaggcactgtgctcagtgggcactgtgtgtaaagataaagaagatgcaagctctactcccaatgggcttatgagggtgttgacatgaaaagcagaagtcttaggaaggactcaccaacaagcaatataatcctgtgaaacacactcttacagcccaccccaatatcaaccaaatgagcacacctccaaagaccatctcgatttcaataaactgaagcatacatactctcatggcaccccaatttccaagacatcctcaaaagtatgcagagtaggacagaactaaaatagttactgccacaacgctaaccacttatcagatacaggatctctgacagaggttttcagtatgtgtgagtgtgagtttaagtgtatgttctttcttgactccacttcctttctcttagtcattatatgtctgaaggagagttacagcaataaacttgaatccactcattaatttaagtaaaccgttcacaatctttatttttttagtagtaaaaaatgacttgtgacatctcacaagaccaatccacagtgaacattacccagagaatttagcataaattctacatataaaatcaaactaagattttagcttgaaattctattagagaaggttaaattttcaatgtcttcattcactaggtacagcatatcctgagtgtacgatatgtttgtctgctggggctgccatgataaaataccatagactgggtggcttaaacaacagaactcaattttctcatagttctggaggcggaaagtccaacatcaaggcatttctgggttgagtttctcctgatgcctctcttcttggcttgtagatggccaccttctcacggtgtcctcaaatggccttttctcttgygtgtacatatccattcc

SEQ ID NO: 710605 - DNA, 1278 bp, Homo sapiens
tttaaaaaattagccgggcatgtgcctatagtcccagctactctggaggctgaggcttgagcctaggagcttgaggctgcagtgagctatgattgccaccgcactacagcctgggcaacagggtaagaaaaagaaaatacaacaacaacagcaaaaacacatttattatctcacagtttctgtgcctcaggaatctgggtgtgtctctgcagaatcctctgcttcagggtctcttatgaggctgcartccaggtgtcagctagggctgggggctcatctggaagctcagccgggcaaggacctgcctctaaggcattccgcagttgacagaattcagttccatctgagcagttagaccaagggcctcagttcctgccagctgttggctggaggtcactgtcagttccttgccacatgggcctgcttactttatcaatgtgtgtgacccgagaaggcaataaagaatctgcttgtaagggaggctacaatctcttgaaacctaatcttagaagtgacaccctgtcacctttggttagaagcaagttgctaggccagcccacacttgggaggcacccccactacacagggtgtgaacacaaggagcaggtcaccagccatcccagtgtcaacccacacaggacataacacgtgggatttgggcacaggcatgtcgacctccaatgcttggctgcttccttctatgcaatcctggatcctccatgattgtgctctgctgtggcctgaacaaaaagggaacgatgatagttctttcttcatgtgactctactaagtactcttttagccagggaagttgagtaatctggttttaacaatagaaaagtgggacttgcaaattagcatgggtttccaaaacggaatgcaatttaaagctgagaagctgaagtgataaatggaggaacagtgttctgtctataaaagcagctgataaaaatgcctgtcacctttcaaaccagtcctgcaccccagagaccacaggtaaatcatctctctctacccagacctgcaaactgtccatgtatgtaacactgccactgcagggaaggaggcgggccagaggagcaggagagagccagccaccacctcaccagccttctgtgtgagttgccttctcccaagtcctttgagtggagacagcccagtccctgatcaaccaagtgccctgcagtgacagctgggaaagatggcaggtgtcagccttctcgccccatctctgccaccactgctccctgaaaacttctcgcagggatgattccagtg

SEQ ID NO: 710606 - DNA, 685 bp, Homo sapiens
tgcagagtccgtccagcaccctagggttgatttccctgggggtgttgttagccactcaggatgaccagcagccattcctggagaatgagaacaaatctcagaatcatgtgatctgtctctagtcccagctccactagctgtgtgaccttggacaagttacttaacttcttttcactttcattttctcatctgaaaagaaggggaagtaacaccttgtaaggactgaataatatgatgtctgacaaaaggcaccgtgcccagcacaattcccagagactgtttgtggagtttggatctgaatgcagggctggcgttaatcatcctttgtggggagcagcccaggaaaatcttctggtcccctgtttccctctcatagtccagtccaattcccattggcactttggggaaggcagtgattttcaagatttatctcagagcagaactcttttgtcaagcaaacttaacatggaatggaacggaacggaagtatataaaactgataaagctgagctcacttgtcaaagcagggctggggacaacctagatctctctttgtgatttgcccctcctcattttgcagtggcctccaatataactccatgagcccccaggcttcccagaacttggatggaacacaactcaactaaagtagtattctagrtggtctctgtcaaattagtaacaa

SEQ ID NO: 710607 - DNA, 1566 bp, Homo sapiens
ggccatgatactaagtcattgtctaatactttgtgctccaactgccagctttcaaccactaatttcctctgaatagtatctaggcacatttcaaaaggaatttcattcttgtttttacccgccttcccccagtttctcctatagaatcgttgtcacaccttcttttcctagcagtgtcatcagaatctaccagaaattaatgcctgcacctcatcagagaggaccaaacactttgtccactatccaacaccaaataatcagccaagagaaatggctctgaattctgtactggttctagcacaaggtccctttcccttctcacttgttccgtgcacatcatctgtggaatagcattgcttatgcacccccaccgccaccattaataaaaaataaggtttttttcaaacaaaataatctccattatagaaagatgggtctagcaaatcactgctaaaagcaggcagagattgagtggtcaaggcgagtgttcctggtcttggtccctatgactaggttctctcacaatactagtgaagggcaaccccaggcccaggacattctgtagaggcttctagagccagaaaagcctctactgcagcggcttctacaggcaggttctgcagaagggtgaacctcgactctactttctcatttgcctcaccccctatatctttttcattttctcccaccctgtctcacaacttccactgcaaaaggacacttttcagaagactgtcttctactacaatcctggtatatcattgaaaacttcagaaagggaaaataaagtgaagaaataaatcaagtgcacaaaatcaagagggaaaaacatcacagactatcttcatgctagaatcctagcttggtcaaggaagctatacaaatgaacagttccaggggtctgcttcccaacagggctatacaaaaaaacaccccaaaatcatgctgccaagtttctgatgagggtaggatgtttggaggctctgttgggatttttttaaattattattattccggttagactttatccctggatagttatagaaagataccaccagcagggcattaatccagatgaaaagattttcatgtttccacattatagatctggctcaaaattccaggtcttgcttagtcaggtccctgactcgttttctcatctgtgaagacttacaaaggaaagtcatgatgggcaaacacattgcagcctgatccctgacggacttggagaatatgcccactgccctggcagagccagaggcagctgaccttctgacttatgtgccaatggcaagagtccttctgcaccagtcatcatctggatcatgggtgtaatttagaggcactaaccagctgtaagtktcactatgcataggcaacttattttcaaagactgagattagagttgctgggatctaaatgactaaaactgctgaaagttaattttggtcaattttgcttttaaatatgcatggcgtctccattaatcaagtcaagaagcaggccacaattaacgtgagctaagcttgacagccatggcattctaacaagaaaggagaccttcca

SEQ ID NO: 710608 - DNA, 3286 bp, Homo sapiens
tcattttgacgagtctattactcagaacaaagaagtggaagaacttaaatcatgatgagcttataaacccctgggaatcaatgttcttttaaagtgcctctcagaacaaacagaaaagcccaaagctagacagcctgtcttttgaagactctaaaactaacttaaaacttatgtgtgcttcagtaacttgaggatttaataaatgtttccatttctgttgttgttgttgttttgctgtggtgattactgtcattgttacaggcccatgacagccccacagatgagcaggtgtgaccaaggtcataagggaaccaccacagccaatcacaccatgtcgtctggggtgaacaccaggtaattcactgcgccttattcttctatggtctctcaatttcatacaacccgaatgtcagctgttgagaatgaaaggaaccctgaacatagtcaatattgagtgtgaaaacctccaaggaaaagaaaagaaggtgagagtttagagttacaagaaaataccaaggcttcttttgaaattgtcaaagagaaatctaaaccaacttcataaataggcatttgtgttgttttgtttgcttgagcattctagatgttctctgcctcctgggtggtctttgaactattccagtgttgtttcatttaccttcaacaaaaggcaaataaacaataataatcaggaggtggtttatcattcccagggcactcagagtcaacttactttcatctggacagattttctgcagacatttcatccaaactttgacatatgccctcaaatggtgcttttcatggttgttaacttaatctccttctcttgttgtggtgtaactcagatactggctatactagttaatattttacccgtttcattccatctgtgttagctttaaatattccgacatacacaaaaagcctaattagcttcctcctacaaggaagatttaagatagggcaaacccaaaatcagcttaagaaaaagttcttttcccagtatggaatagttggcctggaaatcataaggagaaattcaataatttttcactctctctgaagcctatttttaagtgtgtatcattattcatgtaaagttaattccctgctcatcatatatattcatattaaaaataaaacaaaaataaattccaaacccagctataaattgcctggtgtgatggttaacttatgcctcaatttcctatattaagggaaaatgatatactatagcttaagtgatatttagggacttctctaggctcactggattaaatgagggcttctaaagaagaaagagggcttctaaagtcttagtatccatgaatcataaagcaataagtctccagaactgaaaggaagtcagccatgattctccttcctgtcacttaagacagagcacatggtattaaaactataacttaaatttcaaaatgtccaaaaatttctctcatttggctatattctatgagtttgtatatatttttataatagtygtctttacccaaatcacgcaacaataaaacaacttttgcagcagctataattgcaatatatgtgttagccaaatgaaagataaagcctttatgttttaggagtaatatatgtatatttgtgagcttatcaaaatgtatagcttcaagggcttttcatatgaaagtcgataagaagccccaaccaaaggaccccgttcttgctctaatagttatgtagactgtttttctgactcccaggtaccaggaacaaggagccaaactgcactttatcaggtacagaaagacttgctctaatttcataccagttctgacatcttgagatgattgccttttaagctggtttatggctctattagatttcatttgatgcataacatactatttctgggtaaacccccaaaagtgggtttactacagtttgggatgacagtctcttctaggctgctaagctttctttatccttcggatgaggttctccttggcctcaccctactgattcattaactcattaggaatcttatatttttcttcagtgtgataccctcttctcacagctgctacatgaatacattttcagacccctagttaatctttcacaatttcccagggaaaaccttcatttactggaggaagggcaaggcattcccagagaggaactggatgaacgaattgctcgggaagagttcagaagaccccgggagtccttactgaatatttgcactgagttctataagcactgtgggccacggctgaagatcttgcaaaatctggctggggagcctcgggtcattgccttggaactgctggatgtgaagtctcacatgaggtactggcctcgctttccctgccccaagtgtgaacacagcttggcccatgtgtctgaatgtgtgtgttgggttgagagtgggggttctccaggaaaaactcttaatatagaatgatttgtttccggtgacttaggtacacatcatacagaaccctctgctaaagtgtgcattaagtccatcaaacaggatcttagcgtggacaaggggaaaatgttcttaagatagaaaagcacagtttatatatgtgcttctcaataaaagagaaagaaagggaaattttatcacctgaattcttagaaaagtagccttcttctcactactatttactgcccagattcgaatttttcacaagaattgaatgtttcttctctgttattttacatgaggaatgcacaactactttctgcttctagggtccctaaaaagccagtaatgagccctgcagggaagtaagcagttttaactcagccaacttggcttgggcctgaaatcccctttatataaacagccttccaaccgttaaaaaaatgtgtcctggtaaaaattctgaactagatgaggccagtcgtcatttacatgttttactcttagtgtgctagggaaaggccccagaattacttccctgtgcactcgtatttcgtcttcctacagagatgccatttcacttgaaattcatgctaaaggccgtatttgtgtttcaaaaggaacgtgattccagaggaccttctattcagatttgtaattgtttgttaagggtgataaaaatcccttcaaagaaaaatgtcatgggtaacaaaagattcacttggaaattttaacgtatctataaaggtaaaagtagagttaggttcagccacttccaaataacgttgcaatttcacaaaactcacagtttcctggttattgcctttttttaaatttagaaagtactaaatggaggaaaatgagaagacagaaatg

SEQ ID NO: 710609 - DNA, 711 bp, Homo sapiens
aggggtaagacccctgcattggtgtttgtacagccagggttgcaaaacactggtatagagatgtaagataccccagttcaagatagtgaggatgaacttggagaggtactgagatgctctctccaaccccaccacatacacagggtcctgttgtaattattagaatcctaacaccccagaagcaacaatagcccaggaaatcttcaaactgtatccctgaaaagcactgtcactttrtctcaacttgaagccagttgctaaggccctacctggggcagatagccagcatgatttgctagttttgaaggtgtttgccaggtatgctgagtcctggctactggggttggcagacaagtgcgctctcagaagacagtaccctggaaagggagaaacgtgattctgggtggataatctgtattcttgtccctctctgcaggtcactgtggtcttaggggaccttctgtccttttcttaggggaaatacctggaacgctggggtacagaggagagaccatggtaggggtggagtgatgtagtcagatatgcccagagttgaccctggagccacaggagccttctgataaacttggggtcattcctgttgagaagggatgagaatgtggatggctcagtaagacaacactgattcaagcaacagttattgcttagctactctatattctaaaaagtcaaaaggcaaactgaggaaaa

SEQ ID NO: 710610 - DNA, 955 bp, Homo sapiens
tcactgaaatttctgttctgtagccacagaaaaggcacatgcctcctttactatgcttgctaggagaaatgccagcagccacagaaagatgcacttacttctcaatctcatttttttcaaaggaacaaccgttaacactttcttctgtatccttccagaaaatttccaagtgtgcatgtgcataaaacaaatgagatgggccaggcagtggcktatacctataatcccagcaactggggaggctgaagtgggaggatcacttgagcccagaagttagaaaccagcttgggttgcatagggagactccatctctacaaaaacaaaacaaaacaaaacaaaacaaaacaaaaattatccaggagtggtggcacacacctcccagctacttgagaagctgagtgggagaatcactgacctgtgatcctgccactgcacttcagcctgagtgactgagcaagaccctgtctcacaaacaaacaaatggaatcacaccaaatattagtctgactgatttaaaggacttatacttggatgccttttttaaagtgaagaatcaaataatataactgtgtttcttaggcagatcacccaaatctctaattttttttgttttgttttgttttgttttttgtttttgttttttctgttttgtttttgagatggagtctcactctgtcgcccaggctggagtgcagtggcacgatctcggcttactgcaaactccgactccctggttcaagtgattctcctgcctcagcctctcaagtagctgggattacaggcacacaccaccacacccagctaatttttgtatttttagtagagacggggtttcaccgtgttggtcaggatggtctccatcttctgactttgtcatccgcctgcctccaaatccccaattttaatgtgcaaccccgatactcagaaataaatgtaaaatatataggaataatat

SEQ ID NO: 710611 - DNA, 2370 bp, Homo sapiens
cccagaactttgggacgccaaggcagggggattgcttgagcccaggagtttgagtttagcctgagtaacacaacaagaccttctacaagaaatcaaaaaattagctgggcatggttacacatgctgtggtcccaagtacccaggatgctgaggtgggaggatcgattgagcccaggaggtcaaggctgcagtgagccatgatctcaccactgcactccagcctgggcaccgaggccacactacccataggctgctcccagccagaagcgagcatgctaggtactagtgccacctgttcctgcaggcaagagagtcctctaatagtcaacagtccaccagagactcccaactgatctggccaaatgttcctagagctgtgtgttgtgtctcagactcctcctgcccaaccttcttccttcaccctctccccttcatcagctggcttactgttcacttcaaggtcaagacattggctgtctgatgcagggacatccctggcacggcctccatggtcatctagcaaggggagggtggagcaaaggcttggtcccatagcatatattcacccatctccttgtccatttgttgtcttccagcagaatgtaagctctgagaaggtaagcagtttcctctcctttcctacaactgctgtcttccttgtatctagcacagtggctggcacaggctaggtgctcagtaaatatctggtgaakgaacccaggtcccctgaattctctgcttcatttcacaaagctgatctgagcacctattaggtctacaagctgtggcaggtattggggataagatctgagcaagacaggacccttgccttcaaggcactgagttctcaaaggcaagatggtagctatacagctaggcacagaattgtgtgactacagactatggccacagagctcctccttgctgacagctggtgggagctggtgttggctttgtttactgagcatccctacaaagggatttggggcttatgtaatctgaactcaaccagaaggtcagagaaggcttcagaccaaagtttaagataaagaggctgaggcaaggctccagtcccagagcatccccaggaggcctaccctgttcttccatgaatgtctcttgattagaaactctagagtctaggaggtcaaggtgggaggaacacttgaagccaggagttcaagaccagcctggacaacaaagcaagacctcatctctataaaaaataaaaattaaaaataactaaaaataaaatgagagacagagagagagagagagagagagagagaggacagaccagcctaggcaacatggtgaaaccctgtctctacaaaacatacaaaaattagctgggtgtggtggtgtgcacctgtggtcccagctactcgggaggctgaggtgggagagtcacttgagcctgtgaggcagaggttgcagtgagcagggatcgtaccactgcactccaagtctaggtgacagagcaagaccctgtctcaaaagagagagagagagattgtgagaaacagcagagtctgactggagctgaattattgagctcagcctgggaccaactgtcccacccactgaccagcactgaggacagagggtaaaccctgcaaaggaacatttttcatcactccaagacctgatgttaaccacactgaggcttcacattacacagaacacaatgacaatgttctggttatgtttcttgaaaagagtttttttttttttagagatacacattaaaatatttacagatgaaatcatataatgtctgcacgttgcttcagaataatattacaggggagaagggataggctgattcaggccattagggcctggtgaaggtacccgagttctgtctatctttaggttaaaactttttcatcataaaaggtttcctgaaaaaagcaagaaaatgtaaaaatatatatatatagattacatgtggacttggagcagccaacaccattgcttcctgtccccaccagcagccaagactcctcaagctgaaatactggggtcggccacacctttgcaccacagcttcctttgttcttcctgaagtctttcctaattgtgctggaatgcaggcattgcagcagggaatcccctgttccaaagcctttgctggatttttttttttttgaggcggagtctcgctttgtcgcccaggctggagtgcagtggcgccatctcggctcactgcgagctccgcctcctgggttctcgccattctcctgcctcagcctcctgagtagctgggactacaggcgcccgccaccacgcccggctaatttttttgtatttttagtagagacggggttttaccgtgttagccaggatggtctcaatctcctgacctcg

SEQ ID NO: 710612 - DNA, 2370 bp, Homo sapiens
cccagaactttgggacgccaaggcagggggattgcttgagcccaggagtttgagtttagcctgagtaacacaacaagaccttctacaagaaatcaaaaaattagctgggcatggttacacatgctgtggtcccaagtacccaggatgctgaggtgggaggatcgattgagcccaggaggtcaaggctgcagtgagccatgatctcaccactgcactccagcctgggcaccgaggccacactacccataggctgctcccagccagaagcgagcatgctaggtactagtgccacctgttcctgcaggcaagagagtcctctaatagtcaacagtccaccagagactcccaactgatctggccaaatgttcctagagctgtgtgttgtgtctcagactcctcctgcccaaccttcttccttcaccctctccccttcatcagctggcttactgttcacttcaaggtcaagacattggctgtctgatgcagggacatccctggcacggcctccatggtcatctagcaaggggagggtggagcaaaggcttggtcccatagcatatattcacccatctccttgtccatttgttgtcttccagcagaatgtaagctctgagaaggtaagcagtttcctctcctttcctacaactgctgtcttccttgtatctagcacagtggctggcacaggctaggtgctcagtaaatatctggtgaatgaacccaggtcccctgaattctctgcttcatttcacaaagctgatctgagcacctattasgtctacaagctgtggcaggtattggggataagatctgagcaagacaggacccttgccttcaaggcactgagttctcaaaggcaagatggtagctatacagctaggcacagaattgtgtgactacagactatggccacagagctcctccttgctgacagctggtgggagctggtgttggctttgtttactgagcatccctacaaagggatttggggcttatgtaatctgaactcaaccagaaggtcagagaaggcttcagaccaaagtttaagataaagaggctgaggcaaggctccagtcccagagcatccccaggaggcctaccctgttcttccatgaatgtctcttgattagaaactctagagtctaggaggtcaaggtgggaggaacacttgaagccaggagttcaagaccagcctggacaacaaagcaagacctcatctctataaaaaataaaaattaaaaataactaaaaataaaatgagagacagagagagagagagagagagagagagaggacagaccagcctaggcaacatggtgaaaccctgtctctacaaaacatacaaaaattagctgggtgtggtggtgtgcacctgtggtcccagctactcgggaggctgaggtgggagagtcacttgagcctgtgaggcagaggttgcagtgagcagggatcgtaccactgcactccaagtctaggtgacagagcaagaccctgtctcaaaagagagagagagagattgtgagaaacagcagagtctgactggagctgaattattgagctcagcctgggaccaactgtcccacccactgaccagcactgaggacagagggtaaaccctgcaaaggaacatttttcatcactccaagacctgatgttaaccacactgaggcttcacattacacagaacacaatgacaatgttctggttatgtttcttgaaaagagtttttttttttttagagatacacattaaaatatttacagatgaaatcatataatgtctgcacgttgcttcagaataatattacaggggagaagggataggctgattcaggccattagggcctggtgaaggtacccgagttctgtctatctttaggttaaaactttttcatcataaaaggtttcctgaaaaaagcaagaaaatgtaaaaatatatatatatagattacatgtggacttggagcagccaacaccattgcttcctgtccccaccagcagccaagactcctcaagctgaaatactggggtcggccacacctttgcaccacagcttcctttgttcttcctgaagtctttcctaattgtgctggaatgcaggcattgcagcagggaatcccctgttccaaagcctttgctggatttttttttttttgaggcggagtctcgctttgtcgcccaggctggagtgcagtggcgccatctcggctcactgcgagctccgcctcctgggttctcgccattctcctgcctcagcctcctgagtagctgggactacaggcgcccgccaccacgcccggctaatttttttgtatttttagtagagacggggttttaccgtgttagccaggatggtctcaatctcctgacctcg

SEQ ID NO: 710613 - DNA, 2370 bp, Homo sapiens
cccagaactttgggacgccaaggcagggggattgcttgagcccaggagtttgagtttagcctgagtaacacaacaagaccttctacaagaaatcaaaaaattagctgggcatggttacacatgctgtggtcccaagtacccaggatgctgaggtgggaggatcgattgagcccaggaggtcaaggctgcagtgagccatgatctcaccactgcactccagcctgggcaccgaggccacactacccataggctgctcccagccagaagcgagcatgctaggtactagtgccacctgttcctgcaggcaagagagtcctctaatagtcaacagtccaccagagactcccaactgatctggccaaatgttcctagagctgtgtgttgtgtctcagactcctcctgcccaaccttcttccttcaccctctccccttcatcagctggcttactgttcacttcaaggtcaagacattggctgtctgatgcagggacatccctggcacggcctccatggtcatctagcaaggggagggtggagcaaaggcttggtcccatagcatatattcacccatctccttgtccatttgttgtcttccagcagaatgtaagctctgagaaggtaagcagtttcctctcctttcctacaactgctgtcttccttgtatctagcacagtggctggcacaggctaggtgctcagtaaatatctggtgaatgaacccaggtcccctgaattctctgcttcatttcacaaagctgatctgagcacctattaggtctacaagctgtggcaggtattggggataagatctgagcaagacaggacccttgccttcaaggcactgagttctcaaaggcaagatggtagctatacagctaggcacagaattgtgtgactacagactatggccacagagctcctccttgctgacagctggtgggagctggtgttggctttgtttactgagcatccctacaaagggatttggggcttatgtaatctgaactcaaccagaaggtcagagaaggcttcagaccaaagtttaagataaagaggctgaggcaaggctccagtcccagagcatccccaggaggcctacyctgttcttccatgaatgtctcttgattagaaactctagagtctaggaggtcaaggtgggaggaacacttgaagccaggagttcaagaccagcctggacaacaaagcaagacctcatctctataaaaaataaaaattaaaaataactaaaaataaaatgagagacagagagagagagagagagagagagagaggacagaccagcctaggcaacatggtgaaaccctgtctctacaaaacatacaaaaattagctgggtgtggtggtgtgcacctgtggtcccagctactcgggaggctgaggtgggagagtcacttgagcctgtgaggcagaggttgcagtgagcagggatcgtaccactgcactccaagtctaggtgacagagcaagaccctgtctcaaaagagagagagagagattgtgagaaacagcagagtctgactggagctgaattattgagctcagcctgggaccaactgtcccacccactgaccagcactgaggacagagggtaaaccctgcaaaggaacatttttcatcactccaagacctgatgttaaccacactgaggcttcacattacacagaacacaatgacaatgttctggttatgtttcttgaaaagagtttttttttttttagagatacacattaaaatatttacagatgaaatcatataatgtctgcacgttgcttcagaataatattacaggggagaagggataggctgattcaggccattagggcctggtgaaggtacccgagttctgtctatctttaggttaaaactttttcatcataaaaggtttcctgaaaaaagcaagaaaatgtaaaaatatatatatatagattacatgtggacttggagcagccaacaccattgcttcctgtccccaccagcagccaagactcctcaagctgaaatactggggtcggccacacctttgcaccacagcttcctttgttcttcctgaagtctttcctaattgtgctggaatgcaggcattgcagcagggaatcccctgttccaaagcctttgctggatttttttttttttgaggcggagtctcgctttgtcgcccaggctggagtgcagtggcgccatctcggctcactgcgagctccgcctcctgggttctcgccattctcctgcctcagcctcctgagtagctgggactacaggcgcccgccaccacgcccggctaatttttttgtatttttagtagagacggggttttaccgtgttagccaggatggtctcaatctcctgacctcg

SEQ ID NO: 710614 - DNA, 2370 bp, Homo sapiens
cccagaactttgggacgccaaggcagggggattgcttgagcccaggagtttgagtttagcctgagtaacacaacaagaccttctacaagaaatcaaaaaattagctgggcatggttacacatgctgtggtcccaagtacccaggatgctgaggtgggaggatcgattgagcccaggaggtcaaggctgcagtgagccatgatctcaccactgcactccagcctgggcaccgaggccacactacccataggctgctcccagccagaagcgagcatgctaggtactagtgccacctgttcctgcaggcaagagagtcctctaatagtcaacagtccaccagagactcccaactgatctggccaaatgttcctagagctgtgtgttgtgtctcagactcctcctgcccaaccttcttccttcaccctctccccttcatcagctggcttactgttcacttcaaggtcaagacattggctgtctgatgcagggacatccctggcacggcctccatggtcatctagcaaggggagggtggagcaaaggcttggtcccatagcatatattcacccatctccttgtccatttgttgtcttccagcagaatgtaagctctgagaaggtaagcagtttcctctcctttcctacaactgctgtcttccttgtatctagcacagtggctggcacaggctaggtgctcagtaaatatctggtgaatgaacccaggtcccctgaattctctgcttcatttcacaaagctgatctgagcacctattaggtctacaagctgtggcaggtattggggataagatctgagcaagacaggacccttgccttcaaggcactgagttctcaaaggcaagatggtagctatacagctaggcacagaattgtgtgactacagactatggccacagagctcctccttgctgacagctggtgggagctggtgttggctttgtttactgagcatccctacaaagggatttggggcttatgtaatctgaactcaaccagaaggtcagagaaggcttcagaccaaagtttaagataaagaggctgaggcaaggctccagtcccagagcatccccaggaggcctaccctgttcttccatgaatgtctcttgattagaaactctagagtctaggaggtcaaggtgggaggaacacttgaagccaggagttcaagaccagcctggacaacaaagcaagacctcatctctataaaaaataaaaattaaaaataactaaaaataaaatgagagacagagagagagagagagagagagagagaggacagaccagcctaggcaacatggtgaaaccctgtctctacaaaacatacaaaaattagctgggtgtggtggtgtgcacctgtggtcccagctackcgggaggctgaggtgggagagtcacttgagcctgtgaggcagaggttgcagtgagcagggatcgtaccactgcactccaagtctaggtgacagagcaagaccctgtctcaaaagagagagagagagattgtgagaaacagcagagtctgactggagctgaattattgagctcagcctgggaccaactgtcccacccactgaccagcactgaggacagagggtaaaccctgcaaaggaacatttttcatcactccaagacctgatgttaaccacactgaggcttcacattacacagaacacaatgacaatgttctggttatgtttcttgaaaagagtttttttttttttagagatacacattaaaatatttacagatgaaatcatataatgtctgcacgttgcttcagaataatattacaggggagaagggataggctgattcaggccattagggcctggtgaaggtacccgagttctgtctatctttaggttaaaactttttcatcataaaaggtttcctgaaaaaagcaagaaaatgtaaaaatatatatatatagattacatgtggacttggagcagccaacaccattgcttcctgtccccaccagcagccaagactcctcaagctgaaatactggggtcggccacacctttgcaccacagcttcctttgttcttcctgaagtctttcctaattgtgctggaatgcaggcattgcagcagggaatcccctgttccaaagcctttgctggatttttttttttttgaggcggagtctcgctttgtcgcccaggctggagtgcagtggcgccatctcggctcactgcgagctccgcctcctgggttctcgccattctcctgcctcagcctcctgagtagctgggactacaggcgcccgccaccacgcccggctaatttttttgtatttttagtagagacggggttttaccgtgttagccaggatggtctcaatctcctgacctcg

SEQ ID NO: 710615 - DNA, 2370 bp, Homo sapiens
cccagaactttgggacgccaaggcagggggattgcttgagcccaggagtttgagtttagcctgagtaacacaacaagaccttctacaagaaatcaaaaaattagctgggcatggttacacatgctgtggtcccaagtacccaggatgctgaggtgggaggatcgattgagcccaggaggtcaaggctgcagtgagccatgatctcaccactgcactccagcctgggcaccgaggccacactacccataggctgctcccagccagaagcgagcatgctaggtactagtgccacctgttcctgcaggcaagagagtcctctaatagtcaacagtccaccagagactcccaactgatctggccaaatgttcctagagctgtgtgttgtgtctcagactcctcctgcccaaccttcttccttcaccctctccccttcatcagctggcttactgttcacttcaaggtcaagacattggctgtctgatgcagggacatccctggcacggcctccatggtcatctagcaaggggagggtggagcaaaggcttggtcccatagcatatattcacccatctccttgtccatttgttgtcttccagcagaatgtaagctctgagaaggtaagcagtttcctctcctttcctacaactgctgtcttccttgtatctagcacagtggctggcacaggctaggtgctcagtaaatatctggtgaatgaacccaggtcccctgaattctctgcttcatttcacaaagctgatctgagcacctattaggtctacaagctgtggcaggtattggggataagatctgagcaagacaggacccttgccttcaaggcactgagttctcaaaggcaagatggtagctatacagctaggcacagaattgtgtgactacagactatggccacagagctcctccttgctgacagctggtgggagctggtgttggctttgtttactgagcatccctacaaagggatttggggcttatgtaatctgaactcaaccagaaggtcagagaaggcttcagaccaaagtttaagataaagaggctgaggcaaggctccagtcccagagcatccccaggaggcctaccctgttcttccatgaatgtctcttgattagaaactctagagtctaggaggtcaaggtgggaggaacacttgaagccaggagttcaagaccagcctggacaacaaagcaagacctcatctctataaaaaataaaaattaaaaataactaaaaataaaatgagagacagagagagagagagagagagagagagaggacagaccagcctaggcaacatggtgaaaccctgtctctacaaaacatacaaaaattagctgggtgtggtggtgtgcacctgtggtcccagctactcgggaggctgaggtgggagagtcacttgagcctgtgaggcagaggttgcagtgagcagggatcgtaccactgcactccaagtctaggtgacagagcaagaccctgtctcaaaagagagagagagagattgtgagaaacagcagagtctgactggagctgaattattgagctcagcctgggaccaactgtcccacccactgaccagcactgaggacagagggtaaaccctgcaaaggaacatttttcatcactccaagacctgatgttaaccacactgaggcttcacattacacagaacacaatgacaatgttctggttatgtttcttgaaaagagtttttttttttttagagatacacattaaaatatttacagatgaaatcatataatgtctgcacgttgcttcagaataatattacaggggagaagggataggctgattcaggccattagggcctggtgaaggtacccgagttctgtctatctttaggttaaaactttttcatcataaaaggtttcctgaaaaaagcaagaaaatgtaaaaatatatatatatagattacatgtggacttggagcagccaacaccattgcttcctgtccccaccagcagccaagactcctcaagctgaaatactggggtcggccacacctttgcaccacagcttcctttgttcttcctgaagtctttcctaattgtgctggaatgcaggcattgcagcagggaatcccctgttccaaagcctttgctggatttttttttttttgaggcggagtctcgctttgtcgcccaggctggagtgcagtggcgccatctcggctcactgcgagctccgcctcctgggttctcgccattctcctgcctcagcctcctgagtagctgrgactacaggcgcccgccaccacgcccggctaatttttttgtatttttagtagagacggggttttaccgtgttagccaggatggtctcaatctcctgacctcg

SEQ ID NO: 710616 - DNA, 2370 bp, Homo sapiens
cccagaactttgggacgccaaggcagggggattgcttgagcccaggagtttgagtttagcctgagtaacacaacaagaccttctacaagaaatcaaaaaattagctgggcatggttacacatgctgtggtcccaagtacccaggatgctgaggtgggaggatcgattgagcccaggaggtcaaggctgcagtgagccatgatctcaccactgcactccagcctgggcaccgaggccacactacccataggctgctcccagccagaagcgagcatgctaggtactagtgccacctgttcctgcaggcaagagagtcctctaatagtcaacagtccaccagagactcccaactgatctggccaaatgttcctagagctgtgtgttgtgtctcagactcctcctgcccaaccttcttccttcaccctctccccttcatcagctggcttactgttcacttcaaggtcaagacattggctgtctgatgcagggacatccctggcacggcctccatggtcatctagcaaggggagggtggagcaaaggcttggtcccatagcatatattcacccatctccttgtccatttgttgtcttccagcagaatgtaagctctgagaaggtaagcagtttcctctcctttcctacaactgctgtcttccttgtatctagcacagtggctggcacaggctaggtgctcagtaaatatctggtgaatgaacccaggtcccctgaattctctgcttcatttcacaaagctgatctgagcacctattaggtctacaagctgtggcaggtattggggataagatctgagcaagacaggacccttgccttcaaggcactgagttctcaaaggcaagatggtagctatacagctaggcacagaattgtgtgactacagactatggccacagagctcctccttgctgacagctggtgggagctggtgttggctttgtttactgagcatccctacaaagggatttggggcttatgtaatctgaactcaaccagaaggtcagagaaggcttcagaccaaagtttaagataaagaggctgaggcaaggctccagtcccagagcatccccaggaggcctaccctgttcttccatgaatgtctcttgattagaaactctagagtctaggaggtcaaggtgggaggaacacttgaagccaggagttcaagaccagcctggacaacaaagcaagacctcatctctataaaaaataaaaattaaaaataactaaaaataaaatgagagacagagagagagagagagagagagagagaggacagaccagcctaggcaacatggtgaaaccctgtctctacaaaacatacaaaaattagctgggtgtggtggtgtgcacctgtggtcccagctactcgggaggctgaggtgggagagtcacttgagcctgtgaggcagaggttgcagtgagcagggatcgtaccactgcactccaagtctaggtgacagagcaagaccctgtctcaaaagagagagagagagattgtgagaaacagcagagtctgactggagctgaattattgagctcagcctgggaccaactgtcccacccactgaccagcactgaggacagagggtaaaccctgcaaaggaacatttttcatcactccaagacctgatgttaaccacactgaggcttcacattacacagaacacaatgacaatgttctggttatgtttcttgaaaagagtttttttttttttagagatacacattaaaatatttacagatgaaatcatataatgtctgcacgttgcttcagaataatattacaggggagaagggataggctgattcaggccattagggcctggtgaaggtacccgagttctgtctatctttaggttaaaactttttcatcataaaaggtttcctgaaaaaagcaagaaaatgtaaaaatatatatatatagattacatgtggacttggagcagccaacaccattgcttcctgtccccaccagcagccaagactcctcaagctgaaatactggggtcggccacacctttgcaccacagcttcctttgttcttcctgaagtctttcctaattgtgctggaatgcaggcattgcagcagggaatcccctgttccaaagcctttgctggatttttttttttttgaggcggagtctcgctttgtcgcccaggctggagtgcagtggcgccatctcggctcactgcgagctccgcctcctgggttctcgccattctcctgcctcagcctcctgagtagctgggmctacaggcgcccgccaccacgcccggctaatttttttgtatttttagtagagacggggttttaccgtgttagccaggatggtctcaatctcctgacctcg

SEQ ID NO: 710617 - DNA, 902 bp, Homo sapiens
tctgtcgcccatgctgcagtgcaggggcgcgatcttggctcattgcaacctctgcctcccgggttcatgagattctcctgcctcagcctcccaagctgggattacaggtggctgccaccatgcctggctaatttttgtatttttagtagagatggggtttcaccatattggtcaggccagcctcaaactcctgacctcaagtgatcaacccgcctcggcctcccaaagtgctgggattatagacatgagccactgmgcctggcctgttacctttagtctcagattaaactacctaactttgaaagaaaagcttgcaataggagatttacaacctgatagaaaacatatgctgataatttgcatgtacattaaatggacaacttgcacattattgagttattatacattattgggcttattaattcatattaagaaattacaggcaacataatccttctcttttcctagaataagtaatataatagattttttaaaaatgaaaatatgttaaaatctctgtacctcttccctaccacgctgtgcatttggaaatatgaaataacagataagtgacagctctgattatcaaagcaggagcagaatttacaacttaaagtttcataaaacaacactgaaataataattttcaaatcagcaaagatgtttcaaaactacacttgtaagatttgttctcttatgcaagtgttagtgagagtgtgaattagtaaaacctttctgaaaacaacttggcaatatgctttaataaacttaaatttttttatcttttaatttagtagtttaaaagagcaattagatatggaggaaaagatttgtgaacaagtgaaacattcacaatacattgattgtagtatcatttggaagcaatccaagtgttgttacag

SEQ ID NO: 710618 - DNA, 902 bp, Homo sapiens
tctgtcgcccatgctgcagtgcaggggcgcgatcttggctcattgcaacctctgcctcccgggttcatgagattctcctgcctcagcctcccaagctgggattacaggtggctgccaccatgcctggctaatttttgtatttttagtagagatggggtttcaccatattggtcaggccagcctcaaactcctgacctcaagtgatcaacccgcctcggcctcccaaagtgctgggattatagacatgagccactgcgcctggcctgttacctttagtctcagattaaactacctaactttgaaagaaaagcttgcaataggagatttacaacctgatagaaaacatatgctgataatttgcatgtacattaaatggacaacttgcacattattgagttattatacattattggkcttattaattcatattaagaaattacaggcaacataatccttctcttttcctagaataagtaatataatagattttttaaaaatgaaaatatgttaaaatctctgtacctcttccctaccacgctgtgcatttggaaatatgaaataacagataagtgacagctctgattatcaaagcaggagcagaatttacaacttaaagtttcataaaacaacactgaaataataattttcaaatcagcaaagatgtttcaaaactacacttgtaagatttgttctcttatgcaagtgttagtgagagtgtgaattagtaaaacctttctgaaaacaacttggcaatatgctttaataaacttaaatttttttatcttttaatttagtagtttaaaagagcaattagatatggaggaaaagatttgtgaacaagtgaaacattcacaatacattgattgtagtatcatttggaagcaatccaagtgttgttacag

SEQ ID NO: 710619 - DNA, 2231 bp, Homo sapiens
tctgttcgagcttcttgaagagattggagggtagaagaaaatgagatccagttagtaattcccttagctcccttcctgctgtgttgccacaggttgtctgtgtctccaccaaaggccacagctcttgtcataccattatcctctttgagttcctgcaaacactgtcttctattgtctctttagacatagaagtagaaatcactcctgggtgttggcagcaccaggataccaacagagaaactccgggtcagtcacctagtgtaaggaaaatggatgtgatttggtcaagaataggccaaggtaaacatcctgtgtgactcattgagtttggagcacagacacataactccacttgttatataatcacagctatgtagctataacatgggaaggctcatcgcctggtttggaggcactattgtttgtaaaaggtataactgccctgctgacactgtacatacagcacggcatggctcgactcatgcccagagagaattaagctgctgaccctgtaagggagagctggccttgcagaccagggaatgcagctgcaggcgtgggagtggcagagccggagcaggcagccgagacaaagacacacagtgtaagagagctgctgagtaaaaccatctttcaccggcctatggcctcccaagtgttctttcagctacctgccacccatcaacctactcccttcagacctcagcatgggctggaaccagacactgggcatgacagcctgttgatgctacctagacctgactagacaagacagtactgaattggatagttcacataaagagcagaaacacttgccactgtaatcccaaggcaggcacccataggaaacagaggtacctggaagccataattcctaaatggacttcccaggcttatagcatgaactatctccagccacctagcactagcctaactggtaagcccagataccaccagctaatgggcaacatccagaaacttcactctcctaataccaataaggatcctttggtttaaaaagaaccacccttcccacccagagcatagttgtgtgatgaatctagtcccctactttacagttaaacttttctactcactgctcaatccttgctgtcattgtctttattttctctttagcaacaccattgcttttttttgggtgggtggggacagacctctctccttctgtcacccaggctggagtgcagtggtgcgatcttggcctactgcaacctctgcctcctgggatcaagcagttctcctgcctcagcctcttgactagctgggattacaggcgactgccaccacaccgggctaatttttgtatttttagtagagacggggttttaccatgttggccaggctggtctccaactcctgacctcaaatgatcagcccgccgtggcttcccaaaatgctgggattacaggcgtgagccactatgcccggcccaccattgcttttttgattttcctaaactctatctacacgtttgttaataccctccttaccaaattatcctcgattacccattttgaatgtgctttttccttttgtgactctgcctgatataaaaatttaagaattgtttaacaccagggaaattggaggttagaggattaacatacaggctagagataaatatatgagagtttgcagcatagcggtcatagatgataccactaaagtagatcataaggaagtatacagaaaagcaaagagttacaacagaaatttaaagacaaatacaaatagggagtaaaatgagaaaagttaagagaagcagagaatcaggaggactatcacaaaagtaaagtgtcaaagaccaaaaggatgaaggatgtcaaagaccaaaagatgtgaaatgcctttgaatgtagcaagggagtcattggtttttatctgaacaacccgcacagttcagtgaattaagattggaatcagctcactgacaaccacaacaaattcttcaggacctcccgtatggcaggcactgtgccatagcctcagaagttaaacatgattattacatgttcctgtcctttggagtayacacttttgtgatagctccatgtccaggggtacgggctaaaatggaaggcacagacatgtgatcaacccatagttgtttcatatatatatatatatgtgtgtgtgtatatatatatgtatatatgtgtatgtatatatgtatatatgtgtgtatatatgtatgtatgtgtgtatatata

SEQ ID NO: 710620 - DNA, 2231 bp, Homo sapiens
tctgttcgagcttcttgaagagattggagggtagaagaaaatgagatccagttagtaattcccttagctcccttcctgctgtgttgccacaggttgtctgtgtctccaccaaaggccacagctcttgtcataccattatcctctttgagttcctgcaaacactgtcttctattgtctctttagacatagaagtagaaatcactcctgggtgttggcagcaccaggataccaacagagaaactccgggtcagtcacctagtgtaaggaaaatggatgtgatttggtcaagaataggccaaggtaaacatcctgtgtgactcattgagtttggagcacagacacataactccacttgttatataatcacagctatgtagctataacatgggaaggctcatcgcctggtttggaggcactattgtttgtaaaaggtataactgccctgctgacactgtacatacagcacggcatggctcgactcatgcccagagagaattaagctgctgaccctgtaagggagagctggccttgcagaccagggaatgcagctgcaggcgtgggagtggcagagccggagcaggcagccgagacaaagacacacagtgtaagagagctgctgagtaaaaccatctttcaccggcctatggcctcccaagtgttctttcagctacctgccacccatcaacctactcccttcagacctcagcatgggctggaaccagacactgggcatgacagcctgttgatgctacctagacctgactagacaagacagtactgaattggatagttcacataaagagcagaaacacttgccactgtaatcccaaggcaggcacccataggaaacagaggtacctggaagccataattcctaaatggacttcccaggcttatagcatgaactatctccagccacctagcactagcctaactggtaagcccagataccaccagctaatgggcaacatccagaaacttcactctcctaataccaataaggatcctttggtttaaaaagaaccacccttcccacccagagcatagttgtgtgatgaatctagtcccctactttacagttaaacttttctactcactgctcaatccttgctgtcattgtctttattttctctttagcaacaccattgcttttttttgggtgggtggggacagacctctctccttctgtcacccaggctggagtgcagtggtgcgatcttggcctactgcaacctctgcctcctgggatcaagcagttctcctgcctcagcctcttgactagctgggattacaggcgactgccaccacaccgggctaatttttgtatttttagtagagacggggttttaccatgttggccaggctggtctccaactcctgacctcaaatgatcagcccgccgtggcttcccaaaatgctgggattacaggcgtgagccactatgcccggcccaccattgcttttttgattttcctaaactctatctacacgtttgttaataccctccttaccaaattatcctcgattacccattttgaatgtgctttttccttttgtgactctgcctgatataaaaatttaagaattgtttaacaccagggaaattggaggttagaggattaacatacaggctagagataaatatatgagagtttgcagcatagcggtcatagatgataccactaaagtagatcataaggaagtatacagaaaagcaaagagttacaacagaaatttaaagacaaatacaaatagggagtaaaatgagaaaagttaagagaagcagagaatcaggaggactatcacaaaagtaaagtgtcaaagaccaaaaggatgaaggatgtcaaagaccaaaagatgtgaaatgcctttgaatgtagcaagggagtcattggtttttatctgaacaacccgcacagttcagtgaattaagattggaatcagctcactgacaaccacaacaaattcttcaggacctcccgtatggcaggcactgtgccatagcctcagaagttaaacatgattattacatgttcctgtcctttggagtacacacttttgtgatagctccatgtccaggggtacgggctaaaatggaaggcacagacatgtgatcaacccatagttgtttcatatatatatatatatgtgtgtrtgtatatatatatgtatatatgtgtatgtatatatgtatatatgtgtgtatatatgtatgtatgtgtgtatatata

SEQ ID NO: 710621 - DNA, 2231 bp, Homo sapiens
tctgttcgagcttcttgaagagattggagggtagaagaaaatgagatccagttagtaattcccttagctcccttcctgctgtgttgccacaggttgtctgtgtctccaccaaaggccacagctcttgtcataccattatcctctttgagttcctgcaaacactgtcttctattgtctctttagacatagaagtagaaatcactcctgggtgttggcagcaccaggataccaacagagaaactccgggtcagtcacctagtgtaaggaaaatggatgtgatttggtcaagaataggccaaggtaaacatcctgtgtgactcattgagtttggagcacagacacataactccacttgttatataatcacagctatgtagctataacatgggaaggctcatcgcctggtttggaggcactattgtttgtaaaaggtataactgccctgctgacactgtacatacagcacggcatggctcgactcatgcccagagagaattaagctgctgaccctgtaagggagagctggccttgcagaccagggaatgcagctgcaggcgtgggagtggcagagccggagcaggcagccgagacaaagacacacagtgtaagagagctgctgagtaaaaccatctttcaccggcctatggcctcccaagtgttctttcagctacctgccacccatcaacctactcccttcagacctcagcatgggctggaaccagacactgggcatgacagcctgttgatgctacctagacctgactagacaagacagtactgaattggatagttcacataaagagcagaaacacttgccactgtaatcccaaggcaggcacccataggaaacagaggtacctggaagccataattcctaaatggacttcccaggcttatagcatgaactatctccagccacctagcactagcctaactggtaagcccagataccaccagctaatgggcaacatccagaaacttcactctcctaataccaataaggatcctttggtttaaaaagaaccacccttcccacccagagcatagttgtgtgatgaatctagtcccctactttacagttaaacttttctactcactgctcaatccttgctgtcattgtctttattttctctttagcaacaccattgcttttttttgggtgggtggggacagacctctctccttctgtcacccaggctggagtgcagtggtgcgatcttggcctactgcaacctctgcctcctgggatcaagcagttctcctgcctcagcctcttgactagctgggattacaggcgactgccaccacaccgggctaatttttgtatttttagtagagacggggttttaccatgttggccaggctggtctccaactcctgacctcaaatgatcagcccgccgtggcttcccaaaatgctgggattacaggcgtgagccactatgcccggcccaccattgcttttttgattttcctaaactctatctacacgtttgttaataccctccttaccaaattatcctcgattacccattttgaatgtgctttttccttttgtgactctgcctgatataaaaatttaagaattgtttaacaccagggaaattggaggttagaggattaacatacaggctagagataaatatatgagagtttgcagcatagcggtcatagatgataccactaaagtagatcataaggaagtatacagaaaagcaaagagttacaacagaaatttaaagacaaatacaaatagggagtaaaatgagaaaagttaagagaagcagagaatcaggaggactatcacaaaagtaaagtgtcaaagaccaaaaggatgaaggatgtcaaagaccaaaagatgtgaaatgcctttgaatgtagcaagggagtcattggtttttatctgaacaacccgcacagttcagtgaattaagattggaatcagctcactgacaaccacaacaaattcttcaggacctcccgtatggcaggcactgtgccatagcctcagaagttaaacatgattattacatgttcctgtcctttggagtacacacttttgtgatagctccatgtccaggggtacgggctaaaatggaaggcacagacatgtgatcaacccatagttgtttcatatatatatatatatgtgtgtgtrtatatatatatgtatatatgtgtatgtatatatgtatatatgtgtgtatatatgtatgtatgtgtgtatatata

SEQ ID NO: 710622 - DNA, 621 bp, Homo sapiens
tttttttttttttttttttgagccgcagtttcrctcttgttgcccaggctggagtgcaacggcacaatcttggctcactgcaacctccgtctcccgggttcaagcgattctcctgccttagcctttctagtagctgggattacaggcatgcgccaccatgcccagctaattttttatttttagtagagacggggtttctccatttggtcaggctggtctcaaactcccaacctcaggtgatccacccactttggcctcccaaagtgctgggattacaggcatgagccactgcgcccggcctcatcttcattccttctaacaccacttagcccatattctctttcctctcccaggagccactgatcacagacatcatatgattttatctgtaaacactgcagttccatttatcttttaatgagtactgtgttttggcaaaatcttgattaaccagaatgcctggataatgaagctttctgataaatggaattttgtggtaaatgaagacaatataggagagtgaaaagtgttgcattaggaccctggagatctgtgtttgcttttgagctctgagatcagtttgatgtgtgatcttgagagagttgctaacagacctaaata

SEQ ID NO: 710623 - DNA, 621 bp, Homo sapiens
tttttttttttttttttttgagccgcagtttcactcttgttgcccaggctggagtgcaacggcacaatcttggctcactgcaacctccgtctcccgggttcaagcgattctcctgccttagcctttctagtagctgggattacaggcatgcgccaccatgcccagctaattttttatttttagtagagacggggtttctccatttggtcaggctggtctcaaactcccaacctcaggtgatccacccactttggcctcccaaagtgctgggattacaggcatgagccactgcgccsggcctcatcttcattccttctaacaccacttagcccatattctctttcctctcccaggagccactgatcacagacatcatatgattttatctgtaaacactgcagttccatttatcttttaatgagtactgtgttttggcaaaatcttgattaaccagaatgcctggataatgaagctttctgataaatggaattttgtggtaaatgaagacaatataggagagtgaaaagtgttgcattaggaccctggagatctgtgtttgcttttgagctctgagatcagtttgatgtgtgatcttgagagagttgctaacagacctaaata

SEQ ID NO: 710624 - DNA, 1253 bp, Homo sapiens
tgttttattttttcccaggaagaaacttgcctgtacaattacaaggttctacggttctaaattccattctagtcttccacatcattttgaaggtataatattatttgtcaaagtgggatgatagaagatatgtgtggacttaaaattaaattgttgacaaggaaaaaaactaaaataagaaaataagagagaaaaaatatatgcatgtacagtggttagctagaaatatgccttttaaatatttggcatgtggtatgtgggcctcaatgtgtactattgcactagcttcccaaatattaaaggatgtcttttaaaagaaaaacctcttgctaaaaggttaacagttaaaataaccagagtggcacaggtaccagtcattaagtgaaacctttcatcttcccagaatagtacctgttcccaagccagcttctttgaaaatcacttttctctcctttactatttagtttacagattgtatagtaacaatatagaaaccacaatagtagcaaaaaaaataaagaatatttttaaatgaaaactcacatcctaactctaacaaaacatgaaaattaaacctgaatgcctcccattcctgatatatttttcacctaaatattcagctctgggattgcattgtttttggattgagtggaaattattgcctggtcttgaaatcttccacaatgtgtgtgtgtgtgcgtgtgtgcatgtgtgcgtgtgtgtgtatgtgtgtatgtgtggtgaatatatttctttttgttcagaggaaacattttttcaatatgtatatttattttaggcagattatgctagtaattttctacaaatgtgctttttaaaaaataacctttaatttaaaaaaaattattctttctcagtggcccacaattgttaaaaatgctactaatggagctgggtatggtgacacacayctgtcatcccagctacttgggagactgaggcagggatattgcttaaacttgggaatgtgaaaccagcctgggcaacatagtgagatcccaatctcaaaactcaatcattaaaaaataaaataaaataaaacactactaatagctttttaaaaaatagttcttaaccaattttcctagcaccttcctttcctcagtgaagtatagaaatatgtggtcaggcactgtggctcacacctataatcccaataatttgggaagccaaggcatgaggatcagttcattccaggagttcaagactagccagggtgacataatgagact

SEQ ID NO: 710625 - DNA, 1315 bp, Homo sapiens
ttagctagaaaaaaatgtgaacttcacattcattgattatggaaaaaaatcgtatctaaagccatagattaatcaggaagtggccagtcttttgtgttttatctcaaaggacacagaatggtagttctgaataattaagattatatttaaaagttcccagagagtcagtagtgatttggtattcaatacctccagctrtaccaagatatatttgtatcttttacaaatgggaatgtttaccattgttttgagatattctgagtcatatgtctttctgtattttgaattggttccctaaaagttagttactctctccatctttccagcctagtgctataaatactgcatcttcaaattcttccgcctctgcattcagattcaaaaccttatttgaaatgtataatgcactttatcctttctagtccaaagaaatatctagtccaaattttcagaattgttctatatttctgtcattttctgacattatgaccaaaagtacatcccctcatcctcatatctccatccaatgatgattaggcacaatggaagatcagatatggtcctgagaactttctttcttcatacccttttcagaattctactttttagcttttatcctttactttatcaccacctagcacaacatagcatcctaaggctagttttgcatgctgtgggtatttggtttcttttgttactaaaacaaagcatttttctgttcacagtgggccaatacaattgtccaggccaatacacattctcaatgccatcagacagccatgtttcttcatgctctgaggactgggttggctaccagaggaaatgctactttatttctactgtgaagaggagctggacttcagcccaaaatgcttgttctgaacatggtgctactcttgctgtcattgattctgaaaaggacatggtaagaataaaaaaaagataaaatactactattttaattcatatggctaatcagtgctttccttccgtttctaagtggagaaaacaaacaaacaaacaaacattgtacctatttcagatgtaggaaaatgtcatcccagagaaccatatgatcagcctgaggtcaaaatgagatttaatttaatcttttaaatttgatttgattgcttagcttcaaagaccagaaatccaaatatgctgatcctatatagaatgagtacatggtcagataagctgtcatgcctcaagttgcagcttttgagaaacaggatttactatctacttccccagaagggtgtttaatgtaacaaactcctttgtgctttctttaagaactttctaaaacgatacg

SEQ ID NO: 710626 - DNA, 649 bp, Homo sapiens
gaagtatgaaggaaaaaggagaaggagggcagaggggcagggaaagaggcataaaaagaagtaagggagatrtgtggctttcatttccatgttgcagatatctcaaagaaatgctgctaccccttctataatggaaaatagccaaattaacttctcaacattttcaaatccattgaagaatgaactctgtagaacaaccagctggccaaaatctatggtgacaggcacatgcgagagagaggaaacacatccttgcttatttaggatagacaaatccaacaccagataccagtaagaattcagccaggataattgaaagatggattagggataagtgtagggtggcagaacagtgtgaagctcctggggtctgcagaaattagaaaatcccaccacctctcccaggctatttctctacaaactccaccagactctcacagaaatgactggagagaagcagaaattcttcatgtccattgtgatgcagacctggagagagaaaacagtgataatacagaggtggcggctgggcgcggtggctcacacctgtaatcccagcacttggggggccaacgtggtcagatgacctgaggtcgggagttcgagaccagcctgaccaacatggagaaaccccgtctctactaaaaaa

SEQ ID NO: 710627 - DNA, 649 bp, Homo sapiens
gaagtatgaaggaaaaaggagaaggagggcagaggggcagggaaagaggcataaaaagaagtaagggagatgtgtggctttcatttccatgttgcagatatctcaaagaaatgctgctaccccttctataatggaaaatagccaaattaacttctcaacattttcaaatccattgaagaatgaactctgtagaacaaccagctggccaaaatctatggtgacaggcacatgcgagagagaggaaacacatccttgcttatttaggatagacaaatccaacaccagataccagtaagaattcagccaggataattgaaagatggattagggataagtgtagggtggcagaacagtgtgaagctcctggggtctgcagaaattagaaaatcccaccayctctcccaggctatttctctacaaactccaccagactctcacagaaatgactggagagaagcagaaattcttcatgtccattgtgatgcagacctggagagagaaaacagtgataatacagaggtggcggctgggcgcggtggctcacacctgtaatcccagcacttggggggccaacgtggtcagatgacctgaggtcgggagttcgagaccagcctgaccaacatggagaaaccccgtctctactaaaaaa

SEQ ID NO: 710628 - DNA, 611 bp, Homo sapiens
ccacaaatgtatcagaatggtgattacatggattcacacatatgtcaaatgtattaaactgcacaatttaaattggtgcattttattcactgagctgtaggcaagttttactttagttaaaaaaaagaagtactcacatacaaaataaaccaacatatcaaaacagaagcatcattattagaggggaaatataattatcccttttagttcctataaatacaatccagttcctaataagaaattggtactgtaagttgaaatgtcccaacccacctttactttttgcttgatggttgyttttattagttaataatagttaacataggaatgacatattcagtgtgctgagtaaaaataaaagttaaattacattttaaaaatttaaaaactctgtcaactaagagtcttatgtctggttacactatctgtattatctttcaaacatgacagtgaaatgaacacccctccccgcaaaaaagtaaactgagaaaagccattgatagcagacttactttgtaagaaatactaaaaaatattcttaagagtgaaagcaaatgacactcaacagtaacttgaatcaacaggaataaacaaatattagtaaatatgta

SEQ ID NO: 710629 - DNA, 594 bp, Homo sapiens
ttcatacacatacatattaatggcatatttatttgttctccgttgcttcagaaaagatgattggagaagstatttttatttaacacaccaaaacttctgaatggagagagcccacactcttttggtcccctttgagctctccttgctggaccttctattcctattcacaagctattctttccaaaaaacacaagtagaccacttgctcaggacacccttgtggctgctgagaaaatatcttaaaagctgcaagcacaagataaagagggtaggacaaagtgaagtgctgtcctcgaggctgatgggagtaagactgaatacattctgctaaggttccagggtctactgcctattcctgcttctccaacaggacctggaacaaagatgcctttgaaacaaagacaacaaagaggtgtccactgaacaaatatggcatccactgaacaaatacagccctagcatatgtttagtgagccaggtaatgtgtagccgctgttatagatatcgttttaataggagttcaaataaatgcctttgggtgggtcatgtactgcgcagtttatcactgaccctcatcactcactatgtcttaca

SEQ ID NO: 710630 - DNA, 594 bp, Homo sapiens
ttcatacacatacatattaatggcatatttatttgttctccgttgcttcagaaaagatgattggagaagctatttttatttaacacaccaaaacttctgaatggagagagcccacactcttttggtcccctttgagctctccttgctggaccttctattcctattcacaagctattctttccaaaaaacacaagtagaccacttgctcaggacacccttgtggctgctgagaaaatatcttaaaagctgcaagcacaagataaagagggtaggacaaagtgaagtgctgtcctcgaggctgatgggagtaagactgaatacattctgctaaggttccagggtctactgcctattcctgcttctccaacaggacctggaacaaagatgcctttgaaacaaagacaacaaagaggtgtccactgaacaaatatggcatccactgaacaaatacagccctagcatatgtttagtgagccaggtaatgtgtagccgctgttatagatatcgttttaataggagttcaaataaatgcctttgggtgggtcatgtactgcgcagtttatcactgaycctcatcactcactatgtcttaca

SEQ ID NO: 710631 - DNA, 584 bp, Homo sapiens
tcaaaggctggcagaacaaggtgtcatttatttatttttccaaaaaacttggtaaagagagattggggtgggtgggcagagcaaagatttttaggacattgagactcttctgtataacgctataggaggacacatgtccaaacccacagaatgtacagcaccaacagtgaaaccgaacatcaactatgaaatttgggtgacaatgatgtgtccttgtaggctcacggatggtaacacatgtacctctgtggcacaggacatcgaaagtgaggcaggttccgcatgtgtggggacaggggtacacgggaactctttgtactttctgctyaattttgctgtgaactaaaaaacctgctctaaaaaataaagtttattaatttttaaaaaactgagattcaagagaaacaaagtgatatcttgagaggaaatcaaagtcaggaaagataatggtattttctccttcacggaatgagagtatacatgcacttgcatgtaaatatttttaggctaagtactctaggaggaaaatatttgagagagaaaatacagttggtgcaaaaaagtccttgggaaggacttaaaac

SEQ ID NO: 710632 - DNA, 584 bp, Homo sapiens
tcaaaggctggcagaacaaggtgtcatttatttatttttccaaaaaacttggtaaagagagattggggtgggtgggcagagcaaagatttttaggacattgagactcttctgtataacgctataggaggacacatgtccaaacccacagaatgtacagcaccaacagtgaaaccgaacatcaactatgaaatttgggtgacaatgatgtgtccttgtaggctcacggatggtaacacatgtacctctgtggcacaggacatcgaaagtgaggcaggttccgcatgtgtggggacaggggtacacgggaactctttgtactttctgcttaattttgctgtgaactaaaaaacctgctctaaaaaataaagtttattaatttttaaaaaactgagattcaagagaaacaaagtgatatcttgagaggaaawcaaagtcaggaaagataatggtattttctccttcacggaatgagagtatacatgcacttgcatgtaaatatttttaggctaagtactctaggaggaaaatatttgagagagaaaatacagttggtgcaaaaaagtccttgggaaggacttaaaac

SEQ ID NO: 710633 - DNA, 618 bp, Homo sapiens
ttcagtttttttgtactttttttttttttttttttgagacggagtttcactcttgttgcctaggctggagtgcaatggcatgatcttggctcaccacaacctcttcttcccaggttcaagcgattctcctgcctcagcctcccgaatagctgggattataggcgtgtgccaccatgcctggctaattttgtatttttaatagagatggggtttttccatattggtcagggtggtctcgagctctcaacctcaggtaatctgcctgccttggcctcctaaagtgatgggattacaggtgtgaaccaccgcgcttggccttgtaccatttttatgatgttgagacagggcagggaagaggcactgacatttgtttaacatattgggtgttaatttatcttctgttcttcataagagccctgtgaattatagcctattgcatacctgaggaaactgrgtgacagagttgcagtccctcttcaaggtcacgtatttgtgataggtgcaaatccaggctgttagacgtaaagtgctacgcacttagctatctgccattgagaactggtgaggttttaaaaatcacaaattgtgtgaataccttgattttgttagagtacatta

SEQ ID NO: 710634 - DNA, 601 bp, Homo sapiens
aatgctaatataaatagtgttttacatttatgtatttatttacattaaattaattaatgagacagggtctcactctgttgccaggctggagtgtagtggcatgattatggcatgatttatctttgcatatttggcatctttgtttttgttgttgttgtttgtttgtttttttaaaagacagggtttctatctgtcatccaggctggagtgcagtggcatgagcaatagctgtgcactgcagycttgaactcctgagcttgagtgacatcctcctgcctaagcctcctgagtagctggcactacatgttcatgccggctaatttttaaaaaattgtaaattatttttgcagagatggggtctctctaggttgcccagggtgtcgttaagtgatcacttttggtctcaagtgatcttcctgcctcagcctcttgagtagctaggattataggtgtgagccactgttcctgttttgtttttttttttctgaggtattttggtactgtgctttttggtacatgaagattcatgacagttcttttcccattgtggtttacaccattcttccttaagtgccctactttgtcttacttcacacttttg

SEQ ID NO: 710635 - DNA, 585 bp, Homo sapiens
ataatcaataaacatctagtgattgacaatttcaagaacttgatgaccctaaattgtcatattcaatacaaatttttcttttttttttttttggggggggggggtggagtcttgccctgtcacccaggctagagtgcagtggcgtgatctcacctcactgcaaccttctcctcccgggttcaagtgattctcctgcctcagcctcccgagtagctgagactacaggtgtgtaccaccatgcccagttaatttttgtatttttagtagagatggggtttcaccacattggccaggctggtctcgaactcctgacctcaggtgatcctcctgcctcagtctcccaaagtactgggattacaggtgtgagccaccgcgcctggccagatttttcttgaaaaccagatttttaaggcaaatatgtttagttaaaactaggaattgattgatgtttaaaattttaaaataccctggactgggaatcagtaagcctggaatctcrttttgactctcccaataaattagtagtgtgacatgttaactagccatttagcctctctcgatcttattttccatgtatgttaaatg

SEQ ID NO: 710636 - DNA, 1292 bp, Homo sapiens
tgaaagcaccattgttttcaaattaaaatttgaaataataaaagctagaaaaacttgatatatctatcagcttaccagtattattatagtgctttcaccttgaagattcttatgttattattgattgaagttacattgaaaaaataatctcattaaaagctctaaagatttaaagtcttgtagcatacagaaacctcctctttgaaaactttgagaaaacaagttcagtggcctgtgagtatatatacgacacaggacagaatgaattatcagatccctgagtggtctgtgcttacgtaaatatcaaagaacatttcaaaagtgaatcaatttcctgttctttttattttattttatttttttaaattttatttttctgtgttgtttttttttttttttttttttttttaaacagagtctcgctctgttgcccagactatagttcagtggcgcagtctcagctcactgtaatctctgcctcctggattcaggcgattctcctgcctcagcctcctgagtagctgggattgcaggcccccgccaccccacccggctagtttttgtgtattaagtagagacagggtttcaccatgttggccaggctggtcttgaactccttgacctcaagtgatctacccacctcggcctcccaaagagttgggattacaggtgcaagagactatgcccagccttaaattttatttttgaattgaggtcatgctctgtcacccaggctggagtgcagtggtacaatcatggctcactgcagccttgaactcttgggttccagccatccttccactgcaacgtccctgggaactggcactacaggtgygcaccaccataaccagcccatttcatgttcttttaaaaacagaaatttattatgtatcggtttgtaatggcaagctggtagactacaataaaagaatataattttgcacatctaagaaaacattttcaaaattggcatatcataatgttaatactgttagatactgcagaggatctcaagaaacagtaatgatccaaaaatgccatttttgggagtaccattcctggagaaattgacagagattttagatatcacatcttctgaacattaagactacttagcccctctaaaatatattattgttttattattgctttgctctttctcagccccatagagcttattaattcaataatgcatatatttgagaacactaaacaatattagaaaatatcatatggtattcatgtgatttaattcatctgctattattttatagaacctatcactgaaacag

SEQ ID NO: 710637 - DNA, 642 bp, Homo sapiens
taagattctgttcattttttttccagtctatttttcctctgtagttcaactaagtaatttctatcattctgtctttcagatcactcattgtttcmtctgcctcctccatttactatcaagcccatctgtttattttgagctttttattttggttattgtatttttttactgtgtggaatgtacttaataaacgttggcttttattattgttgttaataaaaataaacataaccttttcttttaattaccagacctacaataccaagtttcactcacataaacactggctgtgttacaagtatttccttattcaattcctttattcctttagttcttttcatacgccaagtgtcctgtcctttctttattttaaaatgttttttatttcaatcgtttttggggaacagttgctgtttaattacatggataagctttttttttttttttttttttttttttttgagacagagtctcactctgtcacccaggctggagtgcaatggcctgatctcggctcactgcaagctctgcctcctgggttcatgccattctcctgcctcagcctcccgagtaggtgggaccacaggcacccgccaccacacccggctaatttttttgtatttttagtagagacggggtttc

SEQ ID NO: 710638 - DNA, 3140 bp, Homo sapiens
tttctttgacaagggtcatagtcagacgaaggatagagtgtaagagggccagagttgagagcttcatggtgccccttcccatgtgattttgagtagcctaactggtcagacttccagcagcctttgcacctttggtggcgtgataactatgatctgtgttggagagggaaatatgataaactaactgatacatacatatattttaatttcaacagatttcacctgtgaattaatttacttcgtgcagtgcttggattaagctggcagaacatgagaaccacatcagcatgatcaaaggcaggcaaggataaaacatgtgatgaccccaactttctatggcttccccccaacacaacttgggtggcaggacatagtgtcaaattgccaccatgtattttaagaaaggactcatatcttttgttaaagagtctgtatcgaaacataaacaaacaaaaaccaggcaccccataattaggtgcgtaattatagccttgatgttcaggtgacttgcctggccagagcaccttaggagaaaggattgacctttatgtttttgtggttctgtcacagaatgtggtgatgctcttctatctttatttgctgcaaaggaccatagcaggatttgttgtctgcttgaaggttgagctggcctgaactacatacatagtattataattgggcagcctcagttackttgataattataagattctattttcagtgtgcaatttttcattggtttttacccagtacttgcatgataggcattattctccctagtttgtaaatgttataggctaaattgtccctcatcccaaattaatgttaatgtcctaacccctagtacctcagaatgtgactgtatttagaggtagagtctttgaagagttaattaaattaaaataaagtctttagtgggggctgtaattcaatctggctggtgtttttattagaaaaggaaattaggacacagaaaggtacagacagaagaccatgcagggagaagatagccattgcaggggccaaggacttggccctctgaaggcttgctgaaaaatcaacgtgtgaaaagcagattaattggagaaaaggcacacacatttatttaaggcttatgtatttaaggctctttgtgtatacaagagcctgcggaatgaagacccaaagaaacaggggaaattgtctatttgtatgcttaggttcacaaagtatggatagcagtatagaaatatgattggacaaaaagggtttgatctagtgctaatagcgtgagtggggaagcccagcaagtcctgcctgtctggattattagcaccctctctaagcttgcattccttccttatgggtgtaggcagggccctctctggagtaggggtcgtatagacctacaatcaaacaaggtaggtcagataatgtcttcgtggacagtttttacacagaaaggtggagggaacagagtaatactttcaggttttatggctggctttagggaaaaggagttctgatatctatgactcatcttggggaagacgaattctagtgtccatggctaaccttggaagagaatgggactgactgacaggagggcaggagaagattggagaaaaacttttgcttctgaggctgcttctgaggctttcattttggggtattgttttctgaaccccaacatctacaagccaaagagagatccttcagaagaaaccaaccctgctaacaccttgatctcagagttctagccttcaaatttataagaaaataaatttctgttgtttaagctactcagtaataaaccttgtacaatgagaggctcaccaacttggtcaaactgacagtgtagcttacttggtccagttccctatcatctgtccccattgatgagcatgttaatgaaatgagtgcattctctgtatccgtatttagatattgtcaaactgcttgccaaaatagtcataacagcttctcccaacaataaagtgtgaacatccccattttaaaaaatacaatccaccaacactaaatattgtcaggatttgtcattttctcctagtctaataggagtgaatggtgtctcacggttgtttgaaatgccctcttaacaaccacagtcacaatggccagcacttatttagcatttattaaatgtcaatttctatactatttgttttacatctttaatctccacagtagttctatgaagtaagcatagtgactatcatctatattttgtagataagaaaattgatatttagaaaggttaagtaaattgctcaagaccagacaactaccaagtgattaaacaagaataaaaatttatcttattccaaagcccatggtgttagtttgggtttccacaaaagcagacctcgagatagagacttggggacaggtagttatttcagagtttatcccaggaggtgcacctggggtagcacatggggagagccagataagactgaggggtcagtacagggtatgttaatgatcaaattacaactgtgggaaattggggatccatttttctgagggctcctttgaggattggtgcacccggggtattcctcttctgtctcctattcctcattggttgagttttgggtggctctgtatcaggactgaccaacctcccttagcccagagaaagccctcaatcacagaaatagagacatcaggtccttgagatgatccattgccactgcaggggaacatagaggtaggccaatgtactgatagtggattgacacccactctgcccctggctatattgccacctgttgccacccgctaaagcaggagatatctctggaccagcttcttcctctcagggcccaaggagaagttactacatttaatctctgtgctgtgtggttgatttataattgatgcgacttttcttatggaagttgatacacagtattgcacctccccaaaattgtctaactttctatatgatggatttttttttgtcatacttattctttcctggttttaattactttgtatgtcataagactcatcacgtagttttgataaagtgagggggaaacaccaattgcttcactgctttcttgtgaagtgtataaaataaatcatctctaaactctgaggtggtttctgtatttataaagatgcattttttt

SEQ ID NO: 710639 - DNA, 1301 bp, Homo sapiens
tttttatctccaacttaaataatgagaaaattgagattcagataatttaagcaacatagtcctaggttgcacagataaattagtagcattctttctactacatcatgctaaaaggaggttacttaacttggtgggcagtgaggtatcatgggagggtttgagcagaaaaatggcatcctctgagctatgccttaggaggattaatatggtagcaatgtgaaggaataaaggatggcagaggcaccaatcagaagactattgtacgttaaaacttgaggtgatgatgctctgagaattagctattttttttaaaaaagttctaattaggcttgctgtgtgtggcagtcattagtgctcttcaccaaataaattctccaaatattctgtttcttcctctcttgggcatagggtaggattgcacctccttgcctccttagatttaggtgtggtcatgttacttcatttggctaatgaaatgtcagtaggaatgacaggtttcaccacactgcctgttttcccttctcccatggcaacaaaraatgatctacagagtattggtccattagtctgggacccagagtgagaatgatgtagaatagatctccttctgagccatgatagacaagaagcatttgtgaaaaataaaacttgtttattttaagtcaccaggattttggacttgtctgttaccatggtataacctaggtaaccccaacagatgtcatgtgttctcctgagacctcgtcatttcaagcactgttgctcaaactttaatgcacacccttatacttagaattcttgttaaaatgtagactctagttaagaaggtatggggtgagacacaagacactatatttttaacaacttcccaaacccaggtggtacagatgctactgattcacacttttgtattgcaagagtctaaaactgcactgtctagaatgatagcaaacagccacatgtggctgtttaaatttaaattcactaaaattgaataaaatgaaaaatccagttcctcagttataccagctccaattcataagctcaaaagccacatgaggccagtggctactgtattcaacaacagagacataacacattttcatcatcacaaaaagttttattgaacagtgctaccatagagcaacatgcagaagcacaaagtgacgattggtcccagcagcttgggagctgagaatggttgagattcaggaaagcagagctgctactatcaaacagaaacccaatagagagagagttgagtcccaggacacaaagctgagatggaatgaaatgtgaca

SEQ ID NO: 710640 - DNA, 1871 bp, Homo sapiens
tcaaatattgaagcacagaacacttaagtaattctaaataagaggtagagcaagagctccaactcagatatctttgactcccaaacaccaatgttttgtactacaagtgtactgcaaaaaagtacaattatggatcctttgaggcaccattcaaattgaataatttaattgatcattttatatgtaataatcagcataattaaaaataactagtaagaattaccccttgagcatattatatgccagacattgctaattttctccaaaaaaatctttctttgacggtttacttccaccctgcttttaacgttgtacacattcatttactctgtgaagtagaatacatgaacaatgaataaatatgagtggaagaaagaaatatgtattatttttattagtgattattgagaactataatatttatatgattagttatttagccatatgtattttcagttagagcatgatagtgtattattgttttgtttatcttcccagcaaagaggacatttcactttgcaatgaggatccagacagctcctcagccttgttttccaagaaagacttcatatgatgtcttttatcaatcttctttctaaatgtgcatgacattttctgagtgaaaatgttttgtcatgtgtagctatggaatgaagaccataatatgatattcattacattgacactatcttactgaagaaatcttgctttagaatttcaagatttttgtgtaatctgactctgacattcagcattaaatcctcaaattctttaaatctattcagtgtgacttagatttgctcctccctatctaacgtttgtattatactggtctgaatgagattgaattaagaaaaacaaataatgtcatcatgtaagaaatttatattgatgacattggttggagaaaccctgaaatactaatacagacacacacacacacacacacacacacacacacacacacacacacacatctttcttttacatcaaagggcaagctttactatacaggaaaacactcttaggcaaatattcatgtacaaatataaaaaaaaatcaaaagaatccatccaatgtccttgatgtaccttttaaaattatacatttttaatacctatcttggaatttagagcatgctattaccttaacaaaaagaaggcaatataatgtgatacatacagaagtagtgcttatcttaagccaaaagagtaagatctactattgaggttaaaacaagttgaaaaaaaatcactatttatggtgaaactatctgagccaatgtaccacagaagcaaagccaaacaaggaaattaaaaatatttttattcaaaatgaaagatttaatagtctatttggtgaactgagcattccaaattatagrgatgttagtgttatttaggggaaaatattttattgacaaataagtttaagcaacgttttattaaatgatgtttaattagtttctttactgctaaacttatcagaacccttaatatgtcaaagcgtattgtagaatccaagaacagaacatatgtgtcttttttaaaaaattcagaacaccagtcactgtgcagagagttttgcctgatcagcaatccacaaaagtcactttgaaacatatgtttatcaccaatattatatgcaaatatatataattagcctaaatcaaactatgtaaaaaaatgcaaaatgtaataacagtacatataagagttcttcatagtgcacaagtacactttctctcacaatttctatcttagtagctgttaatacagtatttctttttataactttcaagaatgttgaatgtttttatatttaactattcaaaaaataagatgttaatgttgtcaatatatggggccttt

SEQ ID NO: 710641 - DNA, 1871 bp, Homo sapiens
tcaaatattgaagcacagaacacttaagtaattctaaataagaggtagagcaagagctccaactcagatatctttgactcccaaacaccaatgttttgtactacaagtgtactgcaaaaaagtacaattatggatcctttgaggcaccattcaaattgaataatttaattgatcattttatatgtaataatcagcataattaaaaataactagtaagaattaccccttgagcatattatatgccagacattgctaattttctccaaaaaaatctttctttgacggtttacttccaccctgcttttaacgttgtacacattcatttactctgtgaagtagaatacatgaacaatgaataaatatgagtggaagaaagaaatatgtattatttttattagtgattattgagaactataatatttatatgattagttatttagccatatgtattttcagttagagcatgatagtgtattattgttttgtttatcttcccagcaaagaggacatttcactttgcaatgaggatccagacagctcctcagccttgttttccaagaaagacttcatatgatgtcttttatcaatcttctttctaaatgtgcatgacattttctgagtgaaaatgttttgtcatgtgtagctatggaatgaagaccataatatgatattcattacattgacactatcttactgaagaaatcttgctttagaatttcaagatttttgtgtaatctgactctgacattcagcattaaatcctcaaattctttaaatctattcagtgtgacttagatttgctcctccctatctaacgtttgtattatactggtctgaatgagattgaattaagaaaaacaaataatgtcatcatgtaagaaatttatattgatgacattggttggagaaaccctgaaatactaatacagacacacacacacacacacacacacacacacacacacacacacacacatctttcttttacatcaaagggcaagctttactatacaggaaaacactcttaggcaaatattcatgtacaaatataaaaaaaaatcaaaagaatccatccaatgtccttgatgtaccttttaaaattatacatttttaatacctatcttggaatttagagcatgctattaccttaacaaaaagaaggcaatataatgtgatacatacagaagtagtgcttatcttaagccaaaagagtaagatctactattgaggttaaaacaagttgaaaaaaaatcactatttatggtgaaactatctgagccaatgtaccacagaagcaaagccaaacaaggaaattaaaaatatttttattcaaaatgaaagatttaatagtctatttggtgaactgagcattccaaattatagggatgttagtgttatttaggggaaaatattttattgacaaataagtttaagcaacgttttattaaatgatgtttaattagtttctttactgstaaacttatcagaacccttaatatgtcaaagcgtattgtagaatccaagaacagaacatatgtgtcttttttaaaaaattcagaacaccagtcactgtgcagagagttttgcctgatcagcaatccacaaaagtcactttgaaacatatgtttatcaccaatattatatgcaaatatatataattagcctaaatcaaactatgtaaaaaaatgcaaaatgtaataacagtacatataagagttcttcatagtgcacaagtacactttctctcacaatttctatcttagtagctgttaatacagtatttctttttataactttcaagaatgttgaatgtttttatatttaactattcaaaaaataagatgttaatgttgtcaatatatggggccttt

SEQ ID NO: 710642 - DNA, 1232 bp, Homo sapiens
atatatatagatatatatgtgtgtatatatacatacatgtttaaatcataggataagttaaacaactgccttttaacattttacctttaatcttctattcttcaagtctgtatttgtatctccagcttgatttttccatgacctaattacttctcaccttagttgcactgataatcttctaatctgtcttcttagaagattgctaccattaatctgtcttttacctagtcatttatgtgatagatttagaaggaaaggagagctacgtcatgtcaatgtttatgaatttttagtggcttctctctgactaccagattaagttgaggcattaatggtcctgctcattgtggattcagttcagcattccaaattactccttaacctttatatcttatactcttaaattactgaactacttatatatcctaagcacactgtatttgtgattttaataatgttgttccatttctctatatatacttccttttatcctcctttctcttgattataacttacacatcctttaagatttatccatttaatttataacactgcagaaagctgcatatttctattaagagacaatacagaaaaaatgcaatttaaataataatctaagtgctttatcagggaggagcacataaaacaatcttcaaaccatgtttagtgtagaatggtaagaaaaggccctcactaagcatgaaattgtgactacaagcatgaatagaagtcagtcagataaaaaggagaaaaggatgttccagtcaatcacaaggaatagcatgttcaaaggcatggtctgtagtctagagaaaacaaacaacaaacaaacaaacagatgttcctggatctgcaagtaatttagtagacttgtagcaaaatttctgagttcagatgagaaacatctaatgaygaaactggagatataatcaagaccctattgttgagagtttaaatcccattccaaagagtttgaattttaccctgagttcagagtatggaagagttttaggataaaaaatatagcaattaaatatatgcttctagaatcaatctacggagacaaaactagtttggaagatttttgtctaattaactcaagtacgttggttattccgattgggtaaatcagaggttattaaagaggtgaaagtaaaagtgtttcatgattggttggacatgctgtgtaagtggcagaagagcaatcaaggagcaacacagacctctggcat

SEQ ID NO: 710643 - DNA, 621 bp, Homo sapiens
tgcttagagattttgagttgtatgaatggttttaaatattcctgcagagcataacaacacagccgacagagaagcctcagccccctgcttggcacagctgcatttattacatgccacattaggaataaaagagcaaatttgaattaaattatcaaaaagaagggatcatctctttttctcacattgctgcacatttttagctcacgtgtcttggtaaatatgtggtcaactcttctgagataaktacggtattaccttggcaaataaaatatatcattaaaaatgaacaaaatttaattttacattcaaggttttaagataaatagattaatagcattaaatttatgtatgttttaaaattcatcagtaatttttatgccatattatatgtgtggcttctgaagaaatattttaacctcatttaatttttcagcttgccctgatacctctggttgaagtcaccatcacctctcacccatattattgcaataacctcctaactgggctcttcacctgcactcttgccaccctttaatctatccttaatagagtagctagaatgaactggtaaaatcgtacatcagattatgtcagttgcatgcacaaaacactccagtgatg

SEQ ID NO: 710644 - DNA, 1386 bp, Homo sapiens
tgtacagtgtatttattaattttttatctcacccttccactaaaatgtaagttccactgatgcatgaatttttgttttccttgttcattgctgtattcccattgcattgtataaatgtacataaatgaatgtacatgaatatatataatctaaatattagcaccttcaaggctataaaatactaaaataaaattttaaacaaactgcaattatacatattttctcctaattctagcaaaaccagctggtgggaaattttaaaaaaaactgaggatacatatttgataggggaaaatgtttatatagtcacttcaataattttggtcatttttgccactaatctccatcacaaaatggcctatgtagttaattacctaaatctgggtttctgatgccgctgaaaagaagtaaagtaaaatgccataagcaattctaatgaatcacacagtcatagtaaaggagggaaaagcaaatagagttgtttatgtaataacataatgatgtaatagtcaatatttcagacttaaattaatcatttcagagcagcattgacatcattcactaagaatctattgtgtggagtaactgcaaaccattatatcacattaatgatttctattttgactcaacaattagattatgtattatttagagggaaagacctgtttgaacgacttcgcacatagtagggcctcaataagtttacattaaaattgtaatgagcttgataataaatgcaaatcctgtgccaacaagtcaaacctaccccctgcttaaaattctagttttttttctgtcaaagaaaataaaaattactcagattcatagccaatgctcttttcagctagtcttaaattacattccatatctcttataattcccctttaatttccagtgcaacaacaaaattaaatgcttcttgcttcctgaggataatttctttgtgtcatctcagtatctttgtgtatactatcccgtccacacacacacacacaaaaatgaaraataaaaaatccctttctattacttctgaaataatctctgataatatgtgactatagcaaaaactatattctcaatgtttcctaatcttctcaataaaactgtcctccctacttttttaataatccaaaaaaattataatatttttaaggctgattacaatgcagctgtaagaaacagtcacttaggacttcaagttcttaagaatctatattttgaaacttcagtatcaaattggatgcccacaggtatctgttgaactaaggagatgataaatttatctcaacacttgaagaatatttccagagtaatttttaaataaatttttttatagcttagatggacatttttaacttatgtatcaggtgattcagaaagaaaata

SEQ ID NO: 710645 - DNA, 621 bp, Homo sapiens
aaaaaggcacttaaaaataaaaatcttgcctattttgttatttttttwaaaaacttattatatactttcctgtgtataaagagaacatattgaacatcatttaaactgtcatagataatttaggcagaattcatattattgtcttatgatctgatacagcaattacgataaatgaccttacactgtgctgtgtttgtggttctgttttggttttgtgtatatttttcatactttgcctcgatgcttacctgtaggctgttatattaatattttacttctttcattgaaactatttgtctttcaatttactttaattcaatttggttttatgttgctttttaaaaacacaatcttaatttatttctagtctactaacagctgagaaaaggctgttagaaatacatgtaaaacaagattccatagctatgaatgggaacctgaatggattaagtgcttgggaattagtctgcatattgagtgatatgacttacgactcttcaaaagttttcttgcttcttactccacatacttggtatttctacaaggtatatttggagaattattgaaggctacataggtgagttgtcataacataagagggccaattttagactctatcca

SEQ ID NO: 710646 - DNA, 630 bp, Homo sapiens
tcagcctcccaaaatgctgagattacaggcatgagccatcacacctggccaacagttatttttctttactgcaagaaccttacattgtcatagtagaaaagattagactccatagattaaataaaaacataaaatcatgttaccccacatttagagatagccactaatagccttcagatatattcctccagggcctttttaatgaatctcgatgcagggatatatatgctcccaagtccttcaactttctgtggtcgcctgttctttgacagccaaacaaaatgtcttggtcccatgccacgtgctgagggacatcaagccttcttctggtaattttccaatccctggttcagctgaatccccacatccrtttcctaaagttgctgtctgctctcttctctgctttgtccctgcaccctctactttgtctccatctatctcctcctttgtccccaaaggtcaccaagtactaagtggataacagattcttctttactggagttcgggatcaagaaggtgacccccaaccaagcacaatgtgggagatgacataaggctcagcgctggccattgctgccagcaatggagatttcttgtgtacttctgcgtccaaggtcttggcctgctgcc

SEQ ID NO: 710647 - DNA, 626 bp, Homo sapiens
aaagaaaaatccacaaagccaagcacctgtgatcccagctacttaaagaggcagagacaggaggatcgctgaagtccaggagttgccaccagcctgggcaacacagtgagactagtcccttaaaaaattttttttcaaaatgtttttaacccacgtacctctgcacaggctgaggcatcatttgaaacaaaattgggattaacaaacatttcaggggaatcactgctaggtagattatggaatccactgacataccgatgttaccgaaagaagwtgatctcatgtgccgacatggaaaaaatcacctggatacgtaaaacaaaaaggtacagaccaccatgtgtatggaatgtctatgttcacataatcccatggaaaaactgggaaggacacacaacaagccattcagttgtaggagaggggaagtttctacacactgatcttgtatcctgcaaacttgctgaactcactaattctaaccatttagtagatttccttgggatttcttacctacagataaagagtcttacttcctccttttgggaggagagatttttaatttctttcacaaccggttctccaacttggcttcacattagcatcatctggtaagcttttaaaagccc

SEQ ID NO: 710648 - DNA, 626 bp, Homo sapiens
gtattatttggtggtaatagacctttactgtttagcctagcctgaaattctggatgggccactagtaggaatctaaggaaagcagaccttggtgtcaagctctctagttgggcttggttgctttctgtgttctaaagttgattggtactgtttattgtgttccatggtctggtgagaacactggccggactctgtagtgaggtggaactattgcctgggctttgtaataatctctgctgggacagggttgcatattgggcaggttgtcttcctgkctgggcagtgctgttatttggaatctgtagttggacagggttatgtgcttggctgtaaggctgggtgaggtctctgggattgatgctcaaccacacagagtgggcagggccaaaggctatgctccacagtttatatgtagacttggacttgcctcccagcctagggtaggcataagcaggcaccatggattgctggtcattacttagcaacttgggttgggtgagaccagatgctccctctgtgggtaatcactaacctgttgttgcctcctagtctggggaagactttgtttattagctgatacataatatgggtacatttttatgagggtatatgtgatactttgatac

SEQ ID NO: 710649 - DNA, 626 bp, Homo sapiens
gtattatttggtggtaatagacctttactgtttagcctagcctgaaattctggatgggccactagtaggaatctaaggaaagcagaccttggtgtcaagctctctagttgggcttggttgctttctgtgttctaaagttgattggtactgtttattgtgttccatggtctggtgagaacactggccggactctgtagtgaggtggaactattgcctgggctttgtaataatctctgctgggacagggttgcatattgggcaggttgtcttcctggctgggcagtgctgttatttggaatctgtagttggacagggttatgtgcttggctgtaaggctgggtgaggyctctgggattgatgctcaaccacacagagtgggcagggccaaaggctatgctccacagtttatatgtagacttggacttgcctcccagcctagggtaggcataagcaggcaccatggattgctggtcattacttagcaacttgggttgggtgagaccagatgctccctctgtgggtaatcactaacctgttgttgcctcctagtctggggaagactttgtttattagctgatacataatatgggtacatttttatgagggtatatgtgatactttgatac

SEQ ID NO: 710650 - DNA, 920 bp, Homo sapiens
tctgggtttaaatctcagccctagtatttgctgatcctgtgaccttaggcgtgtcacataatctctcagacagcagaaccwctcttgaaggactgtcatgggtgttagtgatattgtgtgcgaatgcctggcacacattgagtgatcgctgagatttagtgactgccagcttgtctcaggtgcccaaacaacaagatccagtgaaaatgcacatatcctcctttgcctgtataccacatcgtttttaacctttgtacatgaatgactctagttaacgctcatgcattacagatacaatcagttctctccaccacacacactgactgttttgttccattattatctagctacaaaataataatctttaacaagaaatccaaataagtaagagtgtgtgtgtttgtgtgtttgtgtgtgcgggagcgcacatgggagtttttactgaagatttgtagcatcattgaagaaggttctctctgtgccatgctcctcattctactaaagacccttgtctggcactttttatttccggagtatttactctatccactaggctaagatggaattagaaagtccaagtctttttttcaagaagaaaaatgtggaataaaaattatgcaagtttcctagactcaactgaatgttaaaaatggacaatgattcttgcagaaaggaaataatctaattggactgaaagtatactcagccataaaaaacattaaaatcacatttttttgcagcaatatggatgaagctggaggccattatcctaagaaaattaatgcagaaacagaaaaccaaatatcacatgtccttgcttgtaagtgggagctaaacactgagtacacatagacacaaagaggggaacggtagatactgtggcttacttgaaggtggaaaatgggaggaaggtgaggatc

SEQ ID NO: 710651 - DNA, 2113 bp, Homo sapiens
tgctttctgccctttatctttcttcttcctacttggcatgtgaatgcaatggctagaggggtaacagagatgataccgcaaagaggatgaacacttagatactccctcagatggtggaatagaaattgaaaggaacccagttccttgatgattcccttcaagaattgttccatctcaagattacccaaattctacttatttaagaaaaccccctagttttttaaagacactatttattagcatttttgatacttgcagccacatgtcttcactaatatatttgtccaaagtcatgttcacaataagtgagagaggttggttttaaatttaggcttcttaatatctaaaacttgtgattttactaaataatgtaaagaaccatgggcaaggaatacaactggatacttctgtatagagaacccactcattaagtctttaatgaccctcagatatgctttgtacagagaaggcggcataaatggctgattggtaagccagcttccccatgtccaaggctgcatggttccttgactaagagcccaggattaccctacattatcagcatctcctcaggcagggaatgagatgcttctggcctggtgtaatgagctgatgaaatatacaaactgtctcctgcttcttgtcaaatgatttccaacctttctatagcaaggtgtccttttgttttttattaactttgcaaagtacaacatgttttgaaagatttttgtctaaaaaactacacttaacataaatattgaatcactttcccctctacatttaatcaaatgcacatatagcctctaatcatagtttccgatctccgtgtccagggttagctccctgagttggttctaatttcagtaaaaaataagaatactttggttcacatgtgtatcctcaatgtctgttagtattttaaggataatagtaatgtcccatagattcctgggttgtctttgaagcctcctgtgagtctggggactctgctggggacccaggctgggcatacctgctctagagtttgatggtccatattccaggaagctgggtggttgtcccacaagaaaaggttrtagaagaggcttctaggcagaagacagggttgattctgctgtggattcctcttagtgccccatgttactttttagcgaggctgaccccatgataggctgatctttgttgtgccaggcctatttggctcctcatgctcacacctcccacttggactcaagccaggcctggaccctgaaaacccaatcatggagcattttatgagccccatctgcaaaggtaagtgggatctagaattggtcgtgcttaggtatccaacctgcccactttgtgccctgtggattgctctgtagctttcccctcctgcccttcttatgcttatcatgttcatgatggttgagttctgttggaaaaacactcactgagctcctgccatgatccagcatagcactagatgccagtctataaagatgagtaagttcccatgtttatcatcgaacttctgccttgatttctggttggtaatcaggttttcctcatttaaaacttaatgtagaaggatttatgagacatgacatagttcatgccagcctccccctaccttccacttgagttagacccctcttgttctaccccccactgctgatgggatcctgatacagcccaggtagattatctaccatctcaacattgtagatcctgcctttctgcaggatggggccctgttgccacatccttcccaccagatcgagttcctatgtttccctctcctatgtgactgtctctcccattaaactatgcacttctagagggcaggggtatcccagcaccatgctcagagcacagtgagtagtaggtactggtaactatttgttgaatgatgaatggtgagtgctgcatgcagaggggagatgagaagctaggaccctgagaagtctggaaatggtgtaggttggccactgtagatgaccgtgatgtcacctggggtggtgatatgggatgaagggaagactgtggaccagataccactgtcatcatcagactatcatgagagtgagtactaatcaggtggtggttagggaaagcagcggcggggtgg

SEQ ID NO: 710652 - DNA, 1238 bp, Homo sapiens
atctctatctctacaatctttatgtgctcctaagggatataaaaagattttatgttaggttttgttgttttcattctttatttttttaaccataaaatattacacatgcagatacagtaagtcattgtttccttgmctatatatttatagaaaattactaaaaatctagtattaaaaatactataaagccaaaatgccagcttttctttgaaagccacattaactgtgtcctaatcagtttttctaaatttcagatatttaaaaagaattaaatataacatctttaataacatgtataaagccatttcaaagactgaaatcctaactctcaaatttcactaaattaaattttatctaaaaccaagtaagttaaacatattccactgtacattaaaaataagatatgcaaagactccccagtgtgtgcaaatgataccaataattaagaatcacatttcgagctttaaaacacttctatctaaaagaatccaaaagtgtgagtaaattgctttgactgctaacatttactttctgtagtactttctctccccttttcatcctagctctcacccccacaccaacacacatacataaaatagatcatttaggccagtggtatttcagtacatcgcccctcctcctccacttagacagtattgccttttatatctatgtggaggttcccatggcaacactcacttacaccaatactatttccaactgaaatgagagaatccaaaatctaaatgcttcattactaaataacatataccctaacaagtaagaattgtttttctcattatcattatttttcaatgtttttagatttctggaatttcagcaaaaaaatcattttaatattatagaaataactagaaaaacagtcattgtaggcaactatatgtatgcatatcattacatgagatttgtatgtgcttactcttactgcataaaattgatatgctgagccaagaaacctcaattataattatgaatagtaagtataatttttactagtccagtttactctatcaaatttgatttttttttttttaatgttggctacatagctcacaaaagaccctggtgagaaattctaacacaacaagccaagaagcaattcatggacagcaggaggcaattccagaacacaggcataatctataaagagaaacctctacagctttttgatgttaaataagtagaaatattagcatacaacaaagctaagaagcaga

SEQ ID NO: 710653 - DNA, 1079 bp, Homo sapiens
taagtcaaaagagttttaaagtgttagctattagtagagtgactgccaatattattgttattgttgatataactacttggagttcgtctatcccttttaatgcctgttattttcaccttcccaaggagaaggccaccacttgcatagagtgtgcagcagccctctttgtaccctttgcagagctcagcacagcgcctcctactgggtggctaagaatgtgaaaaagtgaatgaacactgcccatctcatgaatatatttcctcataatatcaaatagtcacttagtatagtcagtaacttacaataataaaaaaaataaagaagacaggtactattggagaaatgtactctttttttttcagtctttttaatctttttttttttttgatagagtatcactgcaggctggagtgcagtggtgcaatctcggctcactgtaacctccgccttccaggttcaagaaattctcttgcctccgcctcctgagtagctaggactacaggctcgtgtcactgcrcccagcaaatttttgtatttttagtagagacagggcttcaccatgctggccaggctagtctggaactcctgagctcaagtgatccacccaccttggcctcacaaagtgctgggcttacagacatgagccactgcaccaggcctgtctttttaatcattgacaatctcattatttaggtatattcaagttttaacaaactcatgtttaggataatacaatctgtctaaaaaatttgttagacaggcaaggaaatgtctctccttgagtaacagcaaaactctgttttgctgttttgcctttccaaatagcctatcccaatttttggagcattttgcattttatattctttaaagttcacactgcaaacaattcatgactctttttccttcagctccactcgggacagcaaatgttcatgggtgtcctctgttgggccagttcctgaactcattctttactctcaaagggctcactgcctagaggtagaggggaattataatacaatatagtaagtactaaggcagagaagctaactcttcctgaataggaaaagggtagtgaa

SEQ ID NO: 710654 - DNA, 1079 bp, Homo sapiens
taagtcaaaagagttttaaagtgttagctattagtagagtgactgccaatattattgttattgttgatataactacttggagttcgtctatcccttttaatgcctgttattttcaccttcccaaggagaaggccaccacttgcatagagtgtgcagcagccctctttgtaccctttgcagagctcagcacagcgcctcctactgggtggctaagaatgtgaaaaagtgaatgaacactgcccatctcatgaatatatttcctcataatatcaaatagtcacttagtatagtcagtaacttacaataataaaaaaaataaagaagacaggtactattggagaaatgtactctttttttttcagtctttttaatctttttttttttttgatagagtatcactgcaggctggagtgcagtggtgcaatctcggctcactgtaacctccgccttccaggttcaagaaattctcttgcctccgcctcctgagtagctaggactacaggctcgtgtcactgcgcccagcaaatttttgtatttttagtagagacagggcttcaccatgctggccaggctagtctggaactcctgagctcaagtgatccacccaccttggcctcacaaagtgctgggcttacagacatgagccactgcaccaggsctgtctttttaatcattgacaatctcattatttaggtatattcaagttttaacaaactcatgtttaggataatacaatctgtctaaaaaatttgttagacaggcaaggaaatgtctctccttgagtaacagcaaaactctgttttgctgttttgcctttccaaatagcctatcccaatttttggagcattttgcattttatattctttaaagttcacactgcaaacaattcatgactctttttccttcagctccactcgggacagcaaatgttcatgggtgtcctctgttgggccagttcctgaactcattctttactctcaaagggctcactgcctagaggtagaggggaattataatacaatatagtaagtactaaggcagagaagctaactcttcctgaataggaaaagggtagtgaa

SEQ ID NO: 710655 - DNA, 2737 bp, Homo sapiens
tctcacttagtgccttcctccttttctacccttctagctagtggaagtgagtggaaggtacggatgcagacaacattgaaagagatcacattctaggaatgcaatgttacagcccaattagttcatgagaaagcatggttggaagatatattgtttctatttgtatgctatagaattctgaacggtaaacttaacatgatcagggaataagttattcctcacattttctgcatcctctgggtaagacttacaatcgtggtcatcatcaatgaagcacaaaaacagcctttgagagaattactggaaaccaayatctacaaacagtgcaatggatgatgaagtgacacaagtcctattataactagacttttacaaaatggtactagggaagctcagaagcaagatcatcaatattatatcaatatatacaagttctgaagagtcatggcagagtaagtaatatcagcattgctagcttttttcacagtgggagttgtgatttagtcagacccggtaattctgaaaatcaaaaagtaaaagaaaaaacataaagagaagtttcttgcacctgaacagatggtgcctggacactgaaaagctttcacacacgttaattacacaagaaaaaatatgtaagattttcttctctacccttttctctaaatttttaataactggctcttgaggtttgtaatattattttaaatcaaactggttataaaaaaggagaccttttttaatttttggcctggagaataacacaacttaggagcagcccttctggccacacaaggtactaagcaagtgatgtgtacggtctattttcatctttacaacagccacagtaaccggttattatcttattacatagaaaataaaataatttgcctatgcacacagttagtaaatggttaaacggtgactcttattctggacaacctaatttttgtttgtttgtttgtttgtttgtttttgtttctgagatgggggtctcactctgtcaccctggctggagtgcagccgcacgatcttggctcactgcaacctctgcctcctgggttcaggtgattctcatgcctcagcctcccgagtagctgggactacaggcacgtgccactacacccagctaatttttttattttttgtagagatgggttttcaccatgttggttaggttggtctcaaactcctgacctcaggtgatccacccgcctcggcctcccaaagtgctgggattacaggtgtgagccacctcacccagccccaggacaacctaatattaatgtgtataccaaccttggaagagtaggacaaatctattattccaccttagttgtgtttcctagataagtgttaccttttttcttgttgtagaaattattatcattattatcatcatcattatcactaataaaatattttttgaatattagctatgtgccagacatcattctaagcatttaatatgtttaatattcattaaacaattttaacaaacttacttatgaggtgcctattaataatatttccaaagcacagatggaaaaattgaggtatcagagtgactaggtaatttactcaaggttactcagctatcagtgacagacaggggaattaaataagactctggctctggagcccaggaaaatcagaaccaaattttctagtttggttccttttacctatatttatgaactaaattgggacttggacataaaacatcacaaaccacaatatatgactggaagccatctgtgattttactctggtgaataaatttattttcattggcataatctaaggacttagcattgctggttttaatggcacctctggttcctatagatacagtggtcgaaagggtaagctttgcagctggttgcagtggggtcaccatgaaaacatccctaaggggaactcatttaattcaagaacatgaaatcattcattcatgagtacatcatgcacatgaccatatatatgtgcctgtaatacatacatgtccatcccattcctttatttctttttggcttataatagtaatgttctttctatgtaggaatggagaattttataattgaaaaatgtatatttagccagagcacagacataaggaatatatcaaatagcacattcactgtagctagcttggcttaaatatagcacgatgccaaatttctagccaaaaattgataagagtagtcaataagccaagcatgcagaactatttgtaaaaatttagataattgactaaaaatttcaattttcattcctacgcctgcaaccatgttccttaacatttaatgtttttctgtcactacttagagtaacaaatatttcacttcttcacactcttagcaatagcatacctacaaaatagctgaaataaaaatgtgatgactttaagatttacaagtgataattatctttttaaaaaaattctcattcagagcaaaatttccgatttgttttctcctatcaactccttgttttgtttcaagatctcactgatcatttgcaaatggtgaaaagcctctttagcccactctatatttcatcccaggtgactgaactctgcattttgatttccaaatgggcagatagatgtactgtaatgagaacacaaagaagcaggtttataactcagtacattatggcaccaggttcaaagcaaaaggaagcagcaatgccgtaagcctttgtttctgactcatgcagataaactccagcattttcc

SEQ ID NO: 710656 - DNA, 2369 bp, Homo sapiens
gatttgtctgatcttaaaatctttctttgagctagcacataaagttttcatatatttttctatgcaattggcttttttcctactttttagtttcacataaaatcttctraatgagaagtagtgcagtgtaatggttaggacagagactctagagccagatttttcttctaattgcagttctgccacttaccatctgtttaaccttgaaaaaattacttaacgtctcactgcctcagtttccttatgtaaaatcttcctttcttatgttgttttacctgagaattaaatagtttaattcaaattcatttaaagggttagaacactgtatgaaactaggtaagcactcaaaatatgttagctattattaactatttctcaaaatcctcataattgctggaactcatgtgttttgatttgctatgtcttactctcttcaaaaatagtaacttcttcatcttgttagtattgtataaatttacagtatagaaatgagatatttattaatttttgcagtgtattatttccgccttcccttggccttcagtcagtttatattttgaagtagaaagcatcatgaattgttctcacttataagtgggagctaaatgatgagaacacatggacacaaagaggggaacaacagatacaggggccaatttgagggtgaagggtgggagaagatagaggatcagaacaaaggactattgggtattaggcttagtacctgggtaatgaactattctgcacaacaaagccctgtgacatgagtttacctatataacaaactgcacatataaccctgaacctaaaatagatgttaaaaaaagaaagcatcataaattcatagttttaatattttcaatgcaatagccctatctttgttattttttaaattacatgcgatttactgacttattatttattgtcctgatttttctagaattctatttattgatattaatattgccatttaaaatttttgtttgattggtatatttttacccaatattgtttttatacacctctagttactgtggcatcttttaggagtgggtagcatatacatggccttttattaatgtcaaacacagatgttttgagctttatccatttacatttattgtaataattggtatgtttgctatatttttataattcttaatatttgttaatgttttatttcctttattttttagagataagggtcttgtatattgtattatgagaaatgtatcttagttttaatcttatccaataatattatttctgttttaacatgacttttgttcaatttattgttaacatttaaataacacaagactatatttctatgtagcagaattaagaatgagattatttcaccatttactttcaaaccgtttgattactattttgattatatccattatatcttttaaagaacatgtggttttatttttaaatccaatctaagcatgactgacttttctcagataattcaatctattcacttcacatttattgtctatttattttgtttgcattttctgagtttttaaattattgcattttgaatttttaattttctcttttttctttgcatttcagttctcctagtgtttgcaaataataattttaatttattttctaatagttttctctaaatgtatgaatacaatttgaactaaatgttcaactaaaaatttatatcaacttttgtttcctcgcttaagagagtaacataatccaaacttgacatcctgtagtaaaaaacagctagacaaaatacatgaagtaactatttttagacattggtttataagcagagttggactgtgatttcaaagagaaggtagaaacaaatgaggttagtcctgtcattgcctcagctttctgtctgaagccagtttccaaaatgggccacaaggaagggtaatctcaaacagtacccagagatttcactgagttgaggagacagattagtattcagtaatatggaggaggctaaaatttgagaggaaaagtactagaaagaagctgactataaaaagaaaaagattccaaaagctgcttggtattcctttgaatcctcggctgaatactaatctgtacatgcataccataaaactccatgaggccagacaaaaattaacttgtggaagaagaatattactagagaactataagcagaaatattgtaaaaactcacacagggctgagaattattcaagttttcctttgccagaatggagatatcagtggattaaacatagtaatagcaaaagctgctgtggcaggtagaacactggcctccaaaaatgccgatgtcttagtttctagaatctgtgaatatgttaccttacaaggcaaacagaaactttgtgagtatg

SEQ ID NO: 710657 - DNA, 1602 bp, Homo sapiens
gggacaagatacagaggtggaagacagtgatatgcatgatcttgaccttgtgtaggcctaggataatgtgtgtgtttgtgtctttgttttttaataaaaaagtgtaaaaactaaaaggttaaaaattattttacatagaaaaaagcttgtagaataagtatatggaaaagaaaatagttttgtacaactgcaaaatgtgcttttgtttcaagctaagtgctattacaaaagagtcaaaaagttaagaaaaattttaaagtttatgaagtgaaaaagttacagaaagctaggattattttataattaatgaaaaaacattttaaataaattgagcatagcgtaagtgtgcagtgttgataaagtgtacagtcgtgcataatgtcctaggctttcacattcactcagtactcactcactaactcacccagagaaacttccagtcctccaagctccattcagtgataagtgccttatacaggtataccattttaaaaatcttgtatagcatattgtcactgtactttttctatgtttagatatgcaactacttactattgtgttacaatggcttgcagtattcagaacagtagcatgtggtataggttcgtagccatatagcccggtgtgtagtaggctgtaccacctaggttcatgtaagtccactctatgatgtccacacagtgatgcaattgtgtagtgatgcatttctcagagtgcattcctttcatttagcaacacatgactgtacattgagtgagaaaagtaaaccagaatttgattaaatatgttaaaaacatttaaaaaatcttagattaccagtagtaaactacttgtgaactccccacagatggcaggtgaggatcccagtgaaggtccctcaagagtcattttcactagcttcatagacactcagtctccagacagcattgtckggtagttgggagtcacccaggatccagtggaggggggtgagacattctcgttgagtgtccttgagttatgctccagggaaagggcctcactgggtcttttaatgaaatgaaaccctgacccttcaaggctggcaactgaagggccttatggcatgtgggtgggtgtggtcctgaggcttgttctctaataaccacattcccctggcagatttcacacatgctgccctgcatgtaggacattagtagaccagtcaagatggagcttcgttgaacacagaccaactcttttcaaatacttcctccttcagcaggaggttcctctggctgtcttgcccacctcttgctccccttcaggctttgatgcctggtgccttgtgagctactgcaagaacaggagcacaccctgtcctggtggtggtggtggtgggtgctacaatttttcttcagcatccaatcccagcttggaataataagagaaaatgatgcctgcccctgtgggttcttacaatgtcccttccagggcacagacatcctgacctctagcaggatggaaactgtagctaccctgaagaaaaacagcagccttggcctttgaagggatgacaggacagtggcagggtgacagagtttgggaactttgtgattctgctagctgagtatcttgtcttac

SEQ ID NO: 710658 - DNA, 2192 bp, Homo sapiens
agaagcattatttttaatgttaattcattcaatatttttctttcaaaattgacaacaaaacaaagatagcttttgccatctccattcaacattgtactgaagccacttgtcaatataataagacaagaaaaacaaattagaaggtatgaaagttagaaaacaagaaaaatatgatttataggttatatagttgtctgcttaagaaatccaagcaaatccaataaagtatctaataaagagagcttagcaacattgttgaatatgagatcaatatgcaaaaaagccacacccccttagaaaaaataatttttgaaaggcctctcacacatattgatacagaatggctgagctcctggctaaaccccaccctcaagcctagaacccctaacctaagtgaaaacagccgatcctgaagggctgggcttctggctaaacctcaccctcaagcctggaaccttggccctaagtgaaaacagctgaccccatttttcgtcccaaataattgccttttggcccaccctgccccctatcctgtgcccataaaaaccagaccagctggcagaaaaaaaaaaggaaaagagaagcacaagcagctgactggcggggatacaagcagccaagcagcaagcagagaggcaactaagcatcagaggctatggataaatgtggctaacttcagagggtgcagtttcagaagggtgcccagcaagagacagctgggcttcagggaaagatcacctttttcccacaccatcccctttccagctcccctttcaccaagagccacttccactgctcaataaagtcttctgcattcatcttttaaacagttcatttgacctgattctccctggacaccaaacaagaactcagggtcaaaaagggcaggtgcaggaggctgtcaccctgacccttcactgagctgttaacacttagccatccatggactgcaggctgagtgaaatgagccactccattcctgtccatgaagggggtcaaggtcaagggaacaaataccatctcaatattagcaacaaatttttttaatttttttatttttttttgagatggagtctagctatgttgcccagactggagtgcagtggcactatctcggctcactgcaacttctgccttccaggttcaagtcattctcctgcctcagcctcctgagtagctgggattacaggcatgcaccaccacgcccagctaattttgtatgtttagtagagacggggttttaccattttggccaggctggttttgaactcctgggctccagtgatctgcccaccttggcctcacagagtgctgggattacaggcatgagccactgtgcctggcccatattagcaacaagtctttattataactttaatggaaactaacaggaaagtacagtgcctatatggaaaattataaaactttattaaaatacataaaaaggcctgaatatgcaccgtgtttgtggatgcaaaacctccaatatatgtaatgcaatctactcaaaattgcaatagggtttttcacagcccctgacaacttgattctaaaattcaagggtaagcctaataagccaagaataatcaagagaattctggagaagcttaaggagggaaaattttccatccagctatcaagataatctaaggcttctttctcaaattaaaaaaaataataataatgtggtattggtgcagtggctgataacgtagcgaaagagaattcagaaacaactacatgtaaatgtccaagtccatgtaaattcatacatcaaagatgatttgcttaaaacaacaaagctgaaggccaccctacccaacttccaactatacaacagggctacggtaaccaaaacagcatgatactggtacaaaaacagacacatagaccaatggaacagaataaagaactgagaaataagactgcacacctacaactatctgatctttgactaacctgacaaaaacaagcaatggggaaaggattcccttttcaataaatggtgctgggataaccggctagccayatgcagaagattgaaactggaccctttccttacactatataccaaaattaactcaatatggattaaagacttaaatgtaaaaccccaaactataaaaaccccttgaagactgcctagacaatatcactcaggacataggcacaggtaaagatttcatgatgaa

SEQ ID NO: 710659 - DNA, 948 bp, Homo sapiens
agagtggtgtaaagtcttttctttgggaagccaaagagcattttccctttgagataaaatgctaaattattttctgcagactagagcattctttattgtcccttctatccatcaagcatccttctcagatcttgtgcatctgggctctaaatatttccctacctgactgcttttgttcatggtcattctcaaaatggagagcttctcacttactccttactgctgtctggctgtgcaaaccctaatcattcttcaagctccaacctctgtcctcactccgtattgaagtttccctgtccgcccagccctyagctctcttcagcctctgaactcacatagtgttattgtgtgaactgtttgtcgattaatcatgtatagcactgccttgtgacatcttctgtattatatcattattaaactcacaggatttaacttttcaggtgtcaaacattttgttatgctttctgtggcaggaaccaaatgttatactgtttttgaattgtcctcagcacatgtcagagtctgggacacattgtctgggtgagaatgtattgattgacatagagtactcagggcaaggggactgaattatttcaattacttatttatgagaaaatatataagaaattatcagtggagttatatttttatatgtattaatatatgtatatatacattcttagatattatatttttattgaatgccaagtttaagaaaacaagttaattagagaaaagggaaatggttggaagaatgctggattctggagtatctctgtgaaatcaaaggcagtgagtcttctggagtattttatgtggaaactaaacagttctggcaaatgcaggcagctcgtgttctctgtcagcatctccttcctgtttctctctgccgagctgcctaaactgacttcctgtttgcttcttagaggggacagctccacggtttga

SEQ ID NO: 710660 - DNA, 948 bp, Homo sapiens
agagtggtgtaaagtcttttctttgggaagccaaagagcattttccctttgagataaaatgctaaattattttctgcagactagagcattctttattgtcccttctatccatcaagcatccttctcagatcttgtgcatctgggctctaaatatttccctacctgactgcttttgttcatggtcattctcaaaatggagagcttctcacttactccttactgctgtctggctgtgcaaaccctaatcattcttcaagctccaacctctgtcctcactccgtattgaagtttccctgtccgcccagccctcrgctctcttcagcctctgaactcacatagtgttattgtgtgaactgtttgtcgattaatcatgtatagcactgccttgtgacatcttctgtattatatcattattaaactcacaggatttaacttttcaggtgtcaaacattttgttatgctttctgtggcaggaaccaaatgttatactgtttttgaattgtcctcagcacatgtcagagtctgggacacattgtctgggtgagaatgtattgattgacatagagtactcagggcaaggggactgaattatttcaattacttatttatgagaaaatatataagaaattatcagtggagttatatttttatatgtattaatatatgtatatatacattcttagatattatatttttattgaatgccaagtttaagaaaacaagttaattagagaaaagggaaatggttggaagaatgctggattctggagtatctctgtgaaatcaaaggcagtgagtcttctggagtattttatgtggaaactaaacagttctggcaaatgcaggcagctcgtgttctctgtcagcatctccttcctgtttctctctgccgagctgcctaaactgacttcctgtttgcttcttagaggggacagctccacggtttga

SEQ ID NO: 710661 - DNA, 628 bp, Homo sapiens
acctttctgtttatcacacactcctctttgagcattgagaagactgaatgtaagcatgatgcttaagaattgagagaccgaggttactgaatcttagaattgaaatgattatttgaaatgattccagagaaagaaaggtagatgtcttgggcatggctgtcaagctgaagacgaaagtgttcattctttcagttayaggcagtcatgaaaatgaaaaaattagacagatgcaaagagtggaccaataagaatgctgaaaattacagatgtggtaaatatttatggattggctttctcagctctctaccaagagctgaaagtcaccataagccaagctgtaagagcctgaccatgtaagattcacaggtagaattcctaggggagaaacacaggttagatgtatacatttgtgtctttccagccctacaaattaatccctagcactttctccaaagccatatacatatatatatatatatatatatatatatatatatatattttttttttttttttttttttttttttttttttgagccggagtctcactttgtcacccaggctggagtgcagtggtgctatctcggctcactgcaacctctgcctcctgggttcaagcgattctcct

SEQ ID NO: 710662 - DNA, 628 bp, Homo sapiens
acctttctgtttatcacacactcctctttgagcattgagaagactgaatgtaagcatgatgcttaagaattgagagaccgaggttactgaatcttagaattgaaatgattatttgaaatgattccagagaaagaaaggtagatgtcttgggcatggctgtcaagctgaagacgaaagtgttcattctttcagttataggcagtcatgaaaatgaaaaaattagacagatgcaaagagtggaccaataagaatgctgaaaattacagatgtggtaaatatttatggattggctttytcagctctctaccaagagctgaaagtcaccataagccaagctgtaagagcctgaccatgtaagattcacaggtagaattcctaggggagaaacacaggttagatgtatacatttgtgtctttccagccctacaaattaatccctagcactttctccaaagccatatacatatatatatatatatatatatatatatatatatatattttttttttttttttttttttttttttttttttgagccggagtctcactttgtcacccaggctggagtgcagtggtgctatctcggctcactgcaacctctgcctcctgggttcaagcgattctcct

SEQ ID NO: 710663 - DNA, 628 bp, Homo sapiens
acctttctgtttatcacacactcctctttgagcattgagaagactgaatgtaagcatgatgcttaagaattgagagaccgaggttactgaatcttagaattgaaatgattatttgaaatgattccagagaaagaaaggtagatgtcttgggcatggctgtcaagctgaagacgaaagtgttcattctttcagttataggcagtcatgaaaatgaaaaaattagacagatgcaaagagtggaccaataagaatgctgaaaattacagatgtggtaaatatttatggattggctttctcagctctctaccaagagctgaaagtcaccataagccaagctgtaagagcctgaccatgtaagattcacaggtagaattcctaggggagaaacacaggttagatgtatacatttgtgtctttccagccctacaaattaatccctagcactttytccaaagccatatacatatatatatatatatatatatatatatatatatatattttttttttttttttttttttttttttttttttgagccggagtctcactttgtcacccaggctggagtgcagtggtgctatctcggctcactgcaacctctgcctcctgggttcaagcgattctcct

SEQ ID NO: 710664 - DNA, 1337 bp, Homo sapiens
agctggacatgtttttatttcttgtgaggccacctagaaataggactcatctaggaaatgcatccaaaaagtcaatgcagtcaggccttcattttccttctgcgggccagacgcgacactagaggttgggatttgaagatgaataggccatcatttctaagcttgaggagcgcacactgagtcgttaacttgaagaagtaaacaaacatttatgaaactgtgtgacaggagctaccacaaagctgcacatgcagggatggaaagaaatctctgagtcacacttagggcatgggggaaggcttcctggaggaggggacgcttgccctgcattgtgaagcacgcttatggggagctgcaggtggctccacctgtctggagcaaaaggtggggagtggacagtggtgggagatgtggccagaacaacatcacaaagaccttgtgtgcagagctgaggagtgcttgcctctagtggcagattcctggtttcctcagccttaacctctcaccctctctaggtttccttccttgttttggtggccactggagggttcaaggcagggagtgacctgaagagaactggaaaatcctgtgaggcgacatccggctgaactggaaggagcgagaacaacgaggaggcagccgtgggttggaggtgagaagccaggagaggctgcagcagggtggtggcagtgagaaaggacaggagggaagactgtaaggaaagaagcatctgtgacactgagagtgagtgaagggggatctggggaatccttagtcttcaggcttggctcactgggagctagtggtgcgctttgtcgacagagagaactccagagaagtagaccttggcacaggtctttggatgatgggacggaagttgagttgtaagttgtagggataagagcccacagactctataagtatgaaagacgttagaagcaaaaagaaggccagggaatggtcaaacaagactaggatgtggggaataggtcctctgactacacacacaatttctctgaggagacgccctaatggactttggaggacatagcttggctgaagaggcatccctgaggttccagagttgaagtcttgggtgtccrtcatagcaccaacagtataaactctaggacaagttgaccacactttgagacatcacctatgggctccagtgaaacagctggagctcggttaaatttgattccattttttaattttaggattttttttaagttcaaaaaaattagttggctgggcacagtggctcacgcctgtaatcccagcactttgggaggctgaggtaggcaggcagatcacgaggtcaggagatcaagacc

SEQ ID NO: 710665 - DNA, 1222 bp, Homo sapiens
tttttttttttttttgcatccaaaaaggtcctaacgtaaggcttattcccattccacaagcctttgcttccaaacagaagtattacctttcttgtttctacatccagagtattgatatactactctggggtagaatatttatgggtatactcgtggattgaatatttatcacctggatttcattcaaatccctctgtaagtacctctatcctgttgacaaggccccttgtacatttgggtttaaaggcaaaaccaagacagtaaagtgagcccaaggagagctaggctgcccagaggatgagttccattcttagaataaattaggtccttttgcagcttgcattgttctttggggcactcactaggaaactgttcaatatgagagagccaggcttaccttgcagacaagcacatgctgaggcctattgtggcccccagaaagtgagataataaagaacaggaaagaccctggtaacatttccggcaaattagctggcctcctaatagcctgagtaccaaagagccagggaataggggctggctgggaactaactacarattttgatcccctaatttatgtagataagagaagcaaataagttctcatttgagtcagcgaacagtctggatcttccagtgatttgagtgtagacgaataggaatatgtcctactcaggtgtattaagagatagctggatcaagatgggagaaggaaaagggtcgagttgatgccagctctgtaaattattttcacttaacagcaaggcttagtctcaggtgccttcctccccacattcaggttgtggcaagatggtttccccagtgagccatccaactctagtaatatatatacaagttgttatattcatttacagtaagcagcattaacccttgaggttagcctcaagggcaggtatgatgtgagaagaaaaaaaaaaaatctcaggaagaaactcatcatttctaccctgcacaaagacagtgatgtatttgctatactggatctgagatgttgattctatttctttttgtatttttctagctctgagcttcatccaatttgcaacaaatctattttaaggcaagaagttgattatatgactcaggctaggggtcagagatcctctctggcagaagacaatgagtccagctacagcagaggatttgacatgacgtacactgagtttgactatgacttatgcaatgaagtggttgacgtgac

SEQ ID NO: 710666 - DNA, 955 bp, Homo sapiens
ggcctgaaggtgcagggcggggtggtcactggatcctgcagcgagtggagtccagctaatgagggctgaaaccttccatggagggacaccgccaactcacagagaagaataaataccctacctgctggtgtctcccatgagctaaccaacaggatcacacggagcaaagttgcatgctgtcacggtctctgtgtacaggtcctcgggcgaaggaagaaggagaagggggatgaggccctggaggaacacaagtaggatgactggacagggactgacccaaagtcacaccacaaatgggtggccactggacctcagcatcccttaactactgcaccatcttgtctttggatatatatttttttccttcctttctttttcttttcttttcttttcctttcctttcttttctttctttcttttttttttttttttttttttgagacagagtctcactctgtcgcccaggctggagtgcagtggcgcgatctcggctcactgcaaactccatctcccgggttcacgccattctcctgcctcagcctcccragtagctgggaccacaggcagctgccaccacgcctggttattttttttgtatttttagtagagacagggtttcaccgtgttatccaggatggtctcaatctcctgacctcgtgatccgcccaactcggcctcccaaagtgctgggattacaggcgtgagccaccgcgcccggcctcttttctttcttttttgagatggagtctcactctgtctaccaggctagagtgcagtggcacgatcttggctcactacaacctcctcctcccaggttgaagcaattctcctacctccgcctcccaagtagctgggattacagacatgcgcaaccacaccctgctaatttttgtatttttagtagagatggagtttcaccatgttggccaggctggtctcgaactcctgacctcga

SEQ ID NO: 710667 - DNA, 650 bp, Homo sapiens
tttcggatctgagcttccttctcttcacctttgagctctccgtttgtcacacaaaaggggccgattctgtttgtttctatttgtctgtctgagtttgagctcgggtaagtcattctttcctgttcaataatggaggaggatctgtgtttccctgcatcctagaatggtaaccccctggctagacaccccatagcttatttggcagagtctcagaggaaacgaaggccagggtgcattcagaacatcccagtattctccatctagaactctacctgcttatatgtttaagaactatggccgggcgcggtggctcacacctgtaatcccagcattttgggaggccaaggcagggcggatcacttgaggtcaggagttcaagaccagcctggccaatatggcgaaaccccatctctactaaraatacaaaaattagccgggcatggtggcaggaacctgtaatcccagctattccagaggctgaggcaggagaatctcttgaacccaggaggtggagattgcagtaagccgagatcgtgcctctgcactgcactccagcctggcaatacaccgagactccatctcaaattcccagtgtcagccaggcacagtggctcatgcctgtaatcccagcactttgggatgccaaggca

SEQ ID NO: 710668 - DNA, 659 bp, Homo sapiens
tctcaaactcaaaaactaatgttcttaatcactgccccatcctcgttatgatgggacaaccctctctcccaattcctggattcctgggacacaccaccaaactccttccagtgcaggcgctcagcaagctacaagaaagtaagacagcctttcatcatcaaaacagaggaggcygggcgcggtggctcacgcctgtggtcccagcactttgggaggccgaggcgggcagatcacgaggtcaggagattgagaccatcctggctaacacggtgaaaccccgtctctgctaaaaatacaaaaaattagccgggcatggtggtgggtgcctgtagtcccagctacttgggaggctgaggcaggagaatggtgtgaacccgggaggcggagcttgcagtgagccaagatcgcgccactgcactccagcctgggcgatacagtgagactccgtctgaaaaaaaaaaaaaaaaaaaaaaacagaggagaaaagagagaaactttaaacccaacgaagctcagaagttctgtgtcagggctgggtgaggtggcacatgccagttatcccaatgctttggaaaaccaaggtgggaggccaggatttgaagaccatcctggacaacacagcgagaccccatctctacaaaataaaaattaaaaaatta

SEQ ID NO: 710669 - DNA, 659 bp, Homo sapiens
tctcaaactcaaaaactaatgttcttaatcactgccccatcctcgttatgatgggacaaccctctctcccaattcctggattcctgggacacaccaccaaactccttccagtgcaggcgctcagcaagctacaagaaagtaagacagcctttcatcatcaaaacagaggaggccgggcgcggtggctcacgcctgtggtcccagcactttgggaggccgaggcgggcagatcacgaggtcaggagattgagaccatcctggctaacacggtgaaaccccgtctctgctaaaaatacaaaaaattagccgggcatggtggtgggtgcctgtagtcccagctacttgggaggctgaggcaggagaatggtgtgaacccgggaggcggagcttgcagtgagccaagatcgcgccactgcactccagcctgggcgatacagygagactccgtctgaaaaaaaaaaaaaaaaaaaaaaacagaggagaaaagagagaaactttaaacccaacgaagctcagaagttctgtgtcagggctgggtgaggtggcacatgccagttatcccaatgctttggaaaaccaaggtgggaggccaggatttgaagaccatcctggacaacacagcgagaccccatctctacaaaataaaaattaaaaaatta

SEQ ID NO: 710670 - DNA, 659 bp, Homo sapiens
tctcaaactcaaaaactaatgttcttaatcactgccccatcctcgttatgatgggacaaccctctctcccaattcctggattcctgggacacaccaccaaactccttccagtgcaggcgctcagcaagctacaagaaagtaagacagcctttcatcatcaaaacagaggaggccgggcgcggtggctcacgcctgtggtcccagcactttgggaggccgaggcgggcagatcacgaggtcaggagattgagaccatcctggctaacacggtgaaaccccgtctctgctaaaaatacaaaaaattagccgggcatggtggtgggtgcctgtagtcccagctacttgggaggctgaggcaggagaatggtgtgaacccgggaggcggagcttgcagtgagccaagatcgcgccactgcactccagcctgggcgatacagtgagactccgtctgaaaaaaaaamaaaaaaaaaaaaacagaggagaaaagagagaaactttaaacccaacgaagctcagaagttctgtgtcagggctgggtgaggtggcacatgccagttatcccaatgctttggaaaaccaaggtgggaggccaggatttgaagaccatcctggacaacacagcgagaccccatctctacaaaataaaaattaaaaaatta

SEQ ID NO: 710671 - DNA, 659 bp, Homo sapiens
tctcaaactcaaaaactaatgttcttaatcactgccccatcctcgttatgatgggacaaccctctctcccaattcctggattcctgggacacaccaccaaactccttccagtgcaggcgctcagcaagctacaagaaagtaagacagcctttcatcatcaaaacagaggaggccgggcgcggtggctcacgcctgtggtcccagcactttgggaggccgaggcgggcagatcacgaggtcaggagattgagaccatcctggctaacacggtgaaaccccgtctctgctaaaaatacaaaaaattagccgggcatggtggtgggtgcctgtagtcccagctacttgggaggctgaggcaggagaatggtgtgaacccgggaggcggagcttgcagtgagccaagatcgcgccactgcactccagcctgggcgatacagtgagactccgtctgaaaaaaaaaaaaaaaaaaaaaaacagaggagaraagagagaaactttaaacccaacgaagctcagaagttctgtgtcagggctgggtgaggtggcacatgccagttatcccaatgctttggaaaaccaaggtgggaggccaggatttgaagaccatcctggacaacacagcgagaccccatctctacaaaataaaaattaaaaaatta

SEQ ID NO: 710672 - DNA, 368 bp, Homo sapiens
tctaacgtgattgatgtattagggaacaatattaatgtgttagggaagactattgatatgctggagaataatattaacatattcaagaatgtgaatttcacatttgcttatgtgcaatttyttgcatgtaaaggcagaaaactgcacccagctgtgccaaaacacaaaagaatacacaaaatacacctccaatattagtcagctacctcattctccatgtgtgatttgagccacatgcacccacatctgttgctgtaacttcccctctgatatcaaacaacccttcttcccccattcacaataactcactggcggagtgcggtggctcagacctgtaatcctagcaattctgaaggctgaggcaggtg

SEQ ID NO: 710673 - DNA, 603 bp, Homo sapiens
aaggattttcaagctcttaaagatagcatgggattaggcatgttaactggaaagggaaaacttatgtcctgggggtgggaactatactatcacaagcagtcctcacaagttaggtcactattggtaagggatgtttcacttctgaagacaagatagcagctgtgaattatgcgggagatagtccaggccaayacttctttcatattcaccaggggctctggaccaagtcttcctttttcattcaagtgttctcattcttttatctgaagcctagttctttcaggcatgtgcaatgtcaggaagcggggtggggcttggggagggaagaggaaaagccaggttccactcaccaaaaataaataaataaataaataaaaatttttacaaagccactctggaaaccctgcttgagtacttgaggatagagtacagcttctctattttcccacccctttccgtaagcttcctggaacagaaaaatctgcaaagcaactgaagaaggcagttagaggttgtgaaatggtacattcaggaaagaaaggacaaataagaattttcaccagataggtgggaggtattcaaagtgagagcactttaaggaaa

SEQ ID NO: 710674 - DNA, 560 bp, Homo sapiens
caggctggtctcgatctcctgaactcaagcaattcgactgccttggcctcccaaagtgctgggattataggcatgaactaacactcctggccactctaatatatttttgccaaagtatttccttcccattaaatgtctctsccatccattttgatccaacccactgctatcacaaccatctaggctttacctcctaatacctgcaatgaccttcaagctgtttcttcctgattccaacttctttctgctcagattcacaccatacttcaatccttgattcatttacataactcccagatttctttatattccaatcaaatggaacatgaccttatctaaaccttgactctgaatttgagtacacagcccagagaactgctgagttcctgtggttttggctgtgacggataataccatgaagggctaacaggaactcaattctgtggttatttattcattcatttatttttatttatatttattatatttatattacttatttttatagtattattatatttatttatttattatttttattatttatttttgagatggag

SEQ ID NO: 710675 - DNA, 560 bp, Homo sapiens
caggctggtctcgatctcctgaactcaagcaattcgactgccttggcctcccaaagtgctgggattataggcatgaactaacactcctggccactctaatatatttttgccaaagtatttccttcccattaaatgtctctgccatccattttgatccaacccactgctatcacamccatctaggctttacctcctaatacctgcaatgaccttcaagctgtttcttcctgattccaacttctttctgctcagattcacaccatacttcaatccttgattcatttacataactcccagatttctttatattccaatcaaatggaacatgaccttatctaaaccttgactctgaatttgagtacacagcccagagaactgctgagttcctgtggttttggctgtgacggataataccatgaagggctaacaggaactcaattctgtggttatttattcattcatttatttttatttatatttattatatttatattacttatttttatagtattattatatttatttatttattatttttattatttatttttgagatggag

SEQ ID NO: 710676 - DNA, 560 bp, Homo sapiens
caggctggtctcgatctcctgaactcaagcaattcgactgccttggcctcccaaagtgctgggattataggcatgaactaacactcctggccactctaatatatttttgccaaagtatttccttcccattaaatgtctctgccatccattttgatccaacccactgctatcacaaccatctaggctttacctcctaayacctgcaatgaccttcaagctgtttcttcctgattccaacttctttctgctcagattcacaccatacttcaatccttgattcatttacataactcccagatttctttatattccaatcaaatggaacatgaccttatctaaaccttgactctgaatttgagtacacagcccagagaactgctgagttcctgtggttttggctgtgacggataataccatgaagggctaacaggaactcaattctgtggttatttattcattcatttatttttatttatatttattatatttatattacttatttttatagtattattatatttatttatttattatttttattatttatttttgagatggag

SEQ ID NO: 710677 - DNA, 600 bp, Homo sapiens
aacctctgtaagtaaactcttccttaaaaatgtcttcatttgcagcctgggcaacatagcaagatcccacctctacaaaaagaaattcaaaaaattagccaggcatggtggtggtgcacacctgtagtcccagctacttgggaggctgggtcaataggattgcttaaactcaggagttgaaggttgcagtgagctatgatcacaccactgcacttaggcctgggtgacagagcaagactctctctctctctctctctctctctctctctatacatatayatatatgtatatgttcatgtatatatatatgttcattcaaaccatttgggggtgagttctgttcccttccagcaccctctcatatacagacatttttccaaggtgatacatgtggctgtcactcattttagggacaggtcatgatttgctaattcattcctttgttgatagacatttatcatattttcaactgaattatatattagaaacaatggtgcagtgaacatccttgtgtgtgagtatgtgtgtgtgtatatgcttatgagtatttctgtagggaagactcctcaaattgaaattgcttgaacaaaaggcatacat

SEQ ID NO: 710678 - DNA, 1837 bp, Homo sapiens
tgtttttgaagtgggcaggtccccaaagcccttcttttcccatcactgtgacatctgcctgggcttgagtgctacggacttttcagtcttcctagtggaaaaatgtgacccaaaaactctttttcctttatcaaaaactttctgtctaaacacagctgggcaggcactcctgttttaaagttatttcggggtccctgaccctgccctggtggcttggcctgagactggagagagtgccatcctctgggtcctctccaagtcctactagtctttgaagtcctcaaaatgtgcgtgaggaaggcgtttgcctctattccagaatttctgatacaaagaactccagaatccagagcaaatcagcccttctctgaacgttgtaggatggttcagaacccagagaggaccctggtgctgatatctcctcctcttccctttcccctcagcttacttactcccagatgcggcctgggtatgaagtaggcctttcctgagtggctcccaatccagtcctccaagtactcagaggggaagcccgtgaagccgtcatctaagtcctgctccctcacatgaagctgagggccagatagatggagcgactgccaacttcatttcccgacatcattgtgttcagaagagagtgatgggttttgagttagacagtcctgggcttgagacaggctttgtcactactgtgtgagtgtagccacctaatctctctgagactgtgtaaaacaaagatgataaaatctcaccctgttgtgagatattaaatgagccaaagtgcctagcatgatggtgctggctcatatagtgtagtccctggaatggcaaattaacatcacccaggaacttgttagaaaggcaaattcttggacacaaccctcctgatttatggaatcagaaactctggctgtggggcccagcaacctgagtttaaacaatttctctgggtggttctgcggcacactaaggtttgaaaatcactrcaacaaatgctaacttctaatccccttgatgagctttcacgaagtctcacggcttctctagggactccatggtcttcagagtcgttcacagatgaccaaggacagactgtgtcccagaagccaaaatgagagagagagagagagagcacgcgtacgtgcaccctggggcagtgtctcaccgtatgaacaagggatgtaacactaaaagcccattagggggcagtgtttcccgcctgttgtagaaactggtacagaaaggaatatgaagttcctgaaactgacctttgtctattattaccttctctgaaaagtgccagtccatgtattttttatttattttaagtttgtaatttaatttttaattattgtttagtgtttgcatttaattttatttaatcaccacatttagaaaataataagagcaagtttctaaatgggagactgctgaggctctttgcaagagatgagattaagtttgagtttctaaggcagggcatgagctggaaatagcattgctttccttgattgtctctctccttcagggagattctttttctctagtgttttaagtgatcctttgaagtaagtgtggagagtcttgaatggcaagaccaggagctgagtttaagcttgtaatggaagcttgcattgtgggatatataactgaggaagcatatttatcctgaaggtattttgccagaaggtatcacttgacctggaaaaggaatctatttagttcaggaaagataaaaagtttagaggtatgtgaaggaagcacttagaacttgcaagcctgatgtcctatcaagttatgtcttctgggtgacagacaaaatcgcttgtcttatggt

SEQ ID NO: 710679 - DNA, 763 bp, Homo sapiens
caaatatagatgcttagaaaacaaatttattctcaatagctcttgaggtcagaaatccaaaatccatttcattaggggtaaagtcaaggtgtcagagggactggttccttctgaagcctctgaggggagaatgttttcttgccttttcagtttctactggactgtattccttgacttacggcttcttcctccatctccaaagctcatcattccaatcwgcttctgccgtcacatcactttattttactgactcttcctctgtccttcttatagagatcaatggattatattggacacacaaggtaacctctcttatctcaagatcctcaacttaatcacatctgcaaagttccttttgccatataacatactcacagattctgagaattaggatgtgaacatacttgggggcccattattcagcctatcacagaaggtaatatcgaggttgcctaagagtcactcctgggtgggcgtgctggctcacgcctatagtcctagcactttggtaggccaaggtgggtggatcattcgaggccaggagtttcagaccagcctgggtaacatagcaatgccttgtctcttctgaaaatttaaaaattagtggggcatggttgaacgcccctgtagtcccagctatttgggaggctaaggcaagaggatcccttgagctcgggaggtagaagttgtagtgagccacatttacaccactgcactctagcttgggttaacagagcaagactctgtctcaaaacaaaaaaga

SEQ ID NO: 710680 - DNA, 428 bp, Homo sapiens
ctcagcctcccaaagtggtgggattgtcccagcctcccaaagcactgggattacaaacatgagccaccacacctggccaacaataacttttaatttaggattctgttagacccaatcaaatataataaaaagagaagggcctttcctaccagacatctacctttatttttatttatttatttagagacggagtcttgctctgtcacccaggctggagtgcagtggcacaatctcggctcactgcaacctctgcctcctgggctgaagcgattctcctgccacagcctccaagtagctgtgactacctggctaatttttgtatttttagtagagacggggttttaccatgttgtccmggctggtcttgaactcctgacctccagtgatctgcccacctgagcaccccaaagtgctgggattacaggcgt

SEQ ID NO: 710681 - DNA, 3666 bp, Homo sapiens
gcattttaacttttccagcttgccctacagtgtaggtgagaaggagtcaaaatagctggcagtaatcctaaaattattctgatgttttcagccataagtttaaatttgatgcagaaaagaatagggaggggtcagtggaagattactaggaactgacagaaatgatcaccatagaaatgtctttatccttattcttgggtttgtctcattctaatgaatagtttataaatgcttcatttgaatctatagaaatgattcaaataatctgtttgtttttgttgctgttgttattcggtgaaaataacttctaaatttgaatttgggactactgacgttttcagtttctgcaaagttactgagcccagattgtccgctgttcttaaaccttataacaatgctgaatggtagttacggataattattttattagtgaggaaattgagactcagggagttaagtcctttggctaaggtcacctaactaattattgctagagcctgaatttgaacatagaatcttatagctcaaaaaacctctattaatggacctgcatcaaagtttgttactatcaagagatcaaaagttgtttgatgggcatggtggttcatgcttgtaatccgaggactttgggaggctgaggtgggaggattgcttgagaccaggagtttgagacctgcctgggtaacacattgagacaccatctatttatgtctgtttcagagatcacttaaagttgtcctcaaggaatttcaaacaatttattagtggctgccatatagcaagcgcttatgttcggtgccagcaatgtggcaggtctatatgacaaaatctattctgctcttatggagtttatgcattctggtatattctctacaggtataaacactgaaaaggcttagcggtttcttcagagatgaagaaaggagatgacgtagaaaaatatatcagtttcacaaactgagggttgctgtgagggacttactaaaaaactgaaagcagtgcaggcctcagctgtrggcagtgagcagtgcttattgcttcatgaactaagcgacttcagctcctttacttccctaaatctttcttatgtactcctttcttctgaaatgttaagatttcccttgacaaaaaaaggacaaatcctagttcccccgcctgctgttcccgaaggtgtattgtgttacacaggctgggacggcagtatccccaaggagttgaggaataaaaagctttgggaatcatttgcttgcactgacctttatttctcagataggtagatgctgttgcaattcattgttacctaccctgccactgggaacattaaaataagtagatgagtgagacattttatccctggattgtcatttgtctgtaatctttaaaaaaatcagtccattggctgggcgtggtggctcacgcctgtaatcctagcattttgggaggccgaggcgggtggatcacgaggtcaggagatcgagaccatcccagctaacacggtgaaaccccgtctctactaaaaatacaaaaaattagcagggcgtggtgacgggcacctgtagtcccagctactcgggaggctgaggcaggggaatggcatgaacccaggaggcggagcttgcagtgagccgagatctcgccactgcaccccagcctgggtgacagagcaagactctgtctaaaaaaaaaaaaaatcagtcccattgtctggtttgacttgtatttcacatctgtgcatatgcttttgaatggaaaacactgatgttaatgaaaagaaggctaaagaatagaattcactaggatacactgtatgttagtcctttttcacactgctgatacagacacacccgagactgggaagaaaaagaggtttaattggacttacagttctgtgtgtggctgtggaggccccagaatcatggcaggaggcgaaaggcacttattacgtggtggcggcaagagaaaatgagagacatgcaaaagcagaaacccctgataaaaccatcagatctcatgagatttattcactaccatgagaacagtattggggaaaccacctccatgattcaaattatctcccactgggtccttcccacaacatgtggaaattatgggagtacgactcaagatgagattgggtggggacacagccaaaccatatcacactgttgtctgatctggcatggcagatcctggtttaactgattaatgtttaagaggtggatcttacaggtctgttctacttgatcagtgacattgaacgccactgatcactcttctttcttgaagctgccttcctccttaatttcaagacagcattttcttctgtctttctagctgttctttctcagtctcttcttctggttcttttccctttgccttacaatattgattctgtctttacccttttttcttactctgaaatactacataacatttctcattcagtcctcaagcttaaaccctgtctgcatcagtgagtctgtattcttcagaatcatctatggagctttttttttttttttaaatagagatttctaggtcccagccaagacctactgaatcagaatttccaggcatgggaccgggcatatatatatatgtaagtctcatcgattattctgaagcatctgcccctgaggaagtaccagtggtaggatactcatggctcccatgtctgttctaacccccacttttttcctgagctccaaacaagtatgtccagctggtttttagacatacctccaaataattatgcccaactggtttttagacatatctctaaacaagtatgtccaactggtttttagacatatctctttgagtttactataggaatcttaagttccaagttccctgtgtggaaaccaaagtccttattttcctcaccaggactaatttttctgttgcctatattgcagtttttggcttttgagtgtcccgtactaaaaatgtgtgagtcacccacatttccttttgttagtttctgaatctcattcctgtgctcattcctggcctcagttcaggccaccatcatatctcccctgaattacatccaatgtcccagttaagcctttgttttccctgttctggtcatttaagtcatttctgattgtaagtcatgttcaggttatgtcagggaaaagagatttgtttattgtaggattatcttctaggtaaagaaaacttctcagcagttacacagtcagaacaggggcagcaactgtaggggtcatgatttaatagggagcattctcactggccactgtggtagtgcatagctacctcatgggctacagccagctcggagatagtgatctcaactcaggagttaatttccaagtcttatgagttgtggcttgagtggtgatagcaaacagtggtgacctgttcttaaagaattacttagagcattcttccctcagaaggagcagtaactggcatgcactgttaagttccttggctcctccttatgccatcaggtctagagtttatcttcctaaacagtaatattgatcatgatattccctgtttaaaatcctttaattctttcttataggaaaacatcaaaactctagcctcattcttccctctttctcccttaacacttctgtgttccagccacattgtacttctcagcctaactatgcatgctatgttctttttatt

SEQ ID NO: 710682 - DNA, 881 bp, Homo sapiens
tatccttatggaaatattaaacagatagggcaaatatatatatatatatgtattatatatataataaatatatatatttatatccccactttcatttatatatatatgtatgtatatatatgtgtatatatgtgtatatatgtatatatacatatatatgtatatatgtatatatacatatatatgtatatatatgtgtatatatatgtgtgtatatatatgtgtgtgtatatatatgtgtgtgtgtrtgtatatatatatatatatatatatatatatatatatatatatatccccactttcattaattaaatggaagaaccaagtagatgaatacttgttatggtcataagaccaagttaatggcagatgtggaattacaacagggtcttcctgcttctaatccagggctatctttcccaaaacttaggtcaaacacttctgtcaactgctaagctattattcttctacacaagcatgaaaatacgcaaaataaaacagaagcagtacagtcacacccccacatccttcagattgaaaactaggaaagtatacattatttttaccttacattaaagagaagccattatgataacataaccatgagaattaggccttctatagaaagtatgtccttaaaacatgctgtgtaaaatgtcacagagatatccaacaatatggacacaaatggtgtctcctcatactactacataagatattaatatctagctgagttcaaaattaaggaaaaggtctaggaggcaaaaaataaggaaatcaaaatgagatatgtcagtaggatttgaagtcacagtgaaccaggggaactcctgacacagatgcgtgacctatgtgctaggatctggcattttaacacctac

SEQ ID NO: 710683 - DNA, 881 bp, Homo sapiens
tatccttatggaaatattaaacagatagggcaaatatatatatatatatgtattatatatataataaatatatatatttatatccccactttcatttatatatatatgtatgtatatatatgtgtatatatgtgtatatatgtatatatacatatatatgtatatatgtatatatacatatatatgtatatatatgtgtatatatatgtgtgtatatatatgtgtgtgtatatatatgtgtgtgtgtatgtrtatatatatatatatatatatatatatatatatatatatatccccactttcattaattaaatggaagaaccaagtagatgaatacttgttatggtcataagaccaagttaatggcagatgtggaattacaacagggtcttcctgcttctaatccagggctatctttcccaaaacttaggtcaaacacttctgtcaactgctaagctattattcttctacacaagcatgaaaatacgcaaaataaaacagaagcagtacagtcacacccccacatccttcagattgaaaactaggaaagtatacattatttttaccttacattaaagagaagccattatgataacataaccatgagaattaggccttctatagaaagtatgtccttaaaacatgctgtgtaaaatgtcacagagatatccaacaatatggacacaaatggtgtctcctcatactactacataagatattaatatctagctgagttcaaaattaaggaaaaggtctaggaggcaaaaaataaggaaatcaaaatgagatatgtcagtaggatttgaagtcacagtgaaccaggggaactcctgacacagatgcgtgacctatgtgctaggatctggcattttaacacctac

SEQ ID NO: 710684 - DNA, 881 bp, Homo sapiens
tatccttatggaaatattaaacagatagggcaaatatatatatatatatgtattatatatataataaatatatatatttatatccccactttcatttatatatatatgtatgtatatatatgtgtatatatgtgtatatatgtatatatacatatatatgtatatatgtatatatacatatatatgtatatatatgtgtatatatatgtgtgtatatatatgtgtgtgtatatatatgtgtgtgtgtatgtatatrtatatatatatatatatatatatatatatatatatatccccactttcattaattaaatggaagaaccaagtagatgaatacttgttatggtcataagaccaagttaatggcagatgtggaattacaacagggtcttcctgcttctaatccagggctatctttcccaaaacttaggtcaaacacttctgtcaactgctaagctattattcttctacacaagcatgaaaatacgcaaaataaaacagaagcagtacagtcacacccccacatccttcagattgaaaactaggaaagtatacattatttttaccttacattaaagagaagccattatgataacataaccatgagaattaggccttctatagaaagtatgtccttaaaacatgctgtgtaaaatgtcacagagatatccaacaatatggacacaaatggtgtctcctcatactactacataagatattaatatctagctgagttcaaaattaaggaaaaggtctaggaggcaaaaaataaggaaatcaaaatgagatatgtcagtaggatttgaagtcacagtgaaccaggggaactcctgacacagatgcgtgacctatgtgctaggatctggcattttaacacctac

SEQ ID NO: 710685 - DNA, 881 bp, Homo sapiens
tatccttatggaaatattaaacagatagggcaaatatatatatatatatgtattatatatataataaatatatatatttatatccccactttcatttatatatatatgtatgtatatatatgtgtatatatgtgtatatatgtatatatacatatatatgtatatatgtatatatacatatatatgtatatatatgtgtatatatatgtgtgtatatatatgtgtgtgtatatatatgtgtgtgtgtatgtatatatrtatatatatatatatatatatatatatatatatatccccactttcattaattaaatggaagaaccaagtagatgaatacttgttatggtcataagaccaagttaatggcagatgtggaattacaacagggtcttcctgcttctaatccagggctatctttcccaaaacttaggtcaaacacttctgtcaactgctaagctattattcttctacacaagcatgaaaatacgcaaaataaaacagaagcagtacagtcacacccccacatccttcagattgaaaactaggaaagtatacattatttttaccttacattaaagagaagccattatgataacataaccatgagaattaggccttctatagaaagtatgtccttaaaacatgctgtgtaaaatgtcacagagatatccaacaatatggacacaaatggtgtctcctcatactactacataagatattaatatctagctgagttcaaaattaaggaaaaggtctaggaggcaaaaaataaggaaatcaaaatgagatatgtcagtaggatttgaagtcacagtgaaccaggggaactcctgacacagatgcgtgacctatgtgctaggatctggcattttaacacctac

SEQ ID NO: 710686 - DNA, 1578 bp, Homo sapiens
atacttcctggtacaagggaaagaaactagtaagataaagctgagttagcttaagaggacatgcaccttaaaatataaaactgtgagctgtgcagaggagattaggatcctgacctaacccaggactgatcttaaatcccccgctcctgcactggaaacttcaggaggaactgaggtttaactttgtgtctcttgccatacagaacttagagcttactgaagagttgtagaatgttgaaacctcaggaacttctgtatgaaggagcaggtagargtctctgcatgccagcaaacatattcttcacaactccaaaaggtttaatgtgctatctgtctttttcagatgcagagtggaagctgacacagaggaagggaactgctcattagtggcagtagctcttctgcaccacagtgcggcgccagaggttagcacctcccttagaagctagcatgcaggagcaatgtatgctctatcaagagacagagaccagggaacggctccatcctcagataccagtgtaatagtcgcaatagttactaataatagttagatattaatatgtcatactattctttgcacatttttataatattcatattttatattcccctttctttaaaatgtgcattgcacaaccactagccattagttgtgtaatatatcaattgagaatctttgcctataaaaagttgactctcataatactgttgatttggttattttattattatatttgaaagttctcaatgtttaaactactttctttttttaagagacttaattctcagcaaaaatctaaggacttcttcttagagagcagtcatgcagtggcgtgaacattttactgatgcccacagaattaatactttcctctctttctttttggccaaatatatttgtttcagcagagaaatgttttgctttatgaaaaggtactttctgcaaattcaagcttataaataatcttggtacttttttgttgttgtttggttttgtagagatggagtctcactgtgttgcccaggctggcctcaaactcctaataattcctggactcaagtgatccttccttctcagcctcctaagtagttgggactagaggcacaccaccacacccagctaacagtgctacttttaatgttgaatcctcctaatatatttaagctaagagtcagctttcagatatccaaccaccaagtttttcagtgctttggttttcctccataaaataagggacttggggacaagtaactttatgtttctttataaaaggttttaaaaatttaagatattaatctaaaacatccgtgtagaatggacacacacctacatcctgctccagatactgtgatgtcacatgtgggaagagagactccctgtcctttcaactctgtcgtgtatcatctgaactctgacatgcaatgcaatcagaaagcaaaaactgaactgatcttgcagggagaaaaactgaggtctgtcttgggtactgatgcttatataccctacttcttaggggaaagagagatacagaaataaggatgattttagagggatagtaaatgacttttacagttccc

SEQ ID NO: 710687 - DNA, 585 bp, Homo sapiens
tgtttagcacctaaagcacagtttatactcaaatagttgataatcaaatatagttatgtatcaactattagttgatactcaaatgctcattgtgttttcaatatgcagcaaatgattcattattcattcaactaatactcattaaattgttatcatatactaagtggtgctctagacaatgaaaatgaagaataaaatgataatgaaggattagcctttttctattgtgaagcttacgttccagtaggagagacagacaataaataagtaaaccaataaattaacacaaacacaataaataatatgaagtcaataaaaccaaaaataagtaatagttctagggtaagtaactttatttggatgtgctgagaaattctcacaggagattaacacccgagctgaacctggatggaaaaaagagccaagcrtttgaagacatgatgggtgatctaacagatttgaaagttaaagggtctttggaggaagaataagcttgctacaactgaaaagcagaaaaggaaagtgaaggaaggaaaagtatggtaagatagatatgaggtgcaagagatagaggcaaaagacaaa

SEQ ID NO: 710688 - DNA, 640 bp, Homo sapiens
ttactgtgtgtcagacactacagataccaagattaatgtagttcttgtgttaaagagctcacagcctaactaataggagagccacacgtatwtatgagttaagagtactgttcagtgttcaaaatgcaattgtggtacagaagggatagctcatttagcctggaggctcaaagtcatggcaactattaataagcagtgaaagtacagttttttccttgagactatgacctactttggaataaaaggggaatatggctacaaccacacagaagagtgaaaagtacccaggatgagttaaatttgaatctgactctgccactttcttttattattattttttttttttgagatggagttttgttcttgttgcccaagctggagtgcaaaggcatgatctcggctcaccgcaacctccgtctcccaggttcaagcgattctcctgcctcaacctcctgagtagctgggattacaggcatgtgccaccatgtctggctaattttgtatttttagtagagacagggtttttcatgttggtcaggctgatctcgaactcctgacctcaggtgatccgcccgccttggcctcccaaagtgctgggattacaggtgtgagccaccatgcctggcctgctctgccactt

SEQ ID NO: 710689 - DNA, 640 bp, Homo sapiens
ttactgtgtgtcagacactacagataccaagattaatgtagttcttgtgttaaagagctcacagcctaactaataggagagccacacgtatttatgagttaagagtactgttcagtgttcaaaatgcaattgtggtacagaagggatagctcatttagcctggaggctcaaagtcatggcaactattaataagcagtgaaagtayagttttttccttgagactatgacctactttggaataaaaggggaatatggctacaaccacacagaagagtgaaaagtacccaggatgagttaaatttgaatctgactctgccactttcttttattattattttttttttttgagatggagttttgttcttgttgcccaagctggagtgcaaaggcatgatctcggctcaccgcaacctccgtctcccaggttcaagcgattctcctgcctcaacctcctgagtagctgggattacaggcatgtgccaccatgtctggctaattttgtatttttagtagagacagggtttttcatgttggtcaggctgatctcgaactcctgacctcaggtgatccgcccgccttggcctcccaaagtgctgggattacaggtgtgagccaccatgcctggcctgctctgccactt

SEQ ID NO: 710690 - DNA, 640 bp, Homo sapiens
ttactgtgtgtcagacactacagataccaagattaatgtagttcttgtgttaaagagctcacagcctaactaataggagagccacacgtatttatgagttaagagtactgttcagtgttcaaaatgcaattgtggtacagaagggatagctcatttagcctggaggctcaaagtcatggcaactattaataagcagtgaaagtacagttttttccttgagactatgacctactttggaataaaaggggaatatggctacaaccacacagaagagtgaaaagtacccaggatgagttaaatttgaatctgactctgccactttcttttattattattwtttttttttgagatggagttttgttcttgttgcccaagctggagtgcaaaggcatgatctcggctcaccgcaacctccgtctcccaggttcaagcgattctcctgcctcaacctcctgagtagctgggattacaggcatgtgccaccatgtctggctaattttgtatttttagtagagacagggtttttcatgttggtcaggctgatctcgaactcctgacctcaggtgatccgcccgccttggcctcccaaagtgctgggattacaggtgtgagccaccatgcctggcctgctctgccactt

SEQ ID NO: 710691 - DNA, 414 bp, Homo sapiens
tgtattttaatgtcatatcaacaatttattttcctgaatctagtaagtcaaactattaaactgccctctraaaattatttcatagtacatttacactatttgaataattgaaagatcaatttacatatgactaacctaaattgtccaatgaagtattatttttatgaattttgctaatcacacagatgagactatttgatgggattaattatttgatctcagatatacttaaaaatgaaggagattctctggaagaaaattttcctacatttttatattatttccctcccattgttataagtaggctattggttctatgcatgctccataagtggatgtactgctgtatatgaatgtgttatggctggggtgaagagaatttagaagtaagctaaacttgccaggccaagtcca

SEQ ID NO: 710692 - DNA, 1993 bp, Homo sapiens
tagattctgcagtttaaactatgaattttaaccaaaactacacactaggtttcataaagagtgtgaaagtttcctcttggtagtatcagatttttttcagcattcaatataagcatacagtcaattatattgttaacctacaaatatatacaatatatacaaaacgtgcattttgcacatttttgargtatcttatgttaaagtcatcactctaactttttctcctaaaacaattttattttaattcaacagcatatattgagcaccttcaatgtaagttattgtgcaaagtcccactggattttgtaaagatgaagaaaacacggcctgtgccctgagggagctttaaggtagttggtaaggaagatagaaatgcatgaagccacaaagaagaactgcctgaaactagtactgtcaccaaggtacaaaacaatgcaacaggaaaacctactacagagagattcctttctccattgggaagaatatgggtaagccaagatgctgtctcagttaggccttggaggaaaaggagtattttctgtatgtgtgtcaactcagtccagggcaaagccaaaagtaaattttagaagcagcacctaccatagtgctctgctataccccacgcatgtggtaagtcatcttggcagtgccattttgtcactgactagaagcctggaaccataaaataccacaaaacccccaaaatagacagtgcctgataagtttctcatttcactgacacaccgcagaatgtcaccattctttttcacattcctggattaagctgtttcctttttggagcctttaagcacatatggtgggaaaggaaaaaaaaaaaaagttcaaagaaacccataaccatgttaagtcccacttaaagtgtgatgtttcagcagatggtggctcattaattgccacacctaactgtactcaccaccttttctttgtgtatggatactgggttttgaagttggggtctaattcagttcatttgggccatgtttgacaaataaggcagaattggatataactaagatatccggtgtctctgattcacagccacctgtgatactgcccagatgaacaaaaaaaccagtatttccagctgtctttcctcttttctaccttcaaacttctctctctgctgtgtctgctcaaaggcaccaggatctggggaatgcacatgggtactggggtcaaaccacgtgtaaattctacccacttctttctacctattcacccttagccagcgacctaatttcccaaaccacctgagttctgaaaaatagggatatcaccatctatctcacaggatgcatgattcatggttatcacatgctgaatacattcctcccactctcttatcctccctactccatccatgtaaacacataaacatgcttcagaaattccataggtctatcatattaagaccatataatttaaatgttataaatacaaatggctaaaacgttaatgacacattatttttctcattagttatttatagtattcaaataagagaaacaatctatactcatttattccattaacattattgagcacccatgggccagagaaagagcattccaggcagagtaaacagccagtgcaagggtcctgaggcatgaaagagctttgaggaactgcaaagagacctagagagtagtgaatgaggaaggggtagtatgagatgaaattgcagatatatgcaatgctagattatgcaggccttgaaggccaaactatggagtttggacttcagtccaaagaaaaactttgaagagttttaagcaggggagaggcattgattattgttttgcaatgtcactcagacagctgtgtgaaaaatggattgaagctgggggtagcaagtgtgaaggcagggaagccagtcaggaagctattgcaatcatgcagacaagaaatattagtaacttggactaaggaggcagcagtggaaacagagagaaatgggtaaaggtcaaaatca

SEQ ID NO: 710693 - DNA, 1039 bp, Homo sapiens
atgatcaataaaaaaataaataaataaaagaaaaaaaaaaaaacctgaggaagaaagaccaaataattcctgcccagagtagcagtttagatttgactcctggttcaagtgcttaatatgtatgagtttgggcaaattgcttaatgggtttgtatctcaatttcttatctgtaaaatggaattaattttgatacttactccataggactattataaggattaaaatgaggtaagtcatgtaaakttctttgcacagtccctagaacacaaagtaagcattgaagaaagtgtatccccaaaaaaggtcctgttcaaggaaagggggttccttcctttccaagagactgattaattccccacctctacaccaatgcttctcaaacttcagtgtgcaaatgaatcccttggagatgttgccacaatgctgttccatttagtacatttgggggaactggagagggtccgctgagaatttgcacttccaactagtcccaggtgatgccagtgcagctggtctgccaggctggtggtgttaacaactttgcctcgaagaatacctaacatataaggctttttcatacctattatcaatatgcaaaagaattcatagatgcaggaggcagataagggagtgggttcctggagaatctccgacaggcctgtgcacagggagaacagggtggaaccatggaagttactgtagtttgcacgggggagttcctcttcagtttctgtgtggtgggttggtattcaatctgtgaggtgggagcctgttagcaggaacccctctcactttgctgagagttgttttctttttccctttttgcctaataaattccattcccctcacctttcaatgtgtctacgagcctaacttttcctggtcgtgacacaagaacccggatttagcagaactacggggcagaaattctgcaacagaattaactgtaaagctttaattgtggggcctttggttacttagatgttctagttaagccggggttaaacactaccatgttttcagtttcagctcccggag

SEQ ID NO: 710694 - DNA, 1283 bp, Homo sapiens
ttttaacaaccagctttccctggaactaatagagtgagaactcaattatcacccctcacagggagggcattaatctattcatgagatatctacccacataatccaaatacttcccattaggccccatctccaacactggggatcaaatttcaacatgaggtatagggggacaaacatccaaactatagcagctstgaaatgaaaatgtgaaagtattcatcttatggtttctaatgacctaagggaatataattcagtggaagcattcctttgagagattgaaacaatgagtcatggatatgcatttttctaatggtttaaattggtgaagaagagaacatagaatgcatacagttatgaatggacatgaatataagaggtcagttgatactaaattgtctagctgggaatttgataacacacatttcaagagcctgctatgtaaataatgggtcaccaatttaaaatatgagccatgtgttttagatggagaaaaatcagggtcaagtctaacattctataaggaaaattaaatcttgacacttagtctaagctcaactaaaagtcatctcactgcattttgggagctgagtgtcccatgcttctttagggattatcttatttctaagcaactttccctgctacccagttgcctaactcttgaaatattacctgagacctctccttctggacagcacctataattcagacatttcatgagcacctgtactccctgctgcccaatatcacattcaccttgagcagatttggcaaccctgacttcatataaaaatcatttcaggagcttttaaaaaatactgatccctgctatccacccctccccacgaaggcgctaacttaatttatctggtggaggactcaagcattggtagttcttaaacactcccaaggtgatgctgtagtgcagccagagttaatgactgcagtctttgaacctaactagataatctgcatctatacctttaaccaattcatggtgagatactaatgtgtgagcaacgatttacatttaacctagaagcttccagagagatggtggcttactctaactgaaaatctaatgctgcatattatagcacctctacaagtcagtggagggcagtattatgagtagacagttctttcagcctagtaaattataccagcctgactttctctaggatgggtttggtttttattccaggtgattgattgaaaatgagacagtaatagatgtgacagccctcacattgtcacattgtgatatttaaatacttaagaat
